United States Patent Application Publication US 2008/0050393 A1 - sequence listing, part 7

SEQ ID NO: 22833 - DNA, 387 bp, Homo sapiens
gggaacatgtacctctcctttgtgcccttcgcttcattgtaatgaatgcactgatgtgtttttctccccacttgactgttcacagctcttgcttgcaagacctgctatgtcagtgtaggtctaatcaggagggagaaaccacatagtgatccaaacaggaagagtttaatataaagaattcctgattctcactgggatcggagtgatgaggaactggctagtaagaagtaaagagaactcaaaatacaggaatagcagatacaagaaccagctactacccgggggctgagatatacacccaaggaagagcccccagactctgccctcaggctgtgagcagactcctttgggaaggcatggctctacctcactgaaggacatgaggag

SEQ ID NO: 22834 - DNA, 306 bp, Homo sapiens
  misc_feature (1)...(306): n = a,t,c or g
ctttaaagggagtgatatgcttattccaacaatggatattatgttgttgtaatagtaaaaaacgagttctgaaaacattttgagaaacgacaatcactgggctaaatctgccaccttccaaagtcaccaactacgctgaagacaacagcaaatgagttgtgctttaatttcttaataattagtcctaataagtaataagatcaggcatctaacaagatgattaaatgattcccatactttttttttttctttttttttgnannccttttntgttttnntngcctngncntangnctcnnggctttt

SEQ ID NO: 22835 - DNA, 360 bp, Homo sapiens
  misc_feature (1)...(360): n = a,t,c or g
ggccaagaactcctgtacactcctttgcccagagactattcctttagagcaaaggctacagcccagaatcacgcgcttcaccccattcatcacagctctcctttctgtccatctggtgccactcctcagttttcctgaacttccgcgattttggcgtttgtggaggttataggctgatcattttgtagaatgtctttcaatgtggattcgttgatgtttctgcatgattagaccccacctgtgtgtacttgaagcctgaatgtcacagactctgttctttttatcctattctgtgtctttctgtccagttactggtgaggttactgctgtcgccttgaagcacaaggngntctgggtttg

SEQ ID NO: 22836 - DNA, 547 bp, Homo sapiens
gcaacgaaatgcaccttttaatccagcaggcccgagagatgcccctgctcaagtctgaagttgcagccggagtgaagaagagcggaccgctgcccagtgctgagagattggagaatgttctctttggacctcacgactgctcccatgcccctccggatggctatccaatcatcccaaccagtggatctgtgccagttcagaagcaggcgagcctcttccctgatgaaaaagaagataacttgctgggtaccacatgcctgattgccacagctgtcatcacgttatttaatgaacctagtgctgaagacagtaaaaagggtccattgacagttgcacagaaaaaagcccagaacatcatggagtcctttgaaaatccatttaggatgtttctgccctcactgggacaccgtgctcccgtctctcaggcagcgaagttcgatccatcaaccaaaatctatgaaatcagcaaccgttggaagctggcccaggtacaagtacaaaaagactctaaagaagctgtcaagaagaaggcagctgagcaaacagc

SEQ ID NO: 22837 - DNA, 336 bp, Homo sapiens
  misc_feature (1)...(336): n = a,t,c or g
ttttgcccccaccagctatgacatgattacgaatttaatacgactcactatagggaatttggccctcgaggccaagaattcggcacgaggatgcgtctcgcatggaagaagtcgattaggttaggagttcatagttggaaaacttgtgcccttgtatagagtccccatgggctcccactgcagcctcgagtgcccctgtcccacctggctccccctgctggtgtctagagtttttttccctctcctgtccttgtgttgaaggcagtaaactaagggtgtcaagccccattccctctctactcttgacagcaggattggatgttgnnnnnnnnnnnn

SEQ ID NO: 22838 - DNA, 605 bp, Homo sapiens
  misc_feature (1)...(605): n = a,t,c or g
acagttatgactgattacgaatttaatacgactcactatagggaatttggccctcgaggccaagaattcggcacgagctcatcccagaacttcattcttatttctctcctcatctggcctcccaagtgctccgttgagctgatgaaaagttctttgtactccctcaacgtgtcggaaacaggaggccacacagcacagctttgtttggggtgggcaggagtcaggagtcttgagcagatgcatcactgtgaagaagaacgacatgtcggggctgcacctgtcctcccgtcggcatttgacgaaagctccctgaagcggggcagcactctcctcctgagagatttaccatttattgcccctgtgaggaatgtgtgcttgggaactgccaagtcttaccccttctggaagaagaggttttctctgacaagagcctagagcgtcggctctattatgctgggacttgacagaggagccatggggtttaaacagtaggaaagaggggccacggtgcccagcccatctcttantcttccattcccttggtggaatttggaaacttgaaaacttgggggacttgacagcaggctccatgntctttggcctta

SEQ ID NO: 22839 - DNA, 508 bp, Homo sapiens
ggtgattccacactgaggcgagcgcggcgggccggggtggtagtggcagtgttcgtgtgctcaggtctgaatcgccgagggaggaggcggtggaggaagaggtggcggcggtggcggtggtcgtagcggtggcggaggaggcgggtacgaatcagctgcgggcggagacatggccaacatcgcggtgcagcgaatcaagcgggagttcaaggaggtgctgaagagcgaggagacgagcaaaaatcaaattaaagtagatcttgtagatgagaattttacagaattaagaggagaaatagcaggacctccagacacaccatatgaaggaggaagataccaactagagataaaaataccagaaacatacccatttaatccccctaaggtccggtttatcactaaaatatggcatcctaatattagttccgtcacaagggctatttgtttggatatcctgaaagatcaatgggcaactgcaatgactctccgcacggtattattgtcattt

SEQ ID NO: 22840 - DNA, 492 bp, Homo sapiens
  misc_feature (1)...(492): n = a,t,c or g
tccaacagctatgacatgattacgaatttaatacgactcactatagggaatttggccctcgaggccaagaattcggcacgaggtccccagctcgccagcgtttttcgttggaatatacgttgcacatttatggcgattctgagtgtgagggcagacttctgccaggctcagcacagcattttcgctgacaagtgagcttggaggttctatgtgccataattaacattgccttgaagactcctggacaccgagactggcctcagaaatagttggctttttttttttnnnnnncaagcatatttcttttaatgactccagtaaaattaagcatcaagtaaacaagtggaaagtgacctacacttttaacttgtctcactagtgcctaaatgtagtaaaggctgcttaagttttgtatgtagttggattttttggagtccgaaggtatccatctgcagaaattgaggcccaaattgaatttggattcaagtggat

SEQ ID NO: 22841 - DNA, 433 bp, Homo sapiens
ccaacagctatgacatgattacgaatttaatacgactcactatagggaatttggccctcgaggccaagaattcggcacgagatttcaaaggatttgtatcatataaatagtattatctaacacaagtgaagtagaaaatactttaaaaagttaacttaaaaatatctgatgcgaatttatagaggcatttctaaaaactaatgggtcaaagaagaaaacaaaatgaaaatgaaaaatactttagattgaatcacaatgaaataacacagatggaaacttttagaatgtgactaaggtggtactcagatggaaatttatatccttaaatacttgtagtaagattagaagaagtctaagaatcacagagctaaacattttatttaagaatgagaaattgaataaacccagtgttgtagactaaatatatgtgttc

SEQ ID NO: 22842 - DNA, 600 bp, Homo sapiens
gccaggagatcctgtatatgggaactgattttggcccagctccctctgcccactccgccaagcagagcggatgtctcagatcaagagactcctcagtgagaagaagacctgccagtgccctcaccggtttcagaagacatgtagccccatttgaggcacgaggccaggcagatcccacttgcagcctccccaggtgtctgccccgcgtttcctgcctgcggaccagatgaatgtagcagatcccaggcctctggcctcctgttcgcctcctctacaatttgccattgtttctcctgggttaggccccggcttcactggttgagtgttgctctctagtttccagaggcttaatcacaccgtcctccacgccatttccttttccttcaagcctagcccttctctcatcatttctctctgaccctctccccactgctcatttggatcccaggggagtgttcagggccagccctggctggcatggagggtgaggctgggtgtctggaagcatggagcatgggactgttcttttacaagacaggaccctgggaccacagagggcaggaacttgcacaaaatcacacagccagccagcaaggatgg

SEQ ID NO: 22843 - DNA, 649 bp, Homo sapiens
cgccattttgtctcggcagcggtggccgtagctccatcgcattttatgtttctggcgagaagggaacggagttttcatcaggtagattggtttttgtgcggccgtcctccaccgtttcctccaggacagcacctagtcgtggccggaggagtctcagagctgtcagaaagacagagtcacgctctgtcgccaggctgaagtcagtggcaccatctcggctcactacaacctctgcctcccaggttcaagcaattcttctgcctcagcctcccgagtagctgggactacaggcgcgtgccaccacaccagctaattttttgtatttttaatagagccaaggggcttcaccatgttagccatggtggtctcgatctcctgacctcatgatctgcctgcctcggcctcgtaaagtggtgggattacgggcatgagccacgtgcccagccttcatgtgtattttagacaatgaaaatgatgttagacaaaaaagcaaatttgagcagttttcctttttgagttaaaaatgggttgtaaaacaacagagacaccatatcagcaatgcatatggttcaggaactgttaacttacagtgcagtggtgattcaagaagtttttttgttgttgttgtttgagatggaatcttgctctt

SEQ ID NO: 22844 - DNA, 409 bp, Homo sapiens
  misc_feature (1)...(409): n = a,t,c or g
agaaagagttctatggagactttgctgttactgcttctctttgtgcagtgttagtattcaccctgggcagtgagtgccatgctttttggtgagggcagatcccagcacctattgaattaccatagagtaatgatgtaacagtgcaagattttttttttaagtgacataattgtccagttataagcgtatttagactgtggccatatatgctgtatttctttgtagaataaatggtttctcattaaactctaaagattagggaaaatggatatagaaaatcttagtatagtagaaagacatctgcctgtaattaaactagtttaagggtggaaaaatgcccatttttgctaattatcaatgggatatgattggttcagttttttttttttnccaaantnggggttggccg

SEQ ID NO: 22845 - DNA, 526 bp, Homo sapiens
  misc_feature (1)...(526): n = a,t,c or g
tntttgataccctttgacaccgtttgacatgattacgaatttaatacgactcactatagggaatttggccctcgaggccaagaattcggcacgagtgagtattgtgtccaacagctgaaggaatttgaggggaagactttagtgtcagtcaccaaagaaggcctggaacttccagaggatgaagaagagaaaaagaagcaggaagagaaaaaaacaaagtttgagaacctctgcaaaatcatgaaagacatattggagaaaaaagttgaaaaggtggttgtgtcaaaccgattggtgacatctccatgctgtattgtcacaagcacatatggctggacagcaaacatggagagaatcatgaaagctcaagccctaagagacaactcaacaatgggttacatggcagcaaagaatcacctggagataaaccctgaccattccattattgagaccttaaggcanaaggcagaggctgataagaacgacaagtctgtgaangatctggtcatcttgctttatgaaactg

SEQ ID NO: 22846 - DNA, 457 bp, Homo sapiens
aaccgctatgacatgattacgaatttaatacgactcactatagggaatttggccctcgaggccaagaattcggcacgagctcagtggaatcctaaaaaaacaaccattgaaaacatccagctgcctcatactttattatcaaggtttgatttgatcttcctcatgctggaccctcaggacgaagcctatgacaggcgtctggctcaccacctggtcgcactgtactaccagagcgaggagcaggcagaggaggagctcctggacatggcggtgctaaaggactacattgcctacgcgcacagcaccatcatgccgcggctaagtgaggaagccagccaggctctcatcgaggcttatgtagacatgaggaagattggcagtagccggggaatggtttctgcataccctcgacagctagagtcattaatccgcttagcagaagcccatgctaaagtaa

SEQ ID NO: 22847 - DNA, 854 bp, Homo sapiens
  misc_feature (1)...(854): n = a,t,c or g
ggaggattcgttttcctggctttgagcccctcacaccctggatccttgacctactaggccattatgctgtgatgaacaaccccaccagacagcctttggccctaaacgttgcatacaggcgctgcttgcagattctggctgcaggactgttcctgccaggttcagtgggtatcactgacccctgtgagagtggcaactttagagtacacacagtcatgaccctagaacagcaggacatggtctgctatacagctcagactctcgtccgaatcctctcacatggtggctttaggaagatccttggccaggagggtgatgccagctatcttgcttctgaaatatctacctgggatggagtgatagtaacaccttcagaaaaggcttatgagaagccaccanagaagaaggaagganaggaanaanaggagaatacagaagaaccacctcaaggagaggaanaagaaagcatggaaactcaggagtgacattcccttcactccttttcctacccaagggggaagactggagcctaagctgcctgctactgggctttacatggtgacagacatttccgtgggatagggaagatagcaggaagaaaagtaaactccatagaagtgtcattccactgggttttgatattggcttagctgccagtctcccatttgtgacctatgccatccatctataatggaggataccaacatttcttcctaatattctataatctccaactcctgaaaacccctctctcaactaatactttgctgttgaaatgttgtgaaatgttaagtgtctggaaatttttttttctaagaaaaactattaaagtacttcctagtaagaaaaaaaaa

SEQ ID NO: 22848 - DNA, 628 bp, Homo sapiens
  misc_feature (1)...(628): n = a,t,c or g
caacatgatctatcacagggaacccggtttctgaggttaagaacctggtatgaggggactactttcggaggtactttagcgatctataattctttgatagcggtatacttcctttaagtgtttctctttaattagtttataaaatatggggataactgagagtattttaatgagtaacagtagagaacgttagaaggcaactatctagacatatccgggattaagagatagcgaaaaacagacgaatcaagagaaaaagaactggacggctcccgcaatcgacctcggatacacgtactaccgacgccgtagcgccgaaatcataagagtcagaaaatcgaagacgctgctcgtccatggaagtgtcgaaagatcaggacgcgacccaccaatgattaatcctcgccaccgcgcgccaagccccctactcgcgtactaaactataaaaagaacaaacagagtcccccttcccactagctttccgggtatagtangcttcgaacnccaagangaaacttttacttcgcgatcgagcttccaagtcatagggtcggngattccccccgncaacaggaaactntncctccttaaacgggganaaatcgccgttcgngnaaaaattcgtttt

SEQ ID NO: 22849 - DNA, 633 bp, Homo sapiens
  misc_feature (1)...(633): n = a,t,c or g
gggcctttgcccagcacgtcctgaacagagcgcaggacatcaccctgccccacctgtgcagcgtacttctggcttttgcgcgtctgaacttccatccagaccaagaggatcagttcttcagcctggtacatgagaagctggggtcagagctgccaggcctggagccagccctgcaggtggacctggtgtgggccctgtgtgtgctgcagcaggcacgggaagcagagctgcaagccgtcctccaccctgaatttcacatccaatttctagggagcaagtctcagaaggatcagaacaccttccagaagctgctccacatcaacgccactgccctgctggagtaccccgagtactcgggtccccttctgcctgcctcggctgtggcccctgggccctcagcccttgacaggaaggtgacccccctgcaaaaggagctgcaggagacgctgaaggggctgctggggagcgccgacaagggcagcctgaggtggccacgcagtatggctgggtgctggatgctgaggtgctgctggacagtgacggcgagtttctgcccgtaagggactttgtggcacctcaccttgcccagccaactgggagccagtcaccaccttcagggtctaanangctacg

SEQ ID NO: 22850 - DNA, 571 bp, Homo sapiens
  misc_feature (1)...(571): n = a,t,c or g
gcgtcgacgtcatgttaggctgcattttcatgaaaacagctcaggctcacagaagggcagaaactttgattttcagccgccatgctgtgattgccgtccgaaatggcaagctgtgcttcatgttccgagtgggtgacctgaggaaaagcatgatcattagtgcctctgtgcgcatccaggtggtcaagaaaacaactacacctgaaggggaggtggttcctattcaccaactggacattcctgttgataacccaatcgagagcaataacatttttctggtggcccctttgatcatctgccacgtgattgacaagcgcagtcccctgtatgacatctcagcaactgacctggccaaccaagacttggaggtcatagttattctggaaggagtggttgaaactactggcatcaccacacaagcacgaacctcctacattgctgaggagatccaatggggccaccgctttgtgtccattgtgactgaggaagaaggagtgtattctgtggattactccaaaatttggcacctgttaaagaactgntcccggtgcatgnccnaanctgatgaaaa

SEQ ID NO: 22851 - DNA, 498 bp, Homo sapiens
  misc_feature (1)...(498): n = a,t,c or g
gtttaaatatatcttatctattttaatctagcagattaaaggtgaggtctggcacacctcccttttatcttaaagtggaggttagagattatttgccctcctttgtggagtacttagcgtattctaggcactgccaagcacttagcgtgtattatctaacctagttatcaaaacagtcttactcataggtatcattatccctgttaacagatgaggaaactgagggtcagggaggttaagtgagcaaaaacttttgacgactttctagctgaagcaggctgtctctggtactttgggtgacatgagctgttcagcttagggtgaacattgcttggtttatggagtcttcctgagtgccacacctagtgcccgaatatgaaggtgaagggtatgcttagggaactcacagcttatagctgaggggagatgtatatataanacaaatgattatgtgataagtattacattaaagtttgtaaatgtaagatgggttccggg

SEQ ID NO: 22852 - DNA, 1436 bp, Homo sapiens
cgcttgacatgattacgaatttaatacgactcactatagggaatttggccctcgaggccaagaattcggcacgaggaagactccactaaccgccgccgcctgtctgagctgctgcgctatcatacctcccagtctggagatgagatgacatctctgtcagagtatgtttctcgcatgaaggagacacagaagtccatctattacatcactggtgagagcaaagagcaggtggccaactcagcttttgtggagcgagtgcggaaacggggcttcgaggtggtatatatgaccgagcccattgacgagtactgtgtgcagcagctcaaggaatttgatgggaagagcctggtctcagttaccaaggagggtctggagctgcctgaggatgaagaagagaaaaagaagcaggaagagaaaaaaacaaagtttgagaacctctgcaaaatcatgaaagacatattggagaaaaaagttgaaaaggtggttgtgtcaaaccgattggtgacatctccatgctgtattgtcacaagcacatatggctggacagcaaacatggagagaatcatgaaagctcaagccctaagagacaactcaacaatgggttacatggcagcaaagaaacacctggagataaaccctgaccattccattattgagaccttaaggcaaaaggcagaggctgataagaacgacaagtctgtgaaggatctggtcatcttgctttatgaaactgcgctcctgtcttctggcttcagtctggaagatccccagacacatgctaacaggatctacaggatgatcaaacttggtctgggtattgatgaagatgaccctactgctgatgataccagtgctgctgtaactgaagaaatgccaccccttgaaggagatgacgacacatcacgcatggaagaagtagactaatctctggctgagggatgacttacctgttcagtactctacaattcctctgataatatattttcaaggatgtttttctttatttttgttaatattaaaaagtctgtatggcatgacaactactttaaggggaagataagatttctgtctactaagtgatgctgtgataccttaggcactaaagcagagctagtaatgctttttgagtttcatgttggtttattttcacagattggggtaacgtgcactgtaagacgtatgtaacatgatgttaactttgtgtggtctaaagtgtttagctgtcaagccggatgcctaagtagaccaaatcttgttattgaagtgttctgagctgtatcttgatgtttagaaaagtattcgttacatcttgtaggatctactttttgaacttttcattccctgtagttgacaattctgcatgtactagtcctctagaaataggttaaactgaagcaacttgatggaaggatctctccacaggcttgttttccaaa

SEQ ID NO: 22853 - DNA, 496 bp, Homo sapiens
accagctatgacatgattacgaatttaatacgactcactatagggaatttggccctcgaggccaagaattcggcacgagaactggataggctttgtgcagacatacacttttaacttgactgtttggaaaatacggttttgattttcaaatacgttgactgtatttgaatctttttctacagtgatgtatgataggttctggatcccagtgaatatctatctgcctgcagagtcagaccccagagagtactaaggctcagtgcattcttatcaattctaaataagggtgaaggtagaacaaatagtacagactccacctagagtctaaaataacacaatgatgtcctttgtgtagatttcttcaaccttaagtttgaatgtgcttcaatatgcaattttgctaggaaacttccagaatctgctggggagagtagagtggagaagcatgaatttatggtgagaggagtcagaagaaaacaatattttgagactatta

SEQ ID NO: 22854 - DNA, 419 bp, Homo sapiens
gggccgggagcggacttaccttaccttctctgccttcggcgcgcttctcagccgggccgccgacccaaaggagccgtccgactatgtctaacatggagaaacacctgttcaacctgaagttcgcggccaaagaactgagtaggagtgccaaaaaatgcgataaggaggaaaaggccgaaaaggccaaaattaaaaaggccattcagaagggcaacatggaagttgcgaggatacacgccgaaaatgccatccgccagaagaaccaggcggtgaatttcttgagaatgagtgcgcgagtcgatgcagtggctgccagggtccagacggcggtgacgatgggcaaggtgaccaagtcgatggctggtgtggttaagtcgatggatgcgacattgaagaccatgaatctggagaagatttct

SEQ ID NO: 22855 - DNA, 448 bp, Homo sapiens
  misc_feature (1)...(448): n = a,t,c or g
gactctcatagtgggaggggaagccagtactttgtccatttgggacctggcggctccaaccccgcgcatcaaggcggagctgacgtcctcggcccccgcctgctacgccctggccatcagccccgattccaaggtctgcttctcatgctgcagcgacggcaacatcgctgtgtgggatctgcacaaccagacactagtgaggcaattccagggccacacagacggagccagctgtattgacatttctaatgatggcaccaagctctggacgggtgggtttggacaacacagtcaggtcctgggacctgcgcgaggggcggcagctgcagcagcacgacttcacctcccagatcttctccctggggtactgccccaccggggagtggctggcagtgggcatggagagcancaatgtggaggtgctgcacgtgaacaagcctgacaaagt

SEQ ID NO: 22856 - DNA, 678 bp, Homo sapiens
cgatgtataaatgaaagaaattgagatggtgcacgatgcacagttgaagtgaacttgcggggtttttcagtatctacgattcatagatctggaattcgcggccgcgtcgacctcggctttgacagagtgcaagacgatgacttgcaaaatgtcgcagctggaacgcaacatagagaccatcatcaacaccttccaccaatactctgtgaagctggggcacccagacaccctgaaccagggggaattcaaagagctggtgcgaaaagatctgcaaaattttctcaagaaggagaataagaatgaaaaggtcatagaacacatcatggaggacctggacacaaatgcagacaagcagctgagcttcgaggagttcatcatgctgatggcgaggctaacctgggcctcccacgagaagatgcacgagggtgacgagggccctggccaccaccataagccaggcctcggggagggcaccccctaagaccacagtggccaagatcacagtggccacggccacggccacagtcatggtggccacggccacagccactaatcaggaggccaggccaccctgcctctacccaaccagggccccggggcctgttatgtcaaactgtcttggctgtggggctaggggctggggccaaataaagtctcttcctccaaaaaaaaaaaaaa

SEQ ID NO: 22857 - DNA, 418 bp, Homo sapiens
gctcgttcactgagcaggctgaccaggtgactgctgaggttggaaagctcttgggtgaagagaaggtggatgcaattctttgcgttgctggaggatgggccgggggcaatgccaaatccaagtctctctttaagaactgtgacctgatgtggaagcagagcatatggacatcgaccatctccagccatctggctaccaagcatctcaaggaaggaggcctcctgaccttggctggcgcaaaggctgccctggatgggactcctggtatgatcgggtacggcatggccaagggtgctgttcaccagctctgccagagcctggctgggaagaacagcggcatgccgcccggggcagccgccatcgctgtgctcccggttaccctggataccccgatgaacagtaaatcaatgcctgaggc

SEQ ID NO: 22858 - DNA, 319 bp, Homo sapiens
cacagatgtaaaagacttttttttatacgataaataacttttttttaagttacacatttttcagatataaaagactgaccaatattgtacagtttttattgcttgttggatttttgtcttgtgtttctttagtttttgtgaagtttaattgacttatttatataaattttttttgtttcatattgatgtgtgtctaggcaggacctgtggccaagttcttagttgctgtatgtctcgtggtaggactgtagaaaagggaactgaacattccagagcgtgtagtgaatcacgtaaagctagaaatgatccccagctgttt

SEQ ID NO: 22859 - DNA, 449 bp, Homo sapiens
  misc_feature (1)...(449): n = a,t,c or g
gagattaaactctgtttagcttttgagtttacaaatatttgcttcggtctgttgatgaagcagtaaatcctttaggcactggttaatgatgagacacacccttccagcccgggagaggctgtagcagtaactgaaatgagagcagcactggcagaaggctagaagttaggaaggtagagaaaaaggggagggaagattgtgctgtgtataagatgcctgttgtaaaaattgcaaaaatgactgctagaggcacgagggaactatccgagtaagttgtttattgagtaatagtgaattcagtttgaggaatcttagagatgggtcaattggtaattttatagatggaaccatgagattagtaactcaaggcgttacaccatttaatggcagatatgtgatgaaaatccagtgctttcccttcagtcaccaccctntttcatgatagcaga

SEQ ID NO: 22860 - DNA, 153 bp, Homo sapiens
  misc_feature (1)...(153): n = a,t,c or g
tnnnnnnnnnnnntttggnncccacttgtatgacatgattacgaatttaatacgactcactatagggaatttggccctcgaggccaagaattcggcacgagagtcggcacactatggctgccctctgggctcccagaacccacaacatgaaag

SEQ ID NO: 22861 - DNA, 565 bp, Homo sapiens
  misc_feature (1)...(565): n = a,t,c or g
tnnnntnnnntntttgnnaaccgtttggacatncattacgaatttaatacgactcactatagggaatttggccctcgaggccaagaattcggcacgagggaaagcagccgtttctccttggtctaagtgtgctgcatggagtgagcagtagaagcctgcagcggcacaaatgcacctcccagtttgctgggtttattttagagaatgggggtggggaggcaagaaccagtgtttagcgcgggactactgttccaaaaagaattccaaccgaccagcttgtttgtgaaacaaaaaagtgttcccttttcaagttgagaacaaaaattgggttttaaaattaaagtatacatttttgcattgccttcggtttgtatttagtgtcttgaatgtaagaacatgacctccgtgtagtgctgtaataccttagttttttccacagatgcttgtgatttttgaacaatacgtgaaagatgcaagcacctgaatttctgtttgaatgcggaaccatagctggtatttctcccttgngttagtaataaaccgtcttgccacaataaaaaaaaag

SEQ ID NO: 22862 - DNA, 436 bp, Homo sapiens
  misc_feature (1)...(436): n = a,t,c or g
ggtggtatgtgcctgtggtcccagctgctcaggaggctgtggtgggaggattttctgagccccaggaggttcaggctgcagtgaaccacagttgcaccattgcactgcagcctgggtgacagagtgagacccagtctcagaaaaaaaaatttaaaaaaggaaagaaatagggattgttcttaatcatgcttgaaaatcaattgatgtgcagaaattacaggcatgagccaccacacctggcccacacacaagtattttttttttaaaaaaagataaaatgctgtgaaagttacttaaatatttgtctcagttaaagccttttttttcccatttgtaacagtgtgactggtgtcttaaccagtgtgacttcctctgacttattaatgttcactctttgagacgaaatttaaaagctttaatggaaaagtgnggtttt

SEQ ID NO: 22863 - DNA, 527 bp, Homo sapiens
ggggactcgctggacaatgcccctggaccccccgggggtacgcgttcacgctcacctctgagaggctggaaacgcctggctgtgctttctgaatgctgtgtgcttcctgcctctgtgcctggcctgtgtgcagcacctacttgtgtccgccttcaaaaggcccttctgggtggcgtccttttccccaaaatattaggcaccagccatcaaagatactgcattgttgcctcccccacccctccccccaactgacaacatttgggctcaaatgcagcaggctgggtgcccaacacagtgcctggcgagtggtagcgcttacgtttcttttctgttgaatggatggatagctaatgaaattgtaaccaatgacaagccttgatgtttataacctttactaagagattattattttgctcttcatggacctgttaacaaccaccatattgtatcttacggacgtttgtatgccacgtttgaagagcaggagccttgtttcggcgtcatgttgatggaacttgagctgtctg

SEQ ID NO: 22864 - DNA, 586 bp, Homo sapiens
acggggtctcccggagggccagagtcgtggcttacagaagagacgaaatgtggtctgagggacgatatgaatatgaaagagttccgagagaacgagcacctcctcgaagtcatcccagtgatgaatctggttatagatggacaagagacgatcattctgcaagcaggcaacctgaatacagggacatgagagatggctttagaagaaaaagtttctactcttcccattatgcgagagagcggtctccttataaaagggacaatacttttttcagagaatcacctgttggccgaaaggattctccacacagcagatctggttccagtgtcaagtagcagaagctactctccagaaaggagcaaatcatactctttccatcagtctcaacatagaaataaagagaggcctgtccagtctttgaaaacatcaagagatacttcaccctcaagtggttcagcagtttcttcatcaaaggtgttagacaaacccagtaggctaactgaaaaggaacttgctgaggctgcaagcaagtgggctgctgaaaagctagagaaatcagatgaaagtaacttgcctgaaatttctg

SEQ ID NO: 22865 - DNA, 463 bp, Homo sapiens
gtccggacggtgcagcggcgaggccggccgcgaagatgccagtggcggtgatggcggaaagcgcctttagtttcaaaaagttgctggatcagtgcgagaaccaggagctcgaggcccctggaggaattgctacacccccagtgtatggtcagcttctagctttatatttgctccataatgacatgaataatgcaagatatctttggaaaagaataccacctgctataaaatctgcaaattctgaacttgggggaatttggtcagtaggacaaagaatctggcagagagatttccctgggatctatacaaccatcaacgctcaccagtggtctgagacggtccagccaattatggaagcacttagagatgcaacaaggagacgcgcctttgccctggtctctcaagcgtatacttcaatcatcgccgatgattttgcagcctttgttggacttcctgtagaaga

SEQ ID NO: 22866 - DNA, 507 bp, Homo sapiens
  misc_feature (1)...(507): n = a,t,c or g
tnnnnntttganntctganncccctnctatgacatgattacgaatttaatacgactcactatagggaatttggccctcgaggccaagaattcggcacgaggtcttggaggtgaccctgaaccgcccattcctgtttgctgtgtatgatcaaagcgccactgccctgcacttcctgggccgcgtggccaacccgctgagcacagcatgaggccagggccccagaacacagtgcctggcaaggcctctgcccctggcctttgaggcaaaggccagcagcagataacaaccccggacaaatcagcgatgtgtcacccccagtctcccaccttttcttctaatgagtcgactttgagctggaaagcagccgtttctccttggtctaagtgtgctgcatggagtgagcagtagaagcctgcagcggcacaaatgcacctcccagtttgctgggtttattttagagaatgggggtggggaggcaagaaccagtgtttagcgcgggactactgt

SEQ ID NO: 22867 - DNA, 405 bp, Homo sapiens
gtaccagctgaggtttttcctctgtctctctaggaatagggtctgtttcacaggccatttctgtgaaccctactccattgtggtttctgccactatcaaagttccagctacctgcaaggtgaaggaaggcatcccttttggggcatgcactttctttcctttctcaaaataatgttatatgtggccacactgatgttcacctttacgtccagggtctttgtgccttgtctctactccctctcttggatctggggaggaggggcagagacctgggactctgtatttctatagttctcctggcagagcctttgagaatggggagaaacagcctgggctggggctacaggtctgtcactatgctctcttgccttcagacagaccattctgaattctctaaagggaaaa

SEQ ID NO: 22868 - DNA, 496 bp, Homo sapiens
  misc_feature (1)...(496): n = a,t,c or g
tatgacatgattacgaatttaatacgactcactatagggaatttggccctcgaggccaagaattcggcacgagctgaatgctgcccgggactgccgcctgcgccccaccagcccctccctcctgaaggaggggcaccccgagaagaatgaggctgcagagtgatgtgggggccagccggtgacttcatgaccacactgcgcccaggtgtaagagggcacgcttctgcccaggcatcgtccatggaagacacgcagtcggccactgcagcctcggtcctgggtgccctggggctgggtcactgggggccacaggccacactgggagaccacagtcctggcatgccatgcagctccctgtccccagaggtctgctcagatgcagagagctcaggaaccacactcgctgctgaattctgggagcagagcgtggtacccactgctggctggggcctactctgggactgnagccctgtcccgctggccagcttccgaagca

SEQ ID NO: 22869 - DNA, 486 bp, Homo sapiens
  misc_feature (1)...(486): n = a,t,c or g
ggggagcaggggaagggaatgtgaccaggtctaggtctggagtttcagcttggacactgagccaagcagacaagcaaagcaagccaggacacaccatcctgccccaggcccagcttctctcctgccttccaacgccatggggagcaatctcagcccccaactctgcctgatgccctttatcttgggcctcttgtctggaggtgtgaccaccactccatggtctttggcccggccccagggatcctgctctctggagggggtagagatcaaaggcggctccttccgacttctccaagagggccaggcactggagtacgtgtgtccttctggcttctacccgtaccctgtgcagacacgtacctgcagatctacggggtcctggagcaccctgaagactcaagaccaaaagactgtcaggaaggcanagtgcagagcaatccactgtccaagaccacacgacttcganaacggggaatactggccccc

SEQ ID NO: 22870 - DNA, 309 bp, Homo sapiens
aaaaggtggtgtcatgttttggggagaatcttacttctcaaatggaaattgcactttttgctgaatcctttgcatttttttggtagtaagcagttcattgagtatcagttcctcaaaggaatgagttggcccggctagggtgggccctcttgacctaacttcagagggggccttggctcagtaggtgtgaatcagggaagccacattgtcctcagggtgctgtatgaagctgggtgtgggcggattcctcccacaccttcacactggcctgcctccaactcatacagatctcggagcggtcggtacttc

SEQ ID NO: 22871 - DNA, 716 bp, Homo sapiens
  misc_feature (1)...(716): n = a,t,c or g
ggaggtgctgaacagcattttttttgagcttgaagcggatgagagagagcccacagagtctacccaacagcttaacaagcctgaggtcttggaggtgaccctgaaccgcccattcctgtttgctgtgtatgatcaaagcgccactgccctgcacttcctgggccgcgtggccaacccgctgagcacagcatgaggccagggccccagaacacagtgcctggcaaggcctctgcccctggcctttgaggcaaaggccagcagcagataacaaccccggacaaatcagcgatgtgtcacccccagtctcccaccttttcttctaatgagtcgactttgagctggaaagcagccgtttctccttggtctaagtgtgctgcatggagtgagcagtagaagcctgcagcggcacaaatgcacctcccagtttgctgggtttattttagagaatgggggtggggaggcaagaaccagtgtttagcgcgggactactgttccaaaaagaattccaaccgaccagcttgtttgtgaaacaaaaaagtgttcccttttcaagttgagaacaaaaattgggttttaaaattaaagtatacatttttgcattgccttcggtttgtatttagtgtcttgaatgtaagaacatgacctccgtgtagtgctgtaataccttagttttttcccagatgcttgngatttttgaacaatacgtgaaagatgca

SEQ ID NO: 22872 - DNA, 334 bp, Homo sapiens
gagatgatctgatcctggcagtagtgactgttggggaccagccattacagcagcagatcatcagactccaccaagagcttgggagacagaagtctctgtgggctgatgttcatggaaaactccggagtcatatagatgctttgagggagcagaacatggagctccgagaaaagctgagagctctgcagctgcagcggtggaaagccaggaagaaatctgcagcgtccccacacgcggggcaagaatcgcacactctggcattggaacctgcttttggaaaaatttcacctctgtcagctgatgaagagacaatacccaaatacgctggccacaa

SEQ ID NO: 22873 - DNA, 519 bp, Homo sapiens
gcgcacacccatccttccataatatcaatttcaagcaagcagaaaagatgatggagaccatggaccagggtgatgtgattatccgaccaagcagcaagggcgagaaccacctgacagtgacctggaaagtcagtgatggcatctaccagcatgtggatgtgcgggaggagggcaaggaaaatgccttcagcctgggagccactctgtggatcaacagtgaggaattcgaagatttggatgagattgttgctcgctatgtccagcccatggcatcctttgcccgggaccttctgaatcacaagtattatcaggactgcagcggtggggaccgcaagaaattagaggagctgctcatcaaaactaagaaggagaagcccaccttcatcccttatttcatctgtgcctgcaaggaactgcccggcaagttcctactgggataccagccccggggtaaacccaggatagaatatgtaaccggtgacttcagaaggattccgtaccggggccaaatcttcccaa

SEQ ID NO: 22874 - DNA, 850 bp, Homo sapiens
  misc_feature (1)...(850): n = a,t,c or g
gcggcacgaggccagtgggaacccagacccataggagacccgcgtccccgctcggcctggccaggccccgcgctatggagttcctctgggcccctctcttgggtctgtgctgcagtctggccgctgctgatcgccacaccgtcttctggaacagttcaaatcccaagttccggaatgaggactacaccatacatgtgcagctgaatgactacgtggacatcatctgtccgcactatgaagatcactctgtggcagacgctgccatggagcagtacatactgtacctggtggagcatgaggagtaccagctgtgccagccccagtccaaggaccaagtccgctggcagtgcaaccggcccagtgccaagcatggcccggagaagctgtctgagaagttccagcgcttcacacctttcaccctgggcaaggagttcaaagaaggacacagctactactacatctccaaacccatccaccagcatgaagaccgctgcttgaggttgaaggtgactgtcagtggcaaaatcactcacagtcctcaggcccatgacaatccacaggagaagagacttgcagcagatgacccagaggtgcgggttctacatagcatcggtcacagtgctgcccacgcctcttcccacttgcctggactgtgctgctccttccacttctgctgctgcaaaccccgtgaaggtgtatgccacacctggccttaaagagggacaggctgaagagagggacaggcactccaaacctgtcttggggccactttcagagcccccagccctgggaaccactcccaccacaggcataagctatcacctagcagcctcaaaacggtcagtnttaa

SEQ ID NO: 22875 - DNA, 396 bp, Homo sapiens
gtcaggttctgtgtatgtctccgcgtcttccgcggagcgggtgtgcagggcctgcagcattgaactagatgtcgtccccgcaggccccagaagatgggcagggctgtggcgaccgcggcgatccccctggggacctccgtagcgtcttggtcacgaccgtgctcaacctcgagccgctggacgaggatctcttcagaggaaggcattactgggtaccggccaagaggctgtttggtggtcagatcgtgggccaggccctggtggctgcagccaagtctgtgagtgaagacgtccacgtgcactccctgcactgctactttgttcgggcagagcagatgccctcatgtgttctgcgtagatccccagctgagaagagtttgtggacctttacagtat

SEQ ID NO: 22876 - DNA, 922 bp, Homo sapiens
gatactggtatggatacagacaaaataaagatatttggttcccgggtaagagttgactctacagcaaaggttgcagaaatagaacatgcggaaaaggaaaaaatgaaggagaaagttgaacgtattcttaagcatggaataaattgctttattaacaggcaattaatttataattatcctgaacagctctttggtgctgctggtgtcatggctattgagcatgcagattttgcaggtgtggaacgcctagctcttgtcacaggtggtgaaattgcctctacctttgatcacccagaactggtgaagcttggaagttgcaaacttatcgaggaagtcatgattggagaagacaaactcattcacttttctggggtttgcccttggtgaggcttgtaccattgttttgcgtggtgccactcaacaaattttagatgaagcagaaagatcattgcatgatgctcttttgtgttcttgcgcaaactgtaaaggactctagaacagtttatggaggaggctgttctgagatgttgatggctcatgctgtgacacagcttgccaatagaacaccaggcaaagaagctgttgcaatggagtcttatgctaaagcactgagaatgttgccaaccatcatagctgacaatgcaggctatgacagtgcagacctggtggcacagctcagggctgctcacagtgaaggcaataccactgctggattggatatgagggaaggcaccattggagatatggctatcctgggtataacagaaagttttcaagtgaagcgacaggttcttctgagtgcagctgaagcagcagaggtgattctgcgtgtggacaacatcatcaaagcggcacccaggaaacgtgtccctgatcaccacccctgttaagcattcccacgtgctgtcgatctttggaccag

SEQ ID NO: 22877 - DNA, 673 bp, Homo sapiens
gcggcgtctacaccccgcgctgcggccaggggctgcgctgctatccccacccgggctccgagctgcccctgcaggcgctggtcatgggcgagggcacttgtgagaagcgccgggacgccgagtatggcgccagcccggagcaggttgcagacaatggcgatgaccactcagaaggaggcctggtggagaaccacgtggacagcaccatgaacatgttgggcgggggaggcagtgctggccggaagcccctcaagtcgggtatgaaggagctggccgtgttccgggagaaggtcactgagcagcaccggcagatgggcaagggtggcaagcatcaccttggcctggaggagcccaagaagctgcgaccaccccctgccaggactccctgccaacaggaactggaccaggtcctggagcggatctccaccatgcgccttccggatgagcggggccctctggagcacctctactccctgcacatccccaactgtgacaagcatggccttgtacaacctcaaacagtgcaagatgtctctgaacggggcagcgtggggaagtgctggtgtgtgaaccccaacaccgggaagctgatccagggagcccccaccattcggggggaccccgagtgtcatctcttctacaatgagcagcaggaggctcgcggggtgccacc

SEQ ID NO: 22878 - DNA, 604 bp, Homo sapiens
  misc_feature (1)...(604): n = a,t,c or g
gtgaggaggaatatgaggcatggaaagttcgagagctagggaagaatcaagagggacagagaagatcgagaagcgcttgagaaggagaaagcagaaattgaacgcatgcgaaacctgactgaggaagagaggagagctgaacttcgggcaaacggcaaagtcattaccaacaaagcggttaagggcaaatacaagttcttacagaagtattatcaccggggtgccttcttcatggatgaggatgaagaagtatacaagagagatttcagcgctcctaccctggaggatcatttcaataaaaccattcttcctaaagtcatgcaggtcaagaactttggacgctcaggtcgcaccaaatacactcaccttgtggatcaagataccacctcctttgactcagcttggggccaagagagtgcccagaacacaaagttcttcaaacaaaaggcagctggggtacgagatgtatttgagcggccatctgccaagaagcggaaaactacctagggtccaactgcttattcttccaactgtggaacacaaggggagtctcagcatctggtccttgatttggntttttcattggttccttggcccctggatc

SEQ ID NO: 22879 - DNA, 439 bp, Homo sapiens
  misc_feature (1)...(439): n = a,t,c or g
anttcgatnacagctatgacatgattacgaatttaatacgactcactatagggaatttggccctcgaggccaagaattcggcacgagtggatctcctgcaagaaataattctagacgaatccatagagtacagtgaaggcaagcttattagaaaagtaaaggaataaaagaatggctactctataggcagaatacccccaagggctgctggttgcctatttttatggttatttcttgattgtatgctaaacaaagggtggattattcatgcctcccctttttagaccatatagggtaacttcctgatgttgccatggcatttgtaaaatgtcatggtgctggtgggagtgtagcagtgaggatgaccagaggtcactctcgtcgccatgttggttttggtgggttttagctggcttctttactgcaacctgttttatca

SEQ ID NO: 22880 - DNA, 630 bp, Homo sapiens
gtggcggctcgggacggaggacgcgctagtgttcttctgtgtggcagttcagaatgatggatcaagctagatcagcattctctaacttgtttggtggagaaccattgtcatatacccggttcagcctggctcggcaagtagatggcgataacagtcatgtggagatgaaacttgctgtagatgaagaagaaaatgctgacaataacacaaaggccaatgtcacaaaaccaaaaaggtgtagtggaagtatctgctatgggactattgctgtgatcgtctttttcttgattggatttatgattggctacttgggctattgtaaaggggtagaaccaaaaactgagtgtgagagactggcaggaaccgagtctccagtgagggaggagccaggagaggacttccctgcagcacgtcgcttatattgggatgacctgaagagaaagttgtcggagaaactggacagcacagacttcaccggcaccatcaagctgctgaatgaaaattcatatgtccctcgtgaggctggatctcaaaaagatgaaaatcttgcgttgtatgttgaaaatcaatttcgtgaatttaaactcagcaaagtctggcgtgatcaacattttgttaagattcaggtca

SEQ ID NO: 22881 - DNA, 402 bp, Homo sapiens
cccacgcgtccggccagagaagagtcaagggcacgagcatcgggtagccatgcctttcttggacatccagaaaaggttcggccttaacatagatcgatggttgacaatccagagtggtgaacagccctacaagatggctggtcgatgccatgcttttgaaaaagaatggatagaatgtgcacatggaatcggttatactcgggcagagaaagagtgcaagatagaatatgatgatttcgtagagtgtttgcttcggcagaaaacgatgagacgtgcaggtaccatcaggaagcagcgggataagctgataaaggaaggaaagtacacccctccacctcaccacattggcaagggggagcctcggccctgaacagagcagctgctgatgtctggaggctgatt

SEQ ID NO: 22882 - DNA, 486 bp, Homo sapiens
  misc_feature (1)...(486): n = a,t,c or g
gannccctttgagctntgacatgattacgaatttaatacgactcactatagggaatttggccctcgaggccaagaattcggcacgaggctggtggccaggggcagtggctcacgcctgtagtcacagcactttgggaggccgaggcaggtagatcacctgaggtcaggagttcgagtccagcctggccaacatggtgaaacgccgtctctactaaaaatacaaaaattagctggcgtggtggtgcgcccctgtaatcccaggtactcaggaggctgaggtgggagaactgcttgaacctgggaggtggaggctgcagtgagccgagattgtgccactgcactccagcctaggcgacaaagtgagaccccaactcaaaaaaacaaaacaaaaaaatagaataaaagacgtgctgttagttatcagtagcacaggggcccggtgacaccgggcctgtatgccaggttgtaagtctaacagtcacaaga

SEQ ID NO: 22883 - DNA, 564 bp, Homo sapiens
  misc_feature (1)...(564): n = a,t,c or g
cgctatgacatgattacgaatttaatacgactcactatagggaatttggccctcgaggccaagaattcggcacgagtaggtattttgttcttctgtgacaattgtgaatgagattgcattcctgatgtggctctcggctcagctattgttggtatataggaatgctagtgatttttgtatgtcgagtttgtatcctgagacttcactgacaaaagtcactcagggccaagccttaactgaaatggctgattaacctagtgagagcagtactgggtcaaaactgatcaaaaggcagtcatattcaacaaagtactggaagttctggccagagcagtcaggcaagagaaataaagggcccgggtgcagtggctcacacttgtaatcccagcactttgggaggccgaggcaggtggatcacttgaggtcaagagtttgagaccagcctggccaacatggtgaaaccccatctctactaaaaatcnaaaattagctgagcacggagctcacacctgtagtccagcacttttgggaggctgagcaggtagatcacctgagggcaggagt

SEQ ID NO: 22884 - DNA, 501 bp, Homo sapiens
  misc_feature (1)...(501): n = a,t,c or g
ttaatacgactcactatagggaatttggccctcgaggccaagaattcggcacgagcaataccctgtggcaaccataaggcttctgaccatggaagcgtgcttaaatcagtttaagagcatccattgttggtctccatgctcctactgcagacagcctccaccttgaggaatataaaggagaaccagtgattaaaaagttgagacattctctccattgacaatggctttccaactttcatttatttattcacgtaaatgtttactaattgatgttattatttgtctcttctaaaaataggacaggatggtacttgccattgatgcagaacaataacactgactgttacttatcactgtctataccaatggtccccaacatttttggcacccaggatgggttttgtagaagagaatcttcccacggaccagggcagggaggggtggtttccagatcactgtctacctcagatcatcaggcattanattctcataagtagcatg

SEQ ID NO: 22885 - DNA, 513 bp, Homo sapiens
aggctttttgtgccttacaaaaggcgcaagaaggagaatgaactgcccacaactcccgtgaagaaggactcccccaagaacatcacattgcttccagccaccgcggctaccaccttcaccgtgaccccctcgggacagatcacgacctcgggggcactgacctttgaccgagcgtccacggtagaggccactgctgtcatatcagagagtccggcccagggcgacgtcttcgcaggggccacagtccaagaggccagcgtgcagcccccatgcagggccagccaccctgagcctcactaccccggctatcaggacagctgccagatcgcaccgtttccagaagctgcgttgccaacgtcacatcccaaaatagtgttgacatccctgcctgcgctggcggtcccacccccgactcccaccaaagcggcacctcccgcgttggtcaatgggctggagctgtcagagccgcggagctggctgtacctagaagagatggtcaactccttgctaaca

SEQ ID NO: 22886 - DNA, 650 bp, Homo sapiens
  misc_feature (1)...(650): n = a,t,c or g
tttggataccgtttgactttgacgaacctaatacgactcactatagggaatttggccctcgaggccaagaattcggcacgaggcacaatcatagctcactgcagccttgaactcctggactgaagtgatcctcctgcctcagcctcccaaagagctggagttacagatgtgagccactgtactcggccactgtcttctatttctagtatttcctttttgtttttgtttattattaaagaataggcagtttctagtttattatagttaggctcttaaaaattgtaaattcatggtttagaattcaattagattttcccatagaattggtggcaagattcccagattagtccacataaagctgtttaatccacgttatttatgtacctgatacaatgcttggcacttggaaagttgctcagtaaatgttagtttctttcaatatagaacctcaccttcggtttaaccatatttatatgaggaaagattttagaattaagtgtagtaagagcagatactatcctggctcagtaataataacaataattctatcacttanngatttcttactgnatactaggtactctaagtatttaatattagtactaatttaatcttcaataatcctatcaaatagacattgctattgccat

SEQ ID NO: 22887 - DNA, 332 bp, Homo sapiens
ggtattatgggattagttccaggcagtcgtgcttggatatctcatgggtggtggagtctgtagcaaggctggaaattttgacttggaatcacttggatttctctaagagaataccccaggttggatgtgttactgtggcagcagagaagacttaaaaattacattgtttttagcttgaacttcgtcttgtgaagtcctaattagggaagaggagtcaggctgggggtctaggggaaagcaaagagataaagcagataagccataggtctaccttgcttcatggtccaggacatacaaacaaaaagaagaagcagataagctataggtctgcc

SEQ ID NO: 22888 - DNA, 366 bp, Homo sapiens
cggacgcgtgggcttgaccgcgcgttctgctgtaacgagcgggctcggaggtcctcccgctgctgtcatggttggttcgctaaactgcatcgtcgctgtgtcccagaacatgggcatcggcaagaacggggacctgccctggccaccgctcaggaatgaattcagatatttccagagaatgaccacaacctcttcagtagaaggtaaacagaatctggtgattatgggtaagaagacctggttctccattcctgagaagaatcgacctttaaagggtagaattaatttagttctcagcagagaactcaaggaacctccacaaggagctcattttctttccagaagtctagatgatgccttaaaact

SEQ ID NO: 22889 - DNA, 719 bp, Homo sapiens
ttacgaatttaatacgactcactatagggaatttggccctcgaggccaagaattcggcacgagagcgggaatctgaaatacccaaatgcctggtttcctcggaggagtcaacccgaagagctcccaccttctctggatgtgcctgggctaggactggctagaatctttctctggactgttgcatgtacagtgcctccatcctggaggcaagagagttgggagtggctcgaatcagagccgtgcccaagatatccctgctgatgcatcgtttgaagctgacgtcctgtgtctgtacactgctgccactgttgtgtcctcgctctgcttgctgttgcctcacgccaggccccgtcctgccgtgacacccttcatcctacccttggaaccccaaggcccagttgggtcaaactgttggagaacagagttggcctgcatctggaacacacttgtcctcagcttaccatctcctcacaccccagagtggaaaggtgaacacctgcagctgaggcttggaaacgtttcttgtgttgccctgaaaaatctttgagacctcagggaggctctgtctctcttaaaaggtggagaaagatgccattctctccctaaggtctggtggagtctccccatcttgcatacccttctgcaagccatctatctctgctcactctccaattgacccgcctgggaacaagggatgaggaggagttgggggctggggg

SEQ ID NO: 22890 - DNA, 230 bp, Homo sapiens
attttttttaataagcaggttgggttttccctaagtagtgctgagcagtaaagcttgccagtgtctgggtcttcagacttatttttatgctgaccattttcctttgttcacaccatctttttcaaaccaagctgcaatacagttcactaaatgacaagcacattccaggcctgcttcctaagattaaacttagatcacctttggaaacatgtagaggcttccaaattctg

SEQ ID NO: 22891 - DNA, 424 bp, Homo sapiens
  misc_feature (1)...(424): n = a,t,c or g
gcggcacgagcatggattaggaattcagacagagcactgcagggatggcttgcccctgctccatgatgtctgccttggctaaaaagacttcaaggctggctgggcgcagtggctcacgcttgtaatcccagcactttgggaggctgaggcataaggatcacttgagcccaggagttcaagaccaggctgggcaacatagcaagaccctgtctctacaaaaactagtaataataataaaattagcccagtgtgctggaatgcacctgtgctcccagctactcacgaggctgaggcgggaggctcgcttgagcccaagaattccaggcttcagtgagctgagatcttgccactgcactgcagcctggcaacagagtgagacactgtctctcaaaaaaaaaaaatannnnanttnaatgaanggggc

SEQ ID NO: 22892 - DNA, 465 bp, Homo sapiens
ttctttaattccgccaacaaacagcttcttcacagttacatgagcccctggttttccagattcctctcttgctacagcacgttttggctcaactactctcccatcaattgaatgaggtcttgcagccatggcagcatcaacctcagccatggatgaaaaagttacaaaaccaaatcctcttgatcttttgcttgcaggatccctcattaccacacagtctgtaagctttccccattgttcgtagtagttcctcaaactttcttctgtggtttcaaagcttaagccaccaataaagagcttacggaactgttccttttctctctccatcgcggactcagtcgcttcagcccgatttcccgcagccgagcgagatgagagagatctccgcggacgaacacgaaccggactcgtcctggcgctgtagtgagaactgccgctgctcgagctcgtgccgaattcttggcc

SEQ ID NO: 22893 - DNA, 500 bp, Homo sapiens
  misc_feature (1)...(500): n = a,t,c or g
acagctatgacatgattacgaatttaatacgactcactatagggaatttggccctcgaggccaagaattcggcacgagcggcagtgaaccggcaggtactaccaggtcgccgtcgttgctccgctcgctctgagagagcatggccctgagaggcgtctccgtgcggctgctgagccgcggacccggcctgcacgtccttcgcacgtgggtctcgtcggcggtgcataccgagaaaggcgggagaacacagagccaactggctaagtcctcgcgtcccgagtttgactggcaggacccgctggtgctggaggagcagctgaccacagatgagatcctcatcagggacaccttccgcacctactgccaggagagactcatgcctcgcatcctgttggccaatcgcaacgaagtttttcatcgggagatcatttcggagatgggggagttgggtgtgctgggccccaccatcaaaggatatggctgtgctggggtttcntctg

SEQ ID NO: 22894 - DNA, 410 bp, Homo sapiens
  misc_feature (1)...(410): n = a,t,c or g
nttgannncctgctatgactgattacgaatttaatacgactcactatagggaatttggccctcgaggccaagaattcggcacgagggcatgagccaccatgcccggtccctaatcattaatcaactatttaaaaagtgttcaaccttatttgtcctcaggaaatgcaaattaaatcacttcttaactagaatggctaaaattaaaaaggcaacagtgtaagtggtcaaggatttgaaacagtggggactcactgcggacaaaagtgtaaattggtacaaccgtttttggaaagctgtttggtaatatctgttgaagttgaatgtatttatactcttcttgatatataacagaaatgcacacttagaagacacatgcgagaatgttgatagagcattatttgtaatagtga

SEQ ID NO: 22895 - DNA, 425 bp, Homo sapiens
  misc_feature (1)...(425): n = a,t,c or g
gggcatgagccaccatgcccggtccctaatcattaatcaactatttaaaaagtgttcaaccttatttgtcctcaggaaatgcaaattaaatcacttcttaactagaatggctaaaattaaaaaggcaacagtgtaagtggtcaaggatttgaaacagtggggactcactgcggacaaaagtgtaaattggtacaaccgtttttggaaagctgtttggtaatatctgttgaagttgaatgtatttatactcttcttgatatataacagaaatgcacacttagaagacacatgcgagaatgttgatagagcattatttgtaatagtgaaaaactggaaactatccaaatatccaccaggagtaaaatggagaattaaattgtggnatagtcattcagtggaatcgctacagctgggnanccnaaggg

SEQ ID NO: 22896 - DNA, 453 bp, Homo sapiens
tagcttatttgctctgggggccaggaattggattcagtttacactatcattaaaaaagagggagagagataataaactatattttggtggggatggtgattaaacacctcttttgggtatgccttttaaaaatgcttatagagaaaaaaaattttaaaaagaaagctaatgctagtatatactgcaatgttaggggaatgaacatgttttcctactgcattggggacttctagataggttaatgaaaggccttttattctgttactggacatgaaaactttgtctaatttcttactctattgtacgtttacagtcgcagcactaaaaatggatgacatcaaacatttttaacaaaatgatgtacaaactaaggactatttattgataatgttttgctactcttgtcagacaatggctataaactgaattaggcagtcttaaaaaaaaaaaaaa

SEQ ID NO: 22897 - DNA, 610 bp, Homo sapiens
ggaaaagacggcttcattcccaagaactacatagaaatgaaaccacatccgtggttttttggcaaaatccccagagccaaggcagaagaaatgcttagcaaacagcggcacgatggggcctttcttatccgagagagtgagagcgctcctggggacttctccctctctgtcaagtttggaaacgatgtgcagcacttcaaggtgctccgagatggagccgggaagtacttcctctgggtggtgaagttcaattctttgaatgagctggtggattatcacagatctacatctgtctccagaaaccagcagatattcctgcgggacatagaacaggtgccacagcagccgacatacgtccaggccctctttgactttgatccccaggaggatggagagctgggcttccgccggggagattttatccatgtcatggataactcagaccccaactggtggaaaggagcttgccacgggcagaccggcatgtttccccgcaattatgtcacccccgtgaaccggaacgtctaagagtcaagaagcaattatttaaagaaagtgaaaaatgtaaaacacatacaaaagaattaaacccacaagctgctctgacagg

SEQ ID NO: 22898 - DNA, 523 bp, Homo sapiens
ccctatgacatgattacgaatttaatacgactcactatagggaatttggccctcgaggccaagaattcggcacgagagatgtttatgttggaaagaaaaagttcaagtgcaagttctgaaagcgtttgtcagagctcttgggagtagttagagagatgggatggtatgttgcccagcaggaattgtggcaggactcaacgggagagaaagagtctgaaacataaactgtaggaaggacttccacatgcttgagagaagaggatgctgtgactcggctctgttcatataatacatgcactggctctgggcacctggacccacttcctggtgcttgtggtccgtgaaataactcattcagcctccttgcacaaagtctagcacttactgagcatttgataaatgctagttctacccttaatcactgttctacagtagaaatcatcaagtattttagggcatggtactttgttaggtgtatttagagaaaaaaagcaaagttattaaaatctgacccctctcttcc

SEQ ID NO: 22899 - DNA, 484 bp, Homo sapiens
  misc_feature (1)...(484): n = a,t,c or g
aattctcctgcaagggaccccagtggcccagatgacagaggatgccgtcgacgcggaacggctgaagcacctcattgtgaccccctcgggctgcggggaacagaacatgatcggcatgacgcccacggtcatcgctgtgcattacctggatgaaacggagcagtgggagaagttcggcctagagaagcggcagggggccttggagctcatcaagaaggggtacacccagcagctggccttcagacaacccagctctgcctttgcggccttcgtgaaacgggcacccagcacctggctgaccgcctacgtggtcaaggtcttctctctggctgtcaacctcatcgccatcgactcccaagtcctctgcggggctgttaaatggctgatcctggagaagcagaagcccgacggggtctttcaggaggatgcgcccgtgatacaccaanaaatgattggtggattacngaacaacaacgaganagac

SEQ ID NO: 22900 - DNA, 384 bp, Homo sapiens
ttgataccgcttgaatacatttgactgattacgaatttaatacgactcactatagggaatttggccctcgaggccaagaattcggcacgagggtcgccgtcgccgccggggggaggagggccatgatccaaaggaaccagagcagttgagaaaactgtttattggtggtctgagctttgaaactacagatgatagtttacgagaacattttgagaaatggggcacactcacagattgtgtggtaatgagagacccccaaacaaaacgttccaggggctttggttttgtgacttattcttgtgttgaagaggtggatgcagcaatgtgtgctcgaccacacaaggttgatgggcgtgtagtggaaccaaagagagctgtttctaa

SEQ ID NO: 22901 - DNA, 487 bp, Homo sapiens
gtcttgcctcggcttcgtgagtagctgggattataggcgcccgccaccacgcctggctaattttttgtatttttagttgggacggcgtttcaccgtgttggccaggctggtctcaaattcctgatcccccgtgatgtgccccgctcggcctcccaaagtgctgggatgacaagcatgagccacctcgcccgaccatgtgtcatttttcttgtatgttacataagagcttgcattcacaagagatgggctctgtggtctgtggaatgaaatggttaaagatggagaaattgtatacactggaacagaatcaacccagaacggatagctccctcctggaaaagagacgaggtttcaccgtgttagccaggatggtgtcgatatcctgacctcctgatccacccgccatgggttccaaaagtgctgggattacaggcatgagccaccacgcccgggcaatatattgggttccttatgaaaattatactgg

SEQ ID NO: 22902 - DNA, 406 bp, Homo sapiens
gaaggttctgccggttcccccagctctgggtacccggctctgcatcgcgtcgccatgatgggccatcgtccagtgctcgtgctcagccagaacacaaagcgtgaatccggaagaaaagttcaatctggaaacatcaatgctgccaagactattgcagatatcatccgaacatgtttgggacccaagtccatgatgaagatgcttttggacccaatgggaggcattgtgatgaccaatgatggcaatgccattcttcgagagattcaagtccagcatccagcggccaagtccatgatcgaaattagccggacccaggatgaagaggttggagatgggaccacatcagtaattattcttgcaggggaaatgctgtctgtagctgagcacttcctggagcagcagatgg

SEQ ID NO: 22903 - DNA, 413 bp, Homo sapiens
  misc_feature (1)...(413): n = a,t,c or g
gcttctggataactgtcaaatgacagttcttggagcacctccctgtatccatggaaatactgtctctgtgatctgcacaggaagcctgacccagccactgtttccatgcctcgcaaatgtatctgacccatatttgtctgcagttccagaggggcagtgctttgatctgcttagaggacaaacggctccgcctagtggatggggacagccgctgtgccgggagagtagagatctatcacgacggcttctggggcaccatctgtgatgacggctgggacctgagcgatgcccacgtggtgtgtcaaaagctgggctgtggagtggccttcaatgccacggtctctgctcactttggggaggggcanggcccntntgnctggatgacctgactcncaggaatggagtcccacttg

SEQ ID NO: 22904 - DNA, 509 bp, Homo sapiens
  misc_feature (1)...(509): n = a,t,c or g
nacntctatgacatgattacgaatttaatacgactcactatagggaatttggccctcgaggccaagaattcggcacgagcagcacagatgccagtgccagtgatgtccacggcaatttcgccttcgagggcattggagatgaggatctgtaatctccactgcttggatgtctgccctctaccccagaggaatttacagaaacttgccctgtgcctgtgtcccccatgctaggggcggaggggtcttttccttcttctttcctacctaccccttttctcttggccaggggcctcgtatcctacctttccttgtcccctgggctggctgcacagaggattgccccttctcttttcagagctggccctcgatgccaaattagcatttagtattttgcacaaagtctaagggaccatggctgcctgccttggggaggaaccatagctccctctgggccgcttctggctcttggagccatgggccaaaggccaaggggatgggcagaggtctgg

SEQ ID NO: 22905 - DNA, 584 bp, Homo sapiens
ctggcagatacgttcgtcagcttgctcctttctgcccgtggacgccgccgaagaagcatcgttaaagtctctcttcaccctgccgtcatgtctaagtcagagtctcctaaagagcccgaacagctgaggaagctcttcattggagggttgagctttgaaacaactgatgagagcctgaggagccattttgagcaatggggaacgctcacggactgtgtggtaatgagagatccaaacaccaagcgctccaggggctttgggtttgtcacatatgccactgtggaggaggtggatgcagctatgaatgcaaggccacacaaggtggatggaagagttgtggaaccaaagagagctgtctccagagaagattctcaaagaccaggtgcccacttaactgtgaaaaagatatttgttggtggcattaaagaagacactgaagaacatcacctaagagattattttgaacagtatggaaaaattgaagtgattgaaatcatgactgaccgaggcagtggcaagaaaaggggctttgcctttgtaacctttgacgaccatgactccgtggataagattgcattcagaaa

SEQ ID NO: 22906 - DNA, 751 bp, Homo sapiens
  misc_feature (1)...(751): n = a,t,c or g
gagcagcccaggccggggccggggtgaggtgcgcctggaactggcttttgaatacctcatgagcaaggaccggctacagtgggtcaccatcactagcccccaggctatcatgatgagcatctgcttgcagtccatggttgatgaactgatggtgaagaaatctggcggcagtatcaggaagatgctgcgccggcgggtggggggtactctgagacgctcagacagccagcaagcagtgaagtccccaccactgcttgagtcacctgatgccacccgggagtctatggtcaaactctcaagtaagctgagtgccgtgagcttgcggggaattggcagtcccagcacagatgccagtgccagtgatgtccacggcaatttcgccttcgagggcattggagatgaggatctgtaatctccactgcttggatgtctgccctctaccccagaggaatttacagaaacttgccctgtgcctgtgtcccccatgctaggggcggaggggtcttttccttcttctttcctacctaccccttttctcttggccaggggcctcgtatcctacctttccttgtcccctgggctggctgcacagaggattgccccttctcttttcagagctggccctcgatgccaaattagcatttagtattttgcacaaagtctaagggaccatggctgctgccttggggaggaaccatagctccctctgggccgnttctggcctcttggagccatgggccaaaggccaagg

SEQ ID NO: 22907 - DNA, 520 bp, Homo sapiens
gggtccacataacaaaagtatgttctccctcatttccccccaaaaaagtacctaagagcccgtctaagacccttttttttggtcttgacttgaggtgagattttcttcaagacttctctgtagaagaaaatgaagagacttgcagaacctgaataaaatgtctgaatttctgtcttgttgattatagagttccccgaggctgggtgtggtggcccactcctggaatcccagcactttggggaggctgaggcaggaggatccctttagtccaggagtttgagaccagcctgggcaacatagtgagacctggtctctacaaaaactaaattagttgactgtggtagtgcatgcctgtggtcccagctactcagaaagctgagatgggaggatgtcttgagccttgggggtcaaggccacagtgagctgtgattgtgccactgtactgcagcctgggcatcagagcaagaccccatctcaaaacaaataagcaaaacacccaaaatcttaaaaaaaaaaaaaa

SEQ ID NO: 22908 - DNA, 371 bp, Homo sapiens
ggtcgattaagaaggagtggacagaatgaatgcatccacccctttccccacccttgccacctggaagaattctctcaggcgtgttcagcaccctgtccctcctccctgtccacagctgggtccctcttcaacactgccacatttccttattgatgcatcttttcccaccctgtcactcaacgtggtccctagaacaagaggcttaaaaccgggctttcacccaacctgctccctctgatcctccatcagggccagatcttccacgtctccatctcagtacacaatcatttaatatttccctgtcttacccctattcaagcaactagaggccagaaaatgggcaaattatcactaacaggtctttgactcag

SEQ ID NO: 22909 - DNA, 456 bp, Homo sapiens
aattcggcacgagcggcgttggcggcttgtgcagcaatggccaagatcaaggctcgagatcttcgcgggaagaagaaggaggagctgctgaaacagctggacgacctgaaggtggagctgtcccagctgcgcgtcgccaaagtgacaggcggtgcggcctccaagctctctaagatccgagtcgtccggaaatccattgcccgtgttctcacagttattaaccagactcagaaagaaaacctcaggaaattctacaagggcaagaagtacaagcccctggacctgcggcctaagaagacacgtgccatgcgccgccggctcaacaagcacgaggagaacctgaagaccaagaagcagcagcggaaggagcggctgtacccgctgcggaagtacgcggtcaaggcctgaggggcgcattgtcaataaagcacagctggctgagaaaaaaaaaaaaaa

SEQ ID NO: 22910 - DNA, 440 bp, Homo sapiens
gggcgtggagcccccagccctggacacggcctgggtggaggccacgcggaagaaggcgctgctgaagctggagaagctggacacagacctgaagaactacaagggcaactccatcaaagagagcatccggcgcggccacgacgacctgggcgaccactacctggactgtggggacctcagcaacgccctcaagtgctattcccgggcccgggactactgcaccagcgccaaacacgtcatcaacatgtgcctcaatgtcatcaaggtcagcgtctacttgcagaattggtctcatgtgctcagctacgtcagcaaggctgagtccaccccagagattgccgagcgaggagagcgtgacagccagacccaggccatcctcaccaagctcaagtgtgccgcaggcttggcaaaagctgggccgccaggaagtacaagcaggc

SEQ ID NO: 22911 - DNA, 1056 bp, Homo sapiens
  misc_feature (1)...(1056): n = a,t,c or g
acatgattacgaatttaatacgactcactatagggaatttggccctcgaggccaagaattcggcacgaggggcatggggcgagaccagactaggcgaggcgggcggggcggagtgaatgagctctcaggagggaggatggtgcaggcaggggtgaggagcgcagcgggcggcgagcgggaggcactggcctccagagcccgtggccaaggcgggcctcgcgggcggcgacggagccgggatcggtgcctcagcgttcgggctggagacgaggccaggtctccagctggggtggacgtgcccaccagctgccgaaggccaagacgccaggtccggtggacgtgacaagcaggacatgacatggtccggtgtgacggcgaggacagaggaggcgccgtccggccttcctgaacaccttaggctggtggggctgcggcaagaagcgggtctgtttctttacttcctccacggagtcggcacactatggctgccctctgggctcccagaacccacaacatgaaagaaatggtgctacccagctcaagcctgggcctttgaatccggacacaaaaccctctagcttggaaatgaatatgctgcactttacaaccactgcactacctgactcaggaatcggctctggaaggtgaagctagaggaaccagacctcatcagcccaacatcaaagacaccatcggaacagcagcgcccgcagcacccaccccgcaccggcgactccatcttcatggccaccccctgcggcggacggttgaccaccagccaccacatcatcccagagctgagctcctccagcgggatgacgccgtccccaccacctccctcttcttctttttcatccttctgctctttggttctgagctttcctgctttccttttttctgagagattcaaagcctccacgactctgtttccccngtccttctgaattagttgcangaagtcatttcactgnttggctttgggncggcttgagtcncagtacnntgtgngtggtgtgtnccagcttggnagtgcntgtggncggccgggcgctccat

SEQ ID NO: 22912 - DNA, 553 bp, Homo sapiens
  misc_feature (1)...(553): n = a,t,c or g
ggaaggtgaccaacgtcaaggatggcaccacccaccagacctccttggagctcttcatgtacctgaacgaagtcgcgggcaagcatggcgtgggccgtattgacatcgtggagaaccgcttcattggaatgaagtcccgagcatgaacgtgcagggtgattatgagccaactgatgccaccgggttcatcaacatcaattccctcaggctgaaggaatatcatcgtctccagagcaaggtcactgccaaatagacccgtgtacaatgaggagctggggcctcctcaatttgcagatcccccaagtacaggcgctaattgttgtgataatttgtaattgtgacttgttctccccggctggcagcgtagtggggctgccangccccagctttgttccctggtccccctgaagcctgcaaacgttgtcatcgaagggaanggtgggggcaactgcggtggggagctatnaaatgncaattttnngannaananannnnaaaatcntttttagnggnngnngtttcccttnaggngggtaattttncttggacggcc

SEQ ID NO: 22913 - DNA, 500 bp, Homo sapiens
aacagctatgacatgattacgaatttaatacgactcactatagggaatttggccctcgaggccaagaattcggcacgagaaccaatccctgaaaaacatggagtaagagagtaaaaaataaattcatgtgtgtatgtgtaatatatgtgtgtaagttcacagctggacatatacagtaaggacaaatcattacctctcccttgatggaaaggatccaatataatcaatctgctgccaagtggctgtctgatcttccaggggaatgttgccatcttggactgaggattggcttctgctgttgggagatcaggcactcattgttggcaaaggccaggtcagcattcatgagaagaagtcctttgctgagtccgtatgtagcctccactctttccaccatggtcacttgttcttggcctattgaggaagaccggtgtgactgatgaaaaaggataacttctccacagccttgtaattttgttcacctggttattgacaagccc

SEQ ID NO: 22914 - DNA, 504 bp, Homo sapiens
tgacatgattacgaatttaatacgactcactatagggaatttggccctcgaggccaagaattcggcacgagatctggactttattaagttgacagaggtattgaagaatagatgaccaccccgaaatgaggaataaagtttgttttgtacagttgtttaagcataaaaatagacagatattaatagtagtcagagtattcagttaccaacctcttgtccctcctcactgaagatctggtgacaactctaatccacgtggcgtagagagcggtgcctttggtctaatccgaatgctcctcctcttcactggggggttctggggacatctcacctggttgtgccctgggttttgccctgagatgttagcctccagctctgggggccttgtctcagtctgggcatgtgtacttgctcaaattacagtatctcaacttccatatattctgctttggaaaaaactaacctacacttttatgtattacatcctgatactcttcagcagtc

SEQ ID NO: 22915 - DNA, 350 bp, Homo sapiens
gacagtctttggatcaacaatgtgatcctaaaccattatctcggcaatttgacacagtttcaggtagtatttatgaagattcatgtgctagtcatggtccaatgagtttgggagaattggagttggagccaaattctaagctggttcttcccacaacacttctgacagcacaagaaaatgatgttaatttaccagtagccgctgaagatttttcccagtaccaactaaagcaaaatcaggatgttaagcaagttgaacacaaaccatcacaaagttacctacgtgttagaaataaatctgatattgcaccttcacagcaacaagtttcaccaggtgatatggatcggacc

SEQ ID NO: 22916 - DNA, 488 bp, Homo sapiens
attgctatgacatgattacgaatttaatacgactcactatagggaatttggccctcgaggccaagaattcggcacgagcggcacgagaaaacaggcatctcatgtagtttgccagttgctgctatagagcttccaaggcctggattttgctgattacattcctgtggtggtgttcaacatattcctttgtttattgtattttttgtaaattgttaaggtggttgtagcatctagaggcttgctctcagattcagcgttaacaccccactccagcacacacacagccacctcataggtgtagtactgtattcttctatttggatgcacataatatatggttgtctttttgtgatggtaccagtcattgatgattcatacccaattaggggttgcagagggatgctattctaattctatcattcttctttattggttggactgtttctagaaagagaaactttcccttatttactatttggttacccagt

SEQ ID NO: 22917 - DNA, 440 bp, Homo sapiens
ggtcccttttttgttgttgttagctgtgtacagaatgtgtaatcttttttcttttctcttttttttgttttgttttgttttgtttttgtttttttacttttttcttcttggctaattcttggcagggatctttctggaggaaaagctggggccagccagggcaggagaggtgtgaaatctgccacgaggggcctgctgtttgccacccagcccaacttcctgttgctggcccctgccctctgcccttttgcctgtcctcaggccgctggaacaaaggaaggacagctcattcctcatgggcgatcactccgcatctatagggtcgagcctaggggagcttgagggagggctggggcctccttgtcctggatttccagctctccccatgccccctccctgagcaccaccggcaccgcctcccaaacagggctgctggtttt

SEQ ID NO: 22918 - DNA, 425 bp, Homo sapiens
accagctatgacatgattacgaatttaatacgactcactatagggaatttggccctcgaggccaagaattcggcacgagggaatgttaactgttggtattttctaatgttaactgttggtattatcttggttctaaggccgaaccaaggatgccaggcatcagtttcaaagtgaaaaccgcaatcaaattaaattagctgtttaggtttttagatggttcaaatggtaggtcagtgattcttagccctggctgaatattgcagacagtcctcaacttacaatggttcaattaaggatttttcagcttgacaatggtgcaaaaccatacacgttgaatatgctcctcagcttacattggatttatctggacctgaccccatcgtaagtcaaggagcatgtgtacagtcacctggggagatttgaaa

SEQ ID NO: 22919 - DNA, 987 bp, Homo sapiens
  misc_feature (1)...(987): n = a,t,c or g
gatgacctgatggagtacgcaaagcaacacgggattcccatcccggtcactcccaagaacccgtggagcatggatgagaacctcatgcacatcagctacgaggctggaatcctggagaaccccaagaaccaagcgcctccaggtctctacacgaagacccaggacccagccaaagcccccaacacccctgacattctcggatggcaccacccaccagacctccttggagctcttcatgtacctgaacgaagtcgcgggcaagcatggcgtgggccgtattgacatcgtggagaaccgcttcattggaatgaagtcccgaggtatctacgagaccccagcaggcaccatcctttaccatgctcatttagacatcgaggccttcaccatggaccgggaatgtataccggtttctggcacagccctgagtgtgaatttgtccgccactgcatcgccaagtcccaggagcgagtggaagggaaagtgcaggtgtccgtcctcaagggccaggtgtacatcctcggccgggagtccccactgtctctctacaatgaggagctggtgagcatgaacgtgcagggtgattatgagccaactgatgccaccgggttcatcaacatcaattccctcaggctgaaggaatatcatcgtctccagagcaaggtcactgccaaatagacccgtgtacaatgaggagctggggcctcctcaatttgcagatcccccaagtacaggcgctaattgttgtgataatttgtaattgtgacttgttctccccggctggcagcgtagtggggctgccaggccccagctttgttccctggtccccctgaagcctgcaaacgttgtcatcgaagggaagggtggggggcagctgcggtggggagctatagacnattnnnngantnnggggnnnnnnnnnnnnnnnngnnccntnnnnnnnnntnnnnnnntnnnnnttttgncnnnggnnnnnttnctttttngggg

SEQ ID NO: 22920 - DNA, 696 bp, Homo sapiens
tatgacatgattacgaatttaatacgactcactatagggaatttggccctcgaggccaagaattcggcacgaggatggataactcagagctcatcagaaatgtgaccctttgtggacatctccaccatggcaagacatgttttgtggattgtttaattgaacagactcacccggaaatcagaaagcgctatgaccaagatctgtgctatactgacatcctcttcacagagcaagagagaggtgtaggcatcaaaagcactcctgtgacagtggtcttgccagacaccaaaggaaaatcttatctcttcaatatcatggacactccaggacatgtgaatttctctgatgaggtcacagctggcttgcgcatctcagatggagtggtccttttcattgatgctgctgagggggtgatgctgaacacagagcggctgatcaagcatgcggtgcaggagaggctggcagtcaccgtgtgcatcaacaagattgaccggctgatcctggagctgaagctgcctccaactgatgcttattacaagctgcgccacattgtggatgaggtcaatggattaataagcatgtattccactgatgagaacctgatcctttccccactcctgggtaacgtctgcttctccagctcccagtacagcatctgcttcacgctgggctcctttgccaagatctatgccgaca

SEQ ID NO: 22921 - DNA, 924 bp, Homo sapiens
aaaaaaaagatgggcattaattctagtcatttaaaaaattctatagatcagaggttacatggccaagattgaaacttagaggagtatagttacataaaagaaggcaaaacgatgtataaatgaaagaaattgagatggtgcacgatgcacagttgaagtgaacttgcggggtttttcagtatctacgattcatagatctggaattcgcggccgcgtcgacattttaacttgtacgatacattttcttttttttagttagccataacaggctggaattgctggttagaatactgcatgttatttaagctaaaattcaagccatctacaaaagatttctcattgaggcctccataggctgcaaacacatcaaaggcattactgtactggagaggactgaggttaagggggctgtcacctgggaacattccattggtactactaccttgaccctgcatattaggaaaaataaattccttggcattaggagaaagagcagaggttttctgctgttgttgctgctgtggtggtggtggtggcggtggcggctgggctggctgctgctgttgctgtggctgctgctggctacccaagccaagcccatacagagagtgcattgaggaagagatggctttctgcttcaagaggtcattcacattcaagccgaggttgatgggagaagtacgtgcaaccttgttgctacggccactattcttcattttggtagagccgaacttggtggcagcaaaagtggcagtggtaaaggttaaaggctgagtggaccggggcatgaaggtagggcttacagcagcagagtgaccaaaaggaggcgatggagagctggacactgatgaggctgggtcacttatgggcataaaaacctgggcctctgggttaaagctgtttttgatctccttatccaactcc

SEQ ID NO: 22922 - DNA, 730 bp, Homo sapiens
  misc_feature (1)...(730): n = a,t,c or g
ggacggcacctgcaattttgtgcacagattcccgactgtggcggttagcattggatttgctgttcgacaagagcttgaattcggagtgatttaccactgcacagaggagcggctgtacacgggccggcggggtcggggcgccttctgcaatggccagcggctccgggtctccggggagacagatctctcaaaggccttggttctgacagaaattggccccaaacgtgaccctgcgaccctgaagctgttcctgagtaacatggagcggctgctgcatgccaaggcgcatggggtccgagtgattggaagctccacattggcactctgccacctggcctcaggggccgcggatgcctattaccagtttggcctgcactgctgggatctggcggctgccacagtcatcatcagagaagcaggcggcatcgtgatagacacttcgggtggacccctcgacctcatggcttgcagagtggttgcggccagcacccgggagatggcgatgctcatagctcaggccttacagacgattaactatgggcgggatgatgagaagtgactgcggctgaggcaaagctgctcccaaggcctcctgggctgctgtgggctcctggggaggtggcctcgtggccacgctcatgccagtggctacgctctgtcctggctacccagaaggagttgcacctacaatgaatggctggcctttaaatcncgtctcttcaccaggaat

SEQ ID NO: 22923 - DNA, 746 bp, Homo sapiens
gcgtcttcccgagccagtgtgctgagctctccgcgtcgcctctgtcgcccgcgcctggcctaccgcggcactcccggctgcacgctctgcttggcctcgccatgccggtggacctcagcaagtggtccgggcccttgagcctgcaagaagtggacgagcagccgcagcacccgctgcatgtcacctacgccggggcggcggtggacgagctgggcaaagtgctgacgcccacccaggttaagaatagacccaccagcatttcgtgggatggtcttgattcagggaagctctacaccttggtcctgacagacccggatgctcccagcaggaaggatcccaaatacagagaatggcatcatttcctggtggtcaacatgaagggcaatgacatcagcagcacaggcctccaccgctatgtctggctggtttacgagcaggacaggccgctaaagtgtgacgagcccatcctcagcaaccgatctggagaccaccgtggcaaattcaaggtggcgtccttccgtaaaaagtatgagctcagggccccggtggctggcacgtgttaccaggccgagtgggatgactatgtgcccaaactgtacgagcagctgtctgggaagtagggggttagcttggggacctgaactgtcctggaggccccaagccatgttccccagttcagtgttgcatgtataatagatttctcctcttcctgccccccttggcatgggtgagacctgaccagtcaa

SEQ ID NO: 22924 - DNA, 468 bp, Homo sapiens
gtaagttctatcccactgtaagtgcatcctttccctatggagggaaggaaaggaggaagaaagaaaggaagggaaagaaacagtatttgccttatttaatctgagccgtgcctatctttgtaaagttaaatgagaataacttcttccaaccagcttaattttttttttagactgtgatgatgtcctccaaacacatccttcaggtacccaaagtggcattttcaatatcaagctaccgggatccagtaagattttttctgtttattgcgatcaagagaccagtttgggaggatggcttttgatccagcaaagaatggatggatcactgaattttaaccggacctggcaagactacaagagaggtttcggcagcctgaatgacgagggggaaggagaattctggctaggcaatgactacctccacttactaacccaaaggggctctgttcttaaggttgaattagaagg

SEQ ID NO: 22925 - DNA, 332 bp, Homo sapiens
gtttttatcatggttggaggatacttgacttataaactcaccctttctatggctccctttttcttcctgatgagctccaaatttcctggcaagatctttttactagctttaagtctgctgtccaaatgcctcctatccaaatgtctacaaagtcacttggattttctacaggcaccttaaacttggaggtcccaaattaaactcacatccttctgttcaaacttgctccttctgtgttccctatgcaagactgcccacctacttgtgtaagacagaaactttgaggtcatccttttttcttcttcctcacctcctacatccaataaatgtcc

SEQ ID NO: 22926 - DNA, 461 bp, Homo sapiens
gctcttcagaaagcacctagttccttttggctttcatctgcagtgtaggtctccatagctagtgacacacaaagccttatgagagtattccttccctctagggcccaaagaggctgctaaccagcaggaatgtcctgaaccaaaaggagtggtgaccattctctagacagaataaatgtctggtccctaatgggacagataactagggtttgagttcaggcttgacacaggagcaatgggcagtgaggtggacagcccagaccctgaaaggacgtgtggagacagcagcagtcctgtggtgcagttactgcctgtgtggccagcttcacaggcagcagataatttgtggaaataaacattattttctttttttggtccctgtaggctacttgatcctggatagtttctctttaaacctttggctttccctattttgtttagtagtgatgaaagatgggtta

SEQ ID NO: 22927 - DNA, 459 bp, Homo sapiens
  misc_feature (1)...(459): n = a,t,c or g
gcaacagtttcatccgataactgggtaatcaattgctgcaggttacaaattatctctacattttctttcaattcctggtcttccaaagtctccactagcttttgaagatccagtttgcaggccgcatgctgcctgagctcttctagcttggcgttcattttttcattcgcttgctctgtcaaaatgatcctctccaacatctgggctgtctgaccagctgcctcgctcagaccacgacttaatttttcattctcctctaccagggactgattcttctccatcagggattgtagattctctgatggttccacagttatagatccaggcagggtacctccatgggcctgtagcaacaagacttgtagctgttgtacctgctcgtgccgaattcttggcctcgagggccaaattccctatagtgagtcgtattaaattcgtaatcagtcaagngntntcaag

SEQ ID NO: 22928 - DNA, 456 bp, Homo sapiens
cagctatgacatgattacgaatttaatacgactcactatagggaatttggccctcgaggccaagaattcggcacgagctctgctgcagcccgtgccgccgccgcctcctgggaagagaggaagcgggagaggagcccacgtcgcctgtcacccaatatctccagccgcgcagtcccgaagagtgtaagatgttcgcctgcgccaagctcgcctgcaccccctctctgatccgagctggatccagagttgcatacagaccaatttctgcatcagtgttatctcgaccagaggctagtaggactggagaggtgctgcaacagtaggagtggctggttctggtgctggtattggaacagtctttggcagccttatcattggttatgccagaaacccttcgctgaagcagcagctgttctcatacgctatcctgggatttgccttggctgaagctatggg

SEQ ID NO: 22929 - DNA, 360 bp, Homo sapiens
gctgaataccaaaagtatggctcagtagctttccctaattttgaacaaggagtagcctgtttaagagaaattgcaaaacagagatgtgctccggcatctattcgcctcatggacaacaagcagtttcagtttggtcatgctcttaaacctcaggtttcctctatttttacatcatttttggacggattaaaaaagttttatattacaaagtttaaaggatttgacccaaatcagctaagtgtagccacattactgtttgagggggatcgtgagaaggttcttcaacatgaaaaacaagtgtatgatattgctgcaaaatttggtggggttggcagctggagaagataatggacagagagg

SEQ ID NO: 22930 - DNA, 645 bp, Homo sapiens
ggcattgtggcgcacacctgtattcccatctactcaggaagctgagatggaagaattaattgagcccacgagttcaaggctgcagtgagtcgtgattgtgccactgcactccagccggggtgacagaagagaccttgtctcgaaaaggaatctgaaaacaatggaaccatgccttcataattctagaaagttattttcaactgataaatctatattcacccaaataatcaagggtgaaggtaaaataatacatttttagacaagcaaagactcaggggttacctccatgtgccctttttagggaagctgttggagaaaatactccagcaaaatgaaggagtacacaaaccagagaatgacatgaatccagcaaataggatccaacacaggcaatattccagctatggagctagctttaaaaaggaacagtaaaaatattaatcggttagctgggtggaatggcccatgcctgtagtcccagctactcaggaggctcagcagcaggacgacttgagcccaagagttccagaccagcctggccaccttagtgagatcccttctcttaaaaataataacttattgccagatttggggcatttggaaataagttcattgaagataaagcaaaagtaaaaaaaaaaaaaa

SEQ ID NO: 22931 - DNA, 526 bp, Homo sapiens
  misc_feature (1)...(526): n = a,t,c or g
gaacatggtgaaaccctctctctactaaaaatacaaaaaagaaattagcagggcatggtggtgcgtgcctgtagttccagccacttgggaggctgaggcaggagagttgcgtgaaccgggaggtggaggttgcagtgagccaaggttgtgccactgcactccagcctgggtgacaaagcaagaccctatctcaaaaataaataaataaatacataaataaataaaaccaagcacaaacaaaaaacaccaagctgaattctaaagtgtggaatccaggttgcaatcagcttataaaggagcttgcaccacctaaacaatttgttagtgaagtcattaccagggcttggatcctttcctcaaggtagggaaccctgagtttcataaactctaatgaagtaatttctaagtgagaaaattcagttaggggaccataccaaatctcaccttanagacctgcctatcaccaaagtggccaccaaaagangccctgntgccaaatgccnnnaaactggnttnncnggctgtg

SEQ ID NO: 22932 - DNA, 336 bp, Homo sapiens
cctggatttaatactacgacagccactttgggctttggagccccccaggccccagtagctttgacagatccaaatgcttctgctgcccagcaggctgttctccagcagcacatcaatagtctaacatactcaccttttggagactctcctctcttccggaatccgatgtcagaccctaagaagaaggaagagagattgaaaccaacaaatccagcagcccagaaggctcttactacacctactcattataaactgacaccccgccctgccactagagtccggccaaaggctttacaaacaacaggcacagccaagtcacatctctttgatgggctg

SEQ ID NO: 22933 - DNA, 359 bp, Homo sapiens
gccggagatgcagctcaaggggaagaaagtcacggacaagttcactgagagcgtctacgtcctggccaacgagccatccgtggccctgtaccggctgcaggagcatgtgcgtcgctccctccccgagctggcccagcacaaggcagacatgcagcgttgggaggagcagagccagggagccatctacactgtggagtacgcctgcagcgccgtgaagaacctggtggacagcagcgtctacttccgcagcgtggagggtctgctcaaacaggccatcagcatccgggaccatatgaatgccagtgcccagggccacagcccggaggaaccacccccgccctcctcagcctgatcctgga

SEQ ID NO: 22934 - DNA, 685 bp, Homo sapiens
gcgggagaagactcggcggtcgccacctcttctgtccaggcctcggccttcctgagcatctctccttcctctcccagatcgtcttctccttcagtttcaaagccagtggcgtcgcggccaccctgccgggctctctgtgaggatggtgggggtgaagcccgtcgggagcgacccggatttccagccagagctgagcggcgcgggctccagactcgccgtggtcaagttcaccatgagagggtgtgggccatgtttgaggattgccccagcattcagttctatgagtaataaatatccacaggctgttttcttggaagtcgatgtacatcagtgtcagggaacagctgccaccaacaatatatcagcaacacctacatttttgttttttcgaaacaaagtgagaattgatcaatatcaaggagcagatgctgtgggattagaagaaaaaatcaagcagcacttagaaaatgaccctggaagcaatgaggacacagatattccaaaaggctatatggatttaatgccttttattaacaaagctggttgtgaatgtcttaatgaaagtgatgagcatggatttgacaactgtttacgaaaagacacaaccttcttggaatctgactgtgatgaacagctgcttattactgtggcattcaatcaacctgttaagctttattccatgaaa

SEQ ID NO: 22935 - DNA, 483 bp, Homo sapiens
  misc_feature (1)...(483): n = a,t,c or g
gcgatagctcacgcctataatcccagcattttgggaggccaaggtgggaggattgcttgagctcggaagatggaggctgcagtgagccatgacggtgccactgcactccagcttgggtgacagagtgagacgctgtctcaaattggaagagcagagctgcagacaggaataagaagaacggtaaatttgaagatgggaccgtctagttgcaagaaaacaagctcagggctcccactgattctacattacgggctgtgggttccttgagggaggaattttgtcctgcaggctgtggcagtcctaggactcagcacatctaggtgtccacctgcgtctgtggatggtttacctgcctggacagcaagatgatggctcactagcccccattctctggtcagttatatcacagtcctttacagggcgcctggattttgcccaccagatctcctaactcttggccttnacttctggtgaccttcaagg

SEQ ID NO: 22936 - DNA, 654 bp, Homo sapiens
gacctctgctgcagcccgtgccgccgccgcctcctgggaagagaggaagcgggagaggagcccacgtcgcctgtcacccaatatctccagcccgcgcagtcccgaagagtgtaagatgttcgcctgcgccaagctcgcctgcaccccctctctgatccgagctggatccagagttgcatacagaccaatttctgcatcagtgttatctcgaccagaggctagtaggactggagagggctctacggtatttaatggggcccagaatggtgtgtctcagctaatccaaagggagttccagaccagtgttgtctcccgggacattgacacagcagccaagtttattggtgctggggcagccacagttggtgtggctggttcaggggctggcattggaaccgtgtttggcagcttgatcattggctatgccaggaacccgtctctcaagcagcagctcttctcctatgccattcttggctttgccctgtctgaggccatggggcttttctgtttgatggtcgccttcctcatcctcttcgccatgtgaggctccatggggggtcaccggcctgttgctactgcaactccacaacattcttggtgctggggtgtgttaagctttaccattagcacaacgttctctaaaaaaaaaaaaaa

SEQ ID NO: 22937 - DNA, 501 bp, Homo sapiens
  misc_feature (1)...(501): n = a,t,c or g
ggngnnnttnnntttnntgttttgnnntagtnatcccntttgacatgnttacgaatttaatacgactcactatagggaatttggccctcgaggccaagaattcggcacgagtagaaacagatggtagtatttatgaactgatgttctcgtgaaatgttgagggtggggagaaaagactttaagggaggagagccatctattttgttcctaaagccacctctcatcagaatcgtcatgtttttctgatgcaccgctctgcttcatgcccaagatgacttgcgaggcaatctcaggagctgtggacttaaccgttgcaaagcacactgtctttctcagcgttctctgcaagtcagtaggtgttagtatggntgcaaagntcactgtctcagnaaagttgaacngggctacctctctacagctgtttcctcnnagggaaaaatcttganaccngatngngntnntcnngnnttttngnaannnntctnnntntttnnnatagtc

SEQ ID NO: 22938 - DNA, 785 bp, Homo sapiens
  misc_feature (1)...(785): n = a,t,c or g
tgacatgattacgaatttaatacgactcactatagggaatttggccctcgaggccaagaattcggcacgagagaaggggaaaaactgacaactaacaaaaccagcaccacatcgctaggtggtgcttactaattaccttctcaggattttcctcagattgaaaagcttatgaggatttcttgggagtcttaataacctgcctgttagtacagagctttcctgatgatatttactcttgagcacatgtggttgtaaaaccttaactttctttctccaggagggtggtgatagaaacagatggtagtatttatgaactgatgttctcgtgaaatgttgagggtggggagaaaagactttaagggaggagagccatctattttgttcctaaagccacctctcagcagaatcgtcatgtttttctgatgcaccgctctgcttcatgcccaagatgacttgcgaggcaatctcaggagctgtggacttaaccgttgcaaagcacactgtccttctcagcgttctctgcaagtcagtaggtgttaagtatgggttgcaaagttcactgtctcaacaaaattgactgggctacctccncnanagctgttccccagagggaaaaatccttgaaaccanatggnggganctctggantcanaaggaaatnggggntctcancaaaaanctgnngctttanctnangcacttcgganattttaaaaccgnncccganatnggnngntancccaaccaancacntttgnnngggaaaaataanccnanngtttaaa

SEQ ID NO: 22939 - DNA, 941 bp, Homo sapiens
gttcccatcggtaaagtgggcataataaaagtgtctacttcatagggctattgtggggattagtagcatatctaaagtagcttaaaacagtgtcttacatacagtaggtcaaatatagtgttagctattattaccattatcactgtcactatccttatcctccaaagtttgcaacaaactgagagacagatacaggaaccatagagatggtgatcagaggtcagctttaaaattgagcgatttagagaatgtgatatagatatgcacacaaatggacttgctaatattttaccccttaattaggtaaacttacctgccaattcatagagcatagtccattgcatggccaagagcagactggaatgaggtcctctgtgaacaatcaagagagaaagagcagtacagaaagagttaaattgacaatattcatattctcttcccaaatgctccagtcagacaggtcactgctacttatggggtagactgtgtgaggtgcagtacagaagctggaagcactctatccatactcttcccttctgggaaatgaggttcaaattccctcttcactctagaagcaggagaagtagggaatcattgttccaccctaacaaatggtaatgaaagctaaatttattgcatgtttccaatgtgctaggctctgtgctaagtactttgtattcattagctctttttattcttggaacatttctaagaagtatctatccacattatgcagatgaggaaactgaggctcagaaatgggaatttacttgatccagatcacctagctagaaagcagcgaggcagacatctgaagccaagtctgcctagcgtcaaagcctatgtccctgggcagttatgtgtactactcccactacctaaaggtctcctaatgcctctgactcagtggtgatgagctttgagttttctttctcttttca

SEQ ID NO: 22940 - DNA, 514 bp, Homo sapiens
gattctataaggccataaaacaggtaatataaaaagcttccatgattctatttatatgtacatgagaaggaacttccaggtgttactgtaattcctcaacgtattgtttcgacagcactaatttaatgccgatatactctagatgaagttttacattgttgagctattgctgttctcttgggaactgaactcactttcctcctgaggctttggatttgacattgcatttgaccttttatgtagtaattgacatgtgccagggcaatgatgaatgagaatctacccccagatccaagcatcctgagcaactcttgattatccatattgagtcaaatggtaggcatttcctatcacctgtttccattcaacaagagcactacattcatttagctaaacggattccaaagagtagaattgcattgacccgcgactaatttcaaaatgctttttattattattattttttagacagtctcactttgtcgccaggcccggagtgcagtggtgcgatctc

SEQ ID NO: 22941 - DNA, 388 bp, Homo sapiens
  misc_feature (1)...(388): n = a,t,c or g
agctgtatgtggccgcctatcagcagctgacctctgagaaggaggtgctgcataatcagctactgctgcagacccagctcgtggaccagctgcagcagcaggaagctcagggcaaagcggtggccgagatggcccgccaagagttgcaggaaacccaggagcgcctggaagctgccacccagcagaatcagcagctacgggcccagttgagcctcatggctcaccctggggaaggagatggactggaccgggaggaggaggaggatgaggaggaggaggaggaggaggcggtggcagtacctcagcccatgccaagcatcccggaggacctgnagagccgngaagccatggtggcatttttcaactcagctgtatccagtgccnatga

SEQ ID NO: 22942 - DNA, 367 bp, Homo sapiens
  misc_feature (1)...(367): n = a,t,c or g
gagagtagcagagatggcctgccaagagttgcaggagacccaggaaagggagttgctgagggcaggtccccgagggggatgagacctggcaacatccatgccttctcattctctttcctgaccccttaggagcgcctggaagcagaaccagtagctacaggcccagagatggactggagagtgaggaggaggaggagccttggtccatgctgagcatcctggaggacctggagagctgggagaccatgatgagcctgactccccatgccccacctttgcttcctccctctctcctccctcccagacacccttatgctcttggnttttctgccttctgatttctttggaccctcaccccttccctggg

SEQ ID NO: 22943 - DNA, 803 bp, Homo sapiens
  misc_feature (1)...(803): n = a,t,c or g
agctggtccctgcctgcatgtgactgtaaatccctcccatgttttctctgagtctccctttgcctgctgaggctgtatgtgggctccaggtaacagtgctgtcttcgggccccctgaactgtgttcatggagcatctggctgggtaggcacatgctgggcttgaatccaggggggactgaatcctcagcttacggacctgggcccatctgtttctggagggctccagtcttccttgtcctgtctttgagtccccaagaaggaatcacaggggaggaaccagataccagccatgaccccaggctccaccaagcatcttcatgtccccctgctcatcccccactcccccccacccagagttgctcatcctgccagggctggctgtgcccaccccaagggtgccctcctggggaccccanaactgcctgatcgtgccgtggcccanttttgtggcatctgcagcaacacaagagagaggacaatgtcctcctcttgacccgctgtcacctaaccagactcgggccctgcacctctcaggcacttctggaaaatgactgaggcagattcttcctgaagccnattctccatggggcaacaaggacacctattctgtccttgtccttccatcgctgccccaaaaagcctcacatatctccgtttagaatcaggtcccttctccccanatgaanaggagggtctctgctttgttttctctanctcctcctcagacttgancaagcccaanangccccatgaagacattacctatatcccttctctccctattcaatggcnananggcctg

SEQ ID NO: 22944 - DNA, 694 bp, Homo sapiens
ttttttttttttttgcatttactaaaagtttatttcaaatctgcctccaagtccatgtgttctgaaaaggacagagggggccttggagtgcagccagatggaaggactttgaaggctgtccaagtgctgctttcagagtgcaccaagtttttattgtccctgactgtggctccctgcctgtttgtcaggcgggagcctggagcctgcacagggacagagctggtttcatccggcactccctagccctggacaccctccttgtctcgcctgccctcctgcaggccttcactctcccctgaggctgtcctggcccggactgtggggagcacctcaaccccccggagcaggtgcacacccaggtaagcaggtccaggggctggggtgggcagggctagcttttggatcctgagtgtcactactctctcctcccagggatgccctggacctaagtgacatcaactcagagcctcctcggggctccttcccctcctttgagcctcggaacctcctcagcctgtttgaggacaccctagacccaacctgagccccagactctgcctctgcacttttaaccttttatcctgtgtctctcccgtcgcccttgaaagctggggcccctcgggaactcccatggtcttctctgcctggccgtgtctaataaaaagtatttgaaccttgggaaaaaaaaaaaaaa

SEQ ID NO: 22945 - DNA, 331 bp, Homo sapiens
ggggggagagtgcctaatgtgggagaccaaatagggatcaccaggctaatggggggcgtcagcagctttctctccctcctatcttggcctgttcttttttgttttttgagacggagtctcactctgttgcccagggtggagtgcagtggcatgatcttggctcactgcaacttccacctctgggatcaagggattctcctgcctcagcctcttgagtagctgggattacaggcgcccaccaccacagcctgctaatttttgtatttttagtagagatggggtttcaccatgttggccaggctggtctcaaactcctgactcgaagtgatcc

SEQ ID NO: 22946 - DNA, 368 bp, Homo sapiens
gaataacagagagatactcgcaggcaagccagctgcccagaagtcacccagcgacctgctggatgccagcgcagtctcggccacatctcgctacatcgaggagcagcaggccacagcagcagctgatcatggatgaacaggatcaacagctggagatggtgtctgggagcatccaggttctgaagcacatgtcccagcgcatcggaggggagctggaggaacaggcagttatgttggaagatttctctcacgaattggagagcactcagtcccggctggacaacgtgatgaagaaacttgcaaaagtatctcatatgaccagtgatcggcgccaatggtgtgccatagccatcctctttgcagtcctg

SEQ ID NO: 22947 - DNA, 370 bp, Homo sapiens
gcggcacgagctgccgtgtatccccatatccccacagggcccttctcaccagaccccgtgccccgagtgggtgtgagtgtccacgacctgtccacggcccggccccaggagactggcactcgcccagtttgtactgagctcacttagccaccttactctgcactgcccagggcagcggggcacatcccacttctcgactaggacagtgcattggcctctgtggctaggatcctctttggcagaagggctcattttcttagaatctatctccatagatagacttgggggagaaacctggcgttcctctctgtgcccttgatggcccctgggttgctgcccagattcctgcccgagccacccagggaagtcc

SEQ ID NO: 22948 - DNA, 409 bp, Homo sapiens
gccatcatgggtcgcatgcatgctcccgggtgagctcggggcatcaagccggattgctgggcggggggtgggaggaagacagggagtgtgggcagcgggccgaggggatgatgttctgggctgctctggcactagccgccacctcacctcgagactgcttctctccccaggaagggcctgtcccagtcggctttaccctatcgacgcagcgtccccacttggttgaagttgacatctgacgacgtgaaggagcagatttacaaactggccaagaagggccttactccttcacagatcggtgtaatcctgagagattcacatggtgttgcacaagtacgttttgtgacaggcaataaaattttaagaattcttaagtctaagggacttgctcctgatcttcctgaagatc

SEQ ID NO: 22949 - DNA, 435 bp, Homo sapiens
gttgaatcttatacactcccagatggacgtatcatcaaagttgggggagagagatttgaagcaccagaagctttatttcagcctcacttgatcaatgttgaaggagttggtgttgctgaattgctttttaacacaattcaggcagctgacattgataccagatctgaattctacaaacacattgtgctttctggagggtctactatgtatcctggcctgccatcacggttggaacgagaacttaaacagctttacttagaacgagttttgaagggtgatgtggaaaaactttctaaatttaagatccgcattgaagacccaccccgcagaaagcacatggtattccgtcgacgcggtcgcgaattccagatctatgaatcgtagatactgaaaaaccccgcaaggtcacttcaactgtgcatcgtgcaccatcta

SEQ ID NO: 22950 - DNA, 1014 bp, Homo sapiens
  misc_feature (1)...(1014): n = a,t,c or g
ctctaccagaggagattcttcaagcttagttgctgaacttcaagaaaagcttcaggaagaaaaagctaagtttctagaacaacttgaagagcaagaaaaaagaaagaatgaagaaatgcaaaatgttctaacatctttgattgcggaacaacagaccaattttaacactgttttaacaagagagaaaatgagaaaagaaaacataataaatgatcttagtgataagttgaaaagtacaatgcagcaacaagaacgggataaagatttgatagagtcactttctgaagatcgagctcgtttgcttgaggaaaagaaaaagcttgaagaagaagtcagtaagttgcgcagtagcagttttgttccttcaccatatgtagctacagccccagaactttatggagcttgtgcacctgaactcccaggtgaatcagatagatccgctgtggaaacagcagatgaaggaagagtggattcagcaatggagacaagcatgatgtctgtacaagaaaatattcatatgttgctgaagaaaaacagcggataatgctgttagaacgaacattgcaattgaaagaagaagaaaataaacggttaaatcaaagactgatgtctcagagcatggcttcagtatcttcaaggcattctgaaaagatagctattagagattttcaggtgggagatttggtactcatcatcctagacgaacgccatgacaattatgtgttatttactgttagtcctactttatattttctacattcagagtctctacctgccctggatctcaaaccaggtgaaggtgcttcaggtgcatctagaagaccctgggtacttggaaaagtaatggaaaaagaatactgncaagccaantaggcacaaaacagatttaaagttcctttggggacnaagtnttacagagtgaaagccgtatcatggaataatgaaanggtaaactnatggacaaaatnaatacattctatgacatttttttctgattnggcctgcaagtgctca

SEQ ID NO: 22951 - DNA, 812 bp, Homo sapiens
  misc_feature (1)...(812): n = a,t,c or g
ggccgaaaaagcatgcatcttagaaatagcccctcaattccaggagtcaacatgccaaagaatgaggctggagacaggtagctccgagggaggacttctggcatgagatctcggcacggcaagcccagcatcgcctcagcccagacaggctccaccaggagatcaagcaagggctgcctttcaggagtcacctcctgagccacttcagagttctggaagtgaccacggaccagggtggaggaatagacttctagttcattctgggacacttgagccagagagttgaaagcttggnaagaccagataagaaacctgccctttgtctccctagggacatgagacaccacattccatttgtgctagaaaaacctatccactgatgagtctaactgttccaaacgcctcccacctggtgtgcacagctgcctgggtccattgtcacttgggtgcatcaggttgtcctccgatttttagatgagtttcctgtctagagatgtcctagtctgctcactggctggtggcagtagggtaccctgcgtcctcgaaaagccagagggttcacctagtcagacgaaactccagaacagtgcttgtggagggcctgactgtcctgctcacccacagccgatctgctgcaggtcagcaactgtgtcgtgagcagctgccaaccaccaagcctttctggtgctgttctccagttcacgtctgccagctggtganggcagaggcaagacctggtcaagacccagcgcccctcctccctganggancatggcncagcctcacacttgaaagacgggtttggtttccca

SEQ ID NO: 22952 - DNA, 430 bp, Homo sapiens
  misc_feature (1)...(430): n = a,t,c or g
gaatttaatacgantcactatagggaatttggccctcgaggccaagaattcggcacgagggcgtttcaaggacatcttccaggagatctttgacaagcactataagaccgacttcgacaagaataagatctggtatgagcaccggctcattgatgacatggtggctcaggtcctcaagtcttcgggtggctttgtgtgggcctgcaagaactatgacggagatgtgcagtcagacatcctggcccagggctttggctcccttggcctgatgacgtccgtcctggtctgccctgatgggaagacgattgaggctgaggccgctcatgggaccgtcacccgccactatcgggagcaccagaagggccggcccaccagcaccaaccccatcgccagcatctttgcctggacacgtggcctggagcaccggggg

SEQ ID NO: 22953 - DNA, 388 bp, Homo sapiens
gagacaacatgaatttgcatgttctaataaatacatacttttaaatggcctctagagtagttttccttccctaatctccattccttccaattcaagggcaaattataaatttttatttttcaggctgctttttaaatttcacttttcagaaacacaacaataagagttaatgtagtcctcctttaaactagaaaatactggtataggccaggcgcggtggctgacgcctgtaatcccagcactttgggaggccgaggcgggcagatcacgacttcaggctgaggcaggagaattgcttgaaccggtgaggtgaaggttgtggtgtgccgagatcacgccattgcacaccagcctgggcaacaagagccaaactctgtctcaaaaaaaa

SEQ ID NO: 22954 - DNA, 381 bp, Homo sapiens
gtttctgggcccgtacaaaggaagatccacagaactcatcccacggttaaaaggagtcctcactaatccaaattgtgaatttgaagccaactacgttgctatccacacccttgccacctggtacaaatcaaacatgaatggagtgagaaaagatgtagtgatgactgacagtgaagatagtactgtgtccatccagataaaattagaaaatgaaggcagtgatgaagatattgaaactgatgtactctatagtccacagatggctctaaagctagcattaacagaatggttgcaagagtttggtgtgcctcatcaatacagcagtaggcaagttgcacacagtggagctaaagcaagtgtagttgatgggactcctttagt

SEQ ID NO: 22955 - DNA, 297 bp, Homo sapiens
aagctaaaagtttacttgggtcttaaagagtacacaatgaggtatggaaagccattgaaagtttccaagcaagagagattaaatgattaaaacaggaagattattttattttattttgttttttttgctttatgttcaagtatagacatgcaaaggattattttagaatccatatgtagagtgcccaaaaggaaaagcttatttcagggagacaaaatagaaaggtctagcaaaatgtaggagtaaagtgtgaaggggctaaatcagatcagttgtaataagagtggaaagaaaaag

SEQ ID NO: 22956 - DNA, 787 bp, Homo sapiens
catgattacgaatttaatacgactcactatagggaatttggccctcgaggccaagaattcggcacgaggtgatatatttcccctcttgaagaggcaattcattaaactctcaaattttctatagaatcaagatagaacctttagatactccaactcaccaaaatgtaaaaaaactaacaaaaatatttggtcttcaataatgctaaatatctacatttttagaatttatcaacatttaactagataattgggcatgtcttaattatgcatgtacttatccatactaataaaattgacaatgctagtgcatacttattggtttagtcctattatcaggatataatcatctgtgaggaggatattttaaatactgtaaatgataacagttaatgatatacacatttagactgagttgcacactggcagggagaccaaaaacattacttccatacttgtgtcatgattcttttttttttgaaagagtctcactctgtcgccaggctggagtacaggggcatgatctcggctcactgcaacctctgcctcccgggttcaagcaattctcctgcctcagccacccaagtagctgggactacaggtgcgtgccaccacgcccagctaaattttgaatttttaggggaaacggggtttcaccatgttggccaggatggtctcaatctcctgaccctgcgatctgcccacctaagcctcccaaagggctgggattacaggcgtaagccaccgggcctgcctgttttatgatcttaatagttacttgggttaaatc

SEQ ID NO: 22957 - DNA, 426 bp, Homo sapiens
gcgtgggcaggatgaagcacatcatcagcaagccaggtttgtagtacctacattgacagaccagacaccaggtcaatggagggggactccacacctacatggatcttccacactaattgggaggggatgggctgtctttcttccatgttgaattgcttgtctgactctaagttcattgttttatttatttttgtttgttttttttgacagggtctcactctgttgccaaggctggagtgcagtggcgtgaccttagttcaccacagccttgaactcctgggccaagagatcctcccaccccagcctcctgagtagctgggaccacaggcatgaaccatcgtgcccatttagtttttaattttttgtagagatgaggtctcactatgttgccaggccggtctcgaatgcctgaactttccagcaatc

SEQ ID NO: 22958 - DNA, 509 bp, Homo sapiens
tttgaataaccgtttgacatttgaacgacccttaatacgactcactatagggaatttggccctcgaggccaagaattcggcacgaggggggccactggcaagtgtttcaccaggacagctgaggctgtgctgcctacgggtgcggccaggcagggaccctgggagaggctggcagacaaggatgttcagatgagataggccccattccgtgcacaagacagccctgctctctccatgtctggctgctaataaaggctaagaccacctagaggagtatggtgaccttggggaatggatacccatggcaatgctgcactgtagctgttcccatgctaaaccctctgttctccacaaagactagagttctctctctggcagctctccaggtagttctccctgccatttcaaatgtcttggaggggtcttagggtctcctgcagctaggatctctaaggtctgtgatgaaaagtgggccacttcacaccagtttcacttaccttttcctaagg

SEQ ID NO: 22959 - DNA, 598 bp, Homo sapiens
  misc_feature (1)...(598): n = a,t,c or g
gaagagcggagcgtgtgagcagtactgcggcctcctctcctctcctaacctcgctctcgcggcctacctttacccgcccgcctgctcggcgaccagaacaccttcaaccatgaccacctcagcaagttcccacttaaataaaggcatcaagcaggtgtacatgtccctgcctcagggtgagaaagtccaggccatgtatatctggatcgatggtactggagaaggactgcgctgcaagacccggaccctggacagtgagcccaagtgtgtggaagagttgcctgagtggaatttcgatggctctagtactttacagtctgagggttccaacagtgacatgtatctcgtgcctgctgccatgtttcgggaccccttccgtaaggaccctaacaagctggtgttatgtgaagttttcaagtacaatcgaaggcctgcagagaccaattttgaggcacacctgtaaacggataatggacatggtgagcaaccaacacccctggtttggcatggacaagagtatacctcatggggacagatgggcaccctttggttggcttccaangctcccaaggcccaaggtcatatactgtggtgtgga

SEQ ID NO: 22960 - DNA, 478 bp, Homo sapiens
  misc_feature (1)...(478): n = a,t,c or g
gaagaaatctccaccagaaccccgagtggcgaagaaactgggaatgattgccggcgggacaggaatcaccccaatgctacagctgatccgggccatcctgaaagtccctgaagatccaacccagtgctttctgctttttgccaaccagacagaaaaggatatcatcttgcgggaggacttagaggaactgcaggcccgctatcccaatcgctttaagctctggttcactctggatcatcccccaaaagattgggcctacagcaagggctttgtgactgccgacatgatccgggaacacctgcccgctccaggggatgatgtgctggtactgctttgtgggccacccccaatggtgcagctggcctgccatcccaacttggacaaactgggctactcacaaaagatgcgattcacctactgagcatcctccagcttcctggtgctgttccctgcaanttgttccccatcagtactcaag

SEQ ID NO: 22961 - DNA, 679 bp, Homo sapiens
  misc_feature (1)...(679): n = a,t,c or g
gatcagcaaccctcctcagaggaaagttccagagaagccggagaccaggaaggcaccaggtggccccatgcttttgccgcagacatacggagcgagggggaagggaaggacgcagctgtctctactgcctcgtgccctgcagcgcccaagtgctgcagctcctcaggctgagaacggccctgccgcggctcctgcagttgccgccccagcagccaccgaggcacccaagatgtccaatgccgattttgccaagctgtttctgagaaagtgaacgggacgctgggagacaggaaatgccttacttcactctggcccggcggacctcccaccacccagcagtgcactggggatggacaggcctggtgtgctgcgtgctcgcaaccacagatggctcctcggctttagacagaaaggggaaggggttctaagtcaagagcctttcagtgctccctcatattgagggcagtggcagaaaagtgaccactctgcaggctgggcccaggatgtggcgtcctgagatagttttgtatcttaaagactgaggcacagaagcgaaacgagaacacactgtttttgagacacagttgccaaatgtttctggcagctccggcccctttttgtatgacacttctntttcaccctgcacagncatgggcccgcattcttttaattttaaaaa

SEQ ID NO: 22962 - DNA, 445 bp, Homo sapiens
  misc_feature (1)...(445): n = a,t,c or g
ttgaannacttgntatgccatgattacgaatttaatacgactcactatagggaatttggccctcgaggccaagaattcggcacgagctccgtgggccccgtgagcccgagtcgcaggtggtcgtacaggtgctatgcttatgactcgaactctccctatgtgtggtctctacccagtgatctcctggagctcctggtcccaggtgtttctaagaagccatcactctcagtgcagccaggtcctatggtggcccctggggagagcctgaccctccagtgtgtctctgatgtcggctacgacagatttgttctgtataaggagggagaacgtgacttcctccagcgccctggttggcagccccaggctgggctctcccaggccaacttcaccctgggccctgtgagcccctcccacgggggccagtacagatgctacagtgcacaca

SEQ ID NO: 22963 - DNA, 804 bp, Homo sapiens
gattacgaatttaatacgactcactatagggaatttggccctcgaggccaagaattcggcacgaggtgtaaggaaggagaagatgaacacccacaatgcctgaactcccagccccatgcccgtgggtcgtcccgcgccatcttctccgtgggccccgtgagcccgaatcgcaggtggtcgcacaggtgctatggttatgacttgaactctccctatgtgtggtcttcacccagtgatctcctggagctcctggtcccaggtgtttctaagaagccatcactctcagtgcagccgggtcctgtcgtggcccctggggaaagcctgaccctccagtgtgtctctgatgtcggctatgacagatttgttctgtacaaggagggggaacgtgaccttcgccagctccctggccggcagccccaggctgggctctcccaggccaacttcaccctgggccctgtgagccgctcctacgggggccagtacagatgctacagtgcacacaacctctcctccgagtggtcggcccccagtgaccccctggacatcctgatcacaggacagttctatgacagaccctctctctcggtgcagccgggccccacagtagccccaggaaagaacgtgaccctgctgtgtcagtcacgggggcagttccacactttctttctgaccaaggagggggcaggccatcccccactgcatctgagatcagagcaccaagctcagcagaaccaggctgaattccgcatgggtcctgtgacctcagcccacgtggggacctacagatgctacagctcactcagc

SEQ ID NO: 22964 - DNA, 580 bp, Homo sapiens
  misc_feature (1)...(580): n = a,t,c or g
tnnnnnnnnnnnnatttggaacccttatgacangattacgaatttaatacgactcactatagggaatttggccctcgaggccaagaattcggcacgagaaaactatgctgaggcaaaggatgtcttcctgggcatgtttttgtatgaatatgcaagaaggcatcctgattactctgtcgtgctgctgctgagacttgccaagacatatgaaaccactctagagaagtgctgtgccgctgcagatcctcatgaatgctatgccaaagtgttcgatgaatttaaacctcttgtggaagagcctcagaatttaatcaaacaaaattgtgagctttttgagcagcttggagagtacaaattccagaatgcgctattagttcgttacaccaaaaagaatgccctgtgcagaagactatctatccgtggtcctgaaccagttatgtgtgttgcatgagaaaacgccagtaagtgacagagtcaccaaatgctgacagaatccttggtgacaggcgaccatgcttttnacttntgaagtcgatgaaacatacgttncccaagagttaatgctgaacattcccttcat

SEQ ID NO: 22965 - DNA, 1113 bp, Homo sapiens
ggaaatattctgggtggcacggtcttcagagaagccattatctgcaaaaatatcccccggcttgtgagtggatgggtaaaacctatcatcataggtcgtcatgcttatggggatcaatacagagcaactgattttgttgttcctgggcctggaaaagtagagataacctacacaccaagtgacggaacccaaaaggtgacatacctggtacataactttgaagaaggtggtggtgttgccatggggatgtataatcaagataagtcaattgaagattttgcacacagttccttccaaatggctctgtctaagggttggcctttgtatctgagcaccaaaaacactattctgaagaaatatgatgggcgttttaaagacatctttcaggagatatatgacaagcagtacaagtcccagtttgaagctcaaaagatctggtatgagcataggctcatcgacgacatggtggcccaagctatgaaatcagagggaggcttcatctgggcctgtaaaaactatgatggtgacgtgcagtcggactctgtggcccaagggtatggctctctcggcatgatgaccagcgtgctggtttgtccagatggcaagacagtagaagcagaggctgcccacgggactgtaacccgtcactaccgcatgtaccagaaaggacaggagacgtccaccaatcccattgcttccatttttgcctggaccagagggttagcccacagagcaaagcttgataacaataaagagcttgccttctttgcaaatgctttggaagaagtctctattgagacaattgaggctggcttcatgaccaaggacttggctgcttgcattaaaggtttacccaatgtgcaacgttctgactacttgaatacatttgagttcatggataaacttggagaaaacttgaagatcaaactagctcaggccaaactttaagttcatacctgagctaagaaggataattgtcttttggtaactaggtctacaggtttacatttttctgtgttacactcaaggataaaggcaaaatcaattttgtaatttgtttagaagccagagtttatcttttctataagtttacagcctttttcttatatatac

SEQ ID NO: 22966 - DNA, 666 bp, Homo sapiens
  misc_feature (1)...(666): n = a,t,c or g
gcggcacgagcatgggtttacttataatggagtctgtagcttcacagcatatttcatgtaatcataaagaccagtatattccctcctgctgaatgacatgcgactgtaaagcctctttataaaccatttccaatgttagtatataggattatttgggaagcgtatcaatacctttatagacaaatacgaacatgtatgcacacaaaacatttaactatggtatttatggaagacaggtaacaacattaaatctagttgctttcccttagtattagatttgttgagggttttttaaaaatcaggtctgttgaaagtcttctgtcataatctataaagcagcagcactcatggaaattgtagcatgccagtaatttttaccaacatcccatacatctgagttctgcagtccagtgtgtaatccgctccatgtgtattttgcttaatggaatgctttatttaagcacttaggcagagtagacacaattaaaggtacaaagcccagaggaagtggtagagcagcaccgtgcctgccctgaggcagtggagtcagtagcgctgtccccagggccttgagtgcctggaggtgcttggctccaatagctgcctccaatcccctttaaaaaaaaggggtgnttctgangnaccgaantggcncccaaatntggg

SEQ ID NO: 22967 - DNA, 322 bp, Homo sapiens
ggatggggtttcaccatgttggtcagactggtctcaaactcctgacctctggtgatatgcctgcctcagcctcctaaagtgctgggattacaggcatgagccactgtgcccagccgacagatactattattatttccattctaccgagaaggagactaaggctctgatcatttaaataagttgcctaaggtgatgcagtgatataaggagcagagctaggaattgagccttggtaactttaactctggaccccaagtccttagctactaagctttactgcatggggtttagtcaaattaagacttttggaatatgagttact

SEQ ID NO: 22968 - DNA, 468 bp, Homo sapiens
cttccattttgccctgaaagtcccagatttttgctcattaacagaaaagaagaggagaatgctaagcagatcctccagcggttgtggggcacccaggatgtatcccaagacatccaggagatgaaagatgagagtgcaaggatgtcacaagaaaagcaagtcaccgtgctagagctctttagagtgtccagctaccgacagcccatcatcatttccattgtgctccagctctctcagcagctctctgggatcaatgctgtgttctattactcaacaggaatcttcaaggatgcaggtgttcaagagcccatctatgccaccatcggcgcgggtgtggttaatactatcttcactgtagtttctgtaagttggatggtttggtaattttgaggggagaaaagaatccttgctacagatgttcaaagatggattgcatgaccctaccatcatttaattacctttttggtg

SEQ ID NO: 22969 - DNA, 444 bp, Homo sapiens
gcggcgatgttcaaccgcgccgtgagccggctgagcaggaagcggccgccgtcagacatccacgacagcgatggcagttccagcagcagcaaccagagcctcaagagcacagccaaatgggcggcatccctggagaatctgctggaagacccagaaggcgtgaaaagatttagggaatttttaaaaaaggaattcagtgaagaaaatgttttgttttggctagcatgtgaagattttaagaaaatgcaagataagacgcagatgcaggaaaaggcaaaggagatctacatgacctttctgtccagcaaggcctcatcacaggtcaacgtggaggggcagtctcggctcaacgagaagatcctggaagaaccgcaccctctgatgttccagaaactccaggaccagatctttaatctcatgaagtacgacagctacagccgcttt

SEQ ID NO: 22970 - DNA, 469 bp, Homo sapiens
  misc_feature (1)...(469): n = a,t,c or g
gaanntttgaanaaccgttatgacatgattacgaatttaatacgactcactatagggaatttggccctcgaggccaagaattcggcacgagagactgcatagggctcggtggctcacgcctgtcatcccagcactttgggaggccgaggcgagaggatcatttgaagtcaggagttcgagaccagcctggccaacatggtgaaaccccatctctactaaaaaaaaaacacaaaaattagccaggcgtagtggcgggtgcctgtaatcccanctacttgggaggctgaggcagganantcacttgaacccgggaggcanaggttgcagtgagctganattgcnccactacattccagcctgggnaacanantgagactccatttcaganaaaaaaaaaaaatnaaanggaaaaaanccgtntccntancntaaaantgcagggataaccacccggngtttnggaaaactt

SEQ ID NO: 22971 - DNA, 483 bp, Homo sapiens
cagctatgacatgattacgaatttaatacgactcactatagggaatttggccctcgaggccaagaattcggcacgagagactgcatagggctcggctggtctactcctgacctcaagtgatccgcccacctccccaagtgctgggattacaggcatgagccaccatgcctggcctcttacaatgtgtctatgaaattttccttattcttaaaattttattactaaaaacagaacttatagaaaatgtcaagtgcaggccaggagcagtggattacacctataatcccagcactttgagaggccaagacaagcagatcacttgaagtcaggagtttgagaccagcccggccaccctggtgaaaccacatctccactaaaaatacaaaaattagctggtgtggtggtgcacgcctgtaatcccaaccacttgggaggctgaggcaggagaattgcctgaacccaggaggcagagaatgagtgagc

SEQ ID NO: 22972 - DNA, 523 bp, Homo sapiens
  misc_feature (1)...(523): n = a,t,c or g
gaagtggactaaatgtgactctcaccattcggcttcttatgcacggaaaggaagtaggaagcatcattgggaagaaaggggantcggttaagaggatccgcgaggagagtggcgcgcgggtcaacanctcggaggggaattgtccggagagaatcatcactctgaccggccccaccaatgccatctttaaggctttcgctatgatcatcgacaagctggaggaagatatcaacagctccatgaccaacagtaccgcggccagcaggcccccggtcaccctgaggctggtggtgccggccacccagtgcggctccctgattgggaaaggcgggtgtagatcaaaganatccgcgaaaagtacggnggcncangtccaggtggcggcggatatgctgcccaactcgattcangncaacacaccatttctccgctcgatctggccaanctgaaccaggtggnaanacaacaatctcactttncatatcacggcggaccggantcgccngaattgatccanctccca

SEQ ID NO: 22973 - DNA, 459 bp, Homo sapiens
tcaacagctatgacatgattacgaatttaatacgactcactatagggaatttggccctcgaggccaagaattcggcacgagggttccaacagcaatcggtatgaaagactgaaggccacacaggtgtccaagggcatccgggacaacgagcggagtggccgggcccgagtgcacgtgtctgaggagggcactgagcccgaggcgatgctccaggtgctgggccccaagccggctctgcctgcaggtaccgaggacaccgccaaggaggatgcggccaaccgcaagctggccaagctctacaaggtctccaatggtgcagggaccatgtccgtctccctcgtggctgatgagaaccccttcgcccagggggccctgaagtcagaggactgcttcatcctggaccacggcaaagatgggaaaatctttgtctggaaaggcaagcaggcaaacacggaggag

SEQ ID NO: 22974 - DNA, 445 bp, Homo sapiens
  misc_feature (1)...(445): n = a,t,c or g
tgaatttantacgactcactatagggaatttggccctcgaggccaagaattcggcacgaggtgaagggctgcgtgcagcagctgcggaccctcagcctccgaccactgctggcagtgcccactgaggaggagccggactctgctgccaagagtggtgaggcgtggtatgaggggaacctcggtgctatgctgcggtgtgtggacctgtcacggggcctcctggagccccccagcctggctgaggccagcctcatgcagctgaaggtgacggcgctgaccagtactcggctctgtaaggagctagcctcgtgggtcanaaggccaggagcctccttggagctgagccccgagaggctggctgaagctatggactctgggcagaacctccaggtctcctgcctcaatgctgagcagaaccagcacctccgggcctccctcagccgct

SEQ ID NO: 22975 - DNA, 502 bp, Homo sapiens
  misc_feature (1)...(502): n = a,t,c or g
gacttgctgcctccagagaaccttccctggtgtggaggcagccagggacccaggatgctccggacctgttacgtgctctgttcccaagctggtcccccctccaggggctggcagtccctgagctttgatggcggggccttccaccttaagggcacaggagagctgacacgggccttgctggttctccggctgtgtgcctggcccccactcgtcactcacgggctgttgctccaggcctggtctcggcgactcctgggctcccggctctcaggcgcatttctccgagcatccgtctatgggcagtttgtggctggtgagacagcagaggaggtgaagggctgcgtgcagcagctgcggaccctcagcctccgaccactgctggcagtgcccactgaggaggagccggactctgctgccaagagtgggtgagtagggagccagggcccagggaaggctgggaggacccaggaagggcttttnttgttcggccttgaacctggtg

SEQ ID NO: 22976 - DNA, 384 bp, Homo sapiens
cattattagtaaaaccaatgtatgtttgtagatgcaaccacattattagggggtccatattctttagccatatttacgagatatatatatatgtaacacaagctaccgcaggaggtggtgtcatgggtggagttaaggtagttaggacttttttccagtcaaaagacagactagaatacagctgccctggaggtacttgggataatcaagtttccattcctccctaagaacttttttaaagcaaaatctatttcaaatgattttcaaataggaacaaaaaaaatgcatttttaaaggcaatttctaaaaaataagactttaggttgtagcatgtcttctctacaaccgtaacaacgtttcctttagtgctcagcaccaaagcaa

SEQ ID NO: 22977 - DNA, 850 bp, Homo sapiens
cacgtaacgagcccaactcccccgaacgccgcccgccgctcgccatggatgccggtgtgactgaaagtggactaaatgtgactctcaccattcggcttcttatgcacggaaaggaagtaggaagcatcattgggaagaaaggggagtcggttaagaggatccgcgaggagagtggcgcgcggatcaacatctcggaggggaattgtccggagagaatcatcactctgaccggccccaccaatgccatctttaaggctttcgctatgatcatcgacaagctggaggaagatatcaacagctccatgaccaacagtaccgcggccagcaggcccccggtcaccctgaggcttaagatcaaagagatccgcgagagtacgggggcgcaggtccaggtggcgggggatatgctgcccaactccaccgagcgggccatcaccatcgctggcgtgccgcagtctgtcaccgagtgtgtcaagcagatttgcctggtcatgctggagacgctctcccagtcccccccgaagggcgtgaccatcccgtaccggcccaagccgtccagctctccggtcatcctttgcaggtggtcaggacaggtacagcacaggcagcgacagtgcgagctttccccacaccaccccgtccatgtgcctcaaccctgacctggagggaccacctctagaggcctataccattcaaggacagtatgccattccacagccagatttgaccaagctgcaccagttggcaatgcaacagtctcattttcccatgacgcatggcaacaccggattcagtggcattgaatccagctctccagaggtgaaaggctattggggtttggatgcatctg

SEQ ID NO: 22978 - DNA, 426 bp, Homo sapiens
ggttgcccaagggcagagcacggaatatctggtgtttcttgtgatgataatattttaattttaaatatccctccctcatacaagtgtatgttaccattttaatataattctttttgtacctttccttcttgttttgtgaagatttttgtggcatggattgctgtgctcactgctgtaaaaggtgacctagtgtactgggcagctggtggtggtgcagaaaagagtctcaggttattttttgtttttagttatttcttggaccttgacagtatctaatgactcctcctgaaaatgctgcagtataaaagagcaaagagctttgggaaatacctaagaagcaccttaagattagggtggcattgcttttatagattcttgattttaaagcaacaggcctttctcaggtgttgcattttttggagcaaa

SEQ ID NO: 22979 - DNA, 418 bp, Homo sapiens
gcttccttcctttcttccttccttccttttttcctctaactctctcactttctctttatttctttcactttcttctaatgcattctgcagatcctgctttagcacatttatttcctcttccgtgaccctcagctcgtggaaatgtgaataattatccatgctttcaggtgagacaagaccgagtttcatctgcttctgcacactaaggacttctttcatagcctcctcgtatttgctctgagtttctttaagtttctggctgaggtcagagctgttctctgaaatctcagtgttgtttaagcataccagttctgcccttcgggattggagttcgacctgtagctgttttctctctgcttcagagctctctaatctcttctgtagatcttgcaaaatctcttgcagttgctgaattctg

SEQ ID NO: 22980 - DNA, 483 bp, Homo sapiens
  misc_feature (1)...(483): n = a,t,c or g
gnnnggnnnnnttgnnttgtgaatctgganactacgtaaaacccttatgactgattacgaatttaatacgactcactatagggaatttggccctcgaggccaagaattcggcacgagaggatctggttctgctgccggagaaggcaaacccgctttgagtgaagaggaaagacaggaacaaactaagaggatgttggagctggtggcccagaagcagcgggagcgtgaagaaagagaggaacgggaggcattggaacgggaacggcagcgcaggagacaagggcaagagttgtcagcagcacgacagcggctacaggaagatgagatgcgccgggctgctgaggagaggcggagggaaaaggccgaggagttagcagccagacaaagagttagagaaaagatcgagagggacaaagcagagagagccaagaaggtaggtgactgagaagacgccacgggtaatggagtgggcaggttagtaaa

SEQ ID NO: 22981 - DNA, 479 bp, Homo sapiens
  misc_feature (1)...(479): n = a,t,c or g
ggnnngnnnnnnttgnntttgtnaccanngatactcttatgacatgattacgaatttaatacgactcactatagggaatttggccctcgaggccaagaattcggcacgagaaggatggcagagagagggaacggcagcgcaggagacaagggcaagagttgtcagcagcacgacagcggctacaggaagatgagatggactggctgatggagcacgaagacgaccccgatgtggacgagcctttagagactccccttggacatatcctgggacgggagcccacttcctcagagcaaggcggccttgaaggatctggttctgctgccggagaaggcaaacccgctttgagtgaagaggaaagacaggaacaaactaagaggatgttggagctggtggcccagaagcagcgggagcgtgaagaaagagaggaacgggaggcattggaacgggaacggcagcgcaggagacaagggcaagag

SEQ ID NO: 22982 - DNA, 442 bp, Homo sapiens
  misc_feature (1)...(442): n = a,t,c or g
gaaagacaggaacaaactaagaggatgttggagctggtggcccagaagcagcgggagcgtgaagaaagagaggaacgggaggcattggaacgggaacggcagcgcaggagacaagggcaagagttgtcagcagcacgacagcggctacaggaagatgagatgcgccgggctgctgaggagaggcggagggaaaaggccgaggagttagcagccagacaaagagttagagaaaagatcgagagggacaaagcagagagagcccagaagtttggtggcagtgtgggctctcagcctcccccagtggcaccagatcctggtcctgttcctcttntnccaccangagccttccaccaagcgggttatgaccagtgtcgnatacaggtcagttttcagatgntacctgactgacccagacgntccgtccntnnccctggaacttttt

SEQ ID NO: 22983 - DNA, 514 bp, Homo sapiens
  misc_feature (1)...(514): n = a,t,c or g
ttnnnttntnnnntnctgaattcccttgccatgacatgattacgaatttaatacgactcactatagggaatttggccctcgaggccaagaattcggcacgagcggcacgagcggctgctatagagccgggtgagagagcgagcgcccgtcggcgggtgtcgagggcgggttgcctcgcgctgacccttcccgccctccttctcgtcacacaccaggtccccgcggaagccgcggtgtcggcgccatggcggagctgacggctcttgagagtctcatcgagatgggcttccccaggggacgcgcggagaaggctctggccctcacagggaaccagggcatcgaggctgcgatggactggctgatggagcacgaagacgaccccgatgtggacgagcctttagagactccccttggacatatcctgggacgggagcccacttcctcagagcaaggcggcttgaaggatctggttctgctgccggagaaggcaaacccgctttgagtgaagaggaaa

SEQ ID NO: 22984 - DNA, 469 bp, Homo sapiens
aaccgctatgacatgattacgaatttaatacgactcactatagggaatttggccctcgaggccaagaattcggcacgagggaaacgcaactcagcagcaaggtggtacagaagttggtcctgccctttgggcgactgaactacctgcccctggaacagcagtttatgccctgccttgagaggatcctggctcgggaagcaggggtggcacccctggctacagtcaacatcttgatgtcactgtgccaactgcggtgcctgcccttcagagccctgcactttgttttttcccctggcttcatcaactacatcagtggcacccctcatgctctgattgtgcgtcgctacctctccctgctggacacggccgtggagctggagctcccaggataccggggtccccgccttccccgaaggcagcaagtgcccatctttcccagcctctcatcaccgaccgtgcccgctgcaag

SEQ ID NO: 22985 - DNA, 1009 bp, Homo sapiens
ctagcgccgctgggcctgcaggtctctgtcgagcagcggacgccggtctctgttccgcaggatggggtttgttaaagttgttaagaataaggcctactttaagagataccaagtgaaatttagaagacgacgagagggtaaaactgattattatgctcggaaacgcttggtgatacaagataaaaataaatacaacacacccaaatacaggatgatagttcgtgtgacaaacagagatatcatttgtcagattgcttatgcccgtatagagggggatatgatagtctgcgcagcgtatgcacacgaactgccaaaatatggtgtgaaggttggcctgacaaattatgctgcagcatattgtactggcctgctgctggcccgcaggcttctcaataggtttggcatggacaagatctatgaaggccaagtggaggtgactggtgatgaatacaatgtggaaagcattgatggtcagccaggtgccttcacctgctatttggatgcaggccttgccagaactaccactggcaataaagtttttggtgccctgaagggagctgtggatggaggcttgtctatccctcacagtaccaaacgattccctggttatgattctgaaagcaaggaatttaatgcagaagtacatcggaagcacatcatgggccagaatgttgcagattacatgcgctacttaatggaagaagatgaagatgcttacaagaaacagttctctcaatacataaagaacagcgtaactccagacatgatggaggagatgtataagaaagctcatgctgctatacgagagaatccagtctatgaaaagaagcccaagaaagaagttaaaaagaagaggtggaaccgtcccaaaatgtcccttgctcagaagaaggatcgggtagctcaaaagaaggcaagcttcctcagagctcaggagcgggctgctgagagctaaacccagcaattttctatgattttttcagatatagataataaacttatgaacagc

SEQ ID NO: 22986 - DNA, 339 bp, Homo sapiens
gggacatgcgagatgaggtcctggaacatgagctgatggtggctgaccggcgccagaagcgagagattcggcagctggaacaggaactgcataagtggcaggtgctagtggacagcatcacaggcatgagctctccggacttcgacaaccagacactggcagtgctgcggggccgcatggtgcggtacctgatgcgctcgcgtgagatcaccctgggcagagcaaccaaggataaccagattgatgtggacctgtctctggagggtccggcctggaagatatcccggaaacaaggtgtcatcaagctgaagaacaacggtgatttcttcattgccaatg

SEQ ID NO: 22987 - DNA, 652 bp, Homo sapiens
gaagttcgcttgaatttagacaagatgatggagcatgaagagtactgcagtaaaagctttaacaggtggaattgcccacttattcaaacagaataaggttgttcatgtcaatggatatggaaagataactggcaaaaatcaagtcactgctacgaaagctgatggcggcactcaggttattgatacaaagaacattcttatagccacgggttcagaagttactccttttcctggaatcacgatagatgaagatacaatagtgtcatctacaggtgctttatctttaaaaaaagttccagaaaagatggttgttattggtgcaggagtaataggtgtagaattgggttcagtttggcaaagacttggtgcagatgtgacagcagttgaatttttaggtcatgtaggtggagttggaattgatatggagatatctaaaaactttcaacgcatccttcaaaaacaggggtttaaatttaaattgaatacccaggttactggtgctaccaagaagtcagatggaaaaattgatgtttctattgaagctgcttctggtggtaaagctgaagttatcacttgtgatgtactcttggtttgcattggccgacgaccctttactaagaatttgggactagaagagctgggaattgaacta

SEQ ID NO: 22988 - DNA, 459 bp, Homo sapiens
  misc_feature (1)...(459): n = a,t,c or g
ggtgaagtttcagagcaaacagtgaagaaatcagtgtgattgtagacaaaaagtcggttcacagaacggagcagcggggagaggaagggaaaagcttcatagtttggtgcttatcacatcaagagattggtaaatttctgaggaaagacaggctaatggggcactgaaatggaacaactcctttaaacgtgcagccttttgaatttttcctcaaaaccaagaagttgacctctgagctgtcaggtgaccactgtgtgcaaaggggatggattctcttgtcagtagacggtcttctccatgaagcgagagtaggaagtgtactggaatggccaagtgggactgcttcagctgaccaggttcttttaaaccgtagtcatgctttcccactaactcttaaatccttatgcttanaaaattgangataangctgggcacagtggctcatcctgtaatcccagc

SEQ ID NO: 22989 - DNA, 443 bp, Homo sapiens
  misc_feature (1)...(443): n = a,t,c or g
ggttgtttggtatttttgtttagttgcttaattggttagagatagccctctttaaggatataaaaatcttacattaaaaatttttggttaaggccaggcacagtgactcacgtttataatctcagcattttgggaagccatggtgggaggattatttgagcccaggagttcaagaccagcctgggcagcatagtgagacaccgtatctacaaaacaattttttttttaattagctgggcatggttgtgtgtgcctgtaagtcccaggtacttgggagacaggtgggaggatcactcgagcctgggaggtcaaggctgcagtgagctgtgatcatgccactgcactccagcctggggatccattttttttccaagttgagaaggtcaagaaaaaggngctctccatcctctctcattatatggtcctgacaatttaaaagctac

SEQ ID NO: 22990 - DNA, 463 bp, Homo sapiens
  misc_feature (1)...(463): n = a,t,c or g
gnnnnngnnnnntcttggaccccctttggannacntctatgacatgattacgaatttaatacgactcactatagggaatttggccctcgaggccaagaattcggcacgagcatcccgtcaatgttgactttctgggaatctacataccccctacaaacaagttctcacctaaagcccacggactaataggccagttcatgcaggaaccaaagatacacatcttcaatgagagaccaggaaaggaccctgagaagccagaggccagcatggaagtgaaggggcagaagctgatcatcaccaggggcttacagaaagactacagaacggatctagtgtttggaacccttagcgaatttgctgacagtttgatctggatttactcatggcacctgcacctatttattttcctcatttcttttccttttattcttcaccatcattgctattatagtcactatttcat

SEQ ID NO: 22991 - DNA, 579 bp, Homo sapiens
gacttgggcatctggctccctttggtttgggggtctgcctgaggtcccaccccactaaagggctccccaggcctgggatctgacaccatcaccagtaggagacctcgtgttttgggtctaggtgagagcaggcccctctccccacacctcgccccacagagctctgttcttagcctcctgtgctgcgtgtccatcatcagctgaccaagacacctgaggacacatcttggcacccagaggagcagcagcaacaggctggagggagagggaagcaagaccaagatgaggaggggggaaggctgggttttttggatctcagagattctcctctgtgggaaagaggttgagcttcctggtgtccctcagagtaagcctgaggagtcccagcttagggagtcactattggaggcagagaggcatgcaggcggggtcctaggagcccctgcttctccaggcctcttgcctttgagtctttgtggaatggatagcctcccactaggactgggaggagaataacccaggtcttaaggaccccaaagtcaggatgttgtttgatcttctcaaacatctagttccctg

SEQ ID NO: 22992 - DNA, 494 bp, Homo sapiens
  misc_feature (1)...(494): n = a,t,c or g
gccagaattcaattaaagtggctcagtggatgattcaacagccacacaaagcagcaacattttttggatgcattgggatagataaatttggggagatcctgaagagaaaagctgctgaagcccatgtggatgctcattactacgagcagaatgagcagccaacaggaacttgtgctgcatgcatcactggtgacaacaggtccctcatagctaatcttgctgctgccaattgttataaaaaggaaaaacatcttgatctggagaaaaactggatgttggtagaaaaagcaagagtttgttatatagcaggcttttttcttacagtttccccagagtcagtattaaaggtggctcaccatgcttctgaaaacaacagggttttcactttgaatctatctgcaccgtttattagccaattctacaaggaatcattgatgaaagttatgncctangttgatanacttttggnaatgagacagannctccactttgca

SEQ ID NO: 22993 - DNA, 479 bp, Homo sapiens
tttgaatcccttgactgattacgaatttgtacgactcactatagggaatttggccctcgaggccaagaattcggcacgagcgctgaggcccccggttcgctgtcccgcctggcgtcccttcgcatcgggtgctaactttgagtacatcatcgcagaaaaaagagggaagaataacaccgtggggttgatccaactgaaccgccccaaggccctcaatgcactttgcgatggcctgattgacgagctcaaccaggccctgaagatcttcgaggaggacccggccgtgggggccattgtcctcaccggcggggataaggcctttgcagctggagctgatatcaaggaaatgcagaacctgagtttccaggactgttactccagcaagttcttgaagcactgggaccacctcacccaggtcaagaagccagtcatcgctgctgtcaatggctatgcctttggcgggggctgtgagcttgcca

SEQ ID NO: 22994 - DNA, 628 bp, Homo sapiens
  misc_feature (1)...(628): n = a,t,c or g
ccctaacagctatgacatgattacgaatttaatacgactcactatagggaatttggccctcgaggccaagaattcggcacgagtggccgccctgcgtgtcctgctgtcctgcgtccgcggcccgctgaggcccccggttcgctgtcccgcctggcgtcccttcgcctcgggtgctaactttgagtacatcatcgcagaaaaaagagggaagaataacaccgtggggttgatccaactgaaccgccccaaggccctcaatgcactttgcgatggcctgattgacgagctcaaccaggccctgaagatcttcgaggaggacccggccgtgggggccattgtcctcaccggcggggataaggcctttgcagctggagctgatatcaaggaaatgcagaacctgagtttccaggactgttactccagcaagttcttgaagcactgggaccacctcacccaggtcaagaagccagtcatcgctgctgtcaatggctatgcctttggcgggggctgtgagcttgccatgatgtgtgatatcatctatgccngtgaganggcccagtttgcacagccggagatcttaatangaaccttcccaggtgcgggcggcacccaganactcancccgtgc

SEQ ID NO: 22995 - DNA, 510 bp, Homo sapiens
  misc_feature (1)...(510): n = a,t,c or g
cttngannnccaacagctatgacatgattacgaatttaatacgactcactatagggaatttggccctcgaggccaagaattcggcacgagcggactaataggccagttcatgcaggaaccaaagatacacatcttcaatgagagaccaggaaaggaccctgagaagccagaggccagcatggaagtgaaggggcagaagctgatcatcaccaggggcttacagaaagactacagaacggatctagtgtttggaacggacgttacctgctggtttgtgcacaacagtggaaaaggattcattgacgggcattacaaggattacttcgtgcctcagctctacagctttntcaaacggccttaaaggtttatagtttgggaaattatatatattaatatacatctttcccctgtcacttttgcagatattcttcggtttgaataattaaaatgaaccagatatcagggtggttaattaagcggccgcaagcttattcctttagtgaggggtaa

SEQ ID NO: 22996 - DNA, 469 bp, Homo sapiens
gaactggaaggaacatttaaaggtcatttcaatgaactgctggaggctaagtgtggactaggatgagaatgactaacttctaggagtggcagtcttgaaagaaagaccttatacttttgtggggtttacttccaaaaacaacatcagcttcctacagtaaagagccaagaagatactcccatagctctgacaaggggagggaaaaaataactagtatgaaataagcccaagtcattcatcataacaaagacttacttcctagacttacaaagacttaaaagggtttaccagagccttatctgacctgaggaaagggcacttcccagactccacatccctggtcttgcctaagggaaagggtaaactaagagacacttgtaaaattcacagctcatgacgcacacacactaaaaggctaagatttaatcctaacagaacactatccccttcccatactttaccaccactc

SEQ ID NO: 22997 - DNA, 638 bp, Homo sapiens
attctcccaaggagccagactgcttcaaggacatcgtgaacatgctgatgcaccatgacaggttcaaggtgtttgcagactatgaagcctacatgcagtgccaggcacaggtggaccaactgtaccggaaccccaaggagtggaccggaccatcacggagtatgcacgggagatctggggtgtggagccctccgacctgcagatcccgccccccaacatcccccgggactaggcacaccctgccttggcgggaccagcgggcatttgttttcttgctgactttgcacctccttttttccccaaacactttgccagccgctggtggtccctgcttttctgagtaccatgtttccaggaggggccatgggggtcagggtggttttgagagagcagggtaaggaaggaatgtgctagaagtgctcctagtttcttgtaaaggaagccagagttgacagtacaaagggtcgtggccagccctgcagcttcagcacctgccccacccagagtgggagtcaggtggagccacctgctgggctcccccagaactttgcacacatcttgctatgtattagccgatgtctttagtgttgagcctctggattctggggtctgggccagtggccatagtgaagcctggg

SEQ ID NO: 22998 - DNA, 459 bp, Homo sapiens
  misc_feature (1)...(459): n = a,t,c or g
ggtgtgtnnnnctttgataccgctttgataccagctatgactgattacgaatttaatacgactcactatagggaatttggccctcgaggccaagaattcggcacgaggggattttatttccaaagtgaagacataaaaatagaaatcagcactgagaccatcaccctgagccatggttctagcacattctccttgtcctggtccgacacggctcaagtcacgaatcagagggtgcagatctcagtgaagaaagaaaaagtggtaactatcaccctggataaagagatgtccttttctgttttacttcatcgtgtttggaagaagcatcccgtcaatgttgactttctgggaatctacataccccctacaaacaagttctcacctaaagcccacggactaataggccagttcatgcaggaaccaaagatacacatcttcaatgagagaccaggaaaggac

SEQ ID NO: 22999 - DNA, 522 bp, Homo sapiens
gcttagaactgaaatatttcagattgcctgataaaattacagatttggaaactaggcctagacaggtactcacaacccatggaagtttcactgcttttcttaggtgcccaagctcagagtctgctactttttttgttgtttttgttttttgagacgggctctccatcacccaggccggagtgcaatggtgtgatcacagcactgcaaccttgacttccagggttcaagcctgagcagattcaaggttctctggtccatctcactgtgacagtggttctcatcctaggggccgtttttcccccagggaacatttggcaatgtctggagacatttttggttgttatgcctggggcatgtgctactggcatctagttggtagaggccagagatgctgctgagtatcctataatgcacaggacagcactgctacaaagaattatttgggctgaaatgccatagtactaaagattgagaaactctgtgctataggtagctcttcctttattaccttattaaggacac

SEQ ID NO: 23000 - DNA, 579 bp, Homo sapiens
ggcatggtcactcctagcattcctcactctgttgctaacagcaacagcaataataataagggttacaacttactccataccttactgtctgccaggcattaagctaagtgctttacatatattaagtcatttaatcctcataatgaccctatgaaagagataccatctcaacccaattgacagctggtttgcaagattaggagggatgaaggacccaggggacaatgcgagggaaaactctgaccccggggccccaggctggatgttctttatgcctgtgaaccacagcttatcacatgtctggagttagggaccccacttaaagtgagattttggctggaggtggtggatcatacctataatcccagcactttgggagaccaaggcggaaggactgcttgaggccaggagttcaaaaccagtgtaggtaacagctagaccctatctctacaagaaatttaaaaattagctgggtgtggtggtatgtgcctcaagttccagctactcatgaggctgaggtgggaggatcacttgagcacaggagtttgaagttacagtgagctatgatggcaccactgc

SEQ ID NO: 23001 - DNA, 435 bp, Homo sapiens
  misc_feature (1)...(435): n = a,t,c or g
gctaacatgccactttgacccctggtaaaagtcaagagtgtgcccatgtgccaggaactgacagcctctgcagaaaaattcctgtgatgagagaactcactgtgtgcttttgcgaacactcaggatgttgaaggatagttacaatagttacagatttttcttaactgtactgaaaagatgactctcaggctgcaagaaacactgaaatgccttaaggagtgatgctgtgaagtggctggaaaggagctaaagctggaagcctgggttgtttgataataataggagctctagatccccgaagtgacaggttgtctcttctgaattatcttaaggcagatttcagggctcttccaggctgaagtggaggtaagctgangtgaagggagataagaatctggggcattttgtcctggagcattgtccaatccctgggcg

SEQ ID NO: 23002 - DNA, 412 bp, Homo sapiens
tcactatagggaatttggccctcgaggccaagaattcggcacgagctcagctcccctggagccagctgatcctgtaacgctgctggaggtcagtctgagctaccaagactgtccctagacaaaggtggagtcccccacactgcccaagaccaaatccctcactcaacctgctgaggtgtggatggggaaacagaggcaaaactgaggcacctgatgcattcagcctgctgtgcagcagtgccattgactgccctgatgttcagagagaaacgcacacaaggtttgcccatgagaattggggagcagatggccaagcagataggttatgtctgttttctgagtgatgaagtcaggaagccctgtggctctggaggccacttgtggttcattcttttcccatatccttggcttt

SEQ ID NO: 23003 - DNA, 405 bp, Homo sapiens
aagatttatataatgcatcaaaagccttagaataagaaaagctttttttaaattgctttatctgtatatctgaactcttgaaacttatagctaaaacactaggatttatctgcagtgttgcagggagataattctgccttaaattgtctaaaacaaaaacaaaaccagccaacctatgttacacgtgagattaaaaccaattttttccccattttttctccttttttctcttgctgcccacattgtgcctttattttatgagccccagttttctgggcttagtttaaaaaaaaaatcaagtctaaacattgcatttagaaagcttttgttcttggataaaaagtcatacactttaaaaaaaaaaaaactttttccaggaaaatatattgaaatcatgctggtgac

SEQ ID NO: 23004 - DNA, 478 bp, Homo sapiens
  misc_feature (1)...(478): n = a,t,c or g
tggannacagctatgacatgattacgaatttaatacgactcactatagggaatttggccctcgaggccaagaattcggcacgaggcactgagaccatcaccctgagccatggttctagcacattctccttgtcctggtccgacacggctcaagtcacgaatcagagggtgcagatctcagtgaagaaggaaaaagtggtaactatcaccctggataaagagatgtccttttctgttttacttcatcgtgtttgtaacaatcatcccgtcaatgttgactttctgggaatctacataccccctactaacatgttctcacctannnnnnncggnntannntgccatatcatgctcnaaccntnatacacatcttnaangtgagaccatganaggaccctgaaaagccagaggccatccnggaantgaaggggcaagaacttgatattatcncgnngctnacgngacnnantttgatcgga

SEQ ID NO: 23005 - DNA, 611 bp, Homo sapiens
agattctaccagctatgacatgattacgaatttaatacgactcactatagggaatttggccctcgaggccaagaattcggcacgagatatattttgcctggcaagggaaaactcagatatcagagagtgaccgaagaacagtgtttattgccctaacggtgattagccttgtggggacagttctattctttctcattcggaaaccagattctgaaaatgtcctaggagaagatgagtcttctgatgaccaggacatggaagtcaacgagtctgcccagaacaatctgacaaaggcagtagatgcttttaaaaagtcttttaagttatgtgtcaccaaggagatgctccttcttagtattacaactgcttatacaggtctggaattaactttcttctctggtgtatatggaacctgtattggtgctacaaataaatttggagcagaagagaaaagccttattggactttctggcattttcatcggcattggagaaattttaggtggaagcctcttcggcctgctgagcaagaacaatcgttttggtagaaatccagttgtgctgttgggcatcctggtgcacttcatagctttttatctaatatttctcaca

SEQ ID NO: 23006 - DNA, 483 bp, Homo sapiens
gaatttaatacgactcactatagggaatttggccctcgaggccaagaattcggcacgagggaaagaaggcctatgtttcctagttcaccatcttgatgatagtatactctcaagtatcactttttgaagtataaatgttgccaggtaatttatttctttttgtacagtgtgtaaataaaagggaatcataggtgtaatattttggacttgagtaagacatttggttttgtcctttgtgaggcccatgtctacaaacagaaaaattcaaagcattgataacccaactttacagtttatgcaatcttatgttggagtgtagaaataaggtaatagaatagttacatattaatcccaagacaagactatatagtgtcttaaggttttcctggcattcacaaatatttattaaatgtctgctctatgtaaggtagtgtacagttgagatacataaagtataagatgcaatccttcaaagtgctaatt

SEQ ID NO: 23007 - DNA, 461 bp, Homo sapiens
gagagaggcgctgctgacaccgccgccacaccgccgccacaccgccgctgcctcagtcatgccgaagcacgagttctctgtggacatgacctgtggaggctgtgctgaagctgtctctcgggtcctcaataagcttggaggagttaagtatgacattgacctgcccaacaagaaggtctgcattgaatctgagcacagcatggacactctgcttgcaaccctgaagaaaacaggaaagactgtttcctaccttggccttgagtagcaggggcctggtccccacagcccacaggatggaccaaagggggcaggatgctgatcctcccgctggcttccagacagacctgggacttggcagtcatgccgggtgatggtgttcctgcggagaccctcagttgcctattccttcctagcttccctgcaataaaatcaagctgcttttgttggaaaaaaaaaaaaaa

SEQ ID NO: 23008 - DNA, 527 bp, Homo sapiens
  misc_feature (1)...(527): n = a,t,c or g
gagccagctgagggcaagaaatctgaagatgatggcattggaaaagaaaacttggccatcctagagaaaattaaaaagaaccagaggcaagattacttaaatggtgcagtgtctggctcggtgcaggccactgaccggctgatgaaggagctcagggatatataccgatcacagagtttcaaaggcggaaactatgcagtcgaactcgtgaatgacagtctgtatgattggaatgtcaaactcctcaaagttgaccaggacagcgctttgcacaacgatctccagatcctcaaagagaaagaaggagccgacttcattctacttaacttttcctttaaagataactttccctttgacccaccatttgtcaaggttgtgtctccagtcctctctggaggggtatgttctgggcggaggggccatctgcatggaacttctcaccaaacagggctggagcagtgcctactccatagagtcagtgatcatgcngatcagtgccacactggtgaangggaaagcacgaatgc

SEQ ID NO: 23009 - DNA, 338 bp, Homo sapiens
aaccagtaataaaagtggattcctgttcaacctaacagaaatatcacccaggagaaccagcatgaggaccaggcccatcctagatctgggaccccaaagctactatcccacaaattgttctgtagatagatagatagatagatagatagatagatagatagatagatagatgatagatagatagatagatagatagaaatagaatttaatatcagactctattgccctagtcctgaaattctggtgctgttctagctggagatgtggagatatctactaaacttcaaccaagtgacggaaacttaggggaatgatttttaagagaaagtagatccagg

SEQ ID NO: 23010 - DNA, 447 bp, Homo sapiens
  misc_feature (1)...(447): n = a,t,c or g
anaccgntatgacatgattantaatttacnaccgactcactatagggaatttggccctcgaggccaagaattcggcacgagcagacctgccagctctcggagtccttggtggttgaacttggagaaagaccgcatgaagatacttgtaagcacacatgatccctctgaattgttttactttcctgtaactgcttttgcttttaaaaattgaagaagttttaaacagggctttcatttggtcatccttgcaatccattggggtctagtttggaatctgacaactggaacaaaaagaaccttgaatccggtgcatgccttggttttggtgctgctgctgcttcccaagatcctcagcagggattaagaaggaacccggtgtgcacagcanatccccgaaattggtgggcttgacctcctggcaaattgctgcgtctttccacttgctgt

SEQ ID NO: 23011 - DNA, 809 bp, Homo sapiens
gccaaaaagccaaaagaacatttgtttcaatattgactcagaacctggaaaaatcctcaacctggtttctgacccagaatcaggaattgtagtcaacggtcagcttgttggtgccaagaagcccaacaatggaaaactaagcacctattttggaaaactgggattttatttccaaagtgaagacataaaaatagaaatcagcactgagaccatcaccctgagccatggttctagcacattctccttgtcctggtccgacacggctcaagtcacgaatcagagggtgcagatctcagtgaagaaagaaaaagtggtaactatcaccctggataaagagatgtccttttctgttttacttcatcgtgtttggaagaagcatcccgtcaatgttgactttctgggaatctacataccccctacaaacaagttctcacctaaagcccacggactaataggccagttcatgcaggaaccaaagatacacatcttcaatgagagaccaggaaaggaccctgagaagccagaggccagcatggaagtgaagggggcagaagctgatcatcaccaggggcttacagaaagactacagaacggatctagtgtttggaacggacgttacctgctggtttgtgcacaacagtggaaaaggattcattgacgggcattacaaggattacttcgtgcctcagctctacagctttctcaaacggccttaaaggtttatagtttgggaaattatatatattaatatacatctttcccctgtcacttttgcagatattcttcggtttgaataattaaaatgaacc

SEQ ID NO: 23012 - DNA, 546 bp, Homo sapiens
  misc_feature (1)...(546): n = a,t,c or g
tttgcttttatttcgggtatgcatccacatttcagcatttagtggtcctgaacagcaagtggaaagacgcagcaatttgccaggaggtcaagcccaccaatttcggggatctgctgtgcacaccgggttccttcttaatccctgctgaggatcttgggaagcagcagcagcaccaaaaccaaggcatgcaccggattcaaggttctttttgttccagttgtcagattccaaactagaccccaatggattgcaaggatgaccaaatgaaagccctgtttaaaacttcttcaatttttaaaagcaaaagcagttacaggaaagtaaaacaattcagagggatcatgtgtgcttacaagtatcttcatgcggtctttctccaagttcaaccaccaaggactccgagagctggcaggtctgagtaaccctggtgactattcttttcctcgtgccgaattcttggcctcgagggccaaattccctatagtgagtcgtattaaattcgtagtcatgtcaaaagggtatgcngttcanatattttaattnaac

SEQ ID NO: 23013 - DNA, 558 bp, Homo sapiens
  misc_feature (1)...(558): n = a,t,c or g
ggacccttttgaatatacctaatgatttccttaaaaaagaaattttaaacagacttgtttaatcgtgttctcaaagcatacagtcaagaggtgggactgactgatgctttataggtgtgtgtagggtggtagaggccaaggtgctgccagcaatcctttccatactaggtactggtgaaaattgtttttgtttatgctgtcagcacatttgtgtgggtctctcattgtcccttaacagtgccgcatctcagcctggaagtcagctttaagtcattcaagagaacctcaggctgtttttctgacagtgatgatatgatatacagatacatccacagggtatctattaccagcataatgcattgtaagatggcaaggtggcattttgaaagagcgctgggcaagcagttagcacatctgggcctaccttcagcttcttcatttacaaacttctgaccttttgacactaaagctgctcctttatctttctgagtctcagattcttcatctgtaatctggagttgntaattccagtccttactaccttttagagttggaatg

SEQ ID NO: 23014 - DNA, 421 bp, Homo sapiens
  misc_feature (1)...(421): n = a,t,c or g
tttggaaatccgatatgccatgattacgaatttaatacgactcactatagggaatttggccctcgaggccaagaattcggcacgaggtgagattgaacttttacagaggcattgaaaatgttaatggtggattcttgtggtagttatgaggttaatggagtggggaggtatggtgaaataactgtttcttcttttttcttttcttttcttttttgtttttttttttgacggagtntnactntgncacccaggcanaggttgcagcnatccaaggncactcnactgcnttccancctggncatcaaancaaanccctgtctnaaaancaancaaaaaaccaaaaaanccccccaaaantaantaacccaaanccacacncncncaaagtttgttgaatgagtntatatatnccactgatgaa

SEQ ID NO: 23015 - DNA, 433 bp, Homo sapiens
gctctgctcagcctggtgaaccacacaggccagcgctctgacatgcagaaggtgaccctgggcctgcttgtgttcctggcaggctttcctgtcctggacgccaatgacctagaagataaaaacagtcctttctactatgactggcacagcctccaggttggcgggctcatctgcgctggggttctgtgcgccatgggcatcatcatcgtcatgagtgcaaaatgcaaatgcaagtttggccagaagtccggtcaccatccaggggagactccacctctcatcaccccaggctcagcccaaagctgatgaggacagaccagctgaaattgggtggaggaccgttctctgtccccaggtcctgtctctgcacagaaacttgaactccaggatggaattcttcctcctctgctgggactcctttgcatggcagggc

SEQ ID NO: 23016 - DNA, 846 bp, Homo sapiens
gggaaggcagcaattgtggcaagaaaggaaaagtcctggaggtcaagaaatgagtggcaaggttaggggtgagagggaagagtgaagccctgagaagtgaggtgatggacaggatgtggcctgggagaaacgtttatttgggaaagtgatgactatcctctctttgtcctgggagtcaaggaaatttggcaaacaaccacccctggagtgggtttatgaggggtgggattttgaagcaaaagccagcttttcattagacaagtaggtagagaaagtgtaaacaaaaagtgataatataggagaattacaacgggtcaggagttcagaggctcattggaaggagtgagtaggcttggggtatgtttaaggaggctggttagcaggatggagacagatgactttatatgagttctgggggggtcaggacttttactagagtttactaggaaaccaaatccactgcagaaacaggcatagatttatgtaactgtggtaggggcccattagagatcttgtgttactgatttactaattgtgctactgatttattactaattcattagctgtgacatacactttcagcaagtgactaaaaccttatgacccagagtaaaataattttatatcatgacccaggtagctgtgtgatatgtgtaataagtgggcgtgagtgtctaactaaagattcaccgagcaacacttaacttctactatatgcaacagcctcttatgtttactattctgttctgttctaattcattttctaagaaaatgctggtcatgaaccactgtgttgattttatgatccgttaaaacattacaggtcaggcatggtggctataatcc

SEQ ID NO: 23017 - DNA, 432 bp, Homo sapiens
acctttgaaaaccgctatgactgcctacgaatttaatacgactcactatagggaatttggccctcgaggccaagaattcggcacgaggggtgacttcctgatgttgccatggcatttgtaaactgtcatggcgctagtgggagtgtcttttagcatgctaatgcatgagcagtgaggatgacccgaggtcatttttgttaccatcttggttttggtgggttttggctggttttggccggcttctttaccacttctttttatcagcaaggtctttgtgacctgtacttagtgccgacttcctgtctcatcctgtgagtaagaatgcctaatctctcaggaatgcagcccagtaggtctcaaccttattttacccagcccccattcaagatggagtgactctggttcaaatgcctctgacacatgtgccttatg

SEQ ID NO: 23018 - DNA, 566 bp, Homo sapiens
  misc_feature (1)...(566): n = a,t,c or g
ggcgatgtgatttctgcccagtgctctgaatgtcaaagtgaagaaattcaatgaagcgcgggtaaacggcgggagtaactatgactctcttaaggtagccaaatgcctcgtcatctaattagtgacgcgcatgaatggatgaacgagattcccactgtccctacctactatccagcgaaaccacagccaagggaacgggcttggcggaatcagcggggaaagaagaccctgttgagcttgactctantctggcacggagaagattcacgaaaaggtctaaatgaattgcgtgtgcagggcgcggatttaaagtccaatttctcatgaccaaaaaatgtgtggttttttcccatgtgtcccctaccccccaatttcttgtcccctcttaaagagcagttgtcaccacctgaacaccaaggcattgtattttcatgcccagttaacttatttnnaatntttaagttctctgcttctgcatttggttggttcctgaagcgnanncctgtgaanaacaagtggnnttcagggactncccaagtcnggcaaatgntcggntaaattgaggg

SEQ ID NO: 23019 - DNA, 467 bp, Homo sapiens
  misc_feature (1)...(467): n = a,t,c or g
ttngananccgctatgacatgattacgaatttaatacgactcactatagggaatttggccctcgaggccaagaattcggcacgaggccaaccaaccatgagctcccagattcgtcagaattattccaccgacgtggaggcagccgtcaacagcctggtcaatttgtacctgcaggcctcctacacctacctctctctgggcttctatttcgaccgcgatgatgtggctctggaaggcgtgagccacttcttccgcgaattggccgaggagaagcgcgagggctacgagcgtctcctgaagatgcaaaaccagcgtggcggccgcgctctcttccaggacatcaagaagccagctgaagatgagtggggtaaaaccccagacgccatgaaagctgccatggccctggagaaaaagctgaaccaggcccttttggatcttcatgccctgggttctgcccgcacggaccc

SEQ ID NO: 23020 - DNA, 534 bp, Homo sapiens
  misc_feature (1)...(534): n = a,t,c or g
tctttgancccctttgaanaccnnttgactgattacgaatttaatacgactcactatagggaatttggccctcgaggccaagaattcggcacgagtgaccctcctggctcccctgaattctgtattcaaagatggaacccctccaattgatgcccatacaaggaatttgcttcggaaccacataattaaagaccagctggcctctaagtatctgtaccatggacagaccctggaaactctgggcggcaaaaaactgagagtttttgtttatcgtaatagcctctgcattgagaacagctgcatcgcggcccacgacaagagggggaggtacgggaccctgttcacgatggaccgggtgctgacccccccaatggggactgtcatggatgtcctgaagggagacaatcgctttagcatgctggtagctgccatccagtctgcaggactgacggagaccctcaaccgggaaggagtctacacagtcttcgctcccacaaatgaagccttccgagccctgccaccaagagaacggag

SEQ ID NO: 23021 - DNA, 489 bp, Homo sapiens
  misc_feature (1)...(489): n = a,t,c or g
ggtgnnnnnattgaaacctttgacatgattacgaatttaatacgactcactatagggaatttggccctcgaggccaagaattcggcacgaggctagcaccatcctgagggcagccctgaagctggaaccttccaacaagacgatccacgcagagctctcaaagctggtgaagaagcatgcggcgcagcggagcacggagaccgccttgtaccggaaaatgctgggcaaccccagccggctgcctgctaagtgccctggcaagggtgcctggtccatcccatggaagtggctgtttggggcgactgctgttgccttggggggtgtggcactctctgtggtcatcgctgccaggaactgaccacctaggtggctgccaccccctctgcacaccatggaccctgcctgcgctcccaactcccccaggctccctgtccactgcctccctggtctggcccctcctccgggttaggggagcaaggattgggggtc

SEQ ID NO: 23022 - DNA, 881 bp, Homo sapiens
  misc_feature (1)...(881): n = a,t,c or g
ttgactgattacgaatttaatacgactactatagggaatttggccctcgaggccaagaattcggcacgagagtggacatgacgttcgaggaggaggcacagctcctgcagttgaaggtgaagtgtctgaacaacctggcggcctcgcagctgaagctcgaccactaccgcgcagccctgcgctcctgcagccttgtgctggagcaccagccagacaacatcaaggctctcttccgcaagggcaaggtgctggcccagcagggggagtacagtgaggccatccccatcctgagggcagccctgaagctggaaccttccaacaagacgatcccgcagagctctcaaagctggtgaagaagcatgcggcgcagcggagcacggagaccgccttgtaccggaaaatgctgggcaaccccagccggctgcctgctaagtgccctggcaagggtgcctggtccatcccatggaagtggctgtttggggcgactgctgttgccttggggggtgtggcactctctgtggtcatcgctgccaggaactgaccacctaggtggctgccaccccctctgcacaccatggaccctgccctgcgctccccaactcccccaggctccctgtccactgccctccctggtctggccccctcctccgggttaggggagcaaggattgggggtcgtgcagcccagccagcaggagggactgaggccctctaggaggaaagcccagagggagggggccctcattccttcagacccagttttcccccaccctccttacccgctgggctaggtctncgcagggctggcctantttctctcaaagggctgggggaagcctttccctgctaaancccgcctnnagccaaanccccnaacccgtt

SEQ ID NO: 23023 - DNA, 355 bp, Homo sapiens
gggagaagtgagtgactgttttggatgtatcaggttgcagtgcccactggacagatgtcaaataggcaataagatttgctagccgggaaatcagaaatagagatacatgtgggagttgcctgcatgcacagcaatggtatttacagccctgtaattgactccaaagtctcctgttcaccactgtgcagggtgaatgtggcataggccacccttctatctctaggccttcccctgtctcttcttgctttttgctgttgaaagttgcttttagcttcacaatgcagagggcagtggaagaacagaaaagcaaaacatttcccgagcctgtaattacagtgacaagagtgcttttgtt

SEQ ID NO: 23024 - DNA, 1420 bp, Homo sapiens
ccattagctatcgacatgattacgaatttaatacgactcactatagggaatttggccctcgaggccaagaattcggcacgagctcatcgataaggtcatctccaccatcaccaacaacatccagcagatcattgagatcgaggacacctttgagacccttcgggctgctgtggctgcatcagggctcaacacgatgcttgaaggtaacggccagtacacgcttttggccccgaccaatgaggccttcgagaagatccctagtgagactttgaaccgtatcctgggcgacccagaagccctgagagacctgctgaacaaccacatcttgaagtcagctatgtgtgctgaagccatcgttgcggggctgtctgtagagaccctggagggcacgacactggaggtgggctgcagcggggacatgctcactatcaacgggaaggcgatcatctccaataaagacatcctagccaccaacggggtgatccactacattgatgagctactcatcccagactcagccaagacactatttgaattggctgcagagtctgatgtgtccacagccattgaccttttcagacaagccggcctcggcaatcatctctctggaagtgagcggttgaccctcctggctcccctgaattctgtattcaaagatggaacccctccaattgatgcccatacaaggaatttgcttcggaaccacataattaaagaccagctggcctctaagtatctgtaccatggacagaccctggaaactctgggcggcaaaaaactgagagtttttgtttatcgtaatagcctctgcattgagaacagctgcatcgcggcccacgacaagagggggaggtacgggaccctgttcacgatggaccgggtgctgacccccccaatggggactgtcatggatgtcctgaagggagacaatcgctttagcatgctggtagctgccatccagtctgcaggactgacggagaccctcaaccgggaaggagtctacacagtcttcgctcccacaaatgaagccttccgagccctgccaccaagagaacggagcagactcttgggagatgccaaggaacttgccaacatcctgaaataccacattggtgatgaaatcctggttagcggaggcatcggggccctggtgcggctaaagtctctccaaggtgacaagctggaagtcagcttgaaaaacaatgtggtgagtgtcaacaaggagcctgttgccgagcctgacatcatggccacaaatggcgtggtccatgtcatcaccaatgttctgcagcctccagccaacagacctcaggaaagaggggatgaacttgcagactctgcgcttgagatcttcaaacaagcatcagcgttttccagggcttccagaggtctgtgcgactagcccctgtctatcaaaagt

SEQ ID NO: 23025 - DNA, 1165 bp, Homo sapiens
  misc_feature (1)...(1165): n = a,t,c or g
tgattacgaatttaatacgactcactatagggaatttggccctcgaggccaagaattcggcacgagaaaggaatcaagagcgagagaagtctgcagctaacctggaatacttgaagaacgtcttgctgcagttcattttcttgaaaccaggtagtgaaagagagagacttcttcctgttataaatacgatgttgcagctcagccctgaagaaaagggaaaacttgctgcggttgctcaagatgaggaagaaaatccttcccgttcttctggatgagcatcctatcttcgtagttggtttggacttcgataggttgatggaaggaatacttctattaaccaaatagaatctgtttacaaaaatggttcgtgtgtgttaccattattcttttgtcaaaaagtgtgtatatgtgtttgcatttacatatatttgtacatctgtatgacagatgtattttaaaagtttcaacttgaagtaaaagtacaacagcttgaagtgttgataccaggccacagccctctaactcatgtgatctcccatgcatgctgccagaataaaaccaccaggaatgaattcactccccacttctctggaacctcaggacccgcccatttctcggcagtactgtgaattttgaagttaaactaaattttggtaccataccaactggaatttaggctttaaaaataatgtttcaaggccaggtgtggtgattcatgcctgaaatcccactacttggggaggctgcggctggagaattgcttgaggctagtgagctgtgattgtaccactgcactccagctcggggaacagagcgagaccttgtctctaaaaataataatagtaataaaaataacattttatgactatttattgcaaggtcagatttacagattgttataaattgttgagaaatttttgtgattagaatatgaaggaaaaagctttattggtaaaagtgacatgttaaggggctatgaagtaaatatgctgcagttaattgtgctaagttaaaatacagtttagttatttgctttaaaataaactcttcttcttttctttaaagtatactatctcctcgtgccgaattcttggcctcgagggccaaattccctatagtgagtcgtattaaattcgtaatcatgtnatagcnattagggnntcaa

SEQ ID NO: 23026 - DNA, 499 bp, Homo sapiens
gggagacccaaagggttggaggcagctggcacaagaggctgaggcctggctgaattacccatgctttaagaattgggatgggtccccagtgagctcctggattctgctggctgaaagcaacagtacagacgatgagaccgacgatcccaggacgtatcagaaatatggttacattggaacacatgagtaccctcatttctctcatagacccagcacactccaggcagcatccaccccacaggcagaagaggactggacctgcaccatcctctgaatgccagtgcatcttgggggaaagggctccagtgttatctggaccagttccttcattttcaggtgggactcttgatccagagaggacaaagctcctcagtgagctggtgtataatccaggacagaacccaggtctcctgactcctggccttctatgccctctatcctatcatagataacattctccacagcctcacttcattccacctattctctgaaaatattc

SEQ ID NO: 23027 - DNA, 402 bp, Homo sapiens
ggagcctcccaccagagccgggaggaaaaggcccctgcaatgtggtgacacctccccctttcacactggatccatcttgagccacagtcactggattgactttgctgtcaaaactactgacagggagcagcccccgggccgctggctggtgggcccccaatgacacccatgccagagaggtggggatcctgcctaaggttgtctacgggggcacttggaggacctggcgtgctcagacccaacagcaaaggaactagaaagaaggacccagaacggcttgctttcctgcatctctgtgaagcctctctccttggccacagactgaactcgcagggaatgcagcaggaaggaacaaagacaggcaaacggcaacgtaacctgggctcactgtgctggggcacg

SEQ ID NO: 23028 - DNA, 507 bp, Homo sapiens
  misc_feature (1)...(507): n = a,t,c or g
aacagctatgacatgattacgaatttaatacgactcactatagggaatttggccctcgaggccaagaattcggcacgaggaaatcatatactaacaagtgctagcctgcatcctctgaagtttctctttctcctttgggctactttaaaaataaggccactcataattaaaatattttctgggattgtaatggtgctttcttagtaggaatgagggggtttcataaggaggttggaagtctctccttctgcacacacaaaaattggcaatctttgtcccctttgacagctggtggcatttttctgaaaagctttcaaatcacagatcatttcttcataatgaaatctgtgtggttcaaatacagtgggttgaaattcttatcttatgctgcggtaaaatgctctaatttagattcacaaaaggattctgtaccgtttacttaggagagctgtgcaattgcccataaaaagactgttcagcaccattagtgcataccntaagtggtca

SEQ ID NO: 23029 - DNA, 350 bp, Homo sapiens
  misc_feature (1)...(350): n = a,t,c or g
ggaatgaggggtatggggactgcctgtaatagcactgggattttgcctcccagccaaaatgctccagggtaggcagcaaagaagaaagagtgcgatatgagggtacagtgagtttggcagtccaaattctgttctctgcagcctgtttttgagtagcttgtgaataaagtcacccgactacttgtctaagcacatgtgggtgtgtaactcagttcctggttctcggttctaaaaacagacttttcaactgggaaactttttgggggaaattaactgtacacctatctcggaggtttatttttnttgcaaccagtgaangtngtcctcctcccttccctgnaaaactttcc

SEQ ID NO: 23030 - DNA, 510 bp, Homo sapiens
  misc_feature (1)...(510): n = a,t,c or g
gagcaggcataaaagtaagagcaaaagtcggagcaggagtcaggagaggagagtggaggaggagaancgagggagtgtgagcaggggcaggagccaggagaagagcctccgccagagtcggagccggagcaggagcaaagcgggcagcaggagccggagcaggagccgcagcaagagcaaggacaagaggaagggcaggaagagaagcagagaggagagccgcagtcgcagtcgcagccgcagcaagagtgagaggagcagaaagcgaggcagcaagcgagacagcaaggcgggcagcagcaagaagaggaagaaggaagacactgaccgctcccagtccagatctccatcccgctccgtgtcaaaggagcgggaacatgccaagtctgaatccagccagagggaaggtcgaggagagagtgagaatgctggcaccaatcaggagacccggtccaggtcgagatccaattccaaatcgagaccaaaccttccatcagaatcacgctccat

SEQ ID NO: 23031 - DNA, 584 bp, Homo sapiens
  misc_feature (1)...(584): n = a,t,c or g
gcgnnttnnnacagctatgacatgattacgaatttaatacgactcactatagggaatttggccctcgaggccaagaattcggcacgagaaaaaaattactgccgtaaccctgatggtgatgtaggtggtccctggtgctacacgacaaatccaagaaaactttacgactactgtgatgtccctcagtgtgcggccccttcatttgattgtgggaagcctcaagtggagccgaagaaatgtcctggaagggttgtaggggggtgtgtggcccacccacattcctggccctggcaagtcagtcttagaacaaggtttggaatgcacttctgtggaggcaccttgatatccccagagtgggtgttgactgctgcccactgcttggagaagtccccaaggccttcatcctacaaggtcatcctgggtgcacaccaagaagtgaatctcgaaccgcatgttcaggaaatagaagtgtctaggctgttcttggagcccacacgaaaagatttgccttgctaaagctaagcagtcctgccgtatactgacaaagtaatcccacttgctgccttcccaaaatatgtggcgct

SEQ ID NO: 23032 - DNA, 845 bp, Homo sapiens
  misc_feature (1)...(845): n = a,t,c or g
gcttctctgcctggcctaatggatcttgcatttttgtgcatgagctgccccgagttgatgccaaagttatcctgaatactctctccaaattcccgataaccaccctctgctgtgtcccaaccatctttcggctgcttgtgcaggaggatctgaccaggtaccagtttcagagcctgaggcactgtctgaccggaggagaggccctcaaccctgacgtgagggagaagtggaaacaccagactggtgtggagctgtacgaaggctatggccagtctgaaacggttgtcatctgtgccaatccaaaaggcatgaaaatcaagtctggatccatggggaaggcgtccccaccctacgatgtgcagattgtggatgatgagggcaacgtcctgcctcctggagaaaaggggaatgttgccgtccgtatcagacccactcggcccttctgtttcttcaattgctatttggacaatcctgagaagacagctgcatcagaacaaggggacttttacatcacaggggaccgagctcgcatggacaaggatggctacttttggttcatgggaagaaacgacgatgtgatcaattcttcaagctaccggatcgggcctgttgaagtggaaagtgccctggcagagcatcctgctgtcctggagtcggctgtggtcagcagcccagaccccatcaggggagaggtggtaaaggcatttatagtccttactccagcctactcctctcatgacccagagcactaacgcgggaactccaggacntgttgaaaanggtgactggttcattccaatncccanggagnaattgccaanaacggtttttggaanatccaaagg

SEQ ID NO: 23033 - DNA, 826 bp, Homo sapiens
cattttagaatgacttccttccaaaatgagtatttttatttttttcagagggagggtctcaccctattgctcgggctggactgcagtggtgcgatcatggctcactgtaacctcaacctcccgggttgtgcacttgcccgtatccaggctccctcaggaatgggaggtcccatggaatggtgggacaagggtgagatttggaacgaagccatgccggctctaaatccaccacttggtagagactgggccagtcttctgatttccctaaagctcctcctgagcttgcaaaatggggtttatgatgcccatggcccagccctgttgtgtgagtgcccgatgatgccagattcttcatcacctgaagtgaacccacacaacagggctgggccatgggcatcataaaccccattttgcaagctcaggaggagctttagggaaatcagaagactggcccagtctctaccaagtggtggatttagagccggcatggcttcgttccaaatctcacccttgtcccaccattccatgggacctcccattcctgagggagcctggatacgggcaagtgcacaacccgggaggttgaggttacagtgagccatgatcgcaccactgcagtccagcccgagcaatagggtgagaccctccctctgaaaaaaataaaaatactcattttggaaggaagtcattctaaaatgttacacttgtcttcagcatatctgcaatataataattttctgcataactgaggatcattcacagaaaccaatggcttttctccagcagtgtcttctgaagttgtaacagtaggggcacggggagctat

SEQ ID NO: 23034 - DNA, 458 bp, Homo sapiens
  misc_feature (1)...(458): n = a,t,c or g
gagnnttgaaactctatgacatgattacgaatttaatacgactcactatagggaatttggccctcgaggccaagaattcggcacgaggtgttgtagcacctccgcctgttgtcctgcttccagatgtagagactccttctgaagaagactgtatgtttgggaatgggaaaggataccgaggcaagagggcgaccactgttactgggacgccatgccaggactgggctgcccaggagccccatagacacagcattttcactccagagacaaatccacgggcgggtctggaaaaaaattactgccgtaaccctgatggtgatgtaggtggtccctggtgctacacgacaaatccaagaaaactttacgactactgtgatgtccctcagtgtgcggccccttcatttgattgtgggaagcctcaagtggagccgaagaaatgtcctggaagggttgtaggg

SEQ ID NO: 23035 - DNA, 451 bp, Homo sapiens
tacgactcactatagggaatttggccctcgaggccaagaattcggcacgaggtggctggcaaagatgattcaggcgattctggttttcaacaaccatgggaagccacggctagtccgcttctaccagcgtttcccagaagaaattcaacagcagattgttcgagagactttccatctagtcctcaagcgggatgacaacatctgtaacttcttggagggtggaagtttgattggtggctctgactacaaactgatctaccggcactatgctaccctctactttgtattttgtgtggattcctcagagagtgaacttggaatcttggacctcatccaggtttttgtggaaactctggataagtgtttcgaaaatgtgtgtgaattggatttgatcttccatatggataaggtgcactacatcctccaggaggtggtgatgggtgggatggtg

SEQ ID NO: 23036 - DNA, 645 bp, Homo sapiens
  misc_feature (1)...(645): n = a,t,c or g
gtgatggtactcctttttgcagtggacacaggactatatttctctgtgaagacaaacattcgaagctcaacaagagactggaaggaccataaatttaaatggagaaaggaccctcaagacaaatgacccccatcccatgggggtaataagagcagtagcagcagcatctctgaacatttctctggatttgcaaccccatcatcctcaggcctctctacaagcagcaggaaacatagaactcagagccagatcccttatccaactctcgacttttccttggtctccagtggaagggaaaagcccatgatcttcaagcagggaagccccagtgagtagctgcattcctaccctcacagcaaagcaacaatacaagctaagggatggtaatcctttaaacatacaaaaattgctcgtgttataaattacccagtttagaggggaaaaaaaaacaattattcctaaataaatggtaagtagaattaatggttgaggaggacatacagatgtgggaactgctggggatcaaggaatcantggacaatgaaagcatggtggaaatacagttcagntatcnaanggagnttccatcgaccanaaaaggggctctaaaatancgtngggattanaggatctgngggnnntaat

SEQ ID NO: 23037 - DNA, 471 bp, Homo sapiens
ctcagcctcccaagtagctgggattacaggtgtgcaccaccatgcccggctaattttttgtatttttagtggagacagggtttcaccatgttggccaggctggtctcgaactcctgacctcgtgatccgcctgcctcagcctcccaaagtgctgggattacaggtgtgagccaccacgcctggccccagtccaaaatatttaaagattgtttccttagtgtcttgaagttttgcacaaaattcttttttttgagatggagtctcactctgtcacccaggctggagtgcagtggcgtgatcttggctcactgcaacctctgcctcctgggttcaagcaattctcccacctcagcctcccaagtagctgggattacagacgtgtgccaccatacctgggtaatttttgcatttttagtggagagggagtttcaccatgttggccaggttggtcttgaactcctgacctcaggg

SEQ ID NO: 23038 - DNA, 492 bp, Homo sapiens
  misc_feature (1)...(492): n = a,t,c or g
nannagctatgacatgattacgaatttaatacgactcactatagggaatttggccctcgaggccaagaattcggcacgaggaccagcccaggatgtaccatcacacaatccccgtcatcagcctgtacagcctgagagagagcctggccctcattgcggaacagggcctggagaacagctggcgccagcaccgcgaggccgcggcgtatctgcatgggcgcctgcaggcactggggctgcagctcttcgtgaaggacccggcgctccggcttcccacagtcaccactgtggctgtacccgctggctatgactggagagacatcgtcagctacgtcatagaccacttcgacattgagatcatgggtggccttgggccctccacggggaaggtgctgcggatcggcctgctgggctgcaatgccacccgcgagaatgtggaccgcgtgacggaggccctganggcggncctgaacactgnccaagaaaaactgg

SEQ ID NO: 23039 - DNA, 324 bp, Homo sapiens
gaagatcttcgtgaaggacccggcgctccggcttcccacagtcaccactgtggctgtacccgctggctatgactggagagacatcgtcagctacgtcatagaccacttcgacattgagatcatgggtggccttgggccctccacggggaaggtgctgcggatcggcctgctgggctgcaatgccacccgcgagaatgtggaccgcgtgacggaggccctgagggcggccctgcagcactgccccaagaagaagctgtgacctgcccactggcacacagctggcactggcacacacctgtcccatgcccaccctgagggatcagg

SEQ ID NO: 23040 - DNA, 458 bp, Homo sapiens
ggccctgaggtgggactcacccgtcccgagcaaaccacccatctacaggcatcgacatcctgtactcgggctcccagaaggccctgaacgcccctccagggacctcactcatctccttcagtgacaaggccaactgcagcctggcaactggaggtgccgttccccagaacagagaggacttcggggagaagtcaggaattcggtgttggacgtgggagaaagaagatgtactcccgcaagacgaagcccttctccttctacctggacatcaagtggctggccaacttctggggctgtgacgaccagcccaggatgtaccatcacacaatccccgtcatcagcctgtacagcctgagagagagcctggcctcattgcggaacagggcctggagaacagctggcgccagcaccgcgaggcccgcggcgtatctgcatgggcgcctgcaggcactgggctg

SEQ ID NO: 23041 - DNA, 326 bp, Homo sapiens
cccgtctctactaaaaatacaaagattagctgggcatggtagtgggtgcctgtaatcccagctactcgggaggctgaggcagaaaaatcgcttgaacctgggaggcggagattggagtgagctgagattgcgccattgtactccagcctgggcaacagagcgagactctgtctcaaaaataaataaaatagaataaaataaaataaaatgttaactaaaatcgatttctaatttgggaaacataataactaataccatttgattttaaaaagaattgtatcttaatcattaagctaaagacatagcaagaaaagtcgacgcggccg

SEQ ID NO: 23042 - DNA, 444 bp, Homo sapiens
  misc_feature (1)...(444): n = a,t,c or g
gtgtnnccctttganaccgcttgactncctacgaatttantacgactcactatagggaatttggccctcgaggccaagaattcggcacgagataatttcaagattcaaaatctcattgacttcccaaatttgtgtttttaagaaggctttgctgcaagctaccattcccaatggggcagtcaactctgagaatattacaagccatctttattgccaaaaccagcaagtacacagagtcctgaaacaaggcaggactttggcaatgccttggcctcctggaagcatgtctgagccctcctgttcgcagggatcatgaggaacaagccctcctgagctgctacagttcctgcctgacctcagtctttcgcagtcatcatttgtcctttcttggcacatgggtgctgacctcactcatccttggggtccgggatccagcatcagggg

SEQ ID NO: 23043 - DNA, 408 bp, Homo sapiens
acagctatgacatgattacgaatttaatacgactcactatagggaatttggccctcgaggccaagaattcggcacgagcctgaaaaaatgctcaggaacagaagcgagtgttgtagcacctccgcctgttgtcctgcttccagatgtagagactccttccgaagaagactgtatgtttgggaatgggaaaggataccgaggcaagagggcgaccactgttactgggacgccatgccaggactgggctgcccaggagccccatagacacagcattttcactccagagacaaatccacgggcgggtctggaaaaaaattactgccgtaaccctgatggtgatgtaggtggtccctggtgctacacgacaaatccaagaaaactttacgactactgtgatgtccctcagtg

SEQ ID NO: 23044 - DNA, 596 bp, Homo sapiens
  misc_feature (1)...(596): n = a,t,c or g
ggtatgccagcaatccctgattctctctctgcttggtgttctctggcagcactaagacaaaggaacagggactaggagtttacgtgcttatcacaggtccttggcgtcaggacactagggatgaacatggaggtgatatgttacacagtaaacacctgccaacccctgtactcccctttgctccatcagttatcaggaaggagaactaaggagggaggaagcttattaggttcactgttgaatgatgattgaagagtacctgctgctgtatcttggaagatgacaacatcctttttcattactgtttgattgaaaataatttcaagattcaaaatctcattgacttcccaaatttgtgtttttaagaaggctttgctgcaagctaccattcccaatggggcagtcaactctgagaatattacaagccatctttattgccaaaaccttggcctcctggaagcatgtctgagccctcctgttcgcagggatcatgaggaacaagccctcctgagctgctacagttcctgctgacctcagtctttcgcagcatcatttgcctttcttggncatggggctgacctnctcatccttggggg

SEQ ID NO: 23045 - DNA, 362 bp, Homo sapiens
cgcagaagcaggggaatgggcgtctttacctgggtcgtggccagcgtgtaacccttgggctggagactttcagctgctgcagcaatgtcagtaatttctttctttggacctagagtagtgggccctggagtaggaggcccactgcctgcatctgcctcactctgctcttcatccctggcaagcaagtactccaccccaaaatcatcatcttcctcctcttcatctgcttggctctgtgattgggcatcctcagactcttcagactcagattcctctgatgctgaacttccacttgtttcttcctcctctgaatgttcgtcgacgcggccgcgaattccagatctatgaatcgtagatactga

SEQ ID NO: 23046 - DNA, 448 bp, Homo sapiens
aacagctatgacatgattacgaatttaatacgactcactatagggaatttggccctcgaggccaagaattcggcacgagcagcgggaggtcgcacctgctgggggaagcatgtgatgtgaatcagctgacatcatcttgacgggagccctgtgaggcggacacttaactccagtttcacaggagggagcattggatttgctgcgggagctgaaggccatgcctatcacgctgcacctgctccagtccacccgagtcgggatgtctgtcaacgcccttcggaagcagagctcggatgaggaggtcattgcactggccaagtctctcatcaagtcctggaagaagctcctggatgcttccgatgccaaagccagggagcgggggaggggcatgcctctgcccacatcctcgagggatgcctcagaggccccggatcccagccgcaagagg

SEQ ID NO: 23047 - DNA, 334 bp, Homo sapiens
gggcagaaaagtacactccttctgtaagacacttcactgcctatggtaatgtacacaaatgaagaaatagtgagcacttgaaaacaataatgcaatctatccccccgcccctgcaaccaccacatatacacacctttttttttgttgggtgatatagaccatgtttacatgctgttggaaatcatgcagtagatccattaattgtagaaaaaagcctgtgatgaggtgaggttgctttcttagggataagaatactatattattaacaggaagaaaggtatagagagagtacggatactgaaaggttggtatgcttgccatattttttatatga

SEQ ID NO: 23048 - DNA, 471 bp, Homo sapiens
tttgaataccagctatgacatgattacgaatttaatacgactcactatagggaatttggccctcgaggccaagaattcggcacgagcttcaataccctgtgaagtacaggtattttattttctcccaccttcattccacaaagattcactaatggctcaccatgcacccactactgtgctggggcttaggatggaaccatgagcaaggcgcccaccttgccctcaaggggctatagtctagcagacagcccacatccttgggtagtcccaggtgatcccccatccaagtactgaccaagtttctgggctgaagcattttctggttgtttcaccaaagaaagttccaatttcaaggcaaagaaacttaaggcccagagaggccgaacaagtggcaaaggccaaacagtcagccaggaacagaaggggaagcaaagcaactcgaatttattatgtgtcaactgtgggctatga

SEQ ID NO: 23049 - DNA, 768 bp, Homo sapiens
  misc_feature (1)...(768): n = a,t,c or g
ggcagctgatgaaaacagatggaggccatgctgcaggctgatactgatgggtggagttttgtcatcaggccagcctcatcccgaggtctcctccaccattggccgtagccagcaggcttcagtgctcaccgaaagtaaaatcccctccttcagcaagcccctttggcttccttccgtgactggtcacgttgtctgcctgggctcagcgtggacctgccccatgctgcagaacctggcctcacctggacttttcactagaattgccagcttcctcaacttagcagatcattcactcatgcgggcacaagcaaagatcaacactttcttttttggtaagcttgagttttacaagttattttttggtgatgcgtaagacattgcagtgggaaaccattcaacttgagtttattggagtttgctgttgtagcaggttttaactcaggaacaactcttgtctgatctctccgcccctctgccgggaggcgacattaactgtcctctcggagccggtagcgttgctgtccgagtccccaggacggatctcctgcagacctgccttaatgctcagatcgaagtatttcacaagaatacttgtgtttttaacagcccttcccctggacggtgcggccatgagggcctcatgttacggcattgccttttctttctgtggatccagtatcttcctcggctttttagggacaggaaaaatgcgtctgagagcactctttttaaaaacctggcctgtggataaactggggctgntcaccg

SEQ ID NO: 23050 - DNA, 943 bp, Homo sapiens
  misc_feature (1)...(943): n = a,t,c or g
ggaacaattggctcccacagcaccacctgagctaacccctgtggtccaggactgctaccatggtgatggacagagctaccgaggcacatcctccaccaccaccacaggaaagaagtgtcagtcttggtcatctatgacaccacaccggcaccagaagaccccagaaaactacccaaatgctggcctgacaatgaactactgcaggaatccagatgccgataaaggcccctggtgttttaccacagaccccagcgtcaggtgggagtactgcaacctgaaaaaatgctcaggaacagaagcgagtgttgtagcacctccgcctgttgtcctgcttccagatgtagagactccttccgaagaagactgtatgtttgggaatgggaaaggataccgaggcaagagggcgaccactgttactgggacgccatgccaggactgggctgcccaggagccccatagacacagcattttcactccagagacaaatccacgggcgggtctggaaaaaaattactgccgtaaccctgatggtgatgtaggtggtccctggtgctacacgacaaatccaagaaaactttacgactactgtgatgtccctcagtgtgcggccccttcatttgattgtgggaagcctcaagtggagccgaagaaatgtcctggaagggttgtaggggggtgtgtggcccacccacattcctggccctggcaaagtcagtcttagaacaagggttgnaatgcacttctgtggaagcaccttgatatccccagagtgggtgttgactgctgccactgcttggagaanttcccaangccttcatcctacaaggtcatactgggtgctcaccaanaactgaatctcgaancgcntgttcangannttaganntgcgttggctggccttggnnccnctccataaganattggcttnctaagntaatnaatc

SEQ ID NO: 23051 - DNA, 528 bp, Homo sapiens
  misc_feature (1)...(528): n = a,t,c or g
ttnnnntnttntgctnttgacnnacnnaanctcttctatgacacgattacgaatttaatacgactcactatagggaatttggccctcgaggccaagaattcggcacgaggataggcgagatcgccgccgccgtgtccttcatctccaagtttctccgcaccaaggggctcacgagcgagcgacagctgcagaccttcagccagagcctgcaggagctgctggcagaacattataaacatcactggttcccagaaaagccatgcaagggatcgggttaccgttgtattcgcatcaaccataaaatggatcctctgattggacaggcagcacagcggattggactgagcagtcaggagctgttcaggcttctcccaagtgaactcacactctgggttgacccctatgaagtgtcctacagaattggagaggatggctccatctgtgtgctgtatgaagcctcaccagcaggaggtagcactcaaaacagcaccaacgtgcaaatggttgaacagccaattnacttgtaag

SEQ ID NO: 23052 - DNA, 725 bp, Homo sapiens
  misc_feature (1)...(725): n = a,t,c or g
tatgacatgattacgaatttaatacgactcactatagggaatttggccctcgaggccaagaattcggcacgagcgccctctcttcctctcagccttccgcccccatgcatcccttctacacccgggccgccaccatgataggcgagatcgccgccgccgtgtccttcatctccaagtttctccgcaccaaggggctcacgagcgagcgacagctgcagaccttcagccagagcctgcaggagctgctggcagaacattataaacatcactggttcccagaaaagccatgcaagggatcgggttaccgttgtattcgcatcaaccataaaatggatcctctgattggacaggcagcacagcggattggactgagcagtcaggagctgttcaggcttctcccaagtgaactcacactctgggttgacccctatgaagtgtcctacagaattggagaggatggctccatctgtgtgctgtatgaagcctcaccagcaggaggtagcactcaaaacagcaccaacgtgcaaatggtagacagccgaatcagctgtaaggaggaacttctcttgggcagaacgagcccttccaaaaactacaatatgatgactgttcangttagatataatcgntggtgncacccganganntgggtaaanttgnttttgcttgggtgggccctcctggggangggttanggattaaccangtcacagtgtgaantctgg

SEQ ID NO: 23053 - DNA, 479 bp, Homo sapiens
ggttacttcgcggagctggaacgctggccgcgcaggccctgagggctcgcggccccagtggcgcggccgcgatgcgctccatggcatcttgagggggtgttcccactgatgaagagcaggcgactgggttggagagggagatcatgctggctgcaaagaagggactggacccatacaatgtactggccccaaagggagcttcaggcaccagggaagaccctaatttagtcccctccatctccaacaagagaatagtaggctgcatctgtgaagaggacaataccagcgtcgtctggttttggctgcacaaaggcgaggcccagcgatgcccccgctgtggagcccattacaagctggtgccccagcagctggcacactgagcacctgcactaaattactcaaaatgtgctgtaaagtttcttctttccagtaaagactagccattgcattggctccttctcccataaaaaaaaaaaaaa

SEQ ID NO: 23054 - DNA, 490 bp, Homo sapiens
ttgacatgattacgaatttaatacgactcactatagggaatttggccctcgaggccaagaattcggcacgagtctattcttctcttaaattgcagtgaagcaatatgtctctgccttatgcaggaaaacagggaatgcttcactctgggccacagaatacattaaatttggagtcctgtaactgaagataggaggtttgttatctacatgtaaacatagagtcaggtgttaggaatggagagactggataggaggaggtataaggggagctcttggggtctgccctttcctttagccttctaaataaggcaaatcagtattactaggattcagcaaaacttagacattggcttcttggcttaactatatagcctgttgaagacactggctcaggccaggtgcagtggctcacacctgtaatcccagcactttgggaggctgaagtgggtggatggcttgagcccaggagttcaagaccagcttgggccaa

SEQ ID NO: 23055 - DNA, 831 bp, Homo sapiens
  misc_feature (1)...(831): n = a,t,c or g
gtctaatcttttttcatttatatgcaaaagaaatagttgtaagtaactttttatagcaagatgatacaatggtatgagtgtaatctaaacttccttgtggtattaccttgtatgctgttacttttattttattccttgtaattaagtcacaggcaggacccagtttccagagagcaggcggggccgcccagtgggtcaggcacagggagccccggtcctatcttagagcccctgagcttcagggaaggggccgggccgtgtcgccgcctctggcatcgcctccggttgccttacaccacgccttcacctgcagtcgcctagaaaacttgctctcaaacttcagggttttttcttccttcaaattttggaccaaagtctcatttctgtgttttgcctgcctctgatgctgggacccggaaggcgggcgctcctcctgtcttctctgtgctctttctaccgcccccgcgtcctgtcccgggggctctcctaggatcccctttccgtaaaagcgtgtaacaagggtgtaaatatttataattttttatacctgttgtgagacccgaggggcggcggcgcggttttttanggtgacacaaatgtatantttgctaacagcaattccaggctcagtattgtgaccgcggagccacaagggacccaagcanattcgttgccttacccgatggttttnaaccggnaaaaccgattaaaacctttnggaaacnnaanagaagnanaaaaaangctttnttanggggggnaagttttccctttaggggggnaanttttcctngnaaaggggtnnttttaaaagcnnnaggggaanaaaaa

SEQ ID NO: 23056 - DNA, 392 bp, Homo sapiens
cttctgtgcaaaacatgttacactggagccaggctgttaaattccaaaagtttcaagcctttgactggggaagcagtgccaagaattattttcattacaaccagagttatcctcccacatacaatgtgaaggacatgcttgtgccgactgcagtctggagcgggggtcacgactggcttgcagatgtctacgacgtcaatatcttactgactcagatcaccaacttggtgttccatgagagcattccggaatgggagcatcttgacttcatttggggcctggatgccccttggaggctttataataaaattattaatctaatgaggaaatatcagtgaaagctggacttgagctgtgtaccaccaagtcaatgattatgtcatgtgaaaatg

SEQ ID NO: 23057 - DNA, 537 bp, Homo sapiens
  misc_feature (1)...(537): n = a,t,c or g
gcggcacgagtgggaaagttaccgcagatgattatctgtattttctaattttctacaatgtacaagtaatgcttttgaagtaaggcttatgtttttgaaaagttatggatttaagtcattacttaccagcaaaactttatatgccaagtagctaaaaatcatagttcaactgactttgtggatatttcttagaactatggtcctcaaattgtgagttgctgtagaatggaacttttctgaactattatctcccatccaaatgccatcttttgcactatgagataagaatcactgtcacaaggctgggtgtggtagctcacacctataatcccagcactttgggaggccaaagcaggtggatcaccagaggtcaggaattcaagaccaccctggccaaaatggcaaaacctcatctctactaaaaataaaaaaattagccccgtngtggnggnctgcgccccgggagcncanncaaccngggaaggntngggancnanatccnccggancctnagnacgtgnangttgnctgngggcc

SEQ ID NO: 23058 - DNA, 503 bp, Homo sapiens
gatctgcggggccaggtggccaagcttgaggcagccctaggtgaggccaagaagcaacttcaggatgagatgctgcggcgggtggatgctgagaacaggctgcagaccatgaaggaggaactggacttccagaagaacatctacagtgaggagctgcgtgagaccaagcgccgtcatgagacccgactggtggagattgacaatgggaagcagcgtgagtttgagagccggctggcggatgcgctgcaggaactgcgggcccagcatgaggaccaggtggagcagtataagaaggagctggagaagacttattctgccaagctggacaatgccaggcagtctgctgagaggaacagcaacctggtgggggctgcccacgaggagcttgcagcagtcgcgcatccgcatcgacagcctctctgccagctcagccagctccagaagcagctggcagccaaggaggcgaagcttcaaacctggaggactcactggcccgtgagcgg

SEQ ID NO: 23059 - DNA, 677 bp, Homo sapiens
tatgacatgattacgaatttaatacgactcactatagggaatttggccctcgaggccaagaattcggcacgagcagagaagaatttctctttagttctttgcaagaaggtatagataaagacactttttcaaaaatggcaatggtatcagaattcctcaagcaggcctggtttattgaaaatgaagagcaggaatatgttcaaactgtgaagtcatccaaaggtggtcccggatcatcggtgagcccctatcctaccttcaatccatcctcggatgtcgctgccttgcataaggccataatggttaaaggtgtggatgaagcaaccatcattgacattctaactaagcgaaacaatgcacagcgtcaacagatcaaagcagcatatctccaggaaacaggaaagcccctggatgaaacactgaagaaagcccttacaggtcaccttgaggaggttgttttagctctgctaaaaactccagcgcaatttgatgctgatgaacttcgtgctgccatgaagggccttggaactgatgaagatactctaattgagattttggcatcaagaactaacaaagaaatcagagacattaacagggtctacagagaggaactgaagagagatctggccaaagacataacctcagacacatctggagattttcggaacgctttgctt

SEQ ID NO: 23060 - DNA, 368 bp, Homo sapiens
  misc_feature (1)...(368): n = a,t,c or g
gggagaactccacgtggatctctgattgcgaaaccgtcacatacaccaagagagccacatgggcatgtggccctcaaggctgggtgagagggctcccctgtgtgttgaactatgcaggagggtgatgcggacacatttcaggtggactttgcaaggactgatggatagctacctcagggaccagaatccgtgggaagggatggacctggtgtcccgttcccatctgacaggctctcttttgtcaaggtggtatttttcgtaataaaaggggaagagtaaagactgtccaagcaacagtagctgccaaagagaaaatacgaaatagacactttttttttttgagtcanagtctcactctgccccaggac

SEQ ID NO: 23061 - DNA, 668 bp, Homo sapiens
ctggtctcgaactccagacctcaggtgatccgcccacctcggcctcccaaactgctgggattacaggcgtgagccaccgcgcctggccagggactatactctttttaaaatagacatttgtggggctcacacaatatatgaaatagtaccctctaaaaaagagaaaaaaaaaatcaggcggtcaaacttagagcaacattgtcttattaaagcatagtttatttcactagaaaaaatttaatatcaaggactattacatacttcattactaggaagttctttttaaaatgacacttaaaacaatcactgaaaacttgatccacatcacaccctgtttattttccttaaacatcttggaagcctaagcttctgagaatcatgtggcaagtgtgatgggcagtaaaatacccgagaagatgtttagtagcaattaaaggctgtttgcacctttaaggaccagctgggctgtagtgattcctggggccagagtggcattatgtttttacaaaataatgacatatgtcacatgtttgcatgtttgtttgcttgttgaatttttgaacagccagttgaccaatcatagaaagtattactttctttcatatggtttttggttcactggcttaagaggtttctcagaatatctatggccacagcagcataccagt

SEQ ID NO: 23062 - DNA, 474 bp, Homo sapiens
  misc_feature (1)...(474): n = a,t,c or g
ggcagaggtgaaggaaaagacggaactccttcagactttgtcctctgatgtgagtgagctgttaaaagacaaaactcatctccaggaaaagctgcagagtttggaaaaggactcacaggcactgtctttgacaaaatgtgagctggaaaaccaaattgcacaactgaataaagagaaagaattgcttgtcaaggaatctgaaagcctgcaggccagactgagtgaatcagattatgaaaagctgaatgtctccaaggccttggaggcccgcactggtggagaaaggtgagttcgcattgaggctgagctcaacacaggaggaagtgcatcagctgagaagaggcatcgagaaactgagagttcgcattgaggccgatgaaaagaagcagctgcacatcgcagagaaactgaangaacggtcgacgcggccgcgaattccagatctatgaatcggagatactgaaaaaccccgcg

SEQ ID NO: 23063 - DNA, 747 bp, Homo sapiens
  misc_feature (1)...(747): n = a,t,c or g
ggacacgctcatgactgtgaaacagtatgaggctgccaggctggaatatgatgcctaccgaacagacttagaggagctgagtctaggcccccgggatgcagggacacgtggtcgacttgagagtgcccaggccactttccaggcccatcgggacaagtatgagaagctgcggggagatgtggccatcaagctcaagttcctggaagaaaacaagatcaaggtgatgcacaagcagctgctgctcttccacaatgctgtgtccgcctactttgctgggaaccagaaacagctggagcagaccctgcagcagttcaacatcaagctgcggcctccaggagctgagaaaccctcctggctagaggagcagtgagctgctcccagcccaacttggctatcaagaaagacattgggaagggcagccccagggtgtgggagattggacatggtacatcctttgtcacttgccctctggcttgggctcctttttctggctggggcctgacaccagttttgcccacattgctatggtgggaagaggacctggaggcccagaagttgctgccctgtctatcttcctggccacagggcttcattcccagatcttttccttccacttcacagccaacggctatgacaaaaccactccctggcaatggatcactcctcaagctggggtgtgctccctgacaaatgacanacccgaaaatgcctgtcaancaatggaactctcccgnntcccctgggcaa

SEQ ID NO: 23064 - DNA, 419 bp, Homo sapiens
atcagctatgacatgattacgaatttaatacgactcactatagggaatttggccctcgaggccaagaattcggcacgagagaagggggaaaagatgcttgtaagggagattcaggtggtcccttagtttgcaaacacaatggaatgtggcgtttggtgggcatcaccagctggggtgaaggctgtgcccgcagggagcaacctggtgtctacaccaaagtcgctgagtacatggactggattctggagaaaactcaagcagtgtgaatgggttcccaggggccattggagtccctgaaggacccaggatttgctgggagagggtgttgagttcactgtgccagcatgcttcctccacagtaacacgctgaaggggcttggtgtttgtaagaaaatgctagaagaaaacaaactgtcaca

SEQ ID NO: 23065 - DNA, 408 bp, Homo sapiens
ggggagatgaaaaattaggcattctaactgggtaaccaggagccgacaacaactcctgacgcaatggttcagccttttactaccatcccatttccaccacctccgcagaatggaattcccacagagtatggggtgccacacactcaagactatgccggccagaccggtgagcataacctgacactctacggaagtacgcaagcccacggggagcagagcagcaactcacccagcacacaaaatggatctcttacgacagaaggtggagcacagacagacggccagcagtcacagacacaaagtagttgaaaattcagagagtaaatctaccccgaaacggctgcatgctctaatattcctttccgcttccgggaccctgaccttcggcagatgtttgggcagtttgcg

SEQ ID NO: 23066 - DNA, 530 bp, Homo sapiens
  misc_feature (1)...(530): n = a,t,c or g
gtttagtgcctaacctctgaaacaactttgttcttctagcttggtggaaccgtgggggacatagaaagcatgccctttattgaggccttccgtcagttccaattcaaggtcaaaagagagaacttttgtaacatccacgtcagtctagttccccagccaagttcaacaggggaacagaagactaaacctacccagaatagtgttcgggaacttagaggacttgggctttccccagatctggttgtatgcaggtgctcaaatccacttgacacatcagtgaaggagaaaatatcaatgttctgccatgttgagcctgaacaaatatgatcgcttgctggagacctgctctattgcccttgtggggcaaatacacnaagttctcagactcccatgcctctgtcaataaagntctggagcaatntgcactgggcaacaancacaaattgggaatccagtncatanattctgcggacttggagccatcactcncaanaaaaccgtgngcncacaancttggaaanccctgtagg

SEQ ID NO: 23067 - DNA, 586 bp, Homo sapiens
  misc_feature (1)...(586): n = a,t,c or g
aggacttgggctttccccagatctgggngtatgcaggtgctcaaatccacttgacacatcagtgaaggagaaaatatcaatgttctgccatgttgagcctgaacaagtgatctgtgtccacgatgtctcatccatctaccgagtccccttgttgttagaggagcaaggggttgtagattattttcttcgaagacttgaccttcctattgagaggcagccaagaaaaatgctgatgaaatggaaagagatggctgacagatatgatcgcttgctggagacctgctctattgcccttgtgggcaaatacacgaagttctcagactcctatgcctctgtcattaaggctctggagcattctgcactggccatcaaccacaaattggaaatcaagtacatagattctgcggacttggagcccatcacctcgcaagaagagcccgtgcgctaccacgaagcttggcagaagctctgtagtgctcatggagtgctggttccaggaggatttggtgttcgaggaacagaaggaaaaatccaagcaattgcctgggctcggaatcagaaaaagccttttttgggcgtgtgctta

SEQ ID NO: 23068 - DNA, 363 bp, Homo sapiens
ggtttgagccaggttgcagtgacggtccaggctctcctggaacttgccccacccaagcaacagcagcaccagttatctgctgtttgaggatccccaggacggtgggcactggcctggccaaaacaaggaacaggacaccgtgattgctgctgccagctgtctgcttaaacaaagctcttgtgtgttctcagaagggaccgttcccatgattcctaacaggaatattttgcttcatttctccattttaggggaggttatttccatttccattgaatttttttacgaagacaccattggttttctcagatgaaacttctcttactgaaaacccagcacctaacttggctgtgttttcctggaaaa

SEQ ID NO: 23069 - DNA, 893 bp, Homo sapiens
ggaaaatctgtaggtcagccatgttgtagggaatgaaagaacattttcagctgagaacactgagagtgtgacacaactaccgcctgccaccactcccggctaatgttttgtatttttagtagagaaggggtttcactgtgttagccaggatggtctccatctcctgacctcatgatctgcccgcctcggcctcccaaagtgtggggattacaggtgtgagccaccacacccggccttaatttatttttctagtctgcaggtaattctttttaattctctccactctcctatgatcttatgaggtagggactgtcattatttctcccactttataatgaacaatcagtaaagacagggaagataaccaaatgacatacaaggtggggtccaccccatgaggctgcaggcttggagctttgctttgtcttaaaaatgagaacatgagctgcccacctgttgagacaagaaacaggaaaggcttaaaaaactggcttgttgtgtacaactatccgtggggctgcagtgaacgggctggcagtgcccaggtgcaggctgaaccctgggacaatcacattcagcatccaagggcccccgtaatagcttaatgtttgaattgaacccctggggttgccttgaaggagagaggtcgtggaagtatgttcaaggggtaaggatgggcacgggagatgggcctgaaagccaagctctaccccacccaccttgccccatgagaaatagaaccttcatctttaattgcctaacgagaaaactggggctggccagatgtggtggctcatgtctgtgatcccagcactttgggaggccgaggcgggcagatcacttgaggtcaggagttcgagatcaccctggtcaacatggtgaaaccccgtctt

SEQ ID NO: 23070 - DNA, 332 bp, Homo sapiens
ttttattctaatgtgaaccatggccctgaaagctgataacaagcttggctgagcagagggaactaggggtcggcagaaaggattatgggtggaaaacattggctcttccttggggagtgatgctggggaaagggaagagagtggctcagcctgcaggtaaataggctagaaaagccaaggccaaaggctggaggggagaggacagtcagcatgtccagcctggggtctgggtgtagggttatcccttctccctgtgccgtcgacgcggccgcgaattccagatctatgaatcgtagatactgaaaaaccccgcaagttcacttcaactgtgc

SEQ ID NO: 23071 - DNA, 435 bp, Homo sapiens
  misc_feature (1)...(435): n = a,t,c or g
tccttgncncccctntgaatnccctgctatgacatgattacgaatttaatacgactcactatagggaatttggccctcgaggccaagaattcggcacgagcggggacgtggctcccaactttgaggccaataccaccgtcggccgcatccgtttccacgactttctgggagactcatggggcattctcttctcccaccctcgggactttaccccagtgtgcaccacagagcttggcagagctgcaaagctggcaccagaatttgccaagaggaatgttaagttgattgccctttcaatagacagtgttgaggaccatcttgcctggagcaaggatatcaatgcttacaattgtgaagagcccacagaaaagttaccttttcccatcatcgatgataggaatcgggagcttgccatcctgtngggcatgctggatc

SEQ ID NO: 23072 - DNA, 466 bp, Homo sapiens
ggaccctgggagcttgtgtggagtaaaagtacctttaatagaagcctagggaaccacggacatttaaagagaaagaggagccagttatagagaggtagaaggaaattcctgaagagatgggaagccatgctcaaggggtcacagtgagatggacaggcacttcgtccgtggacagggtttgggatccactggtgagctgataggagtggaggagcagcagcctggaggcagagtgattggagggtgattgcagggtgtagcaagggaggccagcagtgggcaaaataagcaggtaatagcttcttagaaacagcaaggaaatcctttcagaaactgattttataaaagtcatgtggctattttaagcagataacaacatatattactgctacattgcttcatgatctcccagcacattaaaatgtgtcattgaatcctaattttaaaactttgggtgcattttagt

SEQ ID NO: 23073 - DNA, 338 bp, Homo sapiens
gaataaaataaaaacgtaacactaaaatagttcttcaagaaaacataagttttgtgacgttgggctaggcaaaagatttccctgtagatggcagggaaagaacttataccacgaatgaattagataagttggacttcagcaaaattgaaaacttctactacttgaatggcaaaaagtaaatgaaaaaataagctacatactgagataaaatattttctaccaataacaaggaggaaaattaaacaagactaaaaatgacacagaagatagaattagtggatgaggacatttaaacagctgtcataactgagtaaagcagaaacatgttaagtagagac

SEQ ID NO: 23074 - DNA, 431 bp, Homo sapiens
cgcggccgcgtcgactcaggaggttgtggaatttctttcttctccccttcttccctcccaaaagcttagctatgtataaagtgccacagataggaaacagctgttaattacaaagagaaagaattgtcatagcatcttattttgttcctagttttataacattaccatccttcgttttgaactacagatgttgtagtgggttttggaggagggagtggagtaagatgccctcccacttttatcagtttagtagtagtactgagaaaaatcccttcagctctaagaacactgaaaaatccaccgattttttgggtaagcttcttggcaataccctgtggatctgaaacagctaaaaaaatgaatttgaattgcgccagataggtcaataccaagcttctgattcctcctcacatatgaaaagtgaaagttgt

SEQ ID NO: 23075 - DNA, 657 bp, Homo sapiens
gctatgacatgattacgaatttaatacgactcactatagggaatttggccctcgaggccaagaattcggcacgagactttgagggtcttgaatgggactgagcttgccttggtggtgacatcagcagagaagtcagtagttgaagtcatcttccctttgagagttcaagtgctctcagtatggctgagcatgttggataaggagaatgcagaaaaggacaaagtaatttcatattccatgttaatgacagaagtcttctggctttagtgatcttgaacttttttttctagggtttacactgtgattttgcttgcctgatgttcaaacacctggtacacaaaccatcggaggagagagtaagagaaataattatcaatgctgttcggatagaacaggagttcctcactgaggccttgcctgtgaagctcattgggatgaattgcactctaatgaagcaatacattgagtttgtggcagacagacttatgctggaactgggttttagcaaggttttcagagtagagaacccatttgactttatggagaatatttcactggaaggaaagactaacttctttgagaagagagtaggcgagtatcagaggatgggagtgatgtaagtccacagagaattcttttaccttggatgctgcttct

SEQ ID NO: 23076 - DNA, 387 bp, Homo sapiens
ggaaaaccaaacatgctttatttcatttttttcacaatttatttaaacatctcacatatacaaaataggtacaatttaatttttctgcttgcccaagaaacaaagcttctgtggaaccatggaagaagatgaaaatgagactggcaaagaacaaatgctgaatctgaagaagatttgggcaaataatctgcatacttttaattgggaataagatggaaaatatgaatgctaaatcaaattttttaaaaaatacaccacacgatacaactcaatacaggagtatttcttctcaaattcttctagcaccatcaacattcttcaagtatctgaaatactattaattagcacctttgtattatgaacaaaacaaaacaaggacctcagttc

SEQ ID NO: 23077 - DNA, 474 bp, Homo sapiens
gcagacctctgtggcctgggaaggatggacaagggtataagctgctggctacctaaggttgcaaggacaatgaacaggctggtatcacccctgctctttgatggtttcaggacagactcacagaatcacagaatcgaagaggtggaatgcgacccctgtgatggaaccttaccaatttctaaggctgctactttacttctttagtaattttaactgctaggcatatctacttaaatataacccaaactgaccttgcattgctcattgttttgtcctgtaaaggtaaagagatgagagctagtttccataagaagttatcaactatttgaaggcagccataatccctcttctctctgggctaaatgactacattcctcaccctcctgcagcctggtttccgctctcactaaaagtgctcaaactgccacccttacctccctaaactcctcagatgcatccagcaggcataattcc

SEQ ID NO: 23078 - DNA, 453 bp, Homo sapiens
  misc_feature (1)...(453): n = a,t,c or g
tttgaannccnttancngntatgacatgattacgaatttaatacgactcactatagggaatttggccctcgaggccaagaattcggcacgaggtacctgcaggcctcctacacctacctctctctgggcttctatttcgaccgcgatgatgtggctctggaaggcgtgagccacttcttccgcgaattggccgaggagaagcgcgagggctacgagcgtctcctgaagatgcaaaaccagcgtggcggccgcgctctcttccaggacatcaagaagccagctgaagatgagtggggtaaaaccccagacgccatgaaagctgccatggccctggagaaaaagctgaaccaggcccttttggatcttcatgccctgggttctgcccgcacggacccccatctctgtgacttcctggagactcacttcctagatgaggaagtgaagcttatcaag

SEQ ID NO: 23079 - DNA, 752 bp, Homo sapiens
gggacaggctgcttcttcgccagaaccaaccggttgcttgctgtcccagcggcgccccctcatcaccgtcgccatgcccggaggtctgcttctcggggacgtggctcccaactttgaggccaataccaccgtcggccgcatccgtttccacgactttctgggagactcatggggcattctcttctcccaccctcgggactttaccccagtgtgcaccacagagcttggcagagctgcaaagctggcaccagaatttgccaagaggaatgttaagttgattgccctttcaatagacagtgttgaggaccatcttgcctggagcaaggatatcaatgcttacaattgtgaagagcccacagaaaagttaccttttcccatcatcgatgataggaatcgggagcttgccatcctgttgggcatgctggatccagcagagaaggatgaaaagggcatgcctgtgacagctcgtgtggtgtttgtttttggtcctgataagaagctgaagctgtctatcctctacccagctaccactggcaggaactttgatgagattctcagggtagtcatctctctccagctgacagcagaaaaaagggttgccaccccagttgattggaaggatggggatagtgtgatggtccttccaaccatccctgaagaagaagccaaaaaacttttcccgaaaggagtcttcaccaaagagctcccatctggcaagaaatacctccgctacacaccccagccttaagtct

SEQ ID NO: 23080 - DNA, 688 bp, Homo sapiens
gcattttaaccagcagtgccagtgtcatctttgagggcgtcgatatcaagaatggaactgaagaccttccctatgccatgaaacccattgactactacacagagactaagatcttacaggagagggcagttctgggcgccaacgatcctgagaagaatttcttaaccacagccatccgccctcatggcattttcggcccaagggacgcggcagttggtacccatcctcatcgaggcagccaggaacggcaagatgaagttcgtgattggaaatgggaagaacttggtggacttcacctttgtggagaacgtggtccatggacacatcctggcggcagagcagctctcccgagactcgacactgggtgggaaggcatttcacatcaccaatgatgagcccatccctttctggacattcctgtctcgcatcctgacaggcctcaattatgaggcccccaagtaccacatcccctactgggtggcctactacctggccctcctgctatccctgctggtgatggtgatcagtcctgtcatccagctgcagcccaccttcacacccatgcgggtcgcactggctggcacattccactactacagctgcgagagagccaaaaaggccatgggctaccagccactagtgaccatggatgatgctatggagaggaccgtgcagagctttcgccacc

SEQ ID NO: 23081 - DNA, 386 bp, Homo sapiens
ggaaaacttgacctcagtgtaactgaagctgttgttgctggaattgctaaagcttgtggaaaagctggatgtgctctccttggaggtgaaacagcagaaatgcctgacatgtatccccctggagagtatgacctagctgggtttgccgttggtgccatggagcgagatcagaaactccctcacctggaaagaatcactgagggtgatgttgttgttggaatagcttcatctggtcttcatagcaatggatttagccttgtgaggaaaatcgtggcaaaatcttccctccagtactcctctccagcacctgatggttgtggtgaccagactttaggggacttacttctcacgcctaccagaatctacagccattcactgttacctgc

SEQ ID NO: 23082 - DNA, 331 bp, Homo sapiens
gggaaatatatatataatagagacaagatctcgttctgttgcccaggctggaatgctatcatagctcattgcagccttgaacttctgagctcaagcgatcctcccacattaaccgcccaaatagctgggactacagatgcatgccatcccacctggctaatttttaaatttttcgtagagacgggggtcttgcttcattgcccaggctgggcactggttggcttaaatcctgactttgttatttattatgcctctgatttgggcaagttactaagcttttctaatctgcattttttgttgttgttgttgccccagaatggaccccatgtaa

SEQ ID NO: 23083 - DNA, 372 bp, Homo sapiens
ggaaaatatgtgtgcaaagtgcctattggatgcctttataaagttctttcagaacccagactgtgggttcttaaaattcagaagataagactacttgttccataaaagaataggtgaaaggagtgagggttgaaacaggtggttatacttttttccttttgttcttccaggccacacgtgtctacacttagcctctatccatggctacctgggcatcgtggagcttttggtgtccttgggtgctgatgtcaatgctcaggagccctgtaatggccggactgcccttcacctcgcagtggacctgcaaaatcctgacctggtgtcactcctgttgaagtgtggggctgatgtcaacagagttacctaccaggc

SEQ ID NO: 23084 - DNA, 724 bp, Homo sapiens
ggcgctattcagtataaacctgctctcaacattcatgtgcaagtctttgagtggacatatatttgcgtttctcttgagtgaatgcaccttgttgggtcacgtggcttaacttaaaaaaattttaatcactgtggtgcatatgtagtgattattagtgattatctcataattttattttcttgtttaatgatgttgagtgtatttcatttgtattttagtttgcaaatgtttgttcaaattcttcacctgtttttaatgaagacgtacgacttatttttgtgttctgaacataagttctttgtcacataaaatgtgctatgaatgttgagttttaaatactccaaatgaatggctagagaattactatttgtagaaatatttacatgtcaaagggatgctaacaatttactttattgctctaaaatataaaagtgccagaatgctgtggagttttagtggaaaacatgatagctggtgttactgagtaaatttgagtgttaaatgtcaatgtaagctaacggccaagatagggaccactgcagggtggttacttgcagctatgactcaactggtccttcactgccaaacatacctggggttggatcattggcctgaccgtttgcaaattgaggaaccttagggcaaatcaagtgaacttctgaactgccttcgtcttcagttatatggggatttccccacttttgagatccttgtaagggattat

SEQ ID NO: 23085 - DNA, 778 bp, Homo sapiens
gcgagagtctcttgtcggccgagtagcagccaggaaggagagactgggatggttttttatctgttgctttcttaaatcaagggccgccgggccggagatggatggagggaccggggatttgggaactcgaaaacgagctgagggaagggagcctgtggaaatagactggagtctgggtagtgtcgtttcctagagaatggtctcgaagtaacttctcggtaaagtcttcacggaatttccagaccacacttgcccactgggtggcttttaggacccgagacgtgtgcaggcttttccagccaaaatgaagtttaatccctttgtgacttccgaccgaagcaagaatcgcaaaaggcatttcaatgcaccttcccacattcgaaggaagattatgtcttcccctctttccaaagagctgagacagaagtacaacgtgcgatccatgcccatccgaaaggatgatgaagttcaggttgtacgtggacactataaaggtcagcaaattggcaaagtagtccaggtttacaggaagaaatatgttatctacattgaacgggtgcagcgggaaaaggctaatggcacaactgtccacgtaggcattcaccccagcaaggtggttatcactaggctaaaactggacaaagaccgcaaaaagatcctcgaacggaaagccaaatctcgccaagtaggaaaggaaaagggcaaatacaaggaagaaaccattgagaagatgcaggaataaagtaatcttatatacaagctttgattaaaacttgaa

SEQ ID NO: 23086 - DNA, 335 bp, Homo sapiens
tctcaccccacagaatgagcggtccatttacaggaggccaatttagtaaagagatgtgccaccacatgtcaacagctaaaagaccattagggtagacaatttaagtaaaattataaactaatatttctggaagcataaacagtgattcaaacagggctaaatataaaaatcccaagggaaaaagtcaaaacaggccataaattatccgtgacaatatacataagaaactgtattttaaaacacatttttttctgtttaataaagttgtgtttcaaagtcatgtaatacttggtctaacacacacaacaacaaaatactactggaaccaacaacag

SEQ ID NO: 23087 - DNA, 438 bp, Homo sapiens
gaatttgaaagtcaaagtcttatttgataaagatgtgaatgagagaaatacagtaaaaggatttaggaagttcaacattttgggcacgcacacaaaagtgatgaacatggaggagtccaccaatggcagtctggcggctgaatttcggcacctgcaattgaaagaacagaaaaatgctggcaccagaacgaatgagggtcctctcatcgttactgaagagcttcactcccttagttttgaaacccaattgtgccagcctggtttggtaattgacctcgagacgacctctctgcccgttgtggtgatctccaacgtcagccagctcccgagcggttgggcctccatcctttggtacaacatgctggtggcggaacccaggaatctgtccttcttcctgactccaccatgtgcacgatgggctcagctttcagaagtgct

SEQ ID NO: 23088 - DNA, 506 bp, Homo sapiens
  misc_feature (1)...(506): n = a,t,c or g
tttgganaccgttgtgacacgattacgaatttaatacgactcactatagggaatttggccctcgaggccaagaattcggcacgagataatacagagcaagggatgtgacagtgacagggttgagaggaattctttggatagtagttacacttcagggaaaagaggggtccagaaaggtctcccagagagggtgacatttgataagagaaaggcagagactatttgccaccttgaaaggggcttgacagattatgctgtaggctttgaaagcttttgaaaacctgagggagtctttttttaagtgattactttgaaagagctcatttgcatatataaaacctggatttggggagcccttaagggtccctttaagtgtcattttacatcataactgctaatttactacaataagtgaccctaggctaatttaaacgtagattgaaagattgaataaaatatattttaatttgctaggaatcttaccttaagggtagttagtgnatttt

SEQ ID NO: 23089 - DNA, 442 bp, Homo sapiens
gccgaaacgtacatcacttctggttgccagtctttaaaacacacagctctgagacgagactaaggggtgaagtaccttccctgtgagctcagaactttcacttaaaaacgcctaagcctagaggttgatgacatcacatgggctgtgtgtaatgtgtttgtagcctcattcacactgtgaataacttgttaaattgcatattttgaggtgtattttgaagctcttaggacatagttttagggacaaaaacaaaccccctagaatactgtttttaaccatagggcacttgttacctgcctctatatactgtaatctgaaagtaaagtttctagaatatttttgatgaaagtttcgggccgggcatggtggctcatgcctgtaatcctagcactttgggaagccaaggcgggtggatcactttaggccaggagttgagattacc

SEQ ID NO: 23090 - DNA, 406 bp, Homo sapiens
ggggcgaggcggctggggaccgcggggcggacgggagcgagtatgtccgctctgactcggctggcgtctttcgctcgcgttggaggccgccttttcagaagcggctgcgcacggactgctggagatggtggagtccgtcatgccggtggtggtgtgcacattgagccccggtatagacagttcccccagctgaccagatcccaggtgttccagagcgagttcttcagcggactcatgtggttctggattctctggcgcttttggcatgactcagaagaggtgctgggtcactttccgtatcctgatccttcccagtggacagatgaagaattaggtatccctcctgatgatgaagactgaaggtgtagactcagcctcactctgtacaagagccaggtgagaattt

SEQ ID NO: 23091 - DNA, 513 bp, Homo sapiens
  misc_feature (1)...(513): n = a,t,c or g
tnnnnntttganttgatnccnatcagctatgacatgattacgaatttaatacgactcactatagggaatttggccctcgaggccaagaattcggcacgagaacaacttcttccactccccctaaaatgatgctaaaaacatcatctgttcctgtggtatcccccaacacggatgagtttttagatcttcttgccagctcacagagtcgccgtctggatgaccagagggctagtttcagtaatttgccagggcttcgtctaacacaaaacagccagtcggtacttagccacctgatgactaatgacaacaaagaggctgatgaagatttctttgacatccttgtaaaatgtcaaggatccagattagatgatcaaagatgtgctccaccacctgctaccacaaagggtccgacagtaccagatgaagactttttcagccttattttacggtcccagggaaagagaatggatgaacagagagttcttttacaaagagatcaaaacagagacactg

SEQ ID NO: 23092 - DNA, 345 bp, Homo sapiens
caccctcaaacgcgcatgtccagagaagtattaatgccttaatagactactgaaggttaactatttacatcattctaaaaatattttaagctgtattacagtgctataaattctccttttaaggaaaaaagtaatagattgtttccttaccgtgtttgaaaggaaaaaaaataaatccatagtaactaatggtctgccgattttttccctgaatttttaaactccaacaaagcattattttgcaaaaagtcctttagcccaaagtcagtgtctctgttttgatctctttgtaaaagaactctctgttcatccattctctttccctgggaccgtaaaataaggctg

SEQ ID NO: 23093 - DNA, 677 bp, Homo sapiens
ttgactgttgcgaacctaatacgactcactatagggaatttggccctcgaggccaagaattcggcacgaggaaattcttgctaagcaaaaacctcttattgccaaaccttctgcaaagctactctttgtcaacagactgaaggggaaaaaatacaaaacgaattcctccactaaagttctccaagatgccagtaattctattgaccaccgaattccaaattctcagaggaaaatcagtgcagatactattggagatgaagggttctttgacttattaagccgatttcaaagcaataggatggatgatcagagatgttgcttacaagaaaagaactgccatacagcttcaacaacaacttcttccactccccctaaaatgatgctaaaaacatcatctgttcctgtggtatcccccaacacggatgagtttttagatcttcttgccagctcacagagtcgccgtctggatgaccagagggctagtttcagtaatttgccagggcttcgtctaacacaaaacagccagtcggtacttagccacctgatgactaatgacaacaaagaggctgatgaagatttctttgacatccttgtaaaatgtcaaggatccagattagatgatcaaagatgtgctccaccacctgctaccacaaagggtcccgacagtccagatgaag

SEQ ID NO: 23094 - DNA, 1063 bp, Homo sapiens
gatcttgggcgccgccagtctttagcaccagttggtgtaggagttgagacctacttcacagtagttctgtggacaatcacaatgggaatccaaggagggtctgtcctgttcgggctgctgctcgtcctggctgtcttctgccattcaggtcatagcctgcagtgctacaactgtcctaacccaactgctgactgcaaaacagccgtcaattgttcatctgattttgatgcgtgtctcattacccaaagctgggttacaagtgtataacaagtgttggaagtttgagcattgcaatttcaacgacgtcacaacccgcttgagggaaaatgagctaacgtactactgctgcaagaaggacctgtgtaactttaacgaacagcttgaaaatggtgggacatccttatcagagaaaacagttcttctgctggtgactccatttctggcagcagcctggagccttcatccctaagtcaacaccaggagagcttctcccaaactccccgttcctgcgtagtccgctttctcttgctgccacattctaaaggcttgatattttccaaatggatcctgttgggaaagaataaaattagcttgagcaacctggctaagatagaggggctctgggagactttgaaaaccagtcctgtttgcacggaagccccacttgaaggaagaagtctaagagtgaagtaggtgtgacttgaactagattgcatgcttcctcctttgctcttgggaagaccagctttgcagtgacagcttgagtgggttctctgcagccctcagattatttttcctctggctccttggatgtagtcagttagcatcattagtacatctttggagggtggggcaggagtatatgagcatcctctctcacatggaacgctttcataaacttcagggatcccgtgttgccatgggaggcatgccaaatgttccatatgtgggtgtcagtcagggacaacaagatccttaatgcagagctagaggacttctggcagggaagtggggaagtgttccagatagcagggcatgaaaacttagagaggtacaagtggca

SEQ ID NO: 23095 - DNA, 709 bp, Homo sapiens
ggctctcagtgtctgagttaaatgaaatcctggaagaaattgagactgccattaaggagtactctgaggagctggtgcagcagttggctttacgagatgaactggagtttgaaaaggaagtgaaaaacagctttatttctgttcttattgaagtgcaaaacaaacagaaagagcacaaagaaacagcaaaaaagaaaaagaaactaaaaaatggcagctctcagaatgggaagaatgagagaagtcatatgcccggcacacgcttcagcatggaagggatctcaaatgtcattcagaatggcctccgccacacctttggaaattcaggtggagagaaacagtatttgactacagtcattccttatgagaaaaaaaacggaccaccgtctgttgaagatcttcaaatattaacaaaaattctttgtgccatgaaggaggacagtgaaaaagttccgagcttgttaactgattatattctgaaagttctgtgtcctacatagagcagcaactttatctgcggtgggctccaagctagatttccgacagcattattctgagagctggctaccattacccttcttgctattggaaactcagcacatttgaacttgggtttgattcagtattaacagatcttgactacactaattctttatattatagaaccaacggaaatatgggcactattttgaattctagagatggtttt

SEQ ID NO: 23096 - DNA, 424 bp, Homo sapiens
aaggtattcgtttcatctacaccagagaaggcagaccaagtggcgaggcttttgttgaacttgaatcagaagatgaagtcaaattggccctgaaaaaagacagagaaactatgggacacagatatgttgaagtattcaagtcaaacaacgttgaaatggattgggtgttgaagcatactggtccaaatagtcctgacacggccaatgatggctttgtacggcttagaggacttccctttggatgtagcaaggaagaaattgttcagttcttctcaggtatgtagtcatgtttgttgctgagcagtgagttttggctagcttatggcaaggtgatttaatagacgttaaagttgagtagcttaggtatttcagtaggttgtaaattgccaatgaattaatgttttcttcctagagaccttcaaat

SEQ ID NO: 23097 - DNA, 335 bp, Homo sapiens
  misc_feature (1)...(335): n = a,t,c or g
gaactggaagaattcaaaagtctggggtttctaggttggtcgttccgatttagaaatgaggtaataaagaactgactggaagctctgtcggcaagggtcaggcatagaatgcagtaggcttcactgtgaggcaattttatagccagccaacctcttttttgtaagggttccctgaatccttgttagtcttttctctggcattctagagttggttgagggtaaggaaaaagaaggtggagggtggggaaagactttcacttaattgctgntttcaatagctcattcctgtcctgctctatgtctgaagnctncgantgccagtctttctgcatttg

SEQ ID NO: 23098 - DNA, 524 bp, Homo sapiens
  misc_feature (1)...(524): n = a,t,c or g
aattcggcacgagcagaagactggcccacgatgagttcccgatgctcccacagcggcgacgagaagagccaggaaacatcacccagcgccaagagcagattgagaaccaataccgctccctcttggatcgggcagaagaacgcagacgtcgtctattgcaacgttataatgaatttttattggcctatgaggcaggagacatgctggaatggattcaagagaaaaaggcagaaaacactggagtggaactagatgatgtttgggagctgcagaaaaagtttgatgagttccaaaaggtgagaaagaggaaccttctcttgaaggttgccattgtttgcttttatccctcagcatattctacatgatcttttaatttatttcacacttgttaaatattctccccaaagctattggcaactctgtggctgagatctccctctaggtattgtagttgctaataaattgnanggaaatgcagagnaaaactagttacctaactgcagccttcagtgctgcactccaaa

SEQ ID NO: 23099 - DNA, 407 bp, Homo sapiens
attcggcacgaggaccttgggtggtggcactggagatgtttgcagcagcagtttttgaccccattttctgggtcaaacatcccaaggaaggagaggccttaaagtcaaaggagcatctcaggattgagagtcaaggaaaatttgatctttgttatgataatgttccctccaatctacagttctcaaactttctggtctcaaaccttcttaatgttgaaaattgtcttcatgggtatttccatcagtatttgttatattttaaaactgagaaaaatttaggccagggatggtggctcgcacctataatcccagcactttgggaggctgaggctggaggattgctgtagctcaggatcacagaggaggtgtgatggcacctctgcgcaagagaatgtggcctgtctcca

SEQ ID NO: 23100 - DNA, 525 bp, Homo sapiens
cagctatgacatgattacgaatttaatacgactcactatagggaatttggccctcgaggccaagaattcggcacgagagctgaagtcctttttgcctcatttcctgttatctgatacatcatgtctagctttcaacagaaaattacacagatgaggctgggcgcatggctcatgcctataattctagcactttgggaagccaaggtggacagatgacttgaggctagaagttcaagagcatcctgggcaacatggtaaaaccccatctatacaaaaaataagaagattagcctggcatggtggtgcatggctgtagtcccagctacttaggaggctgaggtgggaggatcacttgagcccaggaggtcaagactgcagtaagctgtgatcacatcattgcattccagcttgggcaacagagtaagtaagaccctgtctcaacaaagcatgctaacaggcaaggaaaaacagcctgtagatacaaagccaagcgtcagaaccagactcagatgtgacgcagatttt

SEQ ID NO: 23101 - DNA, 503 bp, Homo sapiens
  misc_feature (1)...(503): n = a,t,c or g
tnnntnntttgactctngaanccccttgctatgacatgattacgaatttaatacgactcactatagggaatttggccctcgaggccaagaattcggcacgaggactgggggtccctgatctgcactaatatggcccagctggtgcccagccacgtgaaaggcctgcacttgaacatggctttggttttaagcaacttctctaccctgaccctcctcctgggacagcgtttcgggaggtttcttggcctcactgagagggatgtggagctgctgtaccccgtcaaggagaaggtattctacagcctgatgagggagagcggctacatgcacatccagtgcaccaagcctgacaccgtaggctctgctctgaatgactctcctgtgggtctggctgcctatattctagagaagttttccacctggaccaatacggaattccgatacctggaggatggaggcctggaaaggaagttctccctggacgacctgctgacaacgtcatg

SEQ ID NO: 23102 - DNA, 553 bp, Homo sapiens
  misc_feature (1)...(553): n = a,t,c or g
ggtgaagcccccccagctgcccgcaggccataccccgaagcccttgctgatggtgcacggctggcccggctctttctacgagttttataagatcatcccactcctgactgaccccaagaaccatggcctgagcgatgagcacgtttttgaagtcatctgcccttccatccctggctatggcttctcagaggcatcctccaagaaggggttcaactcggtggccaccgccaggatcttttacaagctgatgctgcggctgggcttccaggaattctacattcaaggaggggactgggggtccctgatctgcactaatatggcccagctggtgcccagccacgtgaaaggcctgcacttgaacatggctttggttttaagcaacttctctaccctgaccctcctcctgggacagcgtttcgggaggtttcttggcctcactgagagggatgtggagctgctgtaccccgtcaaggagaaggtattctacagcctgatgagggagagcggntacattgcacatncagtgcaccaagcctgacaccgnangtgagtg

SEQ ID NO: 23103 - DNA, 459 bp, Homo sapiens
  misc_feature (1)...(459): n = a,t,c or g
ctttgaaaaccgntatgacatgattacgaatttaatacgactcactatagggaatttggccctcgaggccaagaattcggcacgagcctgtggagatcaagtccttctacatgcagcgatgtcctgaggattcccgtcttactgaatctgtcgacgtgttgatgcccaatgttggtgagattgtgggaggctcaatgcgtatctttgatagtgaagaaatactggcaggttataaaagggaagggattgaccccactccctattactggtatacggatcagagaaaatacggtacatgtccccatggaggatatggcttgggcttggaacgattcttaacgtggattctgaataggtatcacatccgagacgtgtgcttataccctcgatttgtccagcgttgcacgccataaccattttctccagaagcgtggaggaaagattatgaaaggaacaggc

SEQ ID NO: 23104 - DNA, 370 bp, Homo sapiens
ggaagatatcccagaagctcctgagagactgatgacagacaccattaatgaaccaatcttgctgtgtcgatttcctgtggagatcaagtccttctacatgcagcgatgtcctgaggattcccgtcttactgaatctgtcgacgtgttgatgcccaatgttggtgagattgtgggaggctcaatgcgtatctttgatagtgaagaaatactggcaggttataaaagggaagggattgaccccactccctattactggtatacggatcagagaaaatacggtacatgtccccatggaggatatggcttgggcttggaacgattcttaacgtggattctgaataggtatcacatccgagacgtgtgcttatac

SEQ ID NO: 23105 - DNA, 396 bp, Homo sapiens
ggtgccaccagcgaggagaggagctcaaaggccataatactctgccttcaccctggagagaccgtcccatggaggagtcactgctgctctttgaggcaatgcgcaagggcaagttttcagagggcgaggccacactacggatgaagctggtgatggaggatggcaagatggaccctgtagcctatcgagtcaagtatacaccacaccaccgcacaggggacaaatggtgcatctatcccacctacgactacacacactgcctctgtgactccatcgagcacatcactcactcactctgcaccaaggaattccaggcccgacgctcttcctacttctggctttgcaatgcactggacgtctattgccctgtgcagtgggagtatggccgcctcaacc

SEQ ID NO: 23106 - DNA, 528 bp, Homo sapiens
  misc_feature (1)...(528): n = a,t,c or g
ttggnnncccttngannncccagctatgacatgattacgaatttaatacgactcactatagggaatttggccctcgaggccaagaattcggcacgaggtcttttgaaactgctgctctttcacttctcaggcgtcaccgagagctcagcacccaggctgaactctgtaccatttggaagaatggaagctgatgcatctgttgacatgttttccaaagtcctggagcatcagctgcttcagactaccaaactggtggaagaacatttggattctgaaattcaaaaactggatcagatggatgaggatgaattggaacgccttaaagaaaagagactccaggcactaaggaaagctcaacagcagaaacaagaatggctttctaaaggacatggggaatacagagaaatccctagtgaaagagacttttttcaagaagtcaaggagagtgaaaatgtggtttgccatttctacagagacttcccattcaggngtaaaaactnnaccgactntggcatattgnccagaaac

SEQ ID NO: 23107 - DNA, 981 bp, Homo sapiens
gcgggcggaacggtgtctccttcacttcgccctccagctgctggagctgcagcccgaccgcgagcgtgccaagcggcttcagcagctagcggagcggtggcggcggcccccctcaggacaccaccagattcccctcttcccgcggcctcgccatggcgacccacggacagacttgcgcgcgtccaatgtgtattcctccatcatatgctgaccttggcaaagctgccagagatattttcaacaaaggatttggttttgggttggtgaaactggatgtgaaaacaaagtcttgcagtggccgtggaattttcaacgtccggttcatctaatacagacactggtaaagttactgggaccttggagaccaaatacaagtggtgtgagtatggtctgactttcacagaaaagtggaacactgataacactctgggaacagaaatctcttgggagaataagttggctgaagggttgaaactgactcttgataccatatttgtaccgaacacaggaaagaagagtgggaaattgaaggcctcctaaacgggattgttttagtgttggcagtaatgttgatatagatttttctggaccaaccatctatggctgggctgtgttggccttcgaagggtggcttgctggctatcagatgagttttgacacagccaaatccaaactgtcacagaataatttcgccctggggttacaaggctgcggacttccagctgcacacacatgtgaacgatggcactgaatttggaggttctatctaccagaaggtgaatgagaagattgaaacatccataaaccttgcttggacagctgggagtaacaacacccgttttggcattgctgctaagtacatgctggattgtagaacttctctctctgtaagaatgtgctgccagattggatctgctcttatgtttgtgtctaagttttcagagaatgttgtgatatgagtgtagtttgcttgttctttat

SEQ ID NO: 23108 - DNA, 427 bp, Homo sapiens
  misc_feature (1)...(427): n = a,t,c or g
gggcaaaagccggagtggacgtgtcttttgaaactgctgctctttcacttctcaggcgtcaccgagagctcagcacccaggctgaactctgtaccatttggaagaatggaagctgatgcatctgttgacatgttttccaaagtcctggagcatcagctgcttcagactaccaaactggtggaagaacatttggattctgaaattcaaaaactggatcagatggatgaggatgaattggaacgccttaaagaaaagagactccaggcactaaggaaagctcaacagcagaaacaagaatggctttctaaaggacatggggaatacagagaaatccctagtgaaagagacttttttcaagaagtcaaggagagtgaaaatgtggtttgccatttctacagagactcccattcaggtgnaaaatctagag

SEQ ID NO: 23109 - DNA, 619 bp, Homo sapiens
gatcactcactcagcacacatggatatcttccagaatttggctgtggacttggacactgagggtcgctatctctttttgaatgcaattgcaaatcagctccggtacccaaatagccacactcactacttcagttgcaccatgctgtacctttttgcagaggccaatacggaagccatccaagaacagatcacaagagttctcttggaacggttgattgtaaataggccacatccttggggtcttcttattaccttcattgagctgattaaaaacccagcgtttaagttctggaaccatgaatttgtacactgtgccccagaaatcgaaaagttattccagtcggtcgcacagtgctgcatgggacagaagcaggcccagcaagtaatggaagggacaggtgccagttagacgaaactgcatctctgttgtacgtgtcagtctagaggtctcactgcaccgagttcataaactgactgaagaatcctttcagctcttcctgactttcccagccctttggtttgtgggtatctgccccaactactgttgggatcagcctcctgtcttatgtgggcacgttccaaagtttaaatgcatttttttgactcttggccaaaattt

SEQ ID NO: 23110 - DNA, 435 bp, Homo sapiens
gcggcacgagggattcagatgactacgatggagaagaatatgatgtggaagcacatgaacaaggacagggggacatccctacattttacacctatgaagaaggattatcccatctaacagcagaaggccaagccacactggagagattagaaggaatgctttctcagtctgtgagcagccagtataatatggctggggtcaggacagaagattcaataagagattatgaagatgggatggaggtggataccacaccaacagttgctggacagtttgaggatgcagatgttgatcactgaaaatgatttatgcaagtttaagattctgctcctaagtgtaggagagaacttggtgcctcttccactctggagtgaagttaatgaaagtctttttccttttccaaaccccaccctgaacccagttctttttttgaga

SEQ ID NO: 23111 - DNA, 546 bp, Homo sapiens
  misc_feature (1)...(546): n = a,t,c or g
agaagatgggcataatgaataaaggagtcatttatgcgctttgggattatgaacctcagaatgatgatgagctgcccatgaaagaaggagactgcatgacaatcatccacagggaagacgaagatgaaatcgaatggtggtgggcgcgccttaatgataaggagggatatgttccacgtaacttgctgggactgtacccaagaattaaaccaagacaaaggagcttggcctgaaacttccacacagaattttagtcaatgaagaattaatctctgttaagaagaagtaatacgattatttttggcaaaaatttcacaagacttattttaatgacaatgtagcttgaaagcgatgaagaatgtctctagaagagaatgaaggattgaagaattcaccattagaggacatttagcgtgatgaaataaagcatctacgtcagcaggccatactgtgttggggcaaaggtgtcccgtgtagcactcagataagtatacagcgacatccggtttctacaagaatcccgtnnagtaatngngcattattggg

SEQ ID NO: 23112 - DNA, 583 bp, Homo sapiens
  misc_feature (1)...(583): n = a,t,c or g
agcttngangttacnaaaaccnaaantatctatnncngggaacccggtttctgaggttaagaacctggtatgagagattagttcggttaatacagcgaaattttgctcgcatcaaaaacataaaaaaccagtcgggtgcgacggcgggtgttcgcaactttagtcatcagggaggtcgaggtaggagaactgcccaaatctaggaggtggaggggtggaggccgtagcgagtcgagattgttttaccgtatcttagttcgggtaataagagtaaaatcttgctctaaaaaaggaaaaaaggacaatacggtcgagcgtagcggtctatgttgaggtgcgaagagcgtccgagcctaggagcccgagattaggtcgagtaatacagtaagattctgctctcatcaaaaactaaacaaacgagtcgggtgcggcggtgtgcgttcgcggctatagtcaccttggaggtcgaggcgggaagactgtccgagttcgaaaagcttaggtcgtaacgggtcgcggctccgtcatcgtaacttcgttcgggtaatanggaaatanttancccctataaaaaaaaaaaaaa

SEQ ID NO: 23113 - DNA, 323 bp, Homo sapiens
ttttttgataattatatcaaatgtttattttaaaaaataataaaacattcacataatgttgtcacaattttgggtgggaaaaaaagcatgtgtatctctatatctctgtgtactagaaaacaacaaagggatataaaattaaataataaccagtatttaaaagttaacttgaaaatcctcgttgataattcagcagcatgcttctggtcagcctatacagtctctgtcctggtgaggagcatgatcaccaacaggcaagatcttctggccttgaagtttcgcttgagttaaaagagctcatctcaggtaagtaacaggccaag

SEQ ID NO: 23114 - DNA, 631 bp, Homo sapiens
  misc_feature (1)...(631): n = a,t,c or g
gcaggtcagaagttacgtcaagagagctcttgctgaaggtgcccaaatttggtgcggtgagggagtggataagttgagcctccctgccaggaaccaggcaggctactttatgcttcccacggtgataacagacattaaggatgaatcctgctgcatgacggaagagatatttggtccagtgacgtgtgtcgtcccctttgatagtgaagaggaggtgattgaaagagccaacaacgttaagtatgggctggcggctaccgtgtggtccagcaatgtggggcgcgtccaccgggtggctaagaagctgcagtctggcttggtctggaccaactgctggctcatcagggagctgaaccttcctttcggggggatgaagagttctggaataggtagagagggagccaaggactcttacgacttcttcactgagatcaaaaccatcaccgttaaacactgatctttgctaatggtggagccactatggccaatgcctgggctgcaggcatcagttgttcaatgtggtagatgaaaatcatggcatgaattccagctatgccttgactttggcanaanggtatctctagcttatcctnanntcntaagnaccttnccnnnnatngaaaanatcttg

SEQ ID NO: 23115 - DNA, 641 bp, Homo sapiens
gcccctttccactacgggtgggttcccaaggacatgggacaggcaaagtgtgagccaaaggatccttccttattcctaagcagagcatctgctctgggccctggcctccttcccttcttgggaaactgggctgcatgaggtgggccctggtagtttgtaccccaggcccctatactcttccttcctatgtccacagctgaccccaagcagccgttccccgactcctcacccctgagcctcaccctgaactccctcatcttgcaaggccataagtgttttccaagcaaaatgcctctcccatcctctctcaggaagcttctagagactttatgccctccagagctccaagatataagccctccaagggatcagaagctccaagttcctgtcttctgttttatagaaattgatcttccctgggggactttaactcttgacctgtatgcagctgttggagtaattccaggtctcttgaaaaaaaagaggaagataatggataatgagaacatatatatatatatattaagccccaggctgaatactcagggacagcaattcacagcctgcctctgggtctataaacaagtcattctacctctttgtgccctgctgtttattctgtaaggggaaggcggcaatgg

SEQ ID NO: 23116 - DNA, 659 bp, Homo sapiens
gttatagcagcaggaatggacttcctgggaatgaaaatggttggtgagctgctacgaatgtcgggtgcctttttcatgcggcgcacctttggtggcaataaactctactgggctggattctctgaatatgtacaaactatgttacggaatggttatgctcctgttgaatttttcctcgaagggacaagaagccgctctgccaagacattgactcctaaatttggacttctgaatattgtgatggagccattttttaaaagagaagtttttgatacctaccttgtcccaattagtatcagttatgataagatcttggaagaaactctttatgtgtatgagcttctaggggttcctaaaccaaaagagtctacaactgggttgctgaaagccagaaagattctctctgaaaattttggaagcatccatgtgtactttggagatcctgtgtcacttcgatctttggcagctgggaggatgagtcggagctcatataacttggttccaagatacattcctcagaaacagtctgaggacatgcatgcctttgtcactgaagttgcctacaaaatggagcttctgcaaattgaaaacatggttttgagcccctggaccctaataggtgctgttctgcttcagaaccggccatccatggactttga

SEQ ID NO: 23117 - DNA, 401 bp, Homo sapiens
  misc_feature (1)...(401): n = a,t,c or g
aattcggcacgagacaaaaagaaacagtttattgcttaaatgatgatgatgaaactgaagttttaaaagaggatattattcaagggttccgctatggaagtgatatagttcctttctctaaagtggatgaggaacaaatgaaatataaatcggaggggaagtgcttctctgttttgggattttgtaaatcttctcaggttcagagaagattcttcatgggaaatcaagttctaaaggcctttcatggaagacttgcggcaatacatgttttcatccttgaaaaaacantaagaaatntgctcccaccgaggcacagttgaaatgctgttgatgctttgattgactccatgagcttggcnaagaaagatgagaagaccgaccccttgaagacttgtttccac

SEQ ID NO: 23118 - DNA, 1005 bp, Homo sapiens
  misc_feature (1)...(1005): n = a,t,c or g
tctgaggttaagaacctggtatgaggggataggcgtaggaagacaaaataaattcgaccgggtagaacagtcctcctcggttttcgccaaaaacaaatatcgggttgggtgtggcggtctatgttcgcaactttagtatcccgggaggttgaggtaggtggactataaggctaggagacggagattacttcggtcaatatgcgaaattttactctcatcaaaaaacataaaaaaccagtcgggtgcggcggtaggcgttcgcagctttagtcatctgggaggtcgaggtaggagaacgatacgaatttaggaggtggagtccgtagcgagttaggaccgtgttaccgtatcttagttcgagttatagagtgagatcttactctactctaacaacaacaataccgggtcgggtacggcggtctatattcgcaactctagtatcccgggaggttgagataggcgaaccattcgaggctaggagcccgagattagttcggttaatgcgtcgaaattttactcccctcagtaacacaataataacaataataaaacagtaacaataataaaaacagttgggtgcggcggcgcgtgttcgcagctttagtcatctggagggttaaggtataagaaccgtccgaattcgggaggaggtggttgtagcgagttgagactatattatcgtatcttagttcgggcgatagagcgagactcgcactaaaaaaaaatacagggcgagaccctaatcgagctcattcagagaagtcacaataattatcaagcgataccgtcgtttcacccgcacatccactcttcggaatcacgctctctcctcgcctaaaatctcttcacagccttttccccaactaggggtaaatttaaagctccatgacggtcataaggttccaacgttccggccttaccgcggcccatactactcttcgatttnccggncttagttatccggcccctcaacaaaaccnatcggcccatcnagggccggttccg

SEQ ID NO: 23119 - DNA, 572 bp, Homo sapiens
atgacatgattacgaatttaatacgactcactatagggaatttggccctcgaggccaagaattcggcacgagggaacaaatgaaatataaatcggaggggaagtgcttctctgttttgggattttgtaaatcttctcaggttcagagaagattcttcatgggaaatcaagttctaaaggtctttgcagcaagagatgatgaggcagctgcagttgcactttcctccctgattcatgctttggatgacttagacatggaggccatagttcgatatgcttatgacaaaagagctaatcctcaagtcggcgtggcttttcctcatatcaagcataactatgagtgtttagtgtatgtgcagcttgcctttcatggaagacttgcggcaatacatgttttcatccttgaaaaacagtaagaaatatgctcccaccgaggcacagttgaatgctgttgatgctttgattgactccatgagcttggcaaagaaagatgagaagacagacacccttgaagacttgtttccaaccaccaaaatcccaaatcctcgatttcagagattatttcagtgtctg

SEQ ID NO: 23120 - DNA, 429 bp, Homo sapiens
ggaagaaaagaaaccaaagactaaaaaagttgaaaaaactgtctgggactgggaacttatgaatgatatcaaaccaatatggcagagaccatcaaaagaagtagaagaagatgaatacaaagctttctacaaatcattttcaaaggaaagtgatgaccccatggcttatattcactttactgctgaaggggaagttaccttcaaatcaattttatttgtacccacatctgctccacgtggtctgtttgacgaatatggatctaaaaagagcgattacattaagctctatgtgcgccgtgtattcatcacagacgacttccatgatatgatgcctaaatacctcaattttgtcaagggtgtggtggactcagatgatctccccttgaatgtttcccgcgagactcttcagcaacataaactgcttaaggg

SEQ ID NO: 23121 - DNA, 476 bp, Homo sapiens
  misc_feature (1)...(476): n = a,t,c or g
tgacatgattacgaatttaatacgactcactatagggaatttggccctcgaggccaagaattcggcacgaggagagctagcaccatgagcttcaataccctgtctcagcttcccaagtagctgggactacaggctcccaccaccacgtccagctaagttttgtagttttagtagagatggggtttcaccatgttggtcaggctggtctcgaactcctgacgtcaggtgatccacccgcctcggcctcccaaagtgctgggattacaggtatgaacaaccgcgcctggtcccttttttttttctcttttttgannnggagtctcaaaaaaaaaaaaccccccccnaaaatttacccggnctnggggggcnnnccnngaaccntannttnttnggnnggttnngncggnaaantcnttnnaccccggggggcaangnttnnaggnacntaaantngccnagggccttcaaccnngggg

SEQ ID NO: 23122 - DNA, 427 bp, Homo sapiens
  misc_feature (1)...(427): n = a,t,c or g
gaagggatttgtatccatcttcagagccaatgcgctttctactctgcctgtgtacaaatatcccttcattaacacctctttattaagcacccattgtgtaccaagatggattaggtcatcgatggaccagccaggttggccagattcatctaaagccatacttgcccctggatgtagaaacnggggccagggccaggaggttggctggcggggtagagtcagggaggaccctgtaattgtcatggtcaccttataatcccgtttgtttctacctgggcccagcctgcattcacatatttatgtggcccactcacttgctgtgtaccttgtgttaaattaattctattcttcttatccatgaaatgacatggtagtacctgctttgtttgggtgccgtgagggtcncaggaaaaaanactggatgggg

SEQ ID NO: 23123 - DNA, 667 bp, Homo sapiens
  misc_feature (1)...(667): n = a,t,c or g
ctcccctacagaagcccctgggagcacagctcatcaccatggactggacctggaggatcctcttcttggtggcagcagcaacaggtgcccactcccaggtgcaactggtgcagtctggggctgaggtgaagaagcctggggcctcagtgagggtctcctgcaaggcctctggatacaccttcaccagctatgatatgcactgggtgcgacaggcccctggacaagggcttgagtggatgggatggatcaaacctgaagatggtgaaacaatctacgcacagaagttccagggcagagtcaccataaccgcggacacgtctacagacacagcctacatggagctgagcagcctgagatctgaggacacggccgtgtattactgtgcaacagatcacggtgactatgcttttgatatctggggccaagggacaatggtcaccgtctcttcagcacccaccaaggctccggatgtgttccccatcatatcagggtgcagacacccaaaggataacagccctgtggtcctggcatgcttgataactgggtaccacccaacgtcnggantggnaaaanngtacatggngncacaganccngccccaaagaacctttcctgagatcattgacngnnnanttctacatgacanncancncgctntncacccttt

SEQ ID NO: 23124 - DNA, 487 bp, Homo sapiens
aacagctatgacatgattacgaatttaatacgactcactatagggaatttggccctcgaggccaagaattcggcacgagaaaacgagagggggaaggctgccacggacacaggaagtggccgcacaatgcaacatctacttaccctctgagggatggtttgagtccctgtcatcgaagggtagactggcagaggaactagaagatgcagacaaggccctcttggtacctcccgcagctctctgcagtggggaagacatgcttggtgaggaggagctatggggccaggaagacgaggaccgcagggtaggtttggcaatccagctggggaagaaagagaagaaagggctcctaccacagcacttctccatccccagccgtgagcagtccctttctttgcaagggaatggttctagaactctggggtcgggtgagggggaccaaaaactaagacaaaggctgggcaccgtggctcatgcctataatccc

SEQ ID NO: 23125 - DNA, 578 bp, Homo sapiens
  misc_feature (1)...(578): n = a,t,c or g
gcggcacgagggagctgatgatagatcccacccagacttaagctgctggtgggtgggtgagctgggaagtaggactgtccagggaagggtggagagatgtagctaggggctggggagggggaggtggaagcgctattgagcatcctccacaccaaggttgatgaaggaagggatcccagcagggtttctgctctggggctggcaggttgcctggtattatgcccaaggccgctctgcctgggggaaagggcagccaggcagaggcccagtgtctggtaggctgctgaatttcctggaaggggtgattggatggaaagaggccagaaaccccagcctgagagactgctgtgcaccccacagtctgactgcacagagccgcctctgttggcaggaggcactgaggctccccttcctgtgtattgagaagcagtgtttgccaatatattttgctttcaattccaagangagctctgggaaaactgtggataaaaccaaatgccaaatgttggacgttgttcctttcctttccctcnctaattgtttaattgtccgttgnggtttanggnttttnanccttg

SEQ ID NO: 23126 - DNA, 361 bp, Homo sapiens
gaagaaattccagaataaataaaaatgaattaattcaacaaacattttctggggcaccgacaatctgcccagtgcaccaggctaggtatctgatacaaagataatgaaaacagtctcttggaacctaattggggtcctcatttgaccaggaatttctttcgtcccgttttaagccaaccagttttgtccggacaagacaaaaacaacttgggctgctttagagaagcccagctcagtgtagacaatagctgcccagcctctgaaaggggctgattggattatgtggcaaatggaggtgcaaggatgacttggacggtgacaaatgaagtgggcggagacctgctttgagttaatccaggct

SEQ ID NO: 23127 - DNA, 409 bp, Homo sapiens
gccaaaatcgaaagttcggaaaaaggaatgtcagaaatcttgaacatgttctgatgaaagaaccaagtgacccaaagtgacctggacaagattcatagactgaaagctgttgacatcgttgaatcatatgtttatatattgtttttaatctgcaggaaaatggtgtctctcatcatttgctctgttaagggaacaaattagcactttttagaagtctgacaattgtaaacagttattagcttttccagaagctgattcccattttaagatgggggaaaattaaggtttgaggttttagaaattagcaagtagtgcatacccttctagccacaagtgcccagtccaggcaagtgctgacttcttagagaatgtgtggccagacccagggacctggagtgtgtttggactg

SEQ ID NO: 23128 - DNA, 471 bp, Homo sapiens
attacgaatttaatacgactcactatagggaatttggccctcgaggccaagaattcggcacgagctgggctttgtgtttttacattttcctcaggtactgaaataatgactaaaaacaccctgtatttgcattgcatttaaaaaaatcactttcacatatattacctcattagaagttgagggtcattaaaagtggacaatgaacttgctttcaccctcacaaatctctctgaggaatcaagtcaattgaatacgtgtacttgagaaaaaaggtgggctttttgccaaatactttctggcagctcataagcctgagcttttcatctgagccaactgcaagcctggaagggtccagaaaagcgactcatctgctcagcagacctcactgcccctttgttgtggtgggcacggtgcctttcacacacagctgttggtcagtatgtggatcacccgactgcatcctccttgcaa

SEQ ID NO: 23129 - DNA, 845 bp, Homo sapiens
gggagtctggagacgacgtgcagaaatggcacctcgaaaggggaaggaaaagaaggaagaacaggtcatcagcctcggacctcaggtggctgaaggagagaatgtatttggtgtctgccatatctttgcatccttcaatgacacttttgtccatgtcactgatctttctggcaaggaaaccatctgccgtgtgactggtgggatgaaggtaaaggcagaccgagatgaatcctcaccatatgctgctatgttggctgcccaggatgtggcccagaggtgcaaggagctgggtatcaccgccctacacatcaaactccgggccacaggaggaaataggaccaagacccctggacctggggcccagtcggccctcagagcccttgcccgctcgggtatgaagatcgggcggattgaggatgtcacccccatcccctctgacagcactcgcaggaaggggggtcgccgtggtcgccgtctgtgaacaagattcctcaaaatattttctgttaataaattgccttcatgtaaactgtttcaactccagtcttctctccttcatcaggggctactcaggcatttgatttcttcctcctatttggcttcttgggagaaggagcctgaggagagctgagatcctggtgctgcatttggggtcttttccatgctacttgcggcattaagttgccttggtcatctaaagcagaccaaggcgttggagacctcgttttgagtggagatgctggttctaaatatggaccaattcttaaagagccagagtgggaactgttgatccaagtgtagcctgaagcgaaagaggagccttccagacccatgccatatataaa

SEQ ID NO: 23130 - DNA, 459 bp, Homo sapiens
gcttcatgctacaaagagaatagaggtaaatctgggcacacaggcatggagttccagctactcctgagactaaggcatgaggattgcttgagcccaggagtttgactccagcctgggcaacagagcgagaccccatctcttaaaaaaaatagagaatagaggtaagagaaggaggtagtattctatggggattctgatgtcttaatgcctgataccagatcccaactctaatacttactagctgtgttaccttgggcaggcagcttaacatctctgtgccttacccataaaatagagataggatgcaatctacctcattggttattggaaggatcatatggattgaggcatgtaaagtgcttagaattgtgactagcacttcctgaatgctctgtgttagttattattaatggagagggaaaacatatgagtagttaagtctcttccaaatattaaaaa

SEQ ID NO: 23131 - DNA, 399 bp, Homo sapiens
ggttcagttgtggcggttgctggtcagtaacagccaagatgctgcggaatctgctggctcttcgtcagattgggcagaggacgataagcactgcttcccgcaggcattttaaaaataaagttccggagaagcaaaaactgttccaggaggatgatgaaattccactgtatctaaagggtggggtagctgatgccctcctgtatagagccaccatgattcttacagttggtggaacagcatatgccatatatgagctggctgtggcttcatttcccaagaagcaggagtgacttcagtcatcccagcaatcgcttggttcagtttcattcagctctctatggaccagtaatctgataaataaccgagctcttctttggggatcaatatttattgacttgt

SEQ ID NO: 23132 - DNA, 435 bp, Homo sapiens
gctggaagataatgttttctaggttaaagcctttcctgctcctctctaggcaaatagattttggtttcttctgcccacgagagggttgcagaaactcatattcctgggcaatgaggccaggtgacccctaggaacacagtcttcattgcctcaaactggccttcctccctagtctagctgtcagccgtcatcacgctaccaccatgccacagtgggatcagcattattctcattggtcttctacccaggctgacattgttgaaagaaaccttgtcctgcaggtacctcgaagctggcataggtaaacttctggcatcattttatgtgatatagtctattattaattaagccggccgcaagcttattccctttagtgagggttaattttagcttggcacttgcccgtcgttttacaacgtcgtgactggggaaaag

SEQ ID NO: 23133 - DNA, 352 bp, Homo sapiens
ggttgacatttaggtcaggctaaatacaagttgtgttagtattaagtgatgcttagctacctgtactggttacttgctattagtttgtgcaagtaaaattccaaatacatttgaggaaaatcccctttgcaatttgtaggtataaataaccgcttatttgcataagttctatcccactgtaagtgcatcctttccctatggagggaaggaaaggaggaagaaagaaaggaagggaaagaaacagtatttgccttatttaatctgagccgtgcctatctttgtaaagttaaatgagaataacttcttccaaccagcttaattttttttttaaactgtgatgatgtcctccaaa

SEQ ID NO: 23134 - DNA, 1228 bp, Homo sapiens
  misc_feature (1)...(1228): n = a,t,c or g
gcctctgcaacatacaggccagctcttcgggggcctggtgcgtgatatccggcgccgctacccctattacctgagtgacatcacagatgcattcagcccccaggtcctggctgccgtcatcttcatctactttgctgcactgtcacccgccatcaccttcggcggcctcctgggagaaaagacccggaaccagatgggagtgtcggagctgctgatctccactgcagtgcagggcattctcttcgccctgctgggggctcagcccctgcttgtggtcggcttctcaggacccctgctggtgtttgaggaagccttcttctcgttctgcgagaccaacggtntagagtacatcgtgggccgcgtgtggatcggcttctggctcatcctgctggtggtgttggtggtggccttcgagggtagcttcctggtccgcttcatctcccgctatacccaggagatcttctccttcctcatttccctcatcttcatctatgagactttctccaagctgatcaagatcttccaggaccacccactacagaagacttataactacaacgtgttgatggtgcccaaacctcagggccccctgcccaacacagccctcctctcccttgtgctcatggccggtaccttcttctttgccatgatgctgcgcaagttcaagaacagctcctatttccctggcaagctgcgtcgggtcatcggggacttcggggtccccatctccatcctgatcatggtcctggtggatttcttcattcaggatacctacacccagaaactctcggtgcctgatggcttcaaggtgtccaactcctcagcccggggctgggtcatccacccactgggcttgcgttccgagtttcccatctggatgatgtttgcctccgccctgcctgctctgctggtcttcatcctcatattcctggagtctcagatcaccacgtgagagacagggtgggggctgggcctgggagggtgggaggcagggacctttccctggcattctcccaggcaggcaagagacccaggactgcaagctagtccctgcgggtgtgtggccctcccgactagcaggaatagtgaaaagccaggggcagttccaggttttgtgggaccagaagttgtataatttggagaactcttttaagaaaaaaaaaacttgccgggcccgtgggtcaaacccttatnccaaaatttnaaaggccaggggggaaataacctg

SEQ ID NO: 23135 - DNA, 504 bp, Homo sapiens
  misc_feature (1)...(504): n = a,t,c or g
aaataatacgactcactatagggaatttggccctcgaggccaagaattcggcacgaggcaaagccacaaagtacgactatttgtgtttttcgtctaatggaattatggctctgtagaaactgtttttctcagattttgtgctagggtttcacctccctgagtcacatttattagagattttgacaggatccttctttagattgaaatcttgagattgacagtttgcccagcaatatggctagctgctgacctcagtgtgggattctaaacgtaattgagtgtcttcagttccttgccctgaagagctatcctttagctgattctgacctgtaagaatgggacatttctttaccctgtgtaactaaagaagattttaaaagagttggtagggtccgattccataaaggagaattgcccatttttgcatactaagtttttggttggttggttggttttgaaacggagctcggtntttccgcccagctgaatcnanggcgtaactta

SEQ ID NO: 23136 - DNA, 408 bp, Homo sapiens
  misc_feature (1)...(408): n = a,t,c or g
gctggcttcaggagctgaataccctcccaggcacacacaggtgggacacaaataagggttttggaaccactattttctcatcacgacagcaacttaaaatgcctgggaagatggtcgtgatccttggagcctcaaatatactttggataatgtttgcagcttctcaagcttttaaaatcgagaccaccccagaatctagatatcttgctcagattggtgactccgtctcattgacttgcagcaccacaggctgtgagtccccatttttctcttggagaacccagatagatagtccactgaatgggaaggtgacgaatgaggggaccacatctacgctgacaatgaatcctgttagttttgggaaccgaacactnttacctgngccaagcaacttgtgaatctaggaaa

SEQ ID NO: 23137 - DNA, 654 bp, Homo sapiens
gctgtcacatacctttcaggaggtgacagttgtcttagttgtcatctacccagacaaacgtcctgggcccgtcctccctcctgatactgtagcctcttggtacccagggtgagttggtggagaacagagagatgagaagcagagggcttggggaaagcctgttcctctctgactcagccctttttggcattattgcaagagcttgactcctggttgccttttcccagccagttttcagttggggtgaaggtttctgcaagtgtgaggtccagatgctgctgctcatgttgggctttccttttgggaactatttctctttatttatagtgtcgggcttccggggaaagcaatcattggtgtgtatgtgtatgtgcatgcacacacgtgcatatacacatttgtgtatgtggaaatgtgctgggcaagtcaaaactatagaagagttgcctcctgtctctcgaatcttccagagatatcacttaattgttaacagcttttgtgttaatccccttcagcccctagctcttttattctaccacggctggagagttgatacctgcagtcagcctgccagtgactcttagtgtctgtttctgacttatttttcctgtctctgtcttccaacccccaataatatttccaccggggatgcat

SEQ ID NO: 23138 - DNA, 411 bp, Homo sapiens
cccactttctttttaatgggcaaagaacatgaacacatttcaaaagaagacatatatgcatttaaaaagcatataaaaatcactcatcatcactaatcactacagaagtgcataccatctcacaccagtcagaatggctgttactagaaagtcaataaataacagatgctggcaaggttgcggagcaaagggaacacttatacactgttggtgggagtgtaaattagttcaaccattgtggaaagcagtgtggtgattcctcaaagagctaaaaacagaactaccattcgactcagcaatcccattactgggtatatacccaaaggaatataaatcattctaccataaagacacatgcatatgtatgttcactgcagcactattcatgatagcaaagacatggaatcagcc

SEQ ID NO: 23139 - DNA, 504 bp, Homo sapiens
  misc_feature (1)...(504): n = a,t,c or g
gagtccatcttccacgagaaacaagaaggctcactttgtgctcaacattgcctgaataacttattgcaaggagaatattttagccctgtggaattatcctcaattgcacatcagctggatgaggaggagaggatgagaatggcagaaggaggagttactagtgaagattatcgcacgtttttacagcagccttctggaaatatggatgacagtggttttttctctattcaggttataagcaatgccttgaaagtttggggtttagaactaatcctgttcaacagtccagagtatcagaggctcaggatcgatcctataaatgaaagatcatttatatgcaattataaggaacactggtttacagttagaaaattaggaaaacagtggtttaacttgaattctctcttgacgggtccagaattaatatcagatacatatcttgcacttttcntggggcaattcaacaggnagggtnttcccaaatttgtngnaaaggggnccccc

SEQ ID NO: 23140 - DNA, 425 bp, Homo sapiens
ccatgttgaaaaatctatccaggattcatcccgtgtcaacaatggtaaaggggatgtatggcattgagaatgaagtcttcctgagccttccatgtatcctcaatgcccggggattaaccagcgttatcaaccagaagctaaaggatgatgaggttgctcagctcaagaaaagtgcagataccctgtgggacatccagaaggacctaaaagacctgtgactagtgagctctaggctgtagaaatttaaaaactacaatgtgattaactcgagcctttagttttcatccatgtcatggatcacagtttgctttgatcttcttcaatatgtgaatttgggctcacagaatcaaagcctatgcttggtttaatgcttgcaaagtcgacgcggccgcgaattccagatctatgaatcgtagatctgaaaa

SEQ ID NO: 23141 - DNA, 475 bp, Homo sapiens
  misc_feature (1)...(475): n = a,t,c or g
tttgnnactttganaccnctatgacatgattacgaatttaatacgactcactatagggaatttggccctcgaggccaagaattcggcacgagctcggccatctcctgcttctgggacctgccagcaccgtttttgtggttagctccttcttgccaaccaaccatgagctcccagattcgtcagaattattccaccgacgtggaggcaaccgtcaacagcctggtcaatttgtacctgcaggcctcctacacctacctctctctgggcttctatttcgaccgcgatgatgtggctctggaaggcgtgagccacttcttccgcgaattgtccgaggagaaacgcgagggctactagcgtctcctgaagatgcaaaaccagcgtggcggccgcagctctcttccaggacntcnagaanccagctgaagatgantggggtaaaaccccagacgccatgaaagctgcatggccctggaga

SEQ ID NO: 23142 - DNA, 536 bp, Homo sapiens
  misc_feature (1)...(536): n = a,t,c or g
ggtgtnntnntttganacctttgnacatcattacgaatttaatacgactcactatagggaatttggccctcgaggccaagaattcggcacgagactgtgttccttccgcttggagctattttccaggcttctgctggggcctgggacaactgctcccacctcctgacacccttctcccactctcctaggcattctggacctctgggttgggatcaggggtaggaatggaaaggatggagcatcaacagcagggtgggcttgtggggcctgggaggggcaatcctcaaatgcggggtgggggcagcacaggagggcggcctccttctgagctcctgtcccctgctacacctattatcccagctgcctagattcagggaaagtgggacagcttgtaggggaggggctcctttccataaatccttgatgattgacaacacccatttttccttttgccgaccccaagagttttgggagttgtagttaatcatcaagagaatttggggcttccaagttgttcggccaaggacctgagacct

SEQ ID NO: 23143 - DNA, 398 bp, Homo sapiens
cccaaacagaattctaatcatatgctcctctaacaagccaaccagaaccttccaaaaaggtttaggcactaaagtcagtaatcactaggagtggtctagttggggaagtggcaagaaatgtctagaaggagccagcgtaagtgggtaaacagagatcccaaagaaacaccagagaaggcagacacctgagcattttaagctgctctaatgaaatggaaggatgtcccgtcgacgcggccgcgaattccagatctatgaatcgtagatactgaaaaaccccgcaagttcacttcaactgtgcatcgtgcaccatctcaatttctttcatttatacatcgttttgccttcttttatgtaactatactcctctaagtttcaatcttggccatgtaacctcg

SEQ ID NO: 23144 - DNA, 438 bp, Homo sapiens
ggggatgtgccactgcgcccagctcatttttgtacttttagtagagacagggtttcaccatattggccaggctggtctcggacacctgacctcaggtgctgatcactttttttatataatcttgaattgcattaaaggtttcctcataggaaaccatatcaaagggacctttgatagcagagaatgttctttttaggctccccaaccacctcaagtaccctgaagcatcattcccaattttaagagagtgtttatcttcatttaaactctgtaatggtttctctgtaatcacaaggatcctgctccagactgtcaccctcccagccttgccaggatgtccagatgagcagtggtgtggagtcactaggggcacacattctagagtcagacagcttgggtttgaatcctgactcccctggctaattcagcagataccca

SEQ ID NO: 23145 - DNA, 1275 bp, Homo sapiens
gggaagatgctgaggccccaggcatcagagatcatgagagcctgtagccaccaatgtttcaagaggagcccccaccctgttcctgctgctgtctgggtgctactggggaaactggccatggcctgcaaactgggaacccctttcccaccccaacctgctctcctcttctactcacttttcccactccaagcccagcccatggagattgacctggatggggcaggccacctggctctcacctctaggtccccatactcctatgatctgagtcagagccatgtcttctccctggaatgagttgaggccactgtgttccttccgcttggagctattttccaggcttctgctggggcctgggacaactgctcccacctcctgacacccttctcccactctcctaggcattctggacctctgggttgggatcaggggtaggaatggaaaggatggagcatcaacagcagggtgggcttgtggggcctgggaggggcaatcctcaaatgcggggtgggggcagcacaggagggcggcctccttctgagctcctgtcccctgctacacctattatcccagctgcctagattcagggaaagtgggacagcttgtaggggaggggctcctttccataaatccttgatgattgacaacacccatttttccttttgccgaccccaagagttttgggagttgtagttaatcatcaagagaatttggggcttccaagttgttcgggccaaggacctgagacctgaagggttgactttacccatttgggtgggagtgttgagcatctgtccccctttagatctctgaagccacaaataggatgcttgggaagactcctagctgtcctttttcctctccacacagtgctcaaggccagcttatagtcatatatatcacccagacataaaggaaaagacacattttttaggaaatgtttttaataaaagaaaattacaaaaaaaaattttaaagacccctaaccctttgtgtgctctccattctgctccttccccatcgttgcccccatttctgaggtgcactgggaggctccccttctatttggggcttgatgactttctttttgtagctggggctttgatgttccttccagtgtcatttctcatccacataccctgacctggccccctcagtgttgtcaccagatctgatttgtaacccactgagaggacagagagaaataagtgccctctcccaccctcttcctactggtctctctatgcctctctacagtctcgtctcttttaccct

SEQ ID NO: 23146 - DNA, 325 bp, Homo sapiens
gcaacatcgctcgccatctgcaaaccaatctcattctattttgtgtcggtgctgtgggcgcctgtactctctctgtcacacaaccgtggtacctagaagtggactacactcatgaggccatcaccataaagtgtaccttctccgcaaccggatgcccttctgagcaaccaacatgcctgtggtttcgctacggtgctcaccagcctgagaacctgtgcttggacgggtgcaaaagtgaggcagacaagttcacagtgagggaggccctcaaagaaaaccaagtttccctcactgtaaacagagtgacttcaaatgtcgacgcggc

SEQ ID NO: 23147 - DNA, 585 bp, Homo sapiens
  misc_feature (1)...(585): n = a,t,c or g
catgattacgaatttaatacgactcactatagggaatttggccctcgaggccaagaattcggcacgagcatatatttaagccttttgtgtaataagaaagtataaagtcacttccagtgttggctgtgtgacagaatcttgtatttgggccaaggtgtttccatttctcaatcagtgcagtgatacatgtactccagagggacagggtggaccccctgagtcaactggagcaagaaggaaggaggcagactgatggcgattccctctcacccgggactctccccctttcaaggaaagtgaacctttaaagtaaaggcctcatctcctttattgcagttcaaatcctcacctgtgatttcctacagaaatactgctctgaatattttgtaataaaggtctttgcacatgtgaccacatacgtgttaggaggctgcatgctctggaagcctggactctaagctggagctctttggaagagctcttcggtttctgagcataatgctcccatctcctgatttctctgacagaaaacanaagagagaatgagggaaattgctattttatttggattcatgaacttggctg

SEQ ID NO: 23148 - DNA, 326 bp, Homo sapiens
ctggttctacctaatgaaacttaagagcaagacgcaaaggatctgtttccaagtaatttaactgcttcccaaaacatacaagaatgcaaaaatgtccagtgcctaacaaggtagaattcataatatatggtattgaatcaaaaagtaccaaatatgaagagaggcaggaaaatgtgagccagtcaactaataataacagacccagatatgacacaaatgatagaattagtacagttgtcacagctatattccatatgttcaagcagatagagggaagatgctaagtggaggcatggaagatgttttttaaatgaaatttttacaga

SEQ ID NO: 23149 - DNA, 471 bp, Homo sapiens
  misc_feature (1)...(471): n = a,t,c or g
ggggctgaggtgaatgggcttgcagcccagggcaagtatgaaggcagtggagaagatggtggagcagcagcacagtcactctacattgccaaccatgcctactgagtatccactccataccacagcccttggcccagccatctgcacccacttttgcttgtagtcatggccagggccaaatagctatgcagagcagagatgccttcacctggcaccaacttgtcttcctttctctcttcccttcccctctctcattgctgcacctgggaccataggatgggaggatagggagcccctcatgactgagggcagaagaaattgctagaagtcagaacaggatggctgggtctccccctacctcttccagctcccacaattttcccatgatgaggtagcttctccctgggctctccttcttgcctgcctgctcctgggatcanagggtagtacagaagccctgactcatgcctt

SEQ ID NO: 23150 - DNA, 489 bp, Homo sapiens
accctttatgacatgattacgaatttaatacgactcactatagggaatttggccctcgaggccaagaattcggcacgagcccacacgcctttggcacaatgaagtgggtaacctttatttcccttctttttctctttagctcggcttattccaggggtgtgtttcgtcgagatgcacacaagagtgaggttgctcatcggtttaaagatttgggagaagaaaatttcaaagccttggtgttgattgcctttgctcagtatcttcagcagtgtccatttgaagatcatgtaaaattagtgaatgaagtaactgaatttgcaaaaacatgtgttgctgatgagtcagctgaaaattgtgacaaatcacttcataccctttttggagacaaattatgcacagttgcaactcttcgtgaaaacctatggtgaaatggctgactgctgtgcaaaacaagaacctgagagaaatgaatgcttcttgcaacacaaa

SEQ ID NO: 23151 - DNA, 492 bp, Homo sapiens
  misc_feature (1)...(492): n = a,t,c or g
gggtgttgtgatccgcctgtctcagcctcccaaagggctgggattacaagtgtgacctaccgtgcccagtctcggctcactgcaacctccgtctcccgagttcaagcgattctcctgccttagcctcctgagtagctgggatcacaggcacccgccactgcgcccggcctgtaaagtcttttgttgactgaaaaccagaaaatgaaacctccaaaagcagaaattttgcaggtaataattaggagaatgcaggttgtggcatcagattgtgtaagtttgaattattgttccattattagttgaacattcttgggcagttcttaaactcaggcctgtaatcacaatattgtcacgaggtaattcatgtagacacggtgtctcacacggtgtcttggacattgnagtgcttggtggtctcatttgntggtggttaccttttaagcatacatttctgnatggtttaatggtaatttanggaaanagacccccccc

SEQ ID NO: 23152 - DNA, 434 bp, Homo sapiens
gggagacctcaggtggtatctggttccacgtgtccccaatggcacctcgcctggaacgatgtctgcgccgaccagtgataacaatcgaaatagcaggcgtggctgaccgtgtgccgaggctcggcgtgccgcactggccagccgtgatttcatctcagcctctagcatcctgctggggtaggttaataatccctggatttctcagatgggaaatgttaggaaagtctgtaagcccccatggaaggtcccggagcccaaattcaaacccgagtggagcgttctgttgcttcactgtgctctggtgtgaattttaatgtaaggccctggcatttaagagctcgaagacaccatggaggtggagagctcagccctgtcattggatggaagctgagactggtgagattctcaccggggcttttgcagggagtttgggg

SEQ ID NO: 23153 - DNA, 364 bp, Homo sapiens
cgtggacatctcaaggtcttcagggtcttccatctggaactatataaagttcagaaaacatgtctcgaagatatgactccaggaccactatattttctccagaaggtcgcttataccaagttgaatatgccatggaagctattggacatgcaggcacctgtttgggaattttagcaaatgatggtgttttgcttgcagcagagagacgcaacatccacaagcttcttgatgaagtctttttttctgaaaaaatttataaactcaatgaggacatggcttgcagtgtggcaggcataacttctgatgctaatgttctgactaatgaactaaggctcattgctcaaaggtatttattacagtatca

SEQ ID NO: 23154 - DNA, 465 bp, Homo sapiens
tgacatgattacgaatttaatacgactcactatagggaatttggccctcgaggccaagaattcggcacgagcggcacgagaaaatatggcgtattatgtgaactaaaagagttctaaaggagttcttaaaggagtggtagaatttgggtaggaaagtgattaagtccaacttaaaaccaacagtctcaaacgtctacaactacaatgtccaatgagccactagccacatgaggctatttaagtaaatttagtttaaaatccagttttcgaattacattagccacattgtcaagtgttcaaatcacaggtggttagtggctactgtactgggcaacatacattatagaacattttcattataggaagttttattgggcagtgctgctcttaaatcctaccttccactcaactcccatacaactttcttttgtacattttgatactttctacctaatggcagctctt

SEQ ID NO: 23155 - DNA, 379 bp, Homo sapiens
gcagcagcagcaggaggaggcagagcacagcatcgtcgggaccagactcgtctcaggccagttgcagccttctcagccaaacgccgaccaaggaaaactcactaccatgagaattgcagtgatttgcttttgcctcctaggcatcacctgtgccataccagttaaacaggctgattctggaagttctgaggaaaagcagctttacaacaaatacccagatgctgtggccacatggctaaaccctgacccatctcagaagcagaatctcctagccccacagaatgctgtgtcctctgaagaaaccaatgactttaaacaagagacccttccaagtaagtccaacgaaagccatgaccacatggatgatatggatgatgaa

SEQ ID NO: 23156 - DNA, 268 bp, Homo sapiens
gaaagaaagatggaaagctctaagatcttctattttggggaagacatgaaagcgctgagctgagggacgaggaagagctggagcccgcagaagccgtccacagccctgcctcagtggcccagtgggcagaggccagggagtgcctcactattttgcaaatgccgaccctgtggcctgctgcccgccccccccccccccaaaggggccatacgggcccaggaaaccttttatgggactttggccctggcaggacccagggcctccaaac

SEQ ID NO: 23157 - DNA, 424 bp, Homo sapiens
accgctatgacatgattacgaatttaatagcgactcactatagggaatttggccctcgaggccaagaattcggcacgagaccgcgaaagccccaggggccattggaccctacagtcaagctgtattagtcgacaggaccatttacatttcaggacagataggcatggacccttcaagtggacagcttgtgtcaggaggggtagcagaagaagctaaacaagctcttaaaaacatgggtgaaattctgaaagctgcaggctgtgacttcactaacgtggtgaaaacaactgttcttctggctgacataaatgacttcaatactgtcaatgaaatctacaaacagtatttcaagagtaattttcctgctagagctgcttaccaagttgctgctttacccaaaggcagccgaattgaaattgaagca

SEQ ID NO: 23158 - DNA, 602 bp, Homo sapiens
gcagggggctagtgattagtcaggatcaatcagtggagaggagattaaaactcacatctgggagtccggaatcagaacttgtagttcttttttttgaaatggagtctcgctctgtcgcccaggctggagtgcagtggcgtgatctcggctcactgcaacctctgccttccgggttcaagcaattctcccacctcagcctcctgagtagctgggattacaggcgcccaccaccacagccggctactttttgtatttttaggagagacggggtttcaccatgttggtcaggctggtcttgaactcctgacctcatgatccacctgccttagcctcccaaagtgctgggattacaggcgtgagccaccatgcccagccctatagtagttcttcttttgccccttaatatcctcacccacatgtcctgtaccctgcctgaaccctcctcctctttttgttctgatctttgagctccctagagcccataattctttagagcaggtatgtcccgagtctgaaacatgcccttatttgtcccaagctctggacatttctcaccccaaggcggatcaatcatgattaaatcactccaattaaactttagg

SEQ ID NO: 23159 - DNA, 551 bp, Homo sapiens
  misc_feature (1)...(551): n = a,t,c or g
gtccgggtcaccgttggcgacaccagctgcactggtcagggccccagcaagaaggcagccaagcacaaggcagctgaggtggccctcaaacacctcaaaggggggagcatgctggagccggccctggaggacagcagttctttttctcccctagactcttcactgcctgaggacattccggtttttactgctgcagcagctgctaccccagttccatctgtagtcctaaccaggagcccccccatggaactgcagccccctgtctcccctcagcagtctgagtgcaaccccgttggtgctctgcaggagctggtggtgcaaaaaggctggcggttgccggagtacacagtgacccaggaatctgggccagcccaccgcaaagaattcaccatgacctgtcgagtggagcgtttcattgagattgggagtggcacttccaaaaaattggcaaagcggaatgcggcggccaaaatgctgcttcgagtgcacacggtgcctctggatgcccgggatggcaatgaagnggacctgatgatgaccacttntcattg

SEQ ID NO: 23160 - DNA, 428 bp, Homo sapiens
  misc_feature (1)...(428): n = a,t,c or g
gagcgcggctcccaccatggctgaagaagaggaaactgctgctctcacggagaaggttatccggacccagagggtgtttataaacctgttggattcctacagcagcggaaacatcgggaagtttctatctaactgtgtagttggggcttcgcttgaagaaattacagaggaagaggaagaggaagattaaaataagtcagctatgctggaagcttcctcaaccaaagtgaaggaaggcacattccagattgtgggcacgctgtccaagcctgacagcccgcggcctgactttgcggtggagacgtactctgtaagtcccggaggctctggccaggagtagacagagggaagagtcaccttccggtccaacgccttgacaacttggtttactggttgcctccccttccctttttttcacaaanatgggc

SEQ ID NO: 23161 - DNA, 370 bp, Homo sapiens
ggaacccctccaagtcactggccaactatgactcatgtttggtgatgttggatgccagttaataaagtccagaacttaagcccaagaagagagctcagaagtgtttgtgttactctttattgaggaataatttacagatagtaaaatttaccccttatatctgtacagttttgtgaattatgacaaacttactcaggttgtgtaaccaccagtgcagtcaaggcatagattatttccatccttccagagaagtctctgggaccttttgtagtcagtcccctcatggaatgttttgatcaacgtagaaatgcctggaggctgctgggtgggaggctgatcactcagccatcagagcgtcctgtgtctctga

SEQ ID NO: 23162 - DNA, 394 bp, Homo sapiens
  misc_feature (1)...(394): n = a,t,c or g
gaaccccgacttccactccagtccacgtgaagcaaggcactgccggctctgttattaataatccttatgttatcatggacaagcagccggggcaggtgattggagccaccactcccagtacaggtgtgtattagatccatatttgtaccatctaaagggtttgatctttattaaaaatgtaatcctgccatgacttggtagccatgtaattggagaatgaaatctcccgtaaacgagaagcgagaataagtaaaaggaaagccaatactctttctctgaggggagatttactctgtaaaagttgcattttttagaatttacttgagttttcttttaatttctaaaagttcaaaataagccataatgaatgntcttaaaagaatagttgattttg

SEQ ID NO: 23163 - DNA, 541 bp, Homo sapiens
aattcggcacgaggagaatggatacatcaattttgacaagcggaggaagtcctttctgagttgcgacggctccaaaatgaatgtcgtggctataacctccaacctgaccatgatatccagaggtggctacaggggctccggccactgacagaggctcataaccatcgtgtatcctgtgaggtggagccacctggttccagtgaccctcctgccccacgggtgcttcggccaacattggtcatctcgcagtggacagaggttttgggctctgttggggtccctaccccgcttgtgtcctgtgaccggcccagtactgggggagatgaggcgcctacaactcctgctcctctgctgactcggctggcccagcacatgaagtggccatctgtctcgtcactagactctgccttggaaagcagtccatccctgcacagtccagctgaccccagccacctctccccaccagcctcctcccctaggccttctcgaggtcaccgccgctcagcctcctgtggctccccgctgagtgggggtgcaaaaa

SEQ ID NO: 23164 - DNA, 358 bp, Homo sapiens
ggtgagtcgaagttgcactcaatatagtgttttgaattcggactagtcgtgaaaattcctttccagatcatagtatatgtatataagtcacttactgggaagagcactacatcatagttccgtggtccactaaggctgcagttttcttatctgaaataaggaggggtaacggtgcccatcctgcctcccctggcaggtccgcttacgcatgtagtgagaaaatacaggcaggcttgcagggaacaccgctttaaaagtataaagctctctgtgcaggtgctaggtcatggtatttattatcacactgggatcctgtgggaggggtaaggttagctcattggaatggaaaatccagctt

SEQ ID NO: 23165 - DNA, 543 bp, Homo sapiens
  misc_feature (1)...(543): n = a,t,c or g
ttgnnnncancagctatgacatgattacgaatttaatacgactcactatagggaatttggccctcgaggccaagaattcggcacgagcacgttcggaaatgctgccccatcatcccctgataaagttgacaaagctcagccagaagcaattctgatgcagaggagagtacacaggacgagaagaccagtgtttggatcatgacccatcagttactggctatgatatcttggatacattattaaaactctttggaccttggttttgccatccgtgaaatggggacaagcattctcacctcctgggcagatggagagaatgcagtgtgctaacaaatgaagagtgactatcacagtaaatagtatttccttcctttattcaagcatgtgagggactaaaatgtatcaggcatgtgctaaacatggggaaaataatggcaaatgaattccagagctgctattggtagatcacagggttgattggaaagactgaaagtgaagaagcncccctnnnttngncccnanagaaatntgnccnggnnaaaa

SEQ ID NO: 23166 - DNA, 461 bp, Homo sapiens
  misc_feature (1)...(461): n = a,t,c or g
nntnctnccatgctacgaatttaatacgactcactatagggaatttggccctcgaggccaagaattcggcacgagacaatatcttgttctttggctgatgtaatgagtgaacagctgggcaaagaattgcagttagaagaagaagctgccgtttttcctgaagttgctgttgctgaaggaccatttattactggagaaaacattgatacttccagtgaccttatgctggctcagatgctacagatggaatatgacagagaatatgatgcacagcttaggcgtgaagaaaaaaaattcaatggagatagcaaaggtattataaccttattgtgacaacttcattgagtggtagaaaacactcataatgtgctcctaagtaaatcttcaactatttttgcttcttaagtttccatttcctttgaaaattatcgaaaagtgcatccttatgaagacagcgatag

SEQ ID NO: 23167 - DNA, 542 bp, Homo sapiens
  misc_feature (1)...(542): n = a,t,c or g
gtgnnntnnnnattgganaatttggatgacctgattacgaatttaatacgactcactatagggaatttggccctcgaggccaagaattcggcacgagcccgaatggatctggtaggagtggcatcgcctgagcccgggacggcagcggcctggggacccagcaagtgtccatgggctattcctcaaaatacaatatcttgttctttggctgatgtaatgagtgaacagctggccaaagaattgcagttagaagaagaagctgccgtttttcctgaagttgctgttgctgaaggaccatttattactggagaaaacattgatacttccagtgaccttatgctggctcagatgctacagatggaatatgacagagaatatgatgcacagcttaggcngtnaagangaaaaattcaatggagatagcaaagtttccatttnctttngaanantatcnanaagtgcatncttatgaatacngnatagctnttaanatnaggttgattggcngnanactnggantgacatttctnatcnctanaccc

SEQ ID NO: 23168 - DNA, 347 bp, Homo sapiens
cgccgccatctgtcacctccactccggcatcagcagccagtcgcccgtgtcccgcctgtctcctcggcggagcctgctgcccgtcctgccacctctctgctctgttcttgtctctgccttcattcccgaatggatctggtaggagtggcatcgcctgagcccgggacggcagcggcctggggacccagcaagtgtccatgggctattcctcaaaatacaatatcttgttctttggctgatgtaatgagtgaacagctggccaaagaattgcagttagaagaagaagctgcgtttttcctgaagttgctgttgctgaaggaccatttattactggagaaaacattgat

SEQ ID NO: 23169 - DNA, 640 bp, Homo sapiens
  misc_feature (1)...(640): n = a,t,c or g
ctatgacatgattacgaatttaatacgactcactatagggaatttggccctcgaggccaagaattcggcacgagcggcacgaggagagagccagcagggctggtgctggggcttcttctcctgaaggggctgcaagagggaaggcttagccatgtcgtccttgatcagaagggtgatcagcaccgcgaaagccccaggggccattggaccctacagtcaagctgtattagtcgacaggaccatttacatttcaggacagataggcatggacccttcaagtggacagcttgtgtcaggaggggtagcagaagaagctaaacaagctcttaaaaacatgggtgaaattctgaaagctgcaggctgtgacttcactaacgtggtgaaaacaactgttcttctggctgacataaatgacttcaatactgtcaatgaaatctacaaacagtatttcaagagtaattttcctgctagagctgcttaccaagttgctgctttacccaaaggcagccgaattgaaattgaagcagtagctatccaaggaccactgacaacggcatcactataagtgggcccagtgctgtgtaatctggaattggtaacattttaattttacaattgatgnaacatcttaattaagcgg

SEQ ID NO: 23170 - DNA, 522 bp, Homo sapiens
  misc_feature (1)...(522): n = a,t,c or g
tttgnanancctttatgacctgattacgaatttaatacgactcactatagggaatttggccctcgaggccaagaattcggcacgagcggcacgagcggcacgaggggctcggcgtggtggcgcatgcctgtagtcccagctactagggatgctgaggcaggagaaacacttgaacccgggaggtggaggttgcagtggatcacgccactgcactccagcctgggcaacagagactccatctcccaaaaaaaaaccaaaaaacaaaaaaacgtacatagagaaagtctgaaagcccacaagagcaattagcaaaaggaaccctgacataacaaatacagtgatgtccaaagacattagcaaccaggtagttaagctcagggggtgccacgtgtcataaacttgaaagctgcattggtcatgagtaacacaaatgtaggtgctaccacagacagctggtgggcatttcaaactttctcttcatatctatgatgaattcatggatacccaaaacagtgagcttcc

SEQ ID NO: 23171 - DNA, 585 bp, Homo sapiens
  misc_feature (1)...(585): n = a,t,c or g
gcttctttgtctgcgaaggaaaaacacactgattatcataatgaggtgaactggccaccgccgggccggggcgatgtggcttcttaagccacacttctaattttggtgatggagccgacatttctttggcttctcatttaagtctttgcctctgtcccagtgcgaagtccattcagcggggttgaaagttgcaggcagctttgggaaggggggcgtcggacagggttgcattgtagaaagtggctttgttcgatccttcgcacagatgcaaatggccagagcattcattccctttcttcaagagctgaggactgggggggccactggtgatcagttcccaactctagctctcctctgactcatctcaggacccattgaggacatccaaaactcactcaagatcaccaagtggtaggaaagtactaactcctgggcatagccctaggggagtgactacaatgtgaatactcatggaatgcctagccaggtgaagaagtgaatgcatgttggcatcccagagggaccccccttaagagggcatagtttggggttcanatttgactccagcatactggtgaaattggg

SEQ ID NO: 23172 - DNA, 424 bp, Homo sapiens
  misc_feature (1)...(424): n = a,t,c or g
gctgtgaaggctgagaagagccctcggatgaaaatgggcatcggagcattgtaggcagaaaaccatgtgtgagagagaaagggcaggaacagcccatggaggtgctatgagtggcgcagggtccaagaggcttggtgagagggactgtggagggacgaggaagcaggtgagggtcactacctcctcctttcctgcctgccccggcctctcccctctggcacacagtatcccaaccatgggtttagtgtccaccagacttaaaggacccaggaccttctcaccacacggaatatgcagccttacgcgtccttgcccagggcctttctgaattttagaagctgcaccagcccagggcaggatcagggaggcagggattgggggggcagggggaagtgtggggaaanccccgncnccctggcatttt

SEQ ID NO: 23173 - DNA, 449 bp, Homo sapiens
cacatagcaatttaatcaagtaatcattaattagttaccccctatatataaatatatgtaatcaatttcttcaaatagcttgcttacatgataatcaattagccaaccatgagtcatttagaatagtgataaatagaatacacagaatagtgatgaaattcaatttaaaaaatcacgttagcctccaaaccatttaattcaaatgaacccatcaactggatgccaactctggcgaatgtaggacctctgagtggctgtataattgttaattcaaatgaaattcatttaaacagttgacaaactgtcattcaacaattagctccaggaaataacagttatttcatcataaaacagtcccttcaaacacacaattgttctgctgaagagttgtcatcaacaatccaatgctcacctattcagttgctctgtggtcagtgtggctgcatagc

SEQ ID NO: 23174 - DNA, 344 bp, Homo sapiens
gagaagcttctagctctggggtctggctaccgctaggaggctgagcaagccaggaagggaaggagtctgtgtggtgtgtatgtgcatgcagcctacacccacacgtgtgtaccgggggtgaatgtgtgtgagcatgtgtgtgtgcatgtaccggggaatgaaggtgaacatacacctctgtgtgtgcactgcagacacgccccagtgtgtccacatgtgtgtgcatgagtccatgtgtgcgcgtgggggggctctaactgcactttcggcccttttgctctgggggtcccacaaggcccagggcagtgcctgctcccagaatctggtgctctgaccaggccagg

SEQ ID NO: 23175 - DNA, 422 bp, Homo sapiens
  misc_feature (1)...(422): n = a,t,c or g
gggtcctggccacagaccagaatttccctctagaacccatcgaggatgaaaaaagagacatcagtacagaaggtttctgccatctggatgaccagaatagcgaagtaaaacgggccaggataaaccctgacagctgagacttggagatcccatcctttttactcaggcacctgcttaccgtaaatgatcatgttattgtgtattgccgtggacttcagcacccagacaagccaaaaacagagacagggaagaactcattgttgatcacactgttgccttggaacccacgcagaagtaaactcagccactttgctcagagaagtgtttgacatggtctgttcctagttacatgttggctgtaatgtatgttgagaagtcagtccaaggaggtatgttctttcacaacagccttctngcctctg

SEQ ID NO: 23176 - DNA, 517 bp, Homo sapiens
attggaaactcttgactgattacgaatttaatacgactcactatagggaatttggccctcgaggccaagaattcggcacgagaatttagcttttaatctgtatgtcagttatcattgctgtcatttatttcattagtctcaccaagtcatctgtgtcccactggggatttaacatcgaattatggatgttatggatagtttcagctactcgggaggctgaggcaggagaatagtttgaacccgggaggtggtggttgcagtgatctgagatcacaccgttgcactgcagcctgggcaacacagcaagactccatctcaaaaaaaagaaattattttaaattatattttaggctgagtgcgatggcccagtacacctgtaatcccagcactttgagaggctgaagtaggaagatcacttgaggccaagggtttgacaccagccctggcaacataatgatgcccatctcttttatttttaaaaaattttaaaaatacatttgaaaacttctaaaagcct

SEQ ID NO: 23177 - DNA, 485 bp, Homo sapiens
  misc_feature (1)...(485): n = a,t,c or g
ggggaacacaaacttgctggcgggaagagcccggaaagaaacctgtggatctcccttcgagatcatccaaagagaagaaaggtgacctcacattcgtgccccttagcagcactctgcagaaatgcctcctcagctgcaaaacggcctgaacctctcggccaaagttgtccagggaagcctggacagcctaccccaggcagtgagggagtttctcgagaataacgctgagctgtgtcagcctgatcacatccacatctgtgacggctctgaggaggagaatgggcggcttctgggccagatggaggaagagggcatcctcaggcggctgaagaagtatgacaactgctggttggctctcactgaccccagggatgtggccaggatcgaaagcaagacggttatcgtcacccaagagcaaagagacacagtgcccatccccaaaacaggctnaccagctcggtcgctggatgtcaaagaggatttga

SEQ ID NO: 23178 - DNA, 480 bp, Homo sapiens
acttccacagagtgctggatgacgcggcctgccttgccccagggttatgatggatggcagattctgcacccaagtgctcctaatggaggtggagtcctggggtcctgtgatctggtgccggtcagagcagtcaaggaggggacgctggggctgaccccagcagtgtcagacctttttgctgccataaatgcctcatgtgtggtctggaagtgctgtgaggatgggacactggagttgactgactccaacacaaagtatgttggcaacaacatcagcaccaagggtgtgggcagtgaccgctgcgaggacatcactcagaactacaagtatcctgaagggtctcttcaggaaaaagaggtgctggagagagtcgagaaagagaaaatggaacgtgagaaagacaacggcatccgtcctcccagtctcgagactgccagtcctctgtacctgctcttgaaagcacccagctccctacccctg

SEQ ID NO: 23179 - DNA, 644 bp, Homo sapiens
cgcggtcctcggagacacgcggcggtgtcctgtgttggccatggccgactacctgattagtgggggcacgtcctacgtgccagacgacggactcacagcacagcagctcttcaactgcggagacggcctcacctacaatgactttctcattctccctgggtacatcgacttcactgcagaccaggtggacctgacttctgctctgaccaagaaaatcactcttaagaccccactggtttcctctcccatggacacagtcacagaggctgggatggccatagcaatggcgcttacaggcggtattggcttcatccaccacaactgtacacctgaattccaggccaatgaagttcggaaagtgaagaaatatgaacagggattcatcacagaccctgtggtcctcagccccaaggatcgcgtgcgggatgtttttgaggccaaggcccggcatggtttctgcggtatcccaatcacagacacaggccggatggggagccgcttggtgggcatcatctcctccagggacattgattttctcaaagaggaggaacatgactgtttcttggaagagataatgacaaagagggaagacttggtggtagcccctgcaggcatcacactgaaggaggcaaatgaaattctgc

SEQ ID NO: 23180 - DNA, 698 bp, Homo sapiens
gaccatttgtcctcaattcgtgtgaccataagatactgatagcgttgagtcttgaaatgatttaataatatgagtgaggatttgctttctccattagagcattaagctaaaactatcaacattttaaaccaaattgccttatttttcttccaaacttcatatatgtctatcaggtaataataggcttgaaaattgatatcctgtggtgctaaagtacagtagaaagagaggagaagtgtatacatgttttattttaaattgtacgaaaggggaatttaaaaaatatgtaactgctgtttatacattggctccttactgcttattaatctgtattgtacacatgatgaaatgaagcagaagctgggagtcggcctttcctctagtaaccaccacatggctcagcatctgtgccaaacataggcgctcctagtctggtcagtgccaagaggctaccagaacatggggcaggtggctggtgttggtgtcccagcctaagagccacctgctgcagttaccatggcatgctgagttgatgcaccaggtggtagcatccatccgttattatttccaatgtatacctagcctaggccaaggtaaagttagtttttgccgcccactcagactttattcaaagaccacgggggtacgggtgcaggaaggggaggaggggctggggggaggcccaaggggcaagaagc

SEQ ID NO: 23181 - DNA, 578 bp, Homo sapiens
  misc_feature (1)...(578): n = a,t,c or g
gagaaggcagcatatgtcagcattttcttctctgcacttatcagaaagatcaaagactttaatactttcactaattgtgctactgctatcttctaagaactgaaaagcaggagccaggtgtgcaggtggagcatgaaagtggacaaggagcgtgaccgttgaagcaccacagggagacagacgttggagcctccggatgactgcgggccaggcctgggtaatgtcaggcctcccacaagaggtggtggagcagagtgttctctgactaccctggggagagggagactccctttgccggtctgtgaagtaacgggtgccttcccaggcactggcgttaccgcttgaccaaggcctgctaagtaaccagggccttcccaggcactggcattaccgataggccaaggagccctccagcggcccttctctgggcgtgaatgagggctcacactctcgtcttcttggtcacctctcactgtggcccttcagctcctaantctgtgtgctcntgccgaattattgncntcgagggccaaattccngatagtgngtcgttttaaatnnntaaggcatcataatgt

SEQ ID NO: 23182 - DNA, 410 bp, Homo sapiens
gcggcacgaggggtttgggttgtcttttccctgaaaatggggttgaaatgtttataataaaaaatattgtaaaatgtccccttaactgattagcttacaaccgaatagatttcatgtaatgaaggtatgaatatttataattctttttgttttatttcctctggaatcatgttttgtgctctctgtccttgagtcctgtgtggtgtatggtaaggatggcactctttagttgggcgaaggtgataggcgttgcctgtgtattgttgctgctttaggactactcattttgggccttaactacctaggtttctaaaggatggaatgctcctgagtgcagccttgtgcaagtattctgctatggttgtcagtttttctagatgtagcttgttcttgctctttttttttttttt

SEQ ID NO: 23183 - DNA, 446 bp, Homo sapiens
  misc_feature (1)...(446): n = a,t,c or g
gttttagtagagatggggtttaccatgttggccaggctagtctcaaactcctgacctagtgatgcacccaccttggcctcccaaagtgttgggattacaggcatgagccaccacgccagccattttctctttctaagaagagcaacctcagccggagtgagttttttctgactttgcagctgagtctggagaaaagtggcatgccagagcgggtcggtgggaaacagggtgaactttagcttccatcaacagctctggtagcaaaaccagtcccctaccccctagagaatgcatccgtttccccacctgatatggtttggctgtgtccccacctaaaactcatcttgaattgtagctcccataattgccatgtgttgtgggaaggacccagtgggagataattggaatntgggggcagtttcngccatactgtctggnganatgaa

SEQ ID NO: 23184 - DNA, 597 bp, Homo sapiens
gcagattttgcttttgaaaaatgcttgttacatgaataatttgtggaccagggattgcttttctgaaggcagtatagggaacatgaatattcaagatgaaatacaaaaattatgtttaagggtcatagtgtataagtagcttcctaggaaaccctttgtgtatcttttcaaactggggtgggggctgagcatgcttgtgcagaaagaagccatagccagaaaggacagaatctctcccccactcccttgccccataaccaaacataagctagctagtcttgtctaatagatgggatttactataggtgaagatagccctcatattcaaggacagaagctctggcaggagtaaattagcaaagcagaaatagtaccctttcattcttggaggtgctttgaaattttaggtagaatataatcgaaattatggaggttccttagtgctcaataatataagacctggtgttattagaacgagtctttcttataaactaacagagcaggtatatgcctgttagaccttagctgtggggttcctttactattgggtgaatcattaggtataaaaaataatcatcaaccaggcaaattactttg

SEQ ID NO: 23185 - DNA, 414 bp, Homo sapiens
acgagggatccctctgacaccccaggattaggggacacagcagtggctagggcatcagccacagaactgagcgggaaatgccacttgtattggctgtaaagaaatcctggctttgggccaggcacagtggctcaagcctgtaatcccagcactttaggaggttgaggcggatggatcacctgaggtcaggagtttgagaccagcctggccaacatggtgtaaccccgtctctactaaaaatacaaaaaaattagccaggcgtggtagcgggcacctgtaatcccagctactcaggaggctgaggcaggagaatcacttgaaccggggaggcagaggttgcagtgagctgagatcatgccactccactccagcctgggcgacagagcaagactccatctccaaaaaaaaaaaaaa

SEQ ID NO: 23186 - DNA, 844 bp, Homo sapiens
  misc_feature (1)...(844): n = a,t,c or g
ggaaaacatttacacgtcggaataccatggcaagacatgctgataattgtgctggcccagatggcgtagagggggaaaatggaggagaaacgaagaagagtaaacgtggaagaaaaagaaagatgcgctctaagaaagaagattcctctgacagtgaaaatgctgaaccagatctggacgacaatgaggatgaggaggagcctgccgtagaaattgaacctgagccagagcctcagcctgtgaccccagccccaccacccgccaagaagcggagaggacgaccccctggcagaaccaaccagcccaaacagaaccagccaacagctatcattcaggttgaagaccagaatacaggtgcaattgagaacattatagttgaagtaaaaaaagagccagatgctgagcccgcagagggagaggaagaggaggcccagccagctgccacagatgcccccaacggagacctcacgcccganatgatcctcagcatgatggaccggtgatggcggagccttgtgcgtcgccaggacttctctgggctgtgtttaaacggcccgcatcttaatttttctcccttctttctttttttggctttgggaaaagcatcattttaccaaacataccgagaacgaaaacttcaaggatgatgttagaaaaaaatgtgatttaactagaacttgctgtctgatgttagcaaatcatggaatgttctgagtccctgagggtttactgtgaagtgctgaggacagtgttgacaactaactcgttttcctagatggaaacggagacattgacccctccctccatgtggtaaaccactccagaatggccaccaggcttccca

SEQ ID NO: 23187 - DNA, 423 bp, Homo sapiens
gctgtgttggccaggctggtcgtgaactcctgagctcaagtgatccacccacctcagcctcccagagtgctaggattacaggccttttgactcttttatctgagttttattgacccctctaattctcttacccagaatatttatccttcaccagcaactctgactctttgacgggaggcctcagttctagtccttggtctgctggtgtcattgctgtaggaatgaccacgggcctcagtttccccatttgtataatgggaagcctgtaccaggtcattcttaagatttctcctgactccagtgagctggaattctaaatgctggtctaggagctgtctccaggatggtgcaggatggctttgcggaaaggagatgggtttggaggccaacaaacctgcttgcaatattgcctttgcctcttgg

SEQ ID NO: 23188 - DNA, 407 bp, Homo sapiens
tggccaatgcagggccacaagcattggccaggacaatgccacccagatccctcaagatctgtgcatagccgtcccgctcaatggtggcgcggatctgctcggaacctggagtgatggtgaactgggacttgcacttgaggccatgggccagtgcctgcttggccacagctgctgagcgccccatatcttcatagcttgaattggtgcagctaccaattagacccactcggatgtccagaggccatccttccttctctgccaccttgcccacttctgccacagggtgagccaggtcaggggtgaagggcccattgatgtgtggcttcagctcactgaggttaatttcaattagttggtcataatggcagccagggtcaggcaccaagtgatccttgaattcatcagcc

SEQ ID NO: 23189 - DNA, 580 bp, Homo sapiens
  misc_feature (1)...(580): n = a,t,c or g
gggcgatgggttatgtgccctgcgagtacagtcgtccagggacaatgctgctggtagaggtgcggcggaagcagcagatggctgtagtcagcaagatgccctttgtgcccacaaactactataccctcaagtgaagctggctcagggtggggctgtcccttccaggagttttgcccctacaaggggttagtcaagaagctgaggcagaactcactgggggtgggcagttaaggtggaggctgattctaattgtctggttgaggggccacaccacctattccccccacctaactcatgccattccagcttccttcaggaccctgcttctgagtgacggaccagctcacacaatgtcttgtttcagtccatgatcccactgacctactcttgcctgctggagggtaatgagaaactttggttctgcaatctctccaatctgcaagtgctggctgtggancaaaggntcaactttgtggacaggataaaacctgcccaactactcacatggtttcacattcaaanggtataacatgggcattcggcttagntacccctccagtttgcttccgtaangaaattg

SEQ ID NO: 23190 - DNA, 359 bp, Homo sapiens
gggagaacgaatttgtcctcatcaagaaggatgtggatgaagcttacatgaacaaggtagagctggagtctcgcctggaagggctgaccgacgagatcaacttcctcaggcagctgtatgaagaggagatccgggagctgcagtcccagatctcggacacatctgtggtgctgtccatggacaacagccgctccctggacatggacagcatcattgctgaggtcaaggcacagtacgaggatattgccaaccgcagccgggctgaggctgagagcatgtaccagatcaagtatgaggagctgcagagcctggctgggaagcacgggggatgacctgcggcgcacaaagactgagatctt

SEQ ID NO: 23191 - DNA, 332 bp, Homo sapiens
gctgttgagtgccaaggaccctgctaagtgctttgcttgtacgtaatcctcagaacaaccctctaaaggaggcatgatgagtacttttatcatcaccctccccattttacagataagcacactaaggcacagaacagttaaaattcctgccaggaaagactcaagtcagacctttctgatccccaaaccactctgcctgctaggccccgggctgcggcttcaggatgggggcttgtattctctgtgactctgctacacctagatgctcccactcccacagtcaccctggtcatttctagaaggcaacagcagcaggatttgacacatgcccc

SEQ ID NO: 23192 - DNA, 372 bp, Homo sapiens
ctgaaaagccatctttgcattgttcctcatccgcctccttgctcgccgcagccgcctccgccgcgcgcctcctccgccgccgcggactccggcagctttatcgccagagtccctgaactctcgctttctttttaatcccctgcatcggatcaccggcgtgccccaccatgtcagacgcagccgtagacaccagctccgaaatcaccaccaaggacttaaaggagaagaaggaagttgtggaagaggcagaaaatggaagagacgcccctgctaacgggaatgctaatgaggaaaatggggagcaggaggctgacaatgaggtagacgaagaagaggaagaaggtggggaggaagaggaggaggaagaagaat

SEQ ID NO: 23193 - DNA, 395 bp, Homo sapiens
cggacgcgtgggatggagaggagacgcatcacctccgctgctcgccgctcctacgtctcctcaggggagatgatggtggggggcctggctcctggccgccgtctgggtcctggcacccgcctctccctggctcgaatgccccctccactcccgacccgggtggatttctccctggctggggcactcaatgctggcttcaaggagacccgggccagtgagcgggcagagatgatggagctcaatgaccgctttgccagctacatcgagaaggttcgcttcctggaacagcaaaacaaggcgctggctgctgagctgaaccagctgcgggccaaggagcccaccaagctggcagacgtctaccaggctgagctgcgagagctgcggctgcggctcga

SEQ ID NO: 23194 - DNA, 479 bp, Homo sapiens
atttatttaattcccttgaaagtctcatatacaccactaagtagtcacattcacaaacttaatttttataaattcagcagcagtcttaggaatcctaggagaagaagaactccataaaaatgcaactgtaatagtcagtgagagaggtgaatttttatggagttcttcttctcatatacaccactaagtagtcacattcacaaacttaatttttataaattcagcagcagtcttaggaatcctaggagaagaagaactccataaaaatgcaactgtaatagtcagtgagagaggtgaatttctgctccattcaatagtccaggtcttcatcaaggtatcttaaaggctgaactcactgggttataaattcccattttccttttcagtgtggctcagaatggcctccttttccattccagaaataggaagaaatttagacacagaaattagttcagcagcactgaaatcagctgactcat

SEQ ID NO: 23195 - DNA, 910 bp, Homo sapiens
aacagctatgacatgattacgaatttaatacgactcactatagggaatttggccctcgaggccaagaattcggcacgagggcggtcccgcgggtctgtctcttgcttcaacagtgtttggacggaacagatccggggactctcttccagcctccgaccgccctccgatttcctctccgcttgcaacctccgggaccatcttctcggccatctcctgcttctgggacctgccagcaccgtttttgtggttagctccttcttgccaaccaaccatgagctcccagattcgtcagaattattccaccgacgtggaggcagccgtcaacagcctggtcaatttgtacctgcaggcctcctacacctacctctctctgggcttctatttcgaccgcgcgaggagaagcgcgagggctacgagcgtctcctgaagatgcaaaaccagcgtggcggccgcgctctcttccaggacatcaagaagccagctgaagatgagtggggtaaaaccccagacgccatgaaagctgccatggccctggagaaaaagctgaaccaggcccttttggatcttcatgccctgggttctgcccgcacggacccccatctctgtgacttcctggagactcacttcctagatgaggaagtgaagcttatcaagaagatgggtgaccacctgaccaacctccacaggctgggtggcccggaggctgggctgggcgagtatctcttcgaaaggctcactctcaagcacgactaagagccttctgagcccagcgacttctgaagggccccttgcaaagtaatagggcttctgcctaagcctctccctccagccaataggcagctttcttaactatcctaacaagccttggaccaaatggaaataaagctttttgatgcaaaaaaaaaaaaaa

SEQ ID NO: 23196 - DNA, 708 bp, Homo sapiens
tgttcttgtcataaaatgcatactgttgatacaaaccactgtgaacattttttatttgagaattttgtttcaaagggattgctttttcctctcattgtcttgttatgtacaaactagtttttatagctatcaacattaggagtaactttcaaccttgccagcatcactggtatgatgtatatttaattaaagcacacttttccccgaccgtatacttaaaatgacaaagccattcttttaaatatttgtgactctttcctaaagccaaagtttctgttgaattatgttttgacacacccctaagtacaaggtggtatggttgtgtacacatgctgccttcttggggattcaaaaacaggtttttgattttgaatagcaattagtgatatagtgctgtttaagctactaacgataaaaggtaataacattttatacaatttccatatagtctattcattaagtaatctttttacagttgcatcaggcctgaacccgtccattcagaaagcttcaaattatagaaacaatactgttctatacgagtgaccgattatgctttctttggcctacattctttattctgcggtgaagttgaggcttataagttaaaacaaaggaactaacttactgtccaccagtttatacagaactcacagtacctatgacttttttaaactaagatctgttaaaaaagaaatctgtttcaac

SEQ ID NO: 23197 - DNA, 226 bp, Homo sapiens
aaaccaataaatttgtgttactgcagtagtaatcttatgcacacggtgatttcatgttatatatgcaaagtaggcaactgttttcttagttacagaagtttcaagcttcacttttgtgcagtagaaacaaaagtaggctacagtctgtgccatgttgatgtacagtttctgaaattgttttacaagactttgataataaaacccttaaacttaaaaaaaaaaaaaa

SEQ ID NO: 23198 - DNA, 369 bp, Homo sapiens
gatagggctttaaatggaaagatttactagagtaaagacattaaaatgtgcacattttataaatgaatgattaagagtaatacagagagctgggtgcaatggttcaggcctgtaatctcagagcactatgggaggacaaggcaggtggatagcttgagcccaggagtatgagaccagcctgggcaacatggcaaaaccctgtctctaccaaaaatacaaaaattaggcaggcgcagtagtacatgctgttagtcccagctactcaagatgctgaggtgggaggatcacctgagcccagggaggtcaaggctgcagtgagccgtgattgcgccactgcactccagcctgagcaacagagtgagaccctgt

SEQ ID NO: 23199 - DNA, 449 bp, Homo sapiens
gaaaattaaaagcttttacgcttccaaagacaccattaaaagaatgagagttacagactggaagaaaatatttgcatattaaatatctgataaagagcttatattcacattaagaactcttaaaacttaataaaaataaggcaaacaacctaatttaaaaaatggacaagagatttgagtacctatttcaccacaagatatacaaatagctcataagcaacctggaaggatggtcgacatcattagtctctgaactggcaccatgtgaggctccagttcacacccgctcacagggctcaccatagcagggctgcaaggtttcggagaagctggacgcctcgtgcgaggccgatggggatgctgatgggacatcccttttgaaaatacatttgcagtttctttagaagttacacataagtttaccatatgacccaacaactccactccta

SEQ ID NO: 23200 - DNA, 407 bp, Homo sapiens
agtggataaactgtacgctggtctgaaagaccttgctgaagagagaagaggcaagctggatgagagacacaggttattccagctcaaccgggaggtggacgacctggagcagtggatttcagaaaaggagctagtggcctcttccccggaaatggggcaagactttgaccacgtgactcttctgcgggacaagttccgggactttgcccgggagaccggggcgattgggcaggagcgggtggacaatgtgaatgccttcatcgagcgactcatcgacgcgggccacagcgaggcggccaccatcgccgagtggaaggacgggctgaacgagatgtgggcagacctcctggagctcattgacacaagaacacagattcttgccgcttctatgaactgcacaagtttta

SEQ ID NO: 23201 - DNA, 528 bp, Homo sapiens
  misc_feature (1)...(528): n = a,t,c or g
gaaagacggatgtaccgaggcaggagatgggcagggcttgtgttctggtcacaatcctgctgaccaaaacagaatctggcctagacaggatgaagtgaaaaaacagcagcaacaggcagatggcgatgaaagcaatcactagctgccctcatattcccatcagcactgtgacagtttacaaatgccatggcaacgatctggaagttaccacccctttccaggaaagttctaaataacacgcccctcaatttgcattgatgtgccccttaacttacctgtaattggctgggcatggtggcccatgcctgtaatcccagcacttttggaggccaagatgggcagatcacctgaggtcaggagttcaagaccagcctggccaacatggtgaaaccctgtctttactaaaaatacaaaaattatctgagtgaggtggctcgcacctgaaatctcatgaggctgaggcaggagaatcacttgaacctgggacnccngggtgagtgactaagatacacactgtgctccaccctg

SEQ ID NO: 23202 - DNA, 481 bp, Homo sapiens
  misc_feature (1)...(481): n = a,t,c or g
gattgttaaaaatgactgatttctggctttaatactgtcttgaagtatatgaaagtaatctttcactggaaatcacctggataacggctgaagagaagaccagggctaggtcgaatttcctttttggttcagttactgtaatgtgctgctacctgtcctttcatttgccctgcaaatggcacttaaatttatacagtttaagaaactttgttttctaaactagatgaataagattttctcatttgtgaaacagcataaatatattttcagggtgagatttttttaagtctaaaaacctgttctgaagataatttatagtttcatttttatagtattggctttacatagtaaagataatgcacatgaaatacactactgatcctccagttctaagccaggcnnnnnantgggttcccannctangccnaanntttggcannnnnntngcncccnttaagggggnaaaaanccncgggggggg

SEQ ID NO: 23203 - DNA, 516 bp, Homo sapiens
  misc_feature (1)...(516): n = a,t,c or g
gggtnnttnctnatganatggnttcactattttaatacgactcactagngccgaatttggccctcgaggccatttaattcggcacgaggctcggcgtggtggcgggcacctgccgttccagctactcaggaggctgaggcaggagaatggcntgaacccaggaggcagagcttgcagtgagctgagatcgcaccactgcactccagcctgggcgacagtgtgagactccatctcaaaaaaaaaaaattnttttttggtcaaaaccataantttggtnaacccccctgataccttgtgaatnttataatttgtcaaaaaaatggtattttaaaantcctangggccaaccacaatggctatgcctntnntcccancnntttcggaggtcaaaatgggaggactacttgancctaaaattctnaaatcaccctggccaacacngggaaaacccccntctctacaaaaaataaaaaaataaaanttattngggtntggtggcatgcttctgtnntctca

SEQ ID NO: 23204 - DNA, 992 bp, Homo sapiens
aattcggcacgagggacgctctcagctctcggcgcacggcccagcttccttcaaaatgtctactgttcacgaaatcctgtgcaagctcagcttggagggtgatcactctacacccccaagtgcatatgggtctgtcaaagcctatactaactttgatgctgagcgggatgctttgaacattgaaacagccatcaagaccaaaggtgtggatgaggtcaccattgtcaacattttgaccaaccgcagcaatgcacagagacaggatattgccttcgcctaccagagaaggaccaaaaaggaacttgcatcagcactgaagtcagccttatctggccacctggagacggtgattttgggcctattgaagacacctgctcagtatgacgcttctgagctaaaagcttccatgaaggggctgggaaccgacgaggactctctcattgagatcatctgctccacaaccaaccaggagctgcaggaaattaacagagtctacaaggaaatgtacaatactgatctggagaaggacattatttcggacacatctggtgacttccgcaagctgatggttgccctggcaaagggtagaagagcagaggatggctctgtcattgattatgaactgattgaccaagatgctcgggatctctatgacgctggagtgaagaggaaaggaactgatgttcccaagtggatcagcatcatgaccgagcggagcgtgccccacctccagaaagtatttgataggtacaagagttacagcccttatgacatgttggaaagcatcaggaaagaggttaaaggagacctggaaaatgctttcctgaacctggttcagtgcattcagaacaagcccctgtattttgctgatcggctgtatgactccatgaagggcaaggggacgcgagataaggtcctgatcagaatcatggtctcccgcagtgaagtggacatgttgaaaattaggtctgaattcaagagaaagtacggca

SEQ ID NO: 23205 - DNA, 508 bp, Homo sapiens
ctatgacatgattacgaatttaatacgactcactatagggaatttggccctcgaggccaagaattcggcacgagaatcatgctaccatctgtgaatgcttattaacctgggtttttttgttttgtattattttcaaatgaagcatttggattacagcagcatttcctaatctaaactatcctgcatatcaagcaaagtatttcaatttctccaccatgagccaggcacagtggcttacacctataatcctagcactttgggaggctgagggaggaggacagcttgagcccaagagtttgagaccagcctgggcaacatggagagagccctgtctctacaaaaaataaaaaatgacaaaatcagttgggcatggtgacatgcacctgtggtctcagctactcaggaggctgaggtgggaggatcgcttcagcccagggggtctaggctgcagtgagctgtgattacaccgctgcattccagcctgggaaacagactgagactctgctca

SEQ ID NO: 23206 - DNA, 642 bp, Homo sapiens
  misc_feature (1)...(642): n = a,t,c or g
gcggcacgagctccagcgatcccggatccactgcgctggcaggggcctgggggtgggtctcttgctgtctctgcgacgacatccttacgtttcggcactctaatgctgggtttgtgcgtgtgtgtctgcttagcggtctagcgggctgttaggctccctcgcccccagctccttggctcgctcagctcctccaccgcagcccagcagtgagacgcgcgcgcagccagctccccacgagatggaacagaccgaagtgctgaagccacggaccctggctgatctgatccgcatcctgcaccagctctttgccggcgatgaggtcaatgtagaggaggtgcaggccatcatggaagcctacgagagcgaccccaccgagtgggcaatgtacgccaagttcgaccagtacaggtatacccgaaatcttgtggatcaaggaaatggaaaatttaatctgatgattctctgttggggtgaaggacatggcagcagtattcatgatcataccaactcccactgctttctgaagatgctacagggaaatctaaaggagacattatttgcctggcctgacaaaaaatccantgagatggtcaagaagtctgaaaagaatctttgangggaaaaccagtgtgcctacttcat

SEQ ID NO: 23207 - DNA, 395 bp, Homo sapiens
gcctttaccagatcataatttgatctggcccgcaaaacagttagaatgccctgtctatgccttaggaagaatctaggtttttttcctctttttttctttccttggcatctctactcttgattattcatcaagaattatgggctgggtgcggtggctcacgcctgtaatcccagcactttgggaggctgaggcgggcagatcacgaggtcaagagattgagaccatcctggccaacatggtgaaacccggtctctactaaaaaacaaaaattagctgggcatggtggtgtgtatctgcagtcccagctactcgggaggctgaggcaggagaattgcttgaacccggaaggcagatgttgcagtgagttgagatcatgccaccgcactccagcctgg

SEQ ID NO: 23208 - DNA, 361 bp, Homo sapiens
acggcttcaattaagcccgaagtagcccttttagatacccaagacatggagaatatgagtgatgatgatggttgggaatttgtgaaccttggagatcagcaaagctttggtattaaaactgcaggactagaagaaaaatcaactgcttgccagatgttggtttgctatgctaaggagttaaaggaaggctttgtggagtacaccgaacaggttgtcaaactgatggtccctttactgaaattttatttccacgatggtgttcgagtggcagcagcggaatccatgcctcttctcctggagtgtgcaagagtccgtggtcctgagtatctcacacagatgtggcattttatgtgtgatgctg

SEQ ID NO: 23209 - DNA, 483 bp, Homo sapiens
tatgacatgattacgaatttaatacgactcactatagggaatttggccctcgaggccaagaattcggcacgaggtctttatttgacgaaaacgagctgttgcgcagccattggtacctgtattggggaaacatagcatacaagcaagaagcttacagcctcagtggcgaaaattttttcatgtcagagaccgagaactcttgcagtcgtttatgtcatcccttcttctccagacagaagataccaaaaagttgcaatcaaagatctcttcatcttattgataaagccactaataagccaaaatgtctgtcaatgtcaaccgcagccgtgtcagaccagttctatcgctacaagatgccccgtctgattgccaaggttgagggcaaaggcaatggaatcaagacagttatagtcaacatggttgacgttgcaaaggcgcttaatcggcctccaacgtatcccaccaaatattttggttgtgagg

SEQ ID NO: 23210 - DNA, 410 bp, Homo sapiens
gcggcacgagggagcttaaaacctagatgatgtgttgataggtgcagcaaaccaccaagtcacatgtatacctatgtaacaaacctgcaggttcaacacatgtaccccagaacttaaggtaaaattttaaaaaagatagaaggaacattgaggtattaagaaaactattctgaattttggaataatatatattacattgtgagagacctaattataaaattggataatgaaaaggcaaggcaaaacaagaagatgtgcataaaagaatgaaaacaaaagaagctctcctctctttttttataagaatcaaagaaatgtttcttctttcttctctttctcttcctctttttcttactctttctttctttctttctctttctttcttcccttctttctctccttccttctct

SEQ ID NO: 23211 - DNA, 462 bp, Homo sapiens
gcggtgcccggagtgtggtacttctcctagttgcagtcaggcttcatacgctattgtcctgcccgttagagcagccagcgggtacagaatggattttggaagagggagtcaccactggacctccaaggaagccacgtgcagacatctacaaccttcgatctcctgacgagtttattgttggccaaaaccaggctttgattgaaccaggatgaatgcgggtgttggaagtagaatatatatatacatataaaattgaaactggcgatggaatatgagaggagccctctggaaagaaaaggacagaccctgtgctttcatgaaagtgaagatctggctgaaccagttccacaaggttactgtatacatagcctgagtttaaaaggctgtgcccacttcaagaatgtcattgttagactttgaaatttctaactgcctacctgcataaagaaaataaaatcttta

SEQ ID NO: 23212 - DNA, 440 bp, Homo sapiens
  misc_feature (1)...(440): n = a,t,c or g
aanaaccgntttgacatgattacgaatttaatacgactcactatagggaatttggccctcgaggccaagaattcggcacgagtgaatcaaagattaatgcatttagggccgtgcaggatgtgctttgttaacaatgtgtttgcaggcagtatgcttggtaaaagtcatccccatcctccattcttgattaaccagggacacagtgcactgcagaaagccgcagggacctctgcccaggaaagcctgggaattgtccaaggtttccccccactgagacagcctgagatatggcctcgtgggaaaggaaagatcttaccatcccccagcccgacaccagtaaagggtctgtgctgaggaggagtagtgaaagagggaggcctctttgcagttgagataagaggaaggcatctgtctcctgctcgtccctgggaatggaatgt

SEQ ID NO: 23213 - DNA, 445 bp, Homo sapiens
gaactgagacactgaggcttcgtccttatagtagtcaggagcaggcgattgaagtaattctgtcctgcggggttcagcatcatgcacgttccccctgggccattctctgatgcagggcacttgctccacactctgggaacccagattcaccagtctgccctgtcacgtagttgaaggagttgcatttatctttctggctcctaattcctttaaaattacatttgttgcagaacctccacaaggctaaataaaattacatttgtgaccatcagagaactgaataaaccattaactggccatcctggttttgcagagatcaggttgttgacagttcctggttgacccacagctacccatgtcagttatctccactaacatatccaagaatctttgtaggacaatttctccacctgcaaggtctttcaggtagaactcttcttttaag

SEQ ID NO: 23214 - DNA, 549 bp, Homo sapiens
  misc_feature (1)...(549): n = a,t,c or g
ggtgtgaagcgtctgccatgctgccactggagtgccagtacttgaacaaaaacgccctgacgaccctcgcgggacccctcactcccccggtgaagcattttcagttaaagcggaaacccaagagcgccacgctgcgggcggagctgctgcagaagtgtgagtggccgcggccgccatcgggcattgtctttgtagtttccagtcataggtttcttaggttctaaggtaccaagactgccccttcaaggtggcgttctgggccaggcatggtggctcacacctgttgggaggctggggcaggtgggtcgtttgagcccaggagtttgagaccagccaagaaaccccatctctaccaaaagtaccaaaacattagccgggcatggtggtgcgtgcctgtgctcccagctactcggaaggctgaggtangaggatcacctgagcccacgangttnaggctgcagtgagctgtgatcacaccactacactccagcctgggagagagtannacctgtccaagaaaaagaagtaaantctgcataagttttttgt

SEQ ID NO: 23215 - DNA, 430 bp, Homo sapiens
  misc_feature (1)...(430): n = a,t,c or g
gaaatgaggcaccctgggtgactgataagaggcctccgccagattggcccagcaaaggcaagatccagtttaacaactaccaagtgcggtaccgacctgagctggatctggtcctcagagggatcacttgtgacatcggtagcatggagaagattggtgtggtgggcaggacaggagctggaaagtcatccctcacaaactgcctcttcagaatcttanattatcattgnaggannnaaaattggttncntttggcttcannaacntccnaaaaancttgnccttattccccnngaacccantcnngtnttttgaaaccntgaggatgaatctcgaccctttcaacaactactcanatgaggagatttggaaggccttggaactggttacctcaggcttttggggccanctgaacttggggtatncccca

SEQ ID NO: 23216 - DNA, 524 bp, Homo sapiens
tatgactgattacgaatttaatacgactcactatagggaatttggccctcgaggccaagaattcggcacgagaaatgaggcaccctgggtgactgataagaggcctccgccagattggcccagcaaaggcaagatccagtttaacaactaccaagtgcggtaccgacctgagctggatctggtcctcagagggatcacttgtgacatcggtagcatggagaagattggtgtggtgggcaggacaggagctggaaagtcatccctcacaaactgcctcttcagaatcttagaggctgccggtggtcagattatcattgatggagtagatattgcttccattgggctccacgacctccgagagaagctgaccatcatcccccaggaccccatcctgttctctggaagcctgaggatgaatctcgaccctttcaacaactactcagatgaggagatttggaaggccttggagctggctcacctcaagtcttttgtggcagcctgcaacttgggttatcccacgaagt

SEQ ID NO: 23217 - DNA, 395 bp, Homo sapiens
gactggatcatgttgtaggtccggctcctgttgctgaggaagcagctctggatgaccttcatgatgaaatttgcagcctcgcgctcagtcatgttggggctaaacctgtgcttcaagaacttgattggccgcgaaaacagggcaggcccgtgtccaacatgatagtgaccagggagacgaccacatccatgtagggccgcacagccaggtagcctcggacacacatctccatgaaccacttgaagggtgtggcctccatcttgccccccatgatcatcaccatctcatccgtcagcttgatgtcgggttcccagccgagattgccgcccggcgagctttcaaacatgaagccaaagtctgcaaaaccccaaagagctgcctgtgactgggtagga

SEQ ID NO: 23218 - DNA, 448 bp, Homo sapiens
  misc_feature (1)...(448): n = a,t,c or g
ctatgatntgattcnaatttaatacgactcactatagggaatttggccctcgaggccaagaattcggcacgagccaaccttgttctcacagaaacatgtgttgtatggaatcaaggtttaaaggatctagggctatccggggtgtgccttgttaacaatatgtttacaggcagtacgctaggtaaaagtcaccaccgttctccattctcgattaaccaggggcacaatgcactgcgaaaagctgcagggacctctgcccaggaaagccgggtattgtccaaggtttctccccactgagagagcttgagatatggcctcttgggatgggaaagacctgaccgtcccccagcccgacacccgtgaagggtctgtgctgaggaagattagtaaaagaggaagacctcttgcagttgagataagaggaaggcctctgctcctgcatgcccct

SEQ ID NO: 23219 - DNA, 335 bp, Homo sapiens
ggagctctactttgtaattctgtaagtccatgtttttcacattcacagaaaagagtaagtttgcttttcagtcattctttaattatatgcttcagggcaatatttaactgtgcaatctctcaaaacctttaatgtgccaatggcctctgaagctgctagtgtaatatgtggcctttcctacaccttccttcctatggaacacactttggaaagcactttcagttggatttgctctcagtaccatttttggggctgtgaagggggaagagtaagttacaagaactgatctaattagaggctttgaggggaagcaaatgctcatctagtggcctttc

SEQ ID NO: 23220 - DNA, 523 bp, Homo sapiens
gggagaaagctgaccgcttaggcccgggtagtggtcgtcgtggttttccttgtagttcgtggtctgagaccaggcctcaagtggaaacggcgtcaccatgatcgcacggcggaacccagaacccttacggtttctgccggatgaggcccggagcctgcccccgcccaagctgaccgacccgcggctcctctacatcggcttcttgggctactgctccggcctgattgataacgtgatccggcggaggccgatcgcgacggctggtttgcatcgccagcttctatatattacggcctttttttttgctggatattatcttgtaaaacgtgaagactacctgtatgctgtgagggaccgtgaaatgtttggatatatgaaattacatccagaggattttcctgaagaagataagaaaacatatggtgaaatttttgaaaaattccatccaatacgttgaagtcttcaaaatgcttgctccagtttcactgatacctgctggtctgaatttgatggacatggtttt

SEQ ID NO: 23221 - DNA, 360 bp, Homo sapiens
ggctaaatggcatctatacaattgagttttcagtcagggtgggtggtttgcttgagcttagcggtttgagaccagcctgagctcagcagttcgagacaagcctgggcaacatggtgaaactccatctctatcaaaaatacaaaaattagttgggtatagtggcatgcacccgtggtcgcagctactcaggaggctgaggtgggaggattgctggagcctgggaagtcaaggcttcagtgagccatgatcatgacactgcactccagcctgggtgacagagtgagacatggtctcaagaaacaaaacaaaacaacaaccagattactctggagtaggacagtgtgctaaaaaaaaaaaaaa

SEQ ID NO: 23222 - DNA, 406 bp, Homo sapiens
ggacttttaacaagatgcctcctcaaaggggcggcggcagcagcaaactctttagctcttcttttaatggtggaagacgagatgaggtagcagaggctcaacgggcagagtttagccctgcccagttctctggtcctaagaagatcaacctgaaccacttgttgaatttcacttttgaaccccgtggccagacgggtcactttgaaggcagtggacatggtagctggggaaagaggaacaagtggggacataagccttttaacaaggaactctttttacaggccaactgccaatttgtggtgtctgaagaccaagactacacagctcattttgctgatcctgatacattagttaactgggactttgtggaacaagtgcgcatttgtagccatgaagtgccatcttg

SEQ ID NO: 23223 - DNA, 405 bp, Homo sapiens
  misc_feature (1)...(405): n = a,t,c or g
gagcccggtgccaagcgcagctagctcagcaggcggcagcggcggcctgagcttcagggcagccagctccctcccggtctcgccttccctcgcggtcagcatgaaagccttcagtcccgtgaggtccgttaggaaaaacagcctgtcggaccacagcctgggcatctcccggagcaaaacccctgtggacgacccgatgagcctgctatacaacatgaacgactgctactccaagctcaaggagctggtgcccagcatcccccagaacaagaaggtgagcaagatggaaatcctgcagcacgtcatcgactacatcttggacctgcagatcgccctggactcgcatcccactattgtcagcctgcatcaccagagacccgggcagaaccaggcgtncaggacgcc

SEQ ID NO: 23224 - DNA, 556 bp, Homo sapiens
  misc_feature (1)...(556): n = a,t,c or g
cgccttcccccctccccntngccccncggantacncgttatgacatgattacgaatttaatacgactcactatagggaatttggccctcgaggccaagaattcggcacgaggctgggggttgtggaattcgccgttcgaaagcagggactaaaagccccacttcgtcttacgttccgaacggaaggcgtnnnnnnnnnnnnnctntcactnntgnngnagncnntnacngcgtncgnagnnncagaaacgaancgtatggtcattgttctntatattncccntgntcactgctgcgattgctcaaggacattttatgttacggctttaaagcaaaggcatgattattaanaaactatttaagcttttttctttganaaacaagctccttttacagaatataaacaacagtagtgcctgnggtttancccaccaatcttgatgactaaaagtagctgatgcttgggcatatgatcttgagatggtttttgcaaaagccnaaatcgctgcaggtantcacaatagataaangtggtattttaaacctttgaaataact

SEQ ID NO: 23225 - DNA, 535 bp, Homo sapiens
  misc_feature (1)...(535): n = a,t,c or g
ggtnnnnnnnttggnnanngcttgactgattacgaatttaatacgactcactatagggaatttggccctcgaggccaagaattcggcacgaggcaggatgtgccttgttaaccaaatgtttgcaagcagtatacttggtaaaagtcatcaccattctcttgtcccaataaaccaggggcacaatgcactgtggaaagccgcagggacctctgcccttgaaagctgggtattattcaaagtttccccccatgtgatagtctgaaatatggcctcgtgggatgagaaaggcctgacggtcccctagcccgacacccataaaaggtctgtgctgaggtggattagtcaaagaggaaagactcttgcatttgagatagaggaaggccactgtctcctgcctgcccctgggaactgaatgtctcggtataaaacacgattgtacatttgttcaattctgagatgggagaaaaaccgcctatggtgngaggcnanacatgttacagnantacngcctngaaattntnccccccgganattt

SEQ ID NO: 23226 - DNA, 490 bp, Homo sapiens
tatgacatgattacgaatttaatacgactcactatagggaatttggccctcgaggccaagaattcggcacgaggagagaatgacccacagccagagagtatatgaacctctgagtcagctaacccagcaatagttatgccttctagagagggagtccacaccaggccatggggaggagtcatccagcttcaatatctataacaaagacttatttcacttgcttaggagaactcaagtttaaaatagtgagtgagactttttttagcattgcccaaaagatgaaactgcagcccttttccagccagagagatgagctgtgcattagttgacttgcagagttcaaccgaatggaatggtcttggagtaaggcagtaatagaaaaatcagcctttgtgtctggcctgctttttaatattcccactgaactctcagtctgttaagaatctcatgatatatttgggctaatctcttaggtcatatctcctctcag

SEQ ID NO: 23227 - DNA, 426 bp, Homo sapiens
  misc_feature (1)...(426): n = a,t,c or g
gataatagtacttaccaaaacaagcaataaaagttatcttgagtattaattcatataaagttgcgctgcaacacaaataaagtgctcagtaaatatcagttatgttttttattgccatcattccatcatgatccagtcttaggttccatagtgggtataaagatgacacaggctttgcctttgaggtgggcaaaaaggagctacacttctattgatgactgttatgactaggtatttgcataaccataaccatatttcataacatatttcatccgttctgagatcctattctaacatctctgatatcagtcagcttcttataacattcaggatgccttttgaaaaatatcagtgatgcataaaattatcagtgatgcatataataatgggcatcttacaattggnatatcttggatttgatgaaaa

SEQ ID NO: 23228 - DNA, 892 bp, Homo sapiens
  misc_feature (1)...(892): n = a,t,c or g
gcgacagctactgctgccgcagccgcctcatcggccgccccaagctggcggctccagctccgggacgacgaccacgacgacgaccacgacgggagggatcctgatcggcgatcgcctgtactcggaagtttcacttaccatcgaccactctctgattccggaggagaggctctcgcccaccccatccatgcaggatgggctcgacctgcccagtgagacggacttacgcatcctgggctgcgagctcatccaggccgccggcattctcctccggctgccgcaggtggcgatggcaacggggcaggtgttgtttcatcgttttttctactccaaatctttcgtcaaacacagtttcgagattgttgctatggcttggattaatcttgcatcaaaaatcgaagaagcacctagaagaataagagatgtgattaatgtattccaccacctccgccagttaagaggaaaaagcgaccagctacatttaccaaagcctgggtgatgtggagtggtacatanagatgaagctgtcgtcatggcaacagtgagtgaagtatcgaaaatccccaaggagaagccagtgctctgagaataggtcactggaatcggggactaacaggactccaagccccctgatccttgatcagaactacattaacaccaaaaatcaagttatcaaagcagagaggagggtgctaaaggagttgggattttgtgttcatgtcaagcatcctcataagatcattgttatgtatttacaagtcctagaatgtgaacgttatcaanacccgggtcaaaacggccgggnaancaactttttagattccttccctagccaggaaacnnaancanaantaaagtaattccgtttccttccaaataatggnanaattgg

SEQ ID NO: 23229 - DNA, 705 bp, Homo sapiens
  misc_feature (1)...(705): n = a,t,c or g
atgatgatctttaaaatacacactcaaatcaagaaacttaaggttacctttgttcccaaatttcatacctatcatcttaagtagggacttctgtcttcacaacagattattaccttacagaagtttgaattatccggtcgggttttattgtttaaaatcatttctgcatcagctgctgaaacaacaaataggaattgtttttatggaggctttgcatagattccctgagcaggattttaatctttttctaactggactggttcaaatgttgttctcttctttaaagggatggcaagatgtgggcagngatgtcactagggcagggacaggataagagggattagggagagaagatagcagggcatggctgggaacccaagtccaagcataccaacacgagcaggctactgtcagctcccctcggagaagagctgttcacagccagactggcacagttttctgagaaagactattcaaacagtctcaggaaatcaaatatgcaaagcactgacttctaagtaaaaccacagcagttgaaaagactccaaagaaatgtaagggaaactgccagcaacgcagcccccaggtccagtatgggtataggnctacaaaaanncagcaagggtgatggaaaccattgtaaatgngntttttaaaaaaaaacntgggntcctaatgaaaaagcccttngacctnaaatngaac

SEQ ID NO: 23230 - DNA, 664 bp, Homo sapiens
gaacacattcaggaaaggataggaagagtttgctgaagttctttctttagggattcttgtgtaccgatagcacagttaaagagcaaactcataccatttttatatttctgtgtatttgactaagcttactggcttcaatgattaactgttatcccaaatatggattatctttcagccaactcagggaatcacagctactgagtagtgtgtgtcagatctcttgggtgtgctggagtgagtaaaaggggaatgaattactgtgttcatgctgagacttaattgaacgggtattcagttgatctaggtgatgggcactttgttacttttattgtaacaaatttgtatatttagttgctttaaaactttatttcatgctttcattaggccttgtgaaaaagggtaaagaacaaaacacacagcgaagcttttttctcagaatgaagtgtaccctaactagccgaggaagaactatgaacataaagtctgcaacatggaaggtattgcactgcacaggccacattcacgtatatgataccaacagtaaccaacctcagtgtgggtataagaaaccacctatgacctgcttggtgctgatttgtgaacccattcctcacccatcaaatattgaaattcctttagatagcaagactttcctcagtcgaca

SEQ ID NO: 23231 - DNA, 504 bp, Homo sapiens
  misc_feature (1)...(504): n = a,t,c or g
nacagctatgacatgattacgaatttaatacgactcactatagggaatttggccctcgaggccaagaattcggcacgagctcggggaagggaagatattttaaggcgtgtctgagcagacggggaggcttttccaaacccaggcagcttcgtggcgtgtgcggtttcgacccggtcacacaaagcttcagcatgtcatgtggcttatcaggagggcagacttcaaaagctactaaaaatgaacggccctgaagatcttcccaagtcctatgactatgaccttatcatcattggaggtggctcaggaggtctggcagctgctaaggaggcagcccaatatggcaagaaggtgatggtcctggactttgtcactcccacccctcttggaactagatggggtctcggaggaacatgtgtgaatgtgggttgcatacctaaaaaactgatgcatcaagcagctttgttaggacaagccctgcaagantctcgaaattatggntnggaa

SEQ ID NO: 23232 - DNA, 534 bp, Homo sapiens
  misc_feature (1)...(534): n = a,t,c or g
acagctatgacatgattacgaatttaatacgactcactatagggaatttggccctcgaggccaagaattcggcacgaggcaaccctttcacctcagttttcttcactccggcatttgcagcagagcgaaaggtggtcgagtcctgaaggagggcctgatgtcttcatcattctcaaattcttgtaagctctgcgtcgggtgaaaccagacaaagccgcgagcccagggatgggagcacgcgggggacggcctaaacggcggggacgacagcattgcgcctgggtgcagcagtgtgcgtctcggggaagggaagatattttaaggcgtgtctgagcagacggggaggcttttccaaacccaggcagcttcgtggcgtgtgcggtttcgacccggtcacacaaagcttcagcatgtcatgtggcttatcaggagggcagacttcaaaagctactaaaaatgaacggncctgaagatcttnccaagtcctatgactatgaccttatcatcattgaaggggctcaagaaggctggcac

SEQ ID NO: 23233 - DNA, 804 bp, Homo sapiens
  misc_feature (1)...(804): n = a,t,c or g
ttggatatttgtctcttccaatctcaggttgaaatgtgatccccaatgttggaggtggggcctggtgggaggtgtttgggccatgggggtggatccctcatgaatggcttggtgtcctcctgtgttattgaatgagttcttgtagggaaaagaaagagagatcagactgttactgtgtctatgtagaaagggaagacataagaaactccattttgaaaaagacctgtactttgaataattgctttgctgagatgttgttaatttgtagctttgccccagccactttgacccaaccactttgatccaatctggagctcacaaaaacatgtgttgtatgaaatcaaggtttaagggatgtagggctgtgcaggacgtgccttgttaacaaaatatttgcaagcagtatacttggtaaaagtcatcgccattctccattcttgattaaccaggggcacaatgcactgcggaaagccgcagggacctctgcccaggaaagcctgggtattgtccaaggtttccccccactgagacagcctgagatatggcctcgtgggaaaggaaagatcttaccatcccccagcccgacaccagtaaagggtctgtgctgaggtggattagtcaaagagggaggcctctttgcagttgagataagaggaaggcatctgtctcctgcctgcccctgggaactgaatgtctcggtataaaacacgattgnacatttgttcaattctgagatgggagaaaaactgcctatggtgggaggtganacatgttgcaacaatgctggcttggtaatcnttactc

SEQ ID NO: 23234 - DNA, 384 bp, Homo sapiens
ggagagcctggaagtgctggagcgaggggcctacacacaggtcatcttcctggccaggaataacacgatcgtgaatgagctggtacgtgtgaccagtgagggagctggcctgcagctgcagaaggtgactgtcctgggcgtggccacggcgccccagcaggtcctctccaacggtgtccctgtctccaacttcacctacagccccgacaccaaggtcctggacatctgtgtctcgctgttgatgggagagcagtttctcgtcagctggtgttagccgggcggagtgtgttagtctctccagagggaggctggttccccagggaagcagagcctgtgtgcgggcagcagctgtgtgcgggcctgggggttgcatgtgtcacctgg

SEQ ID NO: 23235 - DNA, 411 bp, Homo sapiens
cggacgcgtgggcttggcacctctaattgctctcgtgtattcggtgccgcgactttcacgatggctcgcccaaccttactaccttctgtcggccctgctctctgctgccttcctactcgtgaggaaactgccgccgctctgccacggtctgcccacccaacgcgaagacggtaacccgtgtgactttgactggagagaagtggagatcctgatgtttctcagtgccattgtgatgatgaagaaccgcagatccatcactgtggagcaacatataggcaacattttcatgtttagtaaagtggccaacacaattcttttcttccgcttggatattcgcatgggcctactttacatcacactctgcatagtgttcctgatgacgtgcaaaccccccctatatatgggccctgg

SEQ ID NO: 23236 - DNA, 417 bp, Homo sapiens
gtcagaggggcccagatattttcttggagacagattctgtcatgtttttgtgtcaggagtctgaatgtcagttcttccgaagttttactgcagcactagtgctgaagactgctgtacttgtttggatgattaatactgactcataatccaaaagcaggtacatgaagactataatattcttaaccatgtattgcagatatgcttttggaagctgattcaaaaaacttacatgagtacaaggtgatctttaattggtttatgctccagctacactttttgcttgttattgctgtggcagtgaaaattctgacatgaacaaaagactgaaagtaaacataacttgaaatatttattagtatagagtggttcttgaattgtatatttgctatagcctacatttcaggctaaaattcattc

SEQ ID NO: 23237 - DNA, 764 bp, Homo sapiens
ggggacacgagggcaaccctgtgacaatggcaggtagtgtgcatccgtgaatagcccagtgcgggggttgctcatggagcatcctgaggccgtgcaggcagggagccccatgcccctgggttcgtgagcttgcctgcgtatggggtggtgtcatggagcctcatgcccctgggtcgtgagctcgcctgagtatggggtggtgtcatggagccgcatacccctgggttgtgagctcgcctgcatatgcagggtctgtcatggaacatcccaagtctgtgcagcagggagccccatgcccctgggacatgaacccacctgcgtggaatgctgtttgtgaggtgtctacagggtttatagtagtcttgtggacacagaaatgcacaggggacacttacggacacagaaatgcacaggggaggccgagcataaccaggggtgaggggcaggcagcagttgtagttactgccgcggggcactgctatgtgcagggacagccagcacccagcccatcaccactccctgggctggctggcaggtatggcaccctgggagcccggcatatacccagggcacccctacggctgccgccagtctcatgcccaggtgggtgctctgggctggagcgagggccaggttttgggccgaggcttccccaggcaatcctgtgagctcccttctagcctctgacccagtctggtctggcttgcatggatgtagggcttggggtgggaagttcaggtcctggctttgcctttgcctgatgt

SEQ ID NO: 23238 - DNA, 461 bp, Homo sapiens
  misc_feature (1)...(461): n = a,t,c or g
aacttctatgacatgattacgaatttaatacgactcactatagggaatttggccctcgaggccaagaattcggcacgagagacttttgaggatgttgtgtgagggtgtttgactgtgactggggaagctcagactactttgtatgtgaatgcttcagggttttctttgttgagaacaactagcaacaaaggcaacccatgtgtgaccagttctccccaaggtctatgctaaattatagcaagagccctgggcaaccccaaacctagtcctggtagctgagcaccctgtaaggcaggagcaggcagctcagcttgagcagacattgggtggggggtggggggtggttgaggggggaggcagcacagtgcannaaatgtttnttgggangaagaacctgatccatnaccatctgcttgctatgtactcggattctnctttgtacctanccctttngattggct

SEQ ID NO: 23239 - DNA, 1452 bp, Homo sapiens
  misc_feature (1)...(1452): n = a,t,c or g
attacgaatttaatacgactcactatagggaatttggccctcgaggccaagaattcggcacgaggtggagctgcagcgtatccacaggccccaggatgcaggccctggtgctactcctctgcattggagccctcctcgggcacagcagctgccagaaccctgccagccccccggaggagggctccccagaccccgacagcacaggggcgctggtggaggaggaggatcctttcttcaaagtccccgtgaacaagctggcagcggctgtctccaacttcggctatgacctgtaccgggtgcgatccagcatgagccccacgaccaacgtgctcctgtctcctctcagtgtggccacggccctctcggccctctcgctgggagcggagcagcgaacagaatccatcattcaccgggctctctactatgacttgatcagcagcccagacatccatggtacctataaggagctccttgacacggtcactgccccccagaagaacctcaagagtgcctcccggatcgtctttgagaagaagctgcgcataaaatccagctttgtggcacctctggaaaagtcatatgggaccaggcccagagtcctgacgggcaaccctcgcttggacctgcaagagatcaacaactgggtgcaggcgcagatgaaagggaagctcgccaggtccacaaaggaaattcccgatgagatcagcattctccttctcggtgtggcgcacttcaaggggcagtgggtaacaaagtttgactccagaaagacttccctcgaggatttctacttggatgaagagaggaccgtgagggtccccatgatgtcggaccctaaggctgttttacgctatggcttggattcagatctcagctgcaagattgcccagctgcccttgaccggaagcatgagtatcatcttcttcctgcccctgaaagtgacccagaatttgaccttgatagaggagagcctcacctccgagttcattcatgacatagaccgagaactgaagaccgtgcaggcggtcctcactgtccccaagctgaagctgagttacgaaggcgaagtcaccaagtccctgcaggagatgaagctgcaatccttgtttgattcaccagactttagcaagatcacaggcaaacccatcaagctgactcaggtggaacaccgggctggctttgagtggaacgaggatggggcgggaaccacccccagcccagggctgcagcctgcccacctcaccttcccgctggactatcaccttaaccagcctttcatcttcgtactgagggacacagacacaggggcccttctcttcattggcaagattctggaccccaagggcccctaatatcccagtttaatattctcgtgccgaattcttggcctcgagggccaaattccntatagtgagtcgtattaaattcgtaatcatggcaaccgnatttcaa

SEQ ID NO: 23240 - DNA, 499 bp, Homo sapiens
gggattacaggcgcccgccaccacgcccagctaatttttgtatttttagtagagatggggtttcactatgttggccaggctggtctcgaactcctgacctcgtgattggcccacctcagcctcccaaagtgctggtattacagatgtgagccaccgcacccagcctgagtttctctttctctctttttaactttattttttgaaaaacccggtagactttgtggggagcatttttgttgataattttactgatctaaagctgagtgattttttaaaagaatttgaatttggcttcctcaccagtaatatgtctccttgcttctttgatgtgatagttttgagatgggtgagaatctaatagatctgtggttgaatttgctgtgttgttatgaagtccaccctgtgggcacaataacataactgttggtaggagttgtttgagctattctggagattatttggtaaagtatactaaaagccttaaaaccatgtatgtgcg

SEQ ID NO: 23241 - DNA, 425 bp, Homo sapiens
gaagagactttatcttagacacagagttctaggtaaagtatgcactttgtaatattggagctcactaatactctcaatttcagattagtcagctaacacagtattattgatttaaatagtggggatatgttcatgggatgattgcttcctccccttttgatttcttcttaacttccatccctgtaattcctttctttcttactttgaacccaagactacacctaacttaactatatgtctgtgcaaagcaaaaactacatgattgctgtctcttacttagggggtaggccattatcttagcacaattgaagagcctgatagaaaatattactgggttatacgtgcaggttcagactacttgaaaagtaaaagaaagattccttctcttaagccaggtataaattcagctttaggggaacaatgaa

SEQ ID NO: 23242 - DNA, 442 bp, Homo sapiens
  misc_feature (1)...(442): n = a,t,c or g
gtggggagcttcctgtcgccttgcgtgggtgtggggcctgggaggaggtcctggggcgtgcacccgccctgggcagtggggaggagagtggcctgagttacttcacccccgcgtgctgctggttaatgtcccgcgtctctgcaccttcggctgggagcggggactgatctactttcacattctcaagtttttctcatctgcattagaggtgcccagtaggtccccaggttccagcgtgcccctccctcatacacacggacacaatcagccgagaaattcctggtctgaatcacgagaatgtgganggnangagnccntaatatgaaatgaaccnaggatnnattactataacanannatgactatncnctatttgtacttattattacctctgaaancacttaatnancaagcattgagnaactanncgngaattaaacgcc

SEQ ID NO: 23243 - DNA, 467 bp, Homo sapiens
gggcgaatgatcacagcaatgaacaccatccgaagcggggcaggcgtctgcgtcctgcacaactgtatctatgctgctgggggctatgatggtcaggaccagctgaacagcgtggagcgctacgatgtggaaacagagacgtggactttcgtagcccccatgaagcaccggcgaagtgccctggggatcactgtccaccaggggagaatctacgtccttggaggctatgatggtcacacgttcctggacagtgtggagtgttacgacccagatacagacacctggagcgaggtgacccgaatgacatcgggccggagtggggtgggcgtggctgtcaccatggagccctgccggaagcagattgaccagcagaactgtacctgttgaggcacttttgtttcttgggcaaaaatacagtccaatggggagtatcattgtttttgtacaaaaaccgggactaaaagaaa

SEQ ID NO: 23244 - DNA, 486 bp, Homo sapiens
ggatacagtgatttgatgtccaaaatgctgtcagcatctggcgaccctatcagtgtggtgaaaggacttattctgctaatagatcattctcaggaacttcagttacaatctggactaaaagccaatatagaggtccagggtggtctagctattgatatttcaggtgcaatggagtttagcttgtggtatcgtgagtctaaaacccgagtgaaaaatagggtgactgtggtaataaccactgacatcacagtggactcctcttttgtgaaagctggcctggaaaccagtacagaaacagaagcaggcttggagtttatctccacagtgcagttttctcagtacccattcttagtttgcatgcagatggacaaggatgaagctccattcaggcaatttgagaaaaagtacgaaaggctgtccacaggcagaggttatgtctctcagaaaagaaaagaaagcgtattagcaggatgtgaattcccgctc

SEQ ID NO: 23245 - DNA, 502 bp, Homo sapiens
  misc_feature (1)...(502): n = a,t,c or g
tttgaatccnaacagcattntaatcccnacgaatttaatacgactcactatagggaatttggccctcgaggccaagaattcggcacgagcggcacgaggaattcatgtggaggtcagagtggaagcaggtgtgagagggtccagcagaaggaaacatggctgccaaagtgtttgagtccattggcaagtttggcctggccttagctgttgcaggaggcgtggtgaactctgccttatataatgtggatgctgggcacagagctgtcatctttgaccgattccgtggagtgcaggacattgtggtaggggaagggactcattttctcatcccgtgggtacagaaaccaattatctttgactgccgttctcgaccacgtaatgtgccagtcatcactggtagnnnnnnntacagaatgtcaacatcacactgncatcctnttacngcctgtcntcanccatcttctcgcatctaacnagcntctgagnggactntnatgaaccg

SEQ ID NO: 23246 - DNA, 349 bp, Homo sapiens
ggaattattgaatatctgtttgaaatcattggctttcacattttcccaaggtttgctttaagaatgaagttaatctttttcaagacggattgcacaagtgatctatctgataatgaagcaaatactgagcttatcttaggaggacattaataatctttgtgtttagcctcatcaaatttaacagtaatgcaagctattatacagctaagtaaaacctacttttctgaaattggcaccattctgggatagtgattaaattaccataattattgtaaggtctaacaaccttagaattagtggctgagggtcctaagggtggcatttatatggagaaacactggtagttgca

SEQ ID NO: 23247 - DNA, 459 bp, Homo sapiens
gatttgatctggttcagaagccaagttattatgttagactgggatccctgtctaccaagcttcactcccgtgcctaccagcaggctctcagcagggttaaagaagctaagcaaaaaagccaacagaccatttctcagctccattctactgttcacctgattgaatttgccaggaagaatgtgtatagtgccaatcagaaaattcaggatgctcaggataagctctacctctcatgggtagagtggaaaaggagcattggatatgatgatactgatgagtcccactgtgctgagcacattgagtcacgtactcttgcaattgcccgcaacctgactcagcagctccagaccacgtgccacaccctcctgtccaacatccaaggtgtaccacagaacatccaagatcaagccaagcacatgggggtgatggcaggcgacatctactcagtgttccgcaatg

SEQ ID NO: 23248 - DNA, 436 bp, Homo sapiens
ggagactgcatagggctcggcgtggggtggggggagggggagggatagcattaggagatatacctaatgttaaatgatgagttactgggtgcagcacaccaacatggcacatgtatacacatgtaactaatctgcatgttgtgcacatgtaccctaaaacttaaagtataataaaaaaaataaaaataaactataaagattgaaggatcaaagacggattcatggaagaagaggcaactaaatgggaccttgaaagaaaggtaggaggtgtacagataaaggggagacaggcagtgagtctccataatagtcgggcactagagtgagcagcaggcagcatggacactggctatccattttgtactacatccagaatgtttccctgcatcctgcaagaaatccgagatgattccctgtttactcacgtgaggatttc

SEQ ID NO: 23249 - DNA, 326 bp, Homo sapiens
gaaaaagtgaaccatccaggggaggcaaagtcaccgcagctccttcctgcgctgccatccaaccccgagcggcagcgtggggaagcctctgaacggaacctcgcaggcagctctgctcagagcccctcacgggcaaacacgccaacacccgcaacccggcctgtctcagggagggccctgctcacagcagcagagccacagaacctgtgaagggacaatggacactgagctggggacactggccacttctaggggacactcaggctcacaggaggccatgctgtgcttcttctccttccctccctccctttctttgtcgacgcggg

SEQ ID NO: 23250 - DNA, 385 bp, Homo sapiens
gggagacatcggagccgtctttgggcttggcttcccgccttgtctgggagggcctttccgctttgtggatctgtatggcgcccagaagatagtggaccggctcaagaaatatgaagctgcctatggaaaacagttcaccccatgccagctgctagctgaccatgctaacagccctaacaagaagttctaccagtgagcaggcctcatgcctcgctcagtcagtgcactaaccccagctgccggcagtgctggttctccaacagagtggtgtctagatttatcagagtaacgagaagacaaactccggcactgggtttgctccctgattaaagtgccttcagccaagaccatctctccctcctggtgaagtgtgacttcgaattag

SEQ ID NO: 23251 - DNA, 375 bp, Homo sapiens
  misc_feature (1)...(375): n = a,t,c or g
gaaacagagccacggagagcagcaacaaaaaccaaattcacaatggatttggattcagatgaagatttctcagattttgatgaaaaaactgatgatgaagattttgtcccatcagatgctagtccacctaagaccaaaacttccccaaaacttagtaacaaagaactgaaaccacagaaaagtgtcgtgtcagaccttgaagctgatgatgttaaggacagtgtaccactgtcttcaagccctcctgctacacatttcccagatgaaactgaaattacaaacccagttcctaaaaagaatgtgacagtgaagaagacagcagcaaaaagtcagtcttccacctncactaccggtgccnaaaaaaaggctgnccct

SEQ ID NO: 23252 - DNA, 320 bp, Homo sapiens
cccttggatttcttgcttgtgactgctttcgaaacaattttctcaaaattagagtcagaatcatcagaagtggatggcttccttttgcggcgattcttggttttggcaggatcaggcttttgagagacaccagaattcaaagctggatcccttttagttccttttggggcagccctttttttggcaccggtagtggaggtggaagactgactttttgctgctgtcttcttcactgtcacattctttttaggaactgggtttgtaatttcagtttcatctgggaaatgtgtagcaggagggcttgaagacagtggtacact

SEQ ID NO: 23253 - DNA, 540 bp, Homo sapiens
gttatgaaacagctatgacatgattacgaatttaataccgactcactatagggaatttggccctcgaggccaagaattcggcacgaggctaggtgaccctcggctgctgcagggatctgcagcgactgcagccatgggggcgcacctggtccggcgctacctgggcgatgcctcggtggagcccgaccccctgcagatgccaaccttcccgccagactacggcttccccgaacgcaaggagcgcgagatggtggccacacagcaggagatgatggacgcgcagctgaggctccagctgcgggactactgcgcccaccacctcatccggctgctcaagtgcaagcgtgacactgcgagcaccgcgactatgtgatgcgcatgaaggagtttgagcgggagcggaggctgctccagcggaagaagcggcgggagaagaaggcggcagagttggccaaaggccagggacccggggaagtggaccccaaggtggccctgtagggggtgaccccccaccctatggaccagtcaaataaaagcctt

SEQ ID NO: 23254 - DNA, 526 bp, Homo sapiens
acatgattacgaatttaatacgactcactatagggaatttggccctcgaggccaagaattcggcacgagggagcaactggcagtgacttctagggagactgagcacgtgtctatgtgtatagggttgcggggtgacctgtaaatgatcttatgggtaattctgacctattgaagaaggtcaggtctgcagggtagccgtgcttagactgctgcactaattttagattgtgtcaccactgctttagaaagactacagtaggccaggcacggtggctcacacctgtaatcctagcactttgggagtctgaggcaggaggatcacctgaggtcaggagttcgagaccagcctggccaacatggtgaaacctcatctctactaaaaatacaaaaaactagccggcatgttggtggcacctataatcccagctactcgggaggctgaggcaggagaactgcttgaacctaggaggcagtttgcagtgagccaagattgtccactgactccacctgagcaacagacgcgact

SEQ ID NO: 23255 - DNA, 675 bp, Homo sapiens
  misc_feature (1)...(675): n = a,t,c or g
ggtgagtacatgtaaagatacttgataggacttttgcttagttgaatctttagcaaatctcttttatttcttgggattttgaagaagtaatttttaaaggaggactagaaactaagtgattgggaattggcctttttagaattaaaatttcccattacaagaaaaaaaaatcctgtgttcttttttttttccaaaagggagtaggtcagtgagcaaggggattaataaatatttcaaggtctgtgactttggattaatttgggaaacagggtcttgctctgttacccaggctggagtgcagtggggctatctaggcttactgcaacctcacctgtcactttttaattgcaanaaagctgaanggtttttttctattatatcagttataatgagaaatactgtatatactaactatgagtaaaatactatattgcctaacttgtattattaagcaattctgctaacctgtgaccttacattttcatctgaaaagcaggggctggacaccaattgccctatgaagctattgctagtcctaacattctttgttttgtttgcttttttggcacacttaagtgtgtactatgaagtttatgatgctttaatgaaattttctgtctctaccattgtaatgagaaaggaataaaatactttattttgcaaatctaaaaaaaa

SEQ ID NO: 23256 - DNA, 463 bp, Homo sapiens
tcgggggccacaggcctctagctgtgctgctcaagagactggatcagggtagctacaagtggccgggccttgcctttgggattctacctgttcctaatttggtgtggggtgcggggtccctggccccttttccacactcctcctccgacagcagctccctgggcagtggcctggtctcaccgtgtgcagccttgtggtttatgcttaaatgtacattttcctgctggtaaaaggagaaactgagaggtgtcctgcagaccggctgaccactccttttggagacggcaggaggcctgagcgatccgtactcagaacgtccaggagagacgcatggcccgaagtcaaagtgctggaattttccaaaacagcctgttctctcctctctcctccccagagcaccccctgccatcaggggggttgaaatccctctcccccaggagccctgctgctttgcttggtggta

SEQ ID NO: 23257 - DNA, 459 bp, Homo sapiens
  misc_feature (1)...(459): n = a,t,c or g
gaggtncntnncccttngatanctgnatgactgattacgaatttaatacgactcactatagggaatttggccctcgaggccaagaattcggcacgaggtgacttgcagctggagagaatcaacgtgtactacaatgaggctgctggtaacaaatatgtacctcgggccatcctggtggatctggagcctggcaccatggactctgtcaggtctggacccttcggccagatcttcagaccagacaacttcgtgttcggccagagtggagccgggaataactgggccaagggccactacacagagggagccgagctggtcgactcggtcctggatgtggtgaggaaggagtcagagagctgtgactgtctccagggcttccagctgacccactctctggggggcggcacggggtccgggatgggcaccctgctcatcaacnagatccgggaagaagtaccc

SEQ ID NO: 23258 - DNA, 506 bp, Homo sapiens
  misc_feature (1)...(506): n = a,t,c or g
gcttaaacatcacattagccattggcttttcctctatcttccacataagaggaactttccccaatcacctggtggttttggatttgtgtcccctggtactttggggatgtgtccacatgtgtgtgcagtgcctctgtctgcatgtgtgtggcgctaagatgactcagtgtcgcatgtgctgagacattccggggctgcaggtgggtgttctcacagaggctcgcctgagggatcttttgcacatacaaagatgtgtcccatttataagttagttccctacactaaatgaaagaactctccggggccgtgtgtgtgcagtgaatacacatgtgggtcgttgtttcacacaggcggtgtcctggttgcaggcagagtgtgagaatgcaagctgtgctggctgctctgatatggtccacaaggtatgaggcagcttttggtctctttttggtcttttcgaantagggtgcctgcccacccccgaaccagggaaaaggcagtcttntctg

SEQ ID NO: 23259 - DNA, 397 bp, Homo sapiens
gcactttttaaaagatttacatttcccaaagaaatgaataattaagatggtaggcatttgctttatttttaatagttgtgatctagtgtgagacatagaaaataagtcttagaatatgaaatcatggcaaaagctgaaggctttttatatgatatgttttactatttttaatcatttatggagtactttatgtttgcaaagcccttgcaaataattttattacacatgtaaatgtttgattggtggcgagtatctatacatagtgggtataaaatgagatggaagcctttactgtaaaatatgtcttacttgtttaaaaaatacgtaagtatccataatcagatcttcccgttgatatgtttttgtgcccacacaaattcaaattgcctttgaggcc

SEQ ID NO: 23260 - DNA, 100 bp, Homo sapiens
gcgtggtggcaagcgcctgtagtcccagctactcaggaggctgaggcaggagaatggtgtgaacccgggaggcagagcttgcagtgagccaagatcgcac

SEQ ID NO: 23261 - DNA, 855 bp, Homo sapiens
gtcctcattgtacccattctaatcgcaatggcattcctaatacttaccgaacgaaaaattctaggctatatacaactacgcaaaggccccaacgttgtaggcccctacgggctactacaacccttcgctgacgccataaaactcttcaccaaagagcccctaaaacccgccacatctaccatcaccctctacatcaccgccccgaccttagctctcaccatcgctcttctactatgaacccccctccccatacccaaccccctggtcaacctcaacctaggcctcctatttattctagccacctctagcctagccgtttactcaatcctctgatcagggtgagcatcaaactcaaactacgccctgatcggcgcactgcgagcagtagcccaaacaatctcatatgaagtcaccctagccatcattctactatcaacattactaataagtggctcctttaacctctccacccttatcacaacacaagaacacctctgattactcctgccatcatgacccttggccataatatgatttatctccacactagcagagaccaaccgaacccccttcgaccttgccgaaggggagtccgaactagtctcaggcttcaacatcgaatacgccgcaggccccttcgccctattcttcatagccgaatacacaaacattattataataaacaccctcaccactacaatcttcctaggaacaacatatgacgcactctcccctgaactctacacaacatattttgtcaccaagaccctacttctaacctccctgttcttatgaattcgaacagcatacccccgattccgctacgaccaactcatacacctcctatgaaaaaac

SEQ ID NO: 23262 - DNA, 450 bp, Homo sapiens
  misc_feature (1)...(450): n = a,t,c or g
gagcgggctctagggaactggaagttgctggccaaaggtctgctcatcagggagaggctgaagcgtcgctacgggcccaagagtgaggcagcagctccccacacagatgcaggaggtggactctcttctgatgaagaggaggggaccagctctcaagcagaagcggccaggatactggctgcctcctggcctcaaaaccgagaagatgaataaaagcagaagctgaagggtgggcccaagaagaccaaaagggaaaagaaagcagcagcttcccacctgttcccatttgagcagctgtgagctgagcgcccactataggggcacccaccagttgctgctgccccactacaggccccacacctgccctgggcatgcccagcccctggtggtgggggcttctctgctganaaggcaaactgaggcaacatgcacggaagcggggtcagggga

SEQ ID NO: 23263 - DNA, 693 bp, Homo sapiens
ttttaccttcagaactggtttattagtaggattggttacattcaaaggctgttgcttggacttctctaaagagatgaagcccccacatactgaggaggcaaggcagtcatcaaggccccaaggtgaggcaaatccctggaaggcttgaaccctgcagttcagtctcccggggtaatcactccccagatagcagtgagaatggggcactgaggcccgggatgtaggcactggacagcagcaacccaggcatctgtgccccacaaaccagttaatgggcatcgttaagctgccgtgcaacatccaggatgttttggctctcagcaacaagttggccaggctgatgcccaagttctgggcagccaactggggccctcgtggaatgttacgagcagtgatgcctaccaactgtgggtcatcctcagggccatcttcatgctgggcagggacatggatggtagcctgcatggtctcttgtatgctatctgagccgtctagactccagactcctccagtcaggtacagctggggaagaaaacagttgcctcagcacagtctgagaggggactacctagaaacctgggatgcacaggaagaaatgccacagtcctcctttccctggcttcccgcccatttccccccacttacttgcccatccttcatagctgtatgcacggctactggcacactgcagcc

SEQ ID NO: 23264 - DNA, 471 bp, Homo sapiens
  misc_feature (1)...(471): n = a,t,c or g
ttgganaattnntatgacatgattacgaatttaatacgactcactatagggaatttggccctcgaggccaagaattcggcacgaggatggcaagaagcgcaagcgcagccgcaaggagagttactctgtgtacgtgtacaaggtgctgaaacaggtccatcccgacactggcatctcttccaaggccatgggcatcatgaattctttcgttaacgacatatttgagcgcatcgcgggcgaggcttcccgcctggcgcattacaacaagcgctcgaccatcacctccagggagatccagacggccgtgcgcctgctgcttcccggagagctggccaagcacgccgtgtcggagggcaccaaggccgtcaccaagtacaccagctccaagtaaacattccaattcaggcagctcagcaatggcctgtgattccagcaattcaaatagctggaaaaccctcagcgctgcatctc

SEQ ID NO: 23265 - DNA, 469 bp, Homo sapiens
gacagaagctattagctgttagtaagaacccaagcaaacctcactttaatcactacatgtttgaagcaatatgtttatccataagaataacttgcaaagctaaccctgctgctgttgtaaattttgaggaggctttgtttttggtgtttactgaaatcttacaaaatgatgtgcaagaatttattccatacgtctttcaagtgatgtctttgcttctggaaacacacaaaaatgacatcccgtcttcctatatggccttatttcctcatctccttcagccagtgctttgggaaagaacaggaaatattcctgctctagtgaggcttcttcaagcattcttagaacgcggttcaaacacaatagcaagtgctgcagctgacaaaattcctgggttactaggtgtctttcagaagctgattgcatccaaagcaaatgaccccaagggttttatcttctaaacagtataata

SEQ ID NO: 23266 - DNA, 344 bp, Homo sapiens
gcggcacgagttgcaccatctggcagcgctgtgcccggatccggctcacaaagccatacacgtccaccttccgttctgtatgcatcatgtccagcatggcatcaatgacgacaaaggtacctgtacgccctacacctgcactgcagtggaccacgatggcccctgcatactgagggttacaggccttcaccttcttgaggaacttgagcatgccgatcggggtaaaaggcaccccaaagtctggccagctggtaaagtggaactgagtgatgaggcgctgtggctttctgttggtcatgtcgcccacctgctggatgcagaacttccgtactgtgtagtccacc

SEQ ID NO: 23267 - DNA, 861 bp, Homo sapiens
  misc_feature (1)...(861): n = a,t,c or g
ggatggcagcaatgaggaaggcgcttccgcggcgactggtgggcttggcgtccctccgggctgtcagcacctcatctatgggcactttaccaaagcgggtgaaaattgtggaagttggtccccgagatggactacaaaatgaaaagaatatcgtatctactccagtgaaaatcaagctgatagacatgctttctgaagcaggactctctgttatagaaaccaccagctttgtgtctcctaagtgggttccccagatgggtgaccacactgaagtcttgaagggcattcagaagtttcctggcatcaactacccagtcctgaccccaaatttgaaaggcttcgaggcagcggttgctgctggagccaaggaagtagtcatctttggagctgcctcagagctcttcaccaagaagaacatcaattgttccatagaggagagttttcagaggtttgacgcaatcctgaaggcagcgcagtcagccaatatttctgtgcgggggtacgtctcctgtgctcttggctgcccttatgaagggaagatctccccagctaaagtagctgaggtcaccaagaagttctactcaatgggctgctacgagatctccctgggggacaccattggtgtgggcaccccagggatcatgaaagacatgctgtctgctgtcatgcaggaagtgcctctggctgccctggctgtccactgccatgacacctatggtcaagccctggccaacaccttgatggcctgcagatgggagtgagtgtcgtggactcttctgtggcaggacttggaggctggtcctacacacagggggcatcangaaacttgggcacagaaagacctggctacatgctanaggc

SEQ ID NO: 23268 - DNA, 450 bp, Homo sapiens
ggtatgaagaaaaactaaatatcctcaaggagtcactgacaagtttttaccaagaagagattcaggagcgggatgaaaagattgaagagctagaagctctcttgcaggaagccagacaacagtcagtggcccatcagcaatcagggtctgaattggccctacggcggtcacaaaggttggcagcttctgcctccacccagcagcttcaggaggttaaagctaaattacagcagtgcaaagcagagctaaactctaccactgaagagttgcataagtatcagaaaatgttagaaccaccaccctcagccaagcccttcaccattgatgtggacaagaagttagaagagggccagaagaatataaggctgttgcggacagagcttcagaaacttggtgagtctctccaatcagcagagagagcttgttgccacagcctggggcaggaaactt

SEQ ID NO: 23269 - DNA, 508 bp, Homo sapiens
tcaacagctattacatgattacgaatttaatacgactcactatagggaatttggccctcgaggccaagaattcggcacgagctgtgtcttaccatgcctgaacctaccaagtctgctcctgccccaaagaagggctccaagaaggcggtgactaaggctcagaagaaggacgggaagaagcgcaagcgcagccgcaaggagagctattcagtgtatgtgtacaaggtgctgaagcaggtccatcccgacaccggcatctcttccaaggcaatggggatcatgaattccttcgtcaacgacatcttcgagcgcatcgcaggcgaggcttcccgcctggcgcattacaacaagcgctcgaccattacctccagggagatccagaccgccgtgcgtctgctgcttcccggagagctggccaagcacgcagtgtccgaaggtaccaaggctgtcaccaagtatacaagctccaagtaactttgccagggagagacatgaagaccgaggagaa

SEQ ID NO: 23270 - DNA, 438 bp, Homo sapiens
ccggtcaaaggatgctgagtccggagcgcctagccctaccggactacgagtatctggctcagcgacatgtcctcacctacatggaggatgcagtgtgccagctgctagaaaacagggaagatattagccaatatggaattgccaggttcttcactgaatattttaacagtgtatgccagggaacacacattctctttcgagaattcagcttcgtccaagccaccccccacaatagggtatcatttttacgggccttctggagatgcttccgaactgtgggcaaaaatggcgatttgctgaccatgaaagaatatcactgtttgctgcaattactgtgtcctgatttcccgctggagctcactcagaaagcagccaggattgtgctcatggacgatgccatggactgcttgatgtctttttcagatttcctctttgcct

SEQ ID NO: 23271 - DNA, 483 bp, Homo sapiens
ggcagcgggaaggctcgcctagtcggtccgcatccgtgtcgaccacctgtctggacaccacgaagatgccacccgttgggggcaaaaaggccaagaagggcatcctagaacgtttaaatgctggagagattgtgattggagatggagggtttgtctttgcactggagaagaggggctacgtaaaggcaggaccctggactcctgaagctgctgtggagcacccagaagcagttcgccagcttcatcgagagttcctcagagctggctcaaacgtcatgcagaccttcaccttctatgcgagtgaagacaagctggataacaggggcaactatgtcttacagaagatatctgggcaggaagtcaatgaagctgcttgcgacatcgcccgacaagtggctgatgaaggagatgctttggtagcaggaggagtgagtcagacaccttcataccttagctgcaagagtgaaactgaagtcaaaaaag

SEQ ID NO: 23272 - DNA, 457 bp, Homo sapiens
tatgacatgattacgaatttaatatcgactcactatagggaatttggccctcgaggccaagaattcggcacgagaatccatgtctttctgaacgacagttctgctgtgagaagctgccattagagagatccagcaggccccaggactcagctggccagccggtgacactgctcactgctcattgtcctcaactgtggacctctgtccccctctgctggccactcacagaatttcctgctggcactgtcaagatgaagtccaaggaggaagagactgctgtcgataagggagacctggtggccctgagcctccccgccggccatggtgacaccgacggccccatcagcctggacgtgcccgatggggcaccggacccccagcggaccaaggccgccattgaccacctgcaccagaagatcctgaagatcaccgagcagatcaagattgagcaggaggc

SEQ ID NO: 23273 - DNA, 482 bp, Homo sapiens
ggaaatggtgaagaaccaagtatacactacaggctcttaaaactattgaaagacaatactgctgatatatagcacgacataaacagattataaacatcagagccatttgcttctcagtttacatttctgatacatgcagatagcagatgtctttaaatgaaatacatgtatattgtgtatggacttaattatgcacatgctcagatgtgtagacatcctccgtatatttacataacatatagaggtaatagataggtgatatacatgatacattctcaagagttgcttgaccgaaagttacaaggaccccaacccctttgtcctctctacccacagatggccctgggaatcaattcctcaggaattgccctcaagaactctgcttcttgctttgcagagtgccatggtcatgtcattctgaggtcacataacacataaaattaagtttctatgagtgtataccatttaaagaatttttttag

SEQ ID NO: 23274 - DNA, 394 bp, Homo sapiens
ggctgagcgcgtggtggagttttcctgtggtcacgtgatccctccagacaacatcctgccccttgtcatctgcatcggggtctccaaccagccgctagaattcacgttccagaaaagagacctgcctcagatgatggacgaggtgggtcgcatcctctgtaacctgtgcagtgtggtttctggaggggtggtctgtttcttcccctcctacgagtacctgcgccaggtccatgcccactgggagaagggtggcctgctgggccatctggctgccaggaagaagatattccaggaacctaagagcgcacaccaggtagagcaggtgctgctggcgtattccaggtgcatccaggcctgtggccaggaaagaggccccgtgacagggccctgtcct

SEQ ID NO: 23275 - DNA, 605 bp, Homo sapiens
gggatattggagacctgttttagaaggagcctaggctgaatttgattccaagagagcttaggatgacagcacccctgagctgggcaaaggtactcaggacctcataggagtcttaggcagttacctgaaactgccttcattcactcatttgtgtattcattcatttatgtattcatcagacacataccgaacaccctctatttgtcaggctctgtgcttggaatacagagttgaatcagacatgatctctaccctcctagtaaggagatacagtgggttcatgaatgactatagttagctgaatgtcatatgtactttgaatttgagaagtgggtgatcccctctaggcttcctggaggtcacatttaagctagaccttgacaaattggtaggatttggtcaggcactaggagtggagcatgagctctggggacagacagttatgggttctggtcccactttttatcacttactagttgtttgaccttgggcaagtcatttgaccttctgtgcctcagtttcctcatctgtaaaatggggctaacaatattacctacctcataggatttaatgatgtcaagctcctcactggaggccttatccct

SEQ ID NO: 23276 - DNA, 389 bp, Homo sapiens
ctcatctgctttggcctcgaagcccagcccagagggagcctctgctgccccctaccccaccccacctaaagtacctgtaccttgtggtatctgactctggcatctcaactgactacagctcaggggactcccagggagcccaagggggcttatccgatggcccctactccaacccttatgagaacagccttatcccagccgctgagcctctgccccccagctatgtggcttgctcttaggacaccaggctgcagatgatcagggatccaatatgactcagagaaccagtgcagactcaagacttatggaacagggatggcgaggcctctctcaggagcaggggcattgctgattttgtctgcccaatccatcctgctcaggaaaccaca

SEQ ID NO: 23277 - DNA, 358 bp, Homo sapiens
gggacatagtggccatggatgaaggctcagaagcatcctcctgctcatctgctttggcctcgaagcccagcccagagggagcctctgctgccagctttgagtacactatcctgggaccccagctcccagctcttgcgtccatggacactgtgccctgagctgccccctaccccaccccacctaaagtacctgtaccttgtggtatctgactctggcatctcaactgactacagctcaggggactcccagggagcccaagggggcttatccgatggcccctactccaacccttatgagaacagccttatcccagccgctgagcctctgccccccagctatgtggcttgctcttaggaca

SEQ ID NO: 23278 - DNA, 608 bp, Homo sapiens
  misc_feature (1)...(608): n = a,t,c or g
gggacgcaggtgcaactgacatgggtgaaccccagggatccatgcggattctagtgacagggggctctgggctggtaggcaaagccatccagaaggtggtagcagatggagctggacttcctggagaggactgggtgtttgtctcctctaaagacgccgatctcacggatacagcacagacccgcgccctgtttgagaaggtccaacccacacacgtcatccatcttgctgcaatggtggggggcctgttccggaatatcaaatacaatttggacttctggaggaaaaacgtgcacatgaacgacaacgtcctgcactcggcctttgangtgggcgcccgcaaggtggtgtcctgcctgtccacctgtatcttccctgacaagacnacctacccgatagatgagaccatgatccacaatnggcctccccacaacagcaattttgggtactcgtactgccaanaggatnatcgacntgcagaannggggnctacttccagcagtacnggctgcacccttcancgnctgntnatcnccaccaacntcttcgnngcccctacnaanancntnnncatcnnagggattggncannntgntgcctggcctcaa

SEQ ID NO: 23279 - DNA, 631 bp, Homo sapiens
gtccaggtttggctaataatcattccttaacctagaattcagatgatcctggaattaaggcaggtcagaggactgtaatgatagaattaaattagtgtcactaaaaactgtcccaaagtgctgcttcctaataggaattcattaacctaaaacaagatgttactattatatcgatagactatgaatgctatttctagaaaaagtctagtgccaaatttgtcttattaaataaaaacaatgtaggagcagcttttcttctagtttgatgtcatttaagaattactaacacagtggcagtgttagatgaagatgctgtctacaaggtagataatatactgtttgatactcaaaacatttttcattttgtttaaagtagaagttacataattctatattttaagtcttgggtaaaaaagtagttttacattttataaagtaaagatgtaaatgattcaggtttaaagctctatttgacttcctttttttgtttgagatagccgtcttgctgtgttgcccaggctggagtgcagtggtgtgatctcagctcagtgcaacctccgcccctgggatcaagcgattctcctacctcagcctccaaatagctgggactacaaggtgccctccacatgcc

SEQ ID NO: 23280 - DNA, 1009 bp, Homo sapiens; identical to SEQ ID NO: 16093

SEQ ID NO: 23281 - DNA, 398 bp, Homo sapiens
gaataattttattagaataatttcatactgaaattattttctccaaataaaaattagatggaaaaatgtgaaaaaaattattcatgctctcatatatattttaaaaacactacttttgcttttttatttaccttttaagacattttcatgcttccaggtaaaaacagatattgtaccatgtacctaatccaaatatcatataaacattttatttatagttaataatctatgatgaaggtaattaaagtagattatggcctttttaagtattgcagtctaaaacttcaaaaactaaaatcattgtcaaaattaatatgattattaatcagaatatcagaatatgattcactatttaaactatgataaattatgataatatatgaggaggcctcgctata

SEQ ID NO: 23282 - DNA, 464 bp, Homo sapiens
  misc_feature (1)...(464): n = a,t,c or g
gagtgtnnnncctttgatacctttttgactgattacgaatttaatacgactcactatagggaatttggccctcgaggccaagaattcggcacgaggcacgggaccctccagcacagtgttcagcaggtcctgttggagatgatatgttccattggcaagctacaataatggggccaaatgacagtccctatcagggtggagtatttttcttgacaattcatttcccaacagattaccccttcaaaccacctaaggttgcatttacaacaagaatttatcatccaaatattaacagtaatggcagcatttgtcttgatattctacgatcacagtggtctccagcactaactatttcaaaagtactcttgtccatctgttctctgttgtgtgatcccaatccagatgatcctttagtgcctgagattgctcggatctacaaaacagatagagaaaagtacaacaga

SEQ ID NO: 23283 - DNA, 659 bp, Homo sapiens
atgaggaagaaggggaggaagtggtggaggaccgagattactactatgacaccttcaaaggagatgactacaatgaggagaatcctactgaacccggcagcgacggcaccatgtcagacaaggaaattactcatgatgtcaaagctgtctgctcccaggaggcgatgacggggccctgccgggccgtgatgcctcgttggtacttcgacctctccaagggaaagtgcgtgcgctttatatatggtggctgcggcggcaacaggaacaattttgagtctgaggattattgtatggctgtgtgtaaagcgatgatccctccaactcctctgccaaccaatgatgttgatgtgtatttcgagacctctgcagatgataatgagcatgctcgcttccagaaggctaaggagcagctggagattcggcaccgcaaccgaatggacagggtaaagaaggaatgggaagaggcagagcttcaagctaagaacctccccaaagcagagaggcagactctgattcagcacttccaagccatggttaaagctttagagaaggaagcagccagtgagaagcagcagctggtggagacccacctggcccgagtggaagctatgctgaatgaccgccgtcggatggctctggagaactacctggctgcttgc

SEQ ID NO: 23284 - DNA, 508 bp, Homo sapiens
  misc_feature (1)...(508): n = a,t,c or g
tcttccagaaagttcaggtccctntgaacagccccatatcatactcagagtccacactgtcaagggaggggctgtcattcatggagaaaattttccctgccccaggcatcacgaccagttgattggtcacttctgacagagtgtgccgtctctgcccgctgcgtgtggactgaaatgcctcaaaggcatgagcggggtcttcctcggcctctccttctgtctccagcccttcgtcaatggaggtctccatcatgttgctgggcagtgactggcatcccttccgcaccaggacaggaggcacagggtcaagcagacagccattgacctaaacgccaggggagagaggaaactcagtttctgcactgctgagacagaaaaatccacaaaggaaaacatgtcaagacttgtggcgaactagaaattaattaagcgggcgcaagcttattccctttagtgagggttaattttagcttggcactggccgncgtttacaacgtcgtgactgggg

SEQ ID NO: 23285 - DNA, 390 bp, Homo sapiens
gaacattctctagtgtactctacaacagtccttctggcaaaatactattcccattgtacagatggaaaatgaagacttagaagggtttggtaacctggagacattcagaaaatatctgtggaactcctgcattttgtgaggcactgcccagggcattggagagagagatgcctttgtggtggtcctaaaagagttcacagtctggccaggagacattgtacaaacagactataaatggctgtgcttcttttttttctaaagaatgttcagcgggagcacttgggacctacctgtgagagctgaggaaggcttcacagaagaggtcttgcttaagaggaaacatttggggccaggtgcagtggctacgcctgtaatcccaacgctttgggg

SEQ ID NO: 23286 - DNA, 410 bp, Homo sapiens
cgcggcgccgcctcctgctcctcccgctgctgctgccgctgccgccctgagtcactgcctgcgcagctccggccgcctggctccccatactagtcgccgatatttggagttcttacaacatggcagacattgacaacaaagaacagtctgaacttgatcaagatttggatgatgttgaagaagtagaagaagaggaaactggtgaagaaacaaaactcaaagcacgtcagctaactgttcagatgatgcaaaatcctcagattcttgcagcccttcaagaaagacttgatggtctggtagaaacaccaacaggatacattgaaagcctgcctagggtagttaaaagacgagtgaatgctctcaaaaacctgcaagttaaatgtgcacagatagaagccaaattctatgag

SEQ ID NO: 23287 - DNA, 727 bp, Homo sapiens
  misc_feature (1)...(727): n = a,t,c or g
gagcggacatcttgtggctgtgtcgtgcgcgtgagccccgtagggccggggaggcaccagctgccgcgcggggaggaggccgaggccgcagcttgagggaggccccggcccctctgcgcctgtgtctggcagagctggtgtgagacgagacaatcctgccccgccgccgggataatcaagagttttggccggacctttgagcatacaccgagagagtgaggagccagacgacaagcacacactatggcgctgaaacggattaataaggaacttagtgatttggcccgtgaccctccagcacaatgttctgcaggtccagttggggatgatatgtttcattggcaagccacaattatgggacctaatgacagcccatatcaaggcggtgtattctttttgacaattcattttcctacagactaccccttcaaaccacctaaggttgcatttacaacaagaatttatcatccaaatattaacagtaatggcagcatttgtctcgatattctaagatcacagtggtcgcctgctttaacaatttctaaagttcttttatccatttgttcactgctatgtgatccaaacccagatgaccccctagtgccagagattgcacggatctataaaacaagacagagataagtacancagaatatctcgggaatggnctcagaagtatgccatgtgatgctaccttaaagtcagataactncattatnncnggata

SEQ ID NO: 23288 - DNA, 546 bp, Homo sapiens
  misc_feature (1)...(546): n = a,t,c or g
ggtgaacatcgaggctacttgtacctggccattgagtacgcgccccatggaaaccttctggacttccttcgcaagagccgtgtgctggagacggacccagcatttgccattgccaatagcaccgcgtccacactgtcctcccagcagctccttcacttcgctgccgacgtggcccggggcatggactacttgagccaaaaacagtttatccacagggatctggctgccagaaacattttagttggtgaaaactatgtggcaaaaatagcagattttggattgtcccgaggtcaagaggtgtatgtgaaaaagacaatgggaaggctcccagtgcgctggatggccatcgagtcactgaattacagtgtgtacacaaccaacagtgatgtatggtcctatggtgtgttactatgggagattgttagcttaggaggcacaccctactgcggaatgacttgtgcagaactctacgagaagctgcccagggctacagactggaaaaccctgaactgtgatgatgaggggatgatctaatgancaatgctg

SEQ ID NO: 23289 - DNA, 398 bp, Homo sapiens
gccctccacaggtgggcttagttagcacagagctccagaacctgagatgcctctgaaggtgggagtaggatggcatccttctgccccaattctaaaagccactagccaaacttgacctcggaaactatttacagtgcggtgatgccacctctccctgcagacaaattcaagtactccattaaggggcgttccccagaccttgctgggcatgcccagataagcctccttttcatctgcaaaattgagatcctgacttcctatgcaggattgtttttaatttaatgagactataggtaaagcgcctggctttattaaacactcaaccaacgaggaggaggatgggggtttgtagagtaaattggtatagattttagtactgacttcacaggttcctagga

SEQ ID NO: 23290 - DNA, 546 bp, Homo sapiens
gcacgtactcccaactgtggtcgcgctctcaccccttctgctgctctcgtggccccctcgcgatggcgggcatcctgtttgaggatattttcgatgtgaaggatattgacccggagggcaagaagtttgaccgagtgtctcgactgcattgtgagagtgaatctttcaagatggatctaatcttagatgtaaacattcaaatttaccctgtagacttgggtgacaagtttcggttggtcatagctagtaccttgtatgaagatggtaccctggatgatggtgaatacaaccccactgatgataggccttccagggctgaccagtttgagtatgtaatgtatggaaaagtgtacaggattgagggagatgaaacttctactgaagcagcaacacgcctctctgcgtacgtgtcctatgggggcctgctcatgaggctgcagggggatgccaacaacctgcatgggattcgaggtggactccagagtttatctcctgatgaagaagctagccttctgaacctcgcctgaagcccagcctctctgccaa

SEQ ID NO: 23291 - DNA, 477 bp, Homo sapiens
  misc_feature (1)...(477): n = a,t,c or g
atttganaccgntatgacatgattacgaatttaatacgactcactatagggaatttggccctcgaggccaagaattcggcacgagattttttaataaacgatagttgcaatgaactgtggctcagagaccttcttaaagtagttgagaagggagggcgtgggcaaagcagtgggaagaacatcccaaacttttgggggccagagggctctctccttagtgatgatcagctagccgagctgggccgtcctggggatcggtacagctccctggggtggtgacaggccctttgtgaaagttgtgtgcttggtcttccaccccagccccagacactgcttcaaatagcaccaaccagatgggagtccacatctgtggtggcaaaatgctgacattttcccaagaggtacacaaggtgggagaggcctgctgtancaaangtgtgtgntaaaaaaagcnagggcctgatttantancaaaaa

SEQ ID NO: 23292 - DNA, 1332 bp, Homo sapiens
  misc_feature (1)...(1332): n = a,t,c or g
actatagggaatttggccctcgaggccaagaattcggcacgagagtggcgtagacgagttaagtcctggtctgcgtggaggtcgacgactccgtcgcagactacggacctgtctgggtctcagccgccaaagaccccgtccggtaggaagtactagccggacatcatgagtggctgtcgggtattcatcgggagactaaatccagcggccagggagaaggacgtggaaagattcttcaagggatatggacggataagagatattgatctgaaaagaggctttggttttgtggaatttgaggatccaagggatgcagatgatgctgtgtatgagcttgatggaaaagaactctgtagtgaaagggttactattgaacatgctagggctcggtcacgaggtggaagaggtagaggacgatactctgaccgttttagtagtcgcagacctcgaaatgatagacgaaatgctccacctgtaagaacagaaaatcgtcttatagttgagaatttatcctcaagagtcagctggcaggatctcaaagatttcatgagacaagctggggaagtaacgtttgcggatgcacaccgacctaaattaaatgaaggggtggttgagtttgcctcttatggtgacttaaagaatgctattgaaaaactttctggaaaggaaataaatgggagaaaaataaaattaattgaaggcagcaaaaggcacagtaggtcaagaagcaggtctcgatcccggaccagaagttcctctaggtctcgtagccgatcccgttcccgtagtcgcaaatcttacagccggtcaagaagcaggagcaggagccggagccggagcaagtcccgttctgttagtaggtctcccgtgcctgagaagagccagaaacgtggttcttcaagtagatctaagtctccagcatctgtggatcgccagaggtcccggtcccgatcaaggtccagatcagttgacagtggcaattaaactgtaaataacttgccctgggggcctttttttttaaaaaaacaaaaaccacaaaaattcccaaaccatacttgctaaaaattctggtaagtatgtgcttttctgtgggggtgggatttggaaggggggttgggttgggctggatatctttgtagatgtggaccaccaaggggttgttggaaactaattgtantaaatgtcttttganangncttcngctcacatttttgtgaantccgaagtaatagtttgtgtanattgacaganctctttaanactaaagcagttnaatttttttggctagaaaanaattggnatttanttcctggganaaaaagntaaagcagg

SEQ ID NO: 23293 - DNA, 538 bp, Homo sapiens
gctctgatgaattgagcaaaaccatctccccgatggtgatggatgcaaaagctgtggctggaaacatttccgaccctggactgcaaaagagcttcctggactcaggatatcggatcctgggagctgtggccaaggtcagagaagccttccaacctcaggagcctgacttcccgccgcctccaccagaccttgaacaactccgactaacagatgagcttgctcctcccaaaccacctctgcctgaaggtgaggtccctccacctaggcctccaccaccagaggaaaaggatgaagagttccctgagcagaaggccggggaggtgattaaccagccaatgatgatggctgccagacagctccatgatgaagctcgcaaatggtccagcaaggtaagtagtgaagcttttcttgttgagaaaggatgtcttctcggaaaggatgaaggaccatgaaagacccagaaagaagagtctatttggagtcaccctctctctctcctttggttcctgtgttgccaatagcatattcctcttcttac

SEQ ID NO: 23294 - DNA, 497 bp, Homo sapiens
ggtctgactggtgttatcaccgtgggctccctgactgggagttgatcgcctttcccaggtgctacacccttttccagctggatgagaatttgagtgctctgatccctctacagagcttccctgacccattctgaaggagccccattcctgggaaatattccctagaaacttccaaatcccctaagcagaccactgataaaaccatgtagaaaatttgttattttgcaacctcgctggactctcagtctctgagcagtgaatgattcagtgttaaatgtgatgaatactgtattttgtattgtttcaattgcatctcccagataatgtgaaaatggtccaggagaaggccgattcctatacgcagcgtgctttaaaaaataaataagaaacaactctttgagaaacaacaatttctactttgaagtcataccaatgaaaaaatgtatatgcacttataattttcctaataaagttctgtactcaaatgtaaaaaaaaa

SEQ ID NO: 23295 - DNA, 732 bp, Homo sapiens
acccgttatgacatgattacgaatttaatacgactcactatagggaatttggccctcgaggccaagaattcggcacgagcaaaatggaagatcccaattacatgccaagaccaaagtgtaaacaggagtgactattaacttgggattggcaggaagagatatatgtttatgtgttctctgctttcccacatcctgcttcctcctagactcatttgtgtgtggtcctggtacctttgggcccattttgcagtgatattttagtaactgacattatgtcaaacaatctaggtttcttacattcacttatgtctcaacaactgttgactttttccttctcacatatcaattattctgccctttcctgtttgtttctgtttgtttttctccctcaggtgctcaggaacagcccatggaagaatcatatgaagaggtggtgactgaggtcgtaagcaggagtggacatgtttggatttccaacagctaccctgctggactgtcatggaagatatgcccagaatgtagcgttcttcagtgaatgtgatgactgaagcccaccacaaatatgaccactctgaggctacaggatcctcaagctgggatatccaaaattctttcagaagagagaagctggaacaaaaatccccagattcgaagacactacaggaagattcacctggagtgagacaaagggtctatgagtgccaggagtgtggaaaatccttccggcaaaaa

SEQ ID NO: 23296 - DNA, 355 bp, Homo sapiens
gaaaggtgaaaaacttgaaaactaactcccagaatctggacacagtttctattggttaagatggagatggccaaattagaaaaactgcctcagcatgcccagcctttaccttatcaatcagaattgctgaagaaaagagaagaagctgctttggtcctcccactggcttctgactcagagatccaaaatctgtaccatgccagaagtgtgcatcattatttttgtactctaggggtactgctttttcaggtagccaaaagagtgatttagccttctctctcatttttctacagtaattcagagactgcagttaacagaaaatacagggaaaggaaagatgggaaaaatagttgtg

SEQ ID NO: 23297 - DNA, 411 bp, Homo sapiens
gaaaatgtatgtaaagacttaggtgacacaggagccttcagaaataaaaacccaagagaaactgcatgttcacactcagattcaacgaagagtgggtggctgtgcagaaatgtgattggacagaagggaaggatctaatcgtagactggatggggaagccttgccccgtgtgtagctttcttccttccaggtacagggcagggcccttctggaatgaaggtctgggatccattttcagataaagtagtgttgaggatgtctttgtggccggctcctgtagtggacctcagatccgggtgctcgccagttacagagtccagttgacaagagcaaggtctggtagaaagaaagtgactattaaccagaactagtcatggggatatggctggattcccacccaaagtaactact

SEQ ID NO: 23298 - DNA, 1673 bp, Homo sapiens
cccccctttgaaaaccctatgacatgattacgaatttaatacgactcactatagggaatttggccctcgaggccaagaattcggcacgagccttcatttgattgtgggaagcctcaagtggagccgaagaaatgtcctggaagggttgtaggggggtgtgtggcccacccacattcctggccctggcaagtcagtcttagaacaaggtttggaatgcacttctgtggaggcaccttgatatccccagagtgggtgttgactgctgcccactgcttggagaagtccccaaggccttcatcctacaaggtcatcctgggtgcacaccaagaagtgaatctcgaaccgcatgttcaggaaatagaagtgtctaggctgttcttggagcccacacgaaaagatattgccttgctaaagctaagcagtcctgccgtcatcactgacaaagtaatcccagcttgtctgccatccccaaattatgtggtcgctgaccggaccgaatgtttcatcactggctggggagaaacccaaggtacttttggagctggccttctcaaggaagcccagctccctgtgattgagaataaagtgtgcaatcgctatgagtttctgaatggaagagtccaatccaccgaactctgtgctgggcatttggccggaggcactgacagttgccagggtgacagtggaggtcctctggtttgcttcgagaaggacaaatacattttacaaggagtcacttcttggggtcttggctgtgcacgccccaataagcctggtgtctatgttcgtgtttcaaggtttgttacttggattgagggagtgatgagaaataattaattggacgggagacagagtgacgcactgactcacctagaggctggaacgtgggtagggatttagcatgctggaaataactggcagtaatcaaacgaagacactgtccccagctaccagctacgccaaacctcggcattttttgtgttattttctgactgctggattctgtagtaaggtgacatagctatgacatttgttaaaaataaactctgtacttaactttgatttgagtaaattttggttttggtcttcaacattttcatgctctttgttcaccccaccaatttttaaatgggcagatggggggatttagctgcttttgataaggaacagctgcacaaaggactgagcaggctgcaaggtcacagaggggagagccaagaagttgtccacgcatttacctcatcagctaacgagggcttgacatgcatttttactgtctttattcctgacactgagatgaatgttttcaaagctgcaacatgtatggggagtcatgcaaaccgattctgttattgggaatgaaatctgtcaccgactgcttgacttgagcccaggggacacagagcagagagctgtatatgatggagtgaaccggtccatggatgtgtaacacaagaccaactgagagtctgaatgttattctggggcacacgtgagtctaggattggtgccaagagcatgtaaatgaacaacaagcaaatattgaaggtggaccacttatttcccattgctaattgcctgcccggttttgaaacagtctgcagtacacacggtgacaggagaatgacctgtgggagagatacatgtttagaaggaagagaaaggacaaaggc

SEQ ID NO: 23299 - DNA, 348 bp, Homo sapiens
ggaatgtggaggatatccaatggaatactatgtagcaataaaaaagaataaactaaggatacatggtacaacatggataaacctcaagaatattatgctcagggaaagaagccagacacagaaactacttgctgtatgataccatttatatgcaatattcagaaaaagcaaaagtataaagacaaaaagtagattagtagttgcataggaggggtgggaggaaacaggtattaatgctaagtgtgcatggtcatattggggtgataatgttttcaaactgatttatggtgatggttgcacaactcgatcaacctactaagaaacattgaattttacatcagaaaatgg

SEQ ID NO: 23300 - DNA, 357 bp, Homo sapiens
gcaaactactatctttaacaaaccaaagtgccaaaaaataaataagttctgaaggatctgaatgaaataattggcaacatcaatttgatagcagtatttgggactacaggcacctgccaccatgcccggataatttttgtatttttagtagagacgaggtttcatcgtgttagccaggatggtttcgatctcctgacctcgtgatctgcccgcctcggcctcccaaagtgctgggattacaggtgtgagccaccgcacccggccttttttttcgagatggtgtgtcactctgttgctcaggctggagtacagtggcgcaatctcggctcactgcaacctccccctcccgggttcaag

SEQ ID NO: 23301 - DNA, 437 bp, Homo sapiens
gccccatggagtttgtgaacaagatgaagaaggaagggaagctgatcatgggcattggtcaccgagtgaagtcgataaacaacccagacatgcgagtgcagatcctcaaagattacgtcaggcagcacttccctgccactcctctgctcgattatgcactggaagtagagaagattaccacctcgaagaagccaaatcttatcctgaatgtagatggtctcatcggagtcgcatttgtagacatgcttagaaactgtgggtcctttactcgggaggaagctgatgaatatattgacattggagccctcaatggcatctttgtgctgggaaggagtatggggttcattggacactatcttgatcagaagaggctgaagcaggggctgtatcgtcatccgtgggatgatatttcatatgttcttccggaacacatgagc

SEQ ID NO: 23302 - DNA, 361 bp, Homo sapiens
ggtagaatctgtaaaaggagtcttctcacctatttaaatgccgtagaggtaagcttggggaagtgagttggacgcgaaaggtgaaggtcattgttaatagggcagggctggtaagagacaaatacgctcttctggcaaagtttccagatgggtggagtttatactgaagttcaccaggttcttgggttgttggaaatcctccttcctgccttctttgctgggcaccaccttgtgtgctgggatggagagtagaaccagcacgggtggtctggcagggagggctggcacctggggacaaaggtacatgcagcaagctgactgacggaggaggggcgcccagcaggccagcgagggcctctga

SEQ ID NO: 23303 - DNA, 603 bp, Homo sapiens
ggaatttcgaataaaatatgttggtgccattgagaaactgaaactctccgagggaaaaggccttgaagggccattagacctgataaattatatagacgttgcccagcaagatggaaagttgccttttgttcctccggaggaagaatttattatgggagtttccaagtatggcataaaagtatcaacatcagatcaatatgatgttttgcacaggcatgctctctacttaataatccggatggtgtgttaccgatgacggtctgggggcgggaaaaagcttactggctctgaagaccacagatgcaagcaatgaggaatacagcctgtgggtttatcagtgcaacagcctggaacaagcacaagccatttgcaaggttttatccaccgcttttgactctgtattaacatctgagaaaccctgaatcctgcaatcaagtagaagtcaacttcatctgaaagttcagctgttttcaaactgcaatgctgaaatgttatgcaaataatgaagttatcccttgctctagattttctgaagaaaatggattgtgtaaaatgctgatcatttgtttattaaaatgtatcctattacacagtgaaaaaaaa

SEQ ID NO: 23304 - DNA, 534 bp, Homo sapiens
  misc_feature (1)...(534): n = a,t,c or g
aanatntgaanancgctatgacatgattacgaatttaatacgactcactatagggaatttggccctcgaggccaagaattcggcacgaggcgctgggcagcggccgcgcggagcgcgactgccgagtgagcagcttccgagtcaaggagaacttcgacaaggctcgcttctctgggacctggtacgccatggccaagaaggaccccgagggcctctttctgcaggacaacatcgtcgcggagttctccgtggacgagaccggccagatgagcgccacagccaagggccgagtccgtcttttnnnnnncngngacntgtgcgcatacatggngnncaccttnacagacaccgaggacnctgncaagttcatgatgangnactggggccgtagcctactttctactnaaaggaantgatgnctnactgnattngcnacacagactncaacccntntgcttgtgcnagtnnttctgngagactnntgtanctngangnnatttgtnntgannntactncttntgtttgcnggnccct

SEQ ID NO: 23305 - DNA, 421 bp, Homo sapiens
ggtgctcttctggtgccctagggactgctgtggccagagcccggggccagccagtacagtcctgagccgaggaggagggactgcaagtggaagagagccagtctggaaggaagagctttccaggtggacagggcttcttggaagacccccaaagccccaggtatcctgggtgaagcctgtttgcctctcttgaaaatggcaggtgctcttgttttacccatgttgggtcagcctgaaactgccaaccagtaggaagcatggactctcctgagtgagaagagactgaaataggagcaagcagaaccctgagaggtgtcccatcttattgctgttgaggaccctgaaacaccgttgtttaaagacttcacacagaaggctctgaactgagccactggggaagggaagtttcagtaacatgacc

SEQ ID NO: 23306 - DNA, 440 bp, Homo sapiens
gcatgttggtatttaaagtagtggattcaaagaacttagattataaataagagttccattaggtgatacatagataagggctttttctccccgcaaacacccctaagaatggttctgtgtatgtgaatgagcgggtggtaattgtggctaaatatttttgttttaccaagaaactgaaataattctggccaggaataaatacttcctgaacatcttaggtcttttcaacaagaaaaagacagaggattgtccttaagtccctgctaaaacattccattgttaaaatttgcactttgaaggtaagctttctaggcctgaccctccaggtgtcaatggacttgtgctactatatttttttattcttggtatcagtttaaaattcacgacaaggcccacagaataagattttccatgcatttgcgaatacgtatattcttttt

SEQ ID NO: 23307 - DNA, 539 bp, Homo sapiens
gccgcttcatcagcgccaacctgccctgcaacaagttcaagaaccggctggtgaaacatcatgccctacgaattgacccgtgtgtgtctgcagcccatccgtggtgtggagggctctgactacatcaatgccagcttcctggatggttatagacagcagaaggcctacatagctacacaggggcctctggcagagagcaccgaggacttctggcgcatgctatgggagcacaattccaccatcatcgtcatgctgaccaagcttcgggagatgggcagggagaaatgccaccagtactggccagcagagcgctctgctcgctaccagtactttgttgttgacccgatggctgagtacaacatgccccagtatatcctgcgtgagttcaaggtcacggatgcccgggatgggcagtcaaggacaatccggcagttccagttcacagactggccagagcagggcgtgcccaagacaggcgagggattcattgacttcatcggcaggtgcataagaccaaggagcagtttggacaggatggc

SEQ ID NO: 23308 - DNA, 547 bp, Homo sapiens
  misc_feature (1)...(547): n = a,t,c or g
gaactggaagaatttgaatggaattaatttgtgatttatagggatagactccacaaataataaaaaggaagagtatggtcctggtgttcaaggaaaagaacattctgctcatttggatccttcagctcctccgatgcccttaccagttacatcaccactgctgccatccccaccagccgccgtcggaggagccagcgcgactgccgttccctcagctgcttcgatgacttctaccagggctgcttccgcatcttctgttcacgttcctgtttctgctcttggtgcaggatctgcagctactgctgcatcagaagaaatagttagtacagtttatacaggtcccaccttatgaaaagggcggcaggcccagtggctcacacctgtaatcccagcactttgggaggccgagcaggtggatcacgaggtcaggagatcgagaccatcctggctacacggtgaaaccccgctttctaaaaatccgaaaattaccggtgtggtgcagccnctntattccagtcttaggggccaagcnganaatggngggacc

SEQ ID NO: 23309 - DNA, 341 bp, Homo sapiens
gaaacaagcaatccgattccagaaaattcggaggcaaatggaggcgcctggtgccccgcccaggaccctgacgtgggaagccatggagcagatacggtatttacatgaggaatttccagagtcctggtcagttcccaggttggctgaaggctttgatgtcagcactgatgtgatccgaagagttttaaaaagcaagtttttacccacattggagcagaagctgaagcaggatcaaaaagtccttaagaaagctgggcttgcccactcgctgcagcacctccggggctctggaaatacctcaaagctgctccctgcaggccactctgtatcaggctctttgt

SEQ ID NO: 23310 - DNA, 390 bp, Homo sapiens
gatggtttttattttgtattttttgctttatgtaaaatgtcaatggtttgctgactctttaatcttaaaattattttacatttgaaccttgcctctagccccaaatatttaagtactttgaatacacatgaataattttagttgaccattaacaggtgtgggtgccaacatttcttaacctactgtgttattttaatttattttgagagatggggtcttgttctgttgcccaggctggagtgtagtggtgcagtcatagttccctcggtctccaactcctgggctccagtggtcctcccacctcagcctctcaagtagctgggattacaggtgcacaccgtcatgcctggttaatttttaaacttttttttgtagagacaagatcttgct

SEQ ID NO: 23311 - DNA, 385 bp, Homo sapiens
tatgaatcagacaaaaacaaggatgagaagctaactaaagaggaaatattggagaactggaacatgtttgttggaagccaagctaccaattacggggaagatctcacaaaaaatcatgatgagctttgatagacactcaccagaatatggcagactgtcataggcattctgttattgtcttggattgttgctacaattgtctaatttacagcagttgtgatcccacaaaaagcaagtttatacctcagattggggtataaaaattgtttttcgctcagtatttactggaaaatggacatcactagtctttcagtaagatttctctcaaaacacgtgaaaaccttggtaaattgcaattctttctggggatatattggtacaacat

SEQ ID NO: 23312 - DNA, 508 bp, Homo sapiens
  misc_feature (1)...(508): n = a,t,c or g
gccttttctctcctcatatttcattcttccaggatctgtaatgtgtccaagttctcatagctcacttaaaaatggatggagtccagagggatcagtgccgacttttcattaatctattagagcttcacatttactggcttgcgccaagagatgtgggagaggaggaaaatgagtaagatctcacctcctggaaaggagggtgccactgctttttcagtggtagagttgctcccttaaagcagactctctcccagctgaattctgagctgagtgttacagagataagtcagcttgaatctggaggagtgagagagtttggctagggccctgtgacagctttgtggtcaggaaagaatatgtaaattcactgaattcccaggcatttcagccctanaggagaaggataggggaatccaagagtcctgacttactgggagactgaattatacctagagcccttttaactaccccagnttgggttcanatttgnaaacccttnaaanaaaaa

SEQ ID NO: 23313 - DNA, 492 bp, Homo sapiens
  misc_feature (1)...(492): n = a,t,c or g
attggannccatagcttgacatgattacgaatttaatacgactcactatagggaatttggccctcgaggccaagaattcggcacgagagctggtggacccagtgctggacgtggtgcggaaggagtgcgagcactgcgactgcctgcagggcttccagctcacgcactcgctgggcggcggcacgggctcaggcatgggcacgctgctcatcagcaagatccgtgaggagttcccggaccgcatcatgaacaccttcagcgtcatgccctcgcccaaggtgtcggacacggtggtggagccctacaatgccacactgtcggngcaccagctggnggagaatacngaccagacctactgcatcgactacgaggcgctctatgacatctgnttccgcactctgaagctgacaacgcccacctacggggacctcaaccacctggtgtccaccaccatgagtggcaccacctcgatgcgctttccggnccagctca

SEQ ID NO: 23314 - DNA, 455 bp, Homo sapiens
gaatttaatacgactcactatagggaatttggccctcgaggccaagaattcggcacgaggccatggccaagaaggaccccgagggcctctttctgcaggacaacatcgtcgcggagttctccgtggacgagaccggccagatgagcgccacagccaagggccgagtccgtcttttgaataactgggacgtgtgcgcagacatggtgggcaccttcacagacaccgaggaccctgccaagttcaagatgaagtactggggcgtagcctcctttctccagaaaggaaatgatgaccactggatcgtcgacacagactacgacacgtatgccgtgcagtactcctgccgcctcctgaacctcgatggcacctgtgctgacagctactccttcgtgttttcccgggaccccaaccggctgcccccagaagcgcagaagattgtaggcagcggcaggagg

SEQ ID NO: 23315 - DNA, 335 bp, Homo sapiens
gagtaatgaataaactgataatttggacagtctcttcagtatgaaggatagacatattatccttattggaaaggcaaggagagtccagttgggaattacaaatatgctgtgaataattcctgaagtggataattctaaaattgtcatcaaaggagggtgcgcctttgtttagatggccagtttgatagttttttttaataacctttaaaataaaaaatatgggtagcctcttagaacacacaaagtttgttcttttttaaatgacatttaatattgactatttagaggtttcttttgttggtactagctttgattataattatttattctatgaa

SEQ ID NO: 23316 - DNA, 625 bp, Homo sapiens
ccaacagctatgacatgattacgaatttaatacgactcactatagggaatttggccctcgaggccaagaattcggcacgagggaataaattaccgataatattattctatcattcattttagttacaataagtttgggtgcatataatagaaaacactaaaataatagtggtttatgtaagatagaagtgtatttgtccccattatttaaaaatagtccagcaggacttacaccacatcattaccattgctcaaaaaagaagttacaagaaaaatcaggaaatattttattttgaataataattaaaacaccacatatcacaatttgtgggatttaactaaagtagtcttcagcgggaaacttttgttttaaagaagtagatgagaatataggaaagataaaatcagtgatctctgcttttacattcagatgctagaaaaaggcaagttattaaacctaaagtaagtacaagaaaggaaataaataaaagcagaactcagtgaagtggaaaagaaacaatggagcgcccaaagctagaagataaatttttggtaaacattaataatattaacaacccttagtaattaaacctatagagaaaaaaagagggacatcactgtatatt

SEQ ID NO: 23317 - DNA, 500 bp, Homo sapiens
  misc_feature (1)...(500): n = a,t,c or g
ggtcccggattcaggctctgcgccagatgaatgaaggtgccatagactgtgtcaactacgaaggacagtctgcttatgacgtggcagacatgcggngagcagtattttcgagatcttcctgagccactaatgacgaacaaactctcggaaacctttctacagatctaccaatatgtgcccaaggaccagcgcctgcaggccatcaaggctgccatcatgctgctgcctgacgagaaccgggaggttctgcagaccctgctttatttcctgagcgatgtcacagcagccgtaaaagaaaaccagatgaccccaaccaacctggccgtgtgcttagcgccttccctcttccatctcaacaccctgaagagagagaattcctctcccagggtaatgcaaagaaaacaaagtttgggcaaaccagatcagaaagatttgaatgaaaacctagctgccactcaagggctggcccatatgatcgccgagtgcaagaagcttttcag

SEQ ID NO: 23318 - DNA, 577 bp, Homo sapiens
  misc_feature (1)...(577): n = a,t,c or g
gggaacccggtttctgaggttaagaacctggtatgaagggggccctcttacgccgactaagtcggccccgaatcttcgattctaggcgacttatttatactggtactttaaagcgtcaggaccataggtacgagttatcgtgttcggttcgaaaaaaaaccccaatgcccgagaaaacataaaacccctacaagctcttaaggcaccctcttcaagactccctttttcacgagggggaaacgacaggcactcccataacggagaaatttagtagaaattcgaattaaacgaataagcctaatactactagcaagaagaatcactaacgttacaatctcgacggaacgtatcgggaaggaccttatactacccccgcgtcgcaaccgttaaaagcctgcaatcctagcttaactacggaaacatactangataactttaaactgaggaataccctacaaacatcgactagcatcggcctaagacgctatggccacaaagacagggaanancgaggaatcgcnacgnacttnnnaaatggnaagagatcagnaccatcaacgtattgcgcttcgggggg

SEQ ID NO: 23319 - DNA, 439 bp, Homo sapiens
  misc_feature (1)...(439): n = a,t,c or g
ggttccaggaagaatggccccaagatgatgaaagcaatagatcatctgacatatttgaatgtatgggaaggagatttgtacttctagcagagagtatggggataaattagtgacaggtctctagaaaattaagcaaagagaaaaataaggtaattattaaccagggaaaaatgatttgtggaataagaaatgtaattgctactacataattatactgtgaatatttacctggctgtataatataaacactaaatattgaacttaccaagaattatgatataactatatttggaccatggaagaacagagtaagcacatgtccccaagtgcctttagattagggcacaactaactctggccagagagcagatgtaatgagtgcattttggggctacaacagtgggcccttnagccccctctttccatgctttagcaactt

SEQ ID NO: 23320 - DNA, 710 bp, Homo sapiens
ggaactaccgcaggaacaagagctactccttcatcgcccgcatgaaggccagggacgagtgtaagtaggcgcccatgccgggagccgcgccggtggccagcggtgccggctgtgggaccttcctggctgactggcagaggaagattgcagtgacagctcagttcttacaccgtctccacttgtggagagccacaggaagagaaggaagaccagcgcatgcccagtgggaacgccgtgctccatggcgtggagggcacgggtgccacccacaaaccacaccaggaggcgctgcagccaccagggccccaggctcgttttcctttatagcgaagcaaaaaacacaagaccctccgcccgagtaaattcttcagccacgaagggatggatgtgcatctgccctaagtcagattgaagcctcctcctaggctccaggaggagcatgtgcaggaagggttggcctgagccagagccggcaccccagctccttcctccagctccccgcacccaccggccctgacctggcttcccctcggctgtgtagggacaaagccgaagcccagtgccatgactgcccgcggattgaaaaacagaaacacaaaactttgacttgacttgcgaagtgaagcagggttttcatttttactctccttggtttaggtctagaaagaagaatactgacctgagaggaggcccagtgagattctgaaacc

SEQ ID NO: 23321 - DNA, 463 bp, Homo sapiens
  misc_feature (1)...(463): n = a,t,c or g
nttcgatancngntatgacatgattacgaatttaatacgactcactatagggaatttggccctcgaggccaagaattcggcacgagcggcacgagctgggacctggtacgccatggccaagaaggaccccgagggcctctttctgcaggacaacatcgtcgcggagttctccgtggacgagaccggccagatgagcgccacagccaagggccgagtccgtcttttgaataactgggacgtgtgcgcagacatggtgggcaccttcacagacaccgaggaccctgccaagttcaagatgaagtactggggcgtagcctcctttctccagaaaggaaatgatgaccactggatcgtcgacacagactacgacacgtatgcccgtgcagtactcctgccgcctcctgaacctcgatggcacctgtgctgacagctactccttngtgttttcccgggacccnaacgg

SEQ ID NO: 23322 - DNA, 487 bp, Homo sapiens
ttaaaaatggcccctcaagcaccgttaatttacattccagttatttacatgataattcatgacattctgaaacttgcctgtatattatctgaaaaatggatttcttgaggaaaagatctgtttattgtatgtaaggaaaaattttacctgaaaacaaacaaacaaaccctaaaactcagcaccactaccatttccagaagcttttttagcaagtgaatattttttacataatggataataaatggtatttattcatcatgattttctaagtaatgcttatcagccccttcagtggtgttattctaacaaaatgaatacattacaaattattaagttagcttttcagagttttaatatagaagttactagcactgacacactgattttgaaatgtttcaaaatgagtagatacgattagatcctttaccttttaatatctagtttttccaaaaatgatagtaatatcttttgaagaactatgcttttt

SEQ ID NO: 23323 - DNA, 621 bp, Homo sapiens
  misc_feature (1)...(621): n = a,t,c or g
atccccttttgaaacccctatgacatgattacgaatttaatacgactcactatagggaatttggccctcgaggccaagaattcggcacgaggcgaattttcccgaccaacctgattcgctagattttttttaaggaaaagcttggaaagccaggacacaacgctgctgcctgctttgtgcagggtcctccggggctcagccctgagttggcatcacctgcgcagggccctctggggctcagccctgagctagtgtcacctgcacagggccctctgaggctcagccctgagctggcgtcacctgtgcagggccctctggggctcagccctgagctggcctcacctgggttccccaccccgggctctcctgccctgccctcctgcccgccctccctcctgcctgcgcagctccttccctaggcacctctgtgctgcatcccaccagcctgagcaagacgccctctcggggcctgtgccgnactagcctccctctcctctgtcccatagctggtttttcccaccaatccttanctacagttactttacaattaaacttaagngagctcttttttcaaattngggnacctttggccctnngctnntttngnaaccaaggcagggg

SEQ ID NO: 23324 - DNA, 325 bp, Homo sapiens
agtttccgagagcagcacagttgcttggcataacattgtaaactaaggaaggggaaaaaattccaacctgcttaattagaaatatatgtttaaattagtaattacttgtttatacagtgctccaaatatgagtttattttcatttaacaactaaattgaaaatccacagaatatacctgcaatgaatgctgtaagtaagaattgtttaaagggtatacaagagttgtcttgttatacaatggcagctgtccacccacctcagcttatcccaccttcgctataaaaactactggctgagagggtgtagcttatctgttttaggaag

SEQ ID NO: 23325 - DNA, 435 bp, Homo sapiens
gcacactagagcccctcatcccacgacatgcactcaatagccgtagtgtaatgattgatgaggacatgactgcccgaattagcatggctgatgtcaagttctctttccaatgtcctggtcgcatgtatgcacctgcctgggtagcccccgaagctctgcagaagaagcctgaagacacaaacagacgctcagcagacatgtggagttttgcagtgcttctgtgggaactggtgacacgggaggtaccctttgctgacctctccaatatggagattggaatgaaggtggcattggaaggccttcggcctaccatcccaccaggtatttcccctcatgtgtgtaagctcatgaagatctgcatgaatgaagaccctgcaaagcgacccaaatttgacatgattgtgcctatccttgagaagatgcaggacaagtagg

SEQ ID NO: 23326 - DNA, 720 bp, Homo sapiens
tttgcccccaacagctatgacatgattacgaatttaatacgactcactatagggaatttggccctcgaggccaagaattcggcacgagcaggcacccaccaccacgcctggctaactaactaactaactttttgtatttttagtagagacagggtttcactgtgttagccaggatggtcttgatctcctgacctcatgatctgcctgcctcagcctcccaaagtgctgggattacaggcttgagccactgctcctggccaacatccagtattttatcttgactgtcctaaccttaccttagatgctaacagaagggtcctgctcaaataacactgggtgctatattgatgggtaaatgtgtacatcctattccttcctctttatctcacaatttttgtctccactaagcaagaagtaaactaacacttcgtcactctaaagaaataacttatgtaaaactcttagtaaccctgtttgtcttcaaatgagtaaatagaccctaagtggggggacaattttctagttctgtagagggaaaaacatctgagtcaacattttgaaatgcagagggtattggtacatgacgacatggaaaagggcacttttaaacacagcttactcttcctcaagtacagagagtatatagtgaatcaaaactaactacagccattctttttaaagcccaagggatggagcaaaggtgtaaggatgttacctgtt

SEQ ID NO: 23327 - DNA, 473 bp, Homo sapiens
  misc_feature (1)...(473): n = a,t,c or g
gacggggagtgaggagacatgagctgagccgggaggccttccttagggaggtgtggcagtggaaggaggcgaaaggtggagagatctgtgagcagctgcgagctctgggtgcctccctggactgggatcgagagtgttttaccatggatgttggctcctcagtggctgtgactgaagcttttgtgcggctctacaaggcggggttgctgtaccggaaccatcagcttgtcaactggtcatgtgctttaagatcagccatctcggacattgaggtggagaaccggcccctgcctggccacacacagcttcgactgcctggctgccccacccccgtgtcttttggcctcctattttctgttgccttccccgtggatggagagcctggtgagcatantactctgcagggtcacccgttacctccatttttctggtttctgaacccatgttgggctntnngnacccatnnnnccctc

SEQ ID NO: 23328 - DNA, 312 bp, Homo sapiens
  misc_feature (1)...(312): n = a,t,c or g
ggatagtgctgtcaactgagagagaaaaatcaaaggttttttttaagttttaaggttttttgttttttagatgggaggaggcttgagaaggncatacagatgtacaggggaatagagttcaataatccaaactctgtgatgtgtaccntttgaaatataacgtgtattttggcantggactngntttacatcaaatctccttcctattttcctttgtttgtgccaatatcacagtagagtcttctctgaaagccggtgtacagtnaangggagagggttaggacggcataggagctatttggtggctgggcc

SEQ ID NO: 23329 - DNA, 883 bp, Homo sapiens
tatgacatgattacgaatttaatacgactcactatagggaatttggccctcgaggccaagaattcggcacgagcgctccacgcgcgcccggactcggcggccaggcttgcgcgcggttcccctcccggtgggcggattcctgggcaagatgaagtgggtgtgggcgctcttgctgttggcggcgctgggcagcggccgcgcggagcgcgactgccgagtgagcagcttccgagtcaaggagaacttcgacaaggctcgcttctctgggacctggtacgccatggccaagaaggaccccgagggcctctttctgcaggacaacatcgtcgcggagttctccgtggacgagaccggccagatgagcgccacagccaagggccgagtccgtcttttgaataactgggacgtgtgcgcagacatgggtgggcaccttcacagacaccgaggaccctgccaagttcaagatgaagtactggggcgtagcctcctttctccagccgtgcagtactcctgccgcctcctgaacctcgatggcacctgtgctgacagctactccttcgtgttttcccgggaccccaacggcctgcccccagaagcgcagaagattgtaaggcagcggcaggaggagctgtgcctggccaggcagtacaggctgatcgtccacaacggttactgcgatggcagatcagaaagaaaccttttgtagcaatatcaagaatctagtttcatctgagaacttctgattagctctcagtcttcagctctatttatcttaggagtttaatttgcccttctctccccatcttccctcagttcccataaaaccttcattacacataaagatacacgtgggggtcagtgaatctgcttgcttttctgaaag

SEQ ID NO: 23330 - DNA, 519 bp, Homo sapiens
cacgcgtccgaaatatcttattcccaatgctacacaaccagaaagtaaggtgttctacttgaaaatgaaaggagattattttaggtatctttctgaagtggcatctggagacaacaaacaaaccactgtgtcgaactcccagcaggcttaccaggaagcatttgaaattagtaagaaagaaatgcagcctacacacccaattcgtcttggtctggcactaaatttctcagtcttttactatgagattctaaactctcctgaaaaggcctgtagcctggcaaaaacggcatttgatgaagcaattgctgaattggatacgctgaatgaagagtcttataaagacagcactctgatcatgcagttacttagggacaatctcactctgtggacatcggaaaaccagggagacgaaggagacgctggggagggagagaactaatgtttctcgtgctttgtgatctgttcagtgtcactctgtaccctcaacatatatcccttgtgcgataaaaaaaaaaaaaa

SEQ ID NO: 23331 - DNA, 755 bp, Homo sapiens
cttgactgattacgaatttaatacgactcactatagggaatttggccctcgaggccaagaattcggcacgaggtgcagtaaaatgtccactaggaccccattgccaacggtgaatgaacgagacactgaaaaccacacgtcacatggagatgggcgtcaagaagttacctctcgtaccagccgctcaggagctcggtgtagaaactctatagcctcctgtgcagatgaacaacctcacatcggaaactacagactgttgaaaacaatcggcaaggggaattttgcaaaagtaaaattggcaagacatatccttacaggcagagaggttgcaataaaaataattgacaaaactcagttgaatccaacaagtctacaaaagctcttcagagaagtaagaataattaagattttaaatcatcccaatatagtgaagttattcgaagtcattgaaactgaaaaaacactctacctaatcatggaatatgcaagtggaggtgaagtatttgactatttggttgcacatggcaggatgaaggaaaaagaagcaagatctaaatttagacagattgtgtctgcagttcaatactgccatcagaaacggatcgtacatcgagacctcaaggctgaaaatctattgttagatgccgatatgaacattaaaatagcagatttcggttttagcaatgaatttactgttggcggtaaactcgacacgttttgtggcagtcctccatacgcagcacctgagctcttcc

SEQ ID NO: 23332 - DNA, 423 bp, Homo sapiens
ggcattcacaacccactgaataagatatacataacaacaaagcgcttaccctattttccaattgtaaactttctatttttgatcgctcagttgccaaaacttcaatacaacaaaaatctgggaatggtctgccgaaaaccgaccgacccggttgattggccaccacttgtcctgggactgctcactctgctgaagcagttccattcccggtacaccgagcagttcctggcactgattggccagtttatctgctccacggtggagcagtgtacaaggtacagaagaccaaccaggactacgtgggacttcttgtcacaaaacctaacttaaacctcacattaccaaattcctcttatcgccctaatagagatgggaaatggttgctcacccttctctgtaaagcaagtcagggcatacctcttg

SEQ ID NO: 23333 - DNA, 452 bp, Homo sapiens
  misc_feature (1)...(452): n = a,t,c or g
ggaaaaagggttgccaacctgcagtgaaatgcaggggtttttacagatgtgctagtggggaggcagtatctgatctacatagggtgtggaaaaccagttaggaccaagtgtgccatctgcataaggcatgactctctggcagcacccaccacagtcttttattatgcaggcgagtcctcagcctgagctactctatgttgcttatttctttcctattgcacatgtgctaaaaatgggggaggtggaaccaccatggtggacctgcctggccccaggtagcccttctattggtgcagccgctggcatgcagctgtgcaagcctccggcttccttatctatgtttgtaacctgatcttccaggctgctctttttttagaaaataattgatttcttgggctgtgttttgttagaagggaagttctggccaggtgcantggctcacacctgtagtc

SEQ ID NO: 23334 - DNA, 657 bp, Homo sapiens
aggaagcgaggcagagcggaggctcctcgcaggccggcgccgtgactgtcagcgacgtccaggagctgatgcggcgcaaggaggagatagaagcgcagatcaaggccaactatgacgtgctggaaagccaaaaaggcattgggatgaacgagccgctggtggactgtgagggctacccccggtcagacgtggacctgtaccaagtccgcaccgccaggcacaacatcatatgcctgcagaatgatcacaaggcagtgatgaagcaggtggaggaggccctgcaccagctgcacgctcgcgacaaggagaagcaggcccgggacatggctgaggcccacaaagaggccatgagccgcatactgggtcagagtgagagccagggccctccacgggccttcgccaaagtgaacagcatcagccccggctccccagccagcatcgcgggtctgcaagtggatgatgagattgtggagttcggctctgtgaacacccagaacttccagtcactgcataacattggcagtgtggtgcagcacagtgaggggaagcccctgaatgtgacagtgatccgcagggggggaaaacaccagcttagacttgttccaacacgctgggcaggaaaaggactgctggctgcaacattattctctgcaagat

SEQ ID NO: 23335 - DNA, 423 bp, Homo sapiens
ggctaatttaattccccactattcctgtagcattgtgtcatatttctttatggcactttctgtgtatgatggaaagtcgctagactaaacctgtaagtggtagagacctttctgaatctttctgcctagcgttagtgggctcccagtgaatgtttgtatgaatttatatatttaaatgtttatggttataatatacttttacctaaaagtgtagaacaaatactattaattagtgaaatattctatttttggaagcaatgaaaactatttaaaaaatttttttctacttctgcttttcctcctttcacagataaacctgaaaattgggatgtatggtatgaaagcaagtttgatgactgtgataaggaggcttgcttatcattttcaaaagaaattctttgtgctcgtgccactgtggaccac

SEQ ID NO: 23336 - DNA, 491 bp, Homo sapiens
  misc_feature (1)...(491): n = a,t,c or g
ttgaaancctnatgacctgattacgaatttaatacgactcactatagggaatttggccctcgaggccaagaattcggcacgagcaggaatggcctcctcccttagctccctgttcttggatctgccatggagggatctggtgcctccagacatgtgcacatgagtccatatggagcttttcctgatgttccactccactttgtatagacatctgccctgactgaatgtgttctgtcactcagctttgcttccgacacctctgtttcctcttcccctttctcctcgtatgtgtgtttacctaaactatatgccataaacctcaagttactcattttttttttttnnatttngggggnaaaatncagtttnagcctttnggatanaggntnccaattaagancanggncaagtnttancagcccaaggggtaggtaaccattagaataggaattggngttggggggggggttnncaaaaaanttttnttttaa

SEQ ID NO: 23337 - DNA, 615 bp, Homo sapiens
  misc_feature (1)...(615): n = a,t,c or g
gatcgagtgcaatgacggcgtcttccagcggctccgggactgggccccacggcagacacacaaggtcatccccttgaaaggcctgtgggaggatgtggcacccaccctgcctgacggtcactttgatgggatcctgtacgacacgtacccactctcggaggagacctggcacacacaccagttcaacttcatcaagaaccacgcctttcgcctgctgaagccggggggcgtcctcacctactgcaacctcacctcctggggggagctgatgaagtccaagtactcagacatcaccatcatgtttgaggagacgcaggtgcccgcgctgctggaggccggcttccggagggagaacatccgtacggaggtgatggcgctggtcccaccggccgactgccgctactacgccttcccacagatgatcacgcccctggtgaccaaaggctgagcccccaccccggcccggccacacccatgccctcctccgtgccttcctggccgggagtccagggtgtcgcaccagccctgggctgatcccaactgtgtgtcaccagaagctttcncggctttnttttgtgaagggttnccancagccncnggccgattccannttgg

SEQ ID NO: 23338 - DNA, 669 bp, Homo sapiens
gcggaagacacagctcaaggtagccccggagaccaaagtgaagagcagccagccccaggcagggagccagggcccccagaccttccgccagggcgtgggcaagtacatcaacccagcagccacgaagcgagcagcagaggaagagccctcaaccagtgccactgtccccatgtccaagaagaagcccagtcggggttttggggacttcagctcctggtagcagtaggctgcctgatgaccactagaggtatgtctgcccctcgtcaccctgctgcacaccaatctgtggcccttcatcatgctaagaacaagaactgcgccatggctggctccttctcttctccagcccatccctctgcagcctgtcatccctgtctgtgaccattggtcgggcccctgggctctagagtgacttttgacgccctccatccctcccgccaggcactgtcctccgcaaggcctggtgcagccctggcagtaactggcttgtaagaggctcagacaccaagctgggcctgcagaggaggggcacagtaggacacagtgactgcccaggtgtccacacacctgtaggcctctgagccagcgtccagggtacaggtgcgggtggtggggatgaaggcctgaccagggagggagaagcaggtttggagaggaccctgtgcccac

SEQ ID NO: 23339 - DNA, 444 bp, Homo sapiens
gtcctctccagggcatcccaaatctggtcttcagtgtactggttgaaggggtccaaatttgatctgacagtgccactgaacagcaccggctcttgaggaatgatagagagtttgcttcggaggtcggcaaggccaatatcactgattctcactccatcaatcttgatgcagcctccagataactccaccagacggaagagggccatccccagcgaggacttccctgatcctgtccgccccacaatgccaatcttctctttaggtttgatcgtgaaggatactttctttaggacgagagggaggttttctcggtacctcatctctgcgttctcaaaggtcacctctccctcctggggccagtcaggggagggagccttgttcttaattctggcaggtgcttccaaggacagagtcttaatgtagtgattgatcctctcaccgagg

SEQ ID NO: 23340 - DNA, 530 bp, Homo sapiens
gattttgtatttttagtggagacggggtttctccatgtcggtcaggctggtctcgaactcccgacctcaggtgatctgcccacctcggcctcccaaagtgctgggattacaggcatgagccaccgcgcttggccagactgcgtcctttttaagcgaacattttagggcctgggagtttgtcaagtaaggaagtctcaagcccaaagagcagcgtcctgaccatggtggtttcattacgagcccttctgctggctctcaggcagaagccccacagcaccgggaccattcatgaggtcactgcccagctcatgatgtccgtgaggctgtccttttggccagtagccgtgtgcagctgtgtggcacagatggcttcgttcatcctgatcaaggccccacctcagccacagcagtccccccaacctgtgttgtccaccctattattcatgtacctgccaggccctgctagatagcaccccgtggcattacataacacttcatgagtggctgtgtcttgtaattttggggacagg

SEQ ID NO: 23341 - DNA, 460 bp, Homo sapiens
  misc_feature (1)...(460): n = a,t,c or g
gaaaanccttatttggagancctatgacatgattacgaatttaatacgactcactatagggaatttggccctcgaggccaagaattcggcacgagattagaataggaattggtgttggggggggggtttgcaagaatattttattttaattttttggatgaaatttttatctattatatattaaacattcttgctgctgcgctgcaaagccatagcagatttgaggcgctgttgaggactgaattactctccaagttgaaagatgtctttgggttaaattaaaagccctacctaaaactgaggtggggatggggagagcctttgcctccaccattcccacccaccctccccttaaaccctttgcctttgaaagtagatcatgtccactgcaatgctggacactacaggtatctgtccctgggccancagggacctctgaagccttctttgtggctttttt

SEQ ID NO: 23342 - DNA, 432 bp, Homo sapiens
  misc_feature (1)...(432): n = a,t,c or g
gactgaaacgaaatgtactggggagaaacttgaccgcaaatgatccatcacaggagtatgttgcaagtgagggtgaagaagatccagaagttgaatttttaaagtcactaacaaccaaacaaaaacagaaacttctcaggaaattagatcgactggagaagaaaagaaagaaaaaagatagaaaaaagaaaaagtttcagaagagcagaagtaaacacaagaaacataagtcctcttcttcctcatcttcctcctcctcctcctcttcctctactgagacttcagaaagcagtagtgagagtgagagtaaccctttngaacactacnncgcaggangnattagatttganaaactagtnttnagggcatatcatcagngantctgaanagangggcaatgctaanacgagagagcntnntgatnatcttttt

SEQ ID NO: 23343 - DNA, 454 bp, Homo sapiens
  misc_feature (1)...(454): n = a,t,c or g
gccgagcggaatcaggatgccactgtgtacgtggggggcctggatgagaaggttagtgaaccgctgctgtgggaactgtttctccaggctggaccagtagtcaacacccacatgccaaaggatagagtcactggccagcaccaaggctatggctttgtggaattcttgagtgaggaagatgctgactatgccattaagatcatgaacatgatcaaactctatgggaagccaatacgggtgaacaaagcatcagctcacaacaaaaacctggatgtaggggccaacattttcattgggaacctggaccctgagattgatgagaagttgctttatgatactttcagcgcctttggggtcatcttacaaacccccaaaattatgcgggaccctgcacaggcaacttcaaaggntatgccttataaatttgnttcatttgancttcggancncnaatt

SEQ ID NO: 23344 - DNA, 393 bp, Homo sapiens
gtcggctggctgcccccggcccctcacctccatctttctacccccagggtcgcggcgagcgcgcctatgacatctactcgcggctgctgcgggagcgcatcgtgtgcgtcatgggcccgatcgatgacagcgttgccagccttgttatcgcacagctcctcttcctgcaatccgagagcaacaagaagcccatccacatgtacatcaacagccctggtggtgtggtgaccgcgggcctggccatctacgacacgatgcagtacatcctcaacccgatctgcacctggtgcgtgggccaggccgccagcatgggctccctgcttctcgccgccggcaccccaggcatgcgccactcgctccccaactcccgtatcatgatccaccagccctcag

SEQ ID NO: 23345 - DNA, 671 bp, Homo sapiens
gtagagacacaagtggcccatctgtgttcacagcaatctaaacaagattcccgagggtctcctttgctaggtccagttgttccaggaccatctccaatcccttctgttactgaaaagaggttatcatctggccaaaataaagcttcaggcaagaggcaaagatccagtggaatatgggagaatggtggaggaccaacacctgctaccccagagagcttttctaaaaaaagcaagaaagcagtcatgagtggtattcaccctgcagaagacacggaaggtactgagtttgagccagagggacttccagaagttgtaaagaaagggtttgctgacatcccgacaggaaagactagcccatatatcctgcgaagaacaaccatggcaactcggaccagcccccgcctggctgcacagaagttagcgctatccccactgagtctcggcaaagaaaatcttgcagagtcctccaaaccaacagctggtggcagcagatcacaaaaggtcaaagttgctcaccggagcccagtagattcaggcaccatcctccgagaacccaccacgaaatccgtcccagtcaataatcttcctgagagaagtccgactgacagccccagagagggcctgagggtcaagcgaggccgacttgtccccagccccaaagctggactggg

SEQ ID NO: 23346 - DNA, 355 bp, Homo sapiens
  misc_feature (1)...(355): n = a,t,c or g
gctcgactggcagatagacgtggacctactcaataaaatgaagaaggcaaatgaagatgagttgaagcgtttggatgaggagctggaagatgcagagaagaatctaggagagagcgaaattcgcgatgcaatgatggcaaaggccgagtacctctgccggataggtgacaaagagggagctctgacagcctttcgcaagacatatgacaaaactgtggccctgggtcaccgattggatattgtattctatctccttaggattggcttattttatatggataatgatctcatcacacgaancacaganaaggccaaaagcttantagaanaaggagganactgggacaggagaaac

SEQ ID NO: 23347 - DNA, 419 bp, Homo sapiens
gactacagtaacctgctacaggtttgcagcctagaagcaataggctatagtatatagcctaggtgtgtagtaggcgataccatctaggtttgtgtgagcacactctaaggtgtttgcactacaacaaaattgcctcatgaagcatttctcagaacatattcccatcattaagcaacacatgactgtactttgtttggtctattattttactcaaggccagtcttacagagtcaggcagtgatgtcatttacattaggaagtatttgcatgaaaagtctctttgagaaagctggtataacactagtaacattctgtgcactgattgtgtctttagaaggctataatttaatggcatgagtaaatctgcaatcaggtcctgaggaaggtggccacttcccatcatttaacaatgcccctca

SEQ ID NO: 23348 - DNA, 545 bp, Homo sapiens
  misc_feature (1)...(545): n = a,t,c or g
ggcgtggtagtttttccctaaaccatcaattgccaaggttacttttggcagcgagaaaaagagaaaggggcagaatgtgcctgtctgaagcttttgtacttctgcccagactgtggggaaaatgatgggattaaataaaaatgccagcgataacaaaaaggaaatcttcccaatagttttccttgcctgaagaatgaactgcttgaagctatgacctccctgcctgtctcaatgaggtcaagaaactgactgtcactcctacatttgtgattaatgatgctcccgctggtgacgtatttctaaccacagtctctggagagcagcaagactcagttgccttgtggtgtgttgagtcattgctctggcaaaagatctgtttgctccagcaacaggcttagctttcaacaaggcgcctcttgattctttgctgcaacatcctatcatgaaaagaacagagagcccagtacaaagaaggactgctaanaaggatgaacnttaaataattaaaaaaacttttgactgaatggcaaatgcccataatgaaa

SEQ ID NO: 23349 - DNA, 497 bp, Homo sapiens
  misc_feature (1)...(497): n = a,t,c or g
ggagggatttaaaaataacaaaaccattgtctctggagcctctggtccttattctccacctatctccttttccttttccacccacaaaagaaccttaatattcctgtcctaaaacatactcctttcttttctctgacttctgctagtctctttctcctctagagtataatcccagtttttatcctttacaaacacatgaatacaactaagatgtgtggctgggtgtggtggctcacgcctgtaatcccagcaccttgggaggctgaggcgggtggatcacctgaggtcgggagttcgagaccagcctgaccaacatggagaaaccccgtctctactaaaagtacaaaagtagccaggtgtggtggtacatgcctgtaatctcagctactccggaggctgaggtaggagaatcgcttgaatctgggaggcggaggttgtggtgagccaagatccgtgcaattnactccaacctgggnaacaaaagtgaaactccatcc

SEQ ID NO: 23350 - DNA, 460 bp, Homo sapiens
  misc_feature (1)...(460): n = a,t,c or g
gnngnnnnntnnnntnttgnntttggananccgttatgacatgattacgaatttaatacgactcactatagggaatttggccctcgaggccaagaattcggcacgagagatgtctttgggttaaattaaaagccctacctaaaactgaggtggggatggggagagcctttgcctccaccattcccacccaccctccccttaaaccctctgcctttgaaagtagatcatgttcactgcaatgctggacactacaggtatctgtccctgggccagcagggacctctgaagccttctttgtggcctttttttttttnnnnnnngnnnnnnnnnaaaggnnntttnngnantttngaanncnnananntttcnangntcnnccatttcnnaantttnaaaannttnantngncngttnnantnnangggnctgttngaaaantnancccccagggaanncccac

SEQ ID NO: 23351 - DNA, 416 bp, Homo sapiens
gaaaaatataaattaagtgtttcagaagccatgccgtgtggcctgctctgctctcattaatagccgaggcttcgattgttaaaggcattttgagatgggagagtcagctgctttgtgcaagaaaaaatggaaaagcttccttttaattttctcatcaaagcagaaccatagtcacaaagtcattttgggaggggcatttttattaaaaggatttgaaaagctttaccctggatggagagtgtatctcatttgatgagagtggttttctctcctagcttagtggctccatcactgaaagtctgggcatttctcctgtgttacttgtttacctaatcagatttccacatgaattctggttttcatggccaaagaggggatgtcacgatccatgcgtgcgtgtgaccaggaggaaggga

SEQ ID NO: 23352 - DNA, 420 bp, Homo sapiens
  misc_feature (1)...(420): n = a,t,c or g
tgacngctatgacatgattacgaatttaatacgactcactatagggaatttggccctcgaggccaagaattcggcacgagcacagtagctggtagattaattttttgtgggtttatatttgttttattttgctgaacataaatagtgtcacacattaccttggatctaaatggcatccatggcttggtgcaatgactcatgcctgtaatcccagcatatcgggaggccgaagcaggcagatcacttgaggccaggagttcgagaccagcctggccaacatggtgaaatgctgtctctacttaaagtgcagaaattagccaggcgtggtggtgtgcacctgtaatcccagctactgaggagactgaggtatgagaatctcttgaatccaggaggcagaaattgcagtgagctgagatcatc

SEQ ID NO: 23353 - DNA, 807 bp, Homo sapiens
  misc_feature (1)...(807): n = a,t,c or g
taatacgactcactatagggaatttggccctcgaggccaagaattcggcacgagaagtgttccaaaacagccataaattcaaattcatgtgcttccttagagatctgtttatggttctcatatctcctcttatatgtatttgaatgacagaaccattatttaaggcaaggatcgggtgataacatagaggcttccttggttctaagccttttattaatgtcctgctctccatttccctgcttgttccctagactgaagctacactgaccaaagctacagcattttacattctgtagatgttggttgtgtgctcattgcctgagacagccaactatttaattctgtcattgataccaggatattgaaattcagttaaaatttgaagctcacagtagctggtagattaattttttgtgggtttatatttgttttattttgctgaacataaatagtgtcacacattaccttggatctaaatggcatccatggcttggtgcaatgactcatgcctgtaatcccagcatatcgggaggccgaagcaggcagatcacttgaggccaggagttcgagaccagcctggccaacatggtgaaatgctgtctctacttaaagtgcagaaattagccaggcgtggtggtgtgcacctgtaatcccagctactgaggagactgaggtatgagaatctcttgaatccaggaggcagaaattgcagtgagctgagatcataccactgnactccacctgggtgatagagcaagactctgctcaaaataatataataaataaataaatggnctgcctaaattt

SEQ ID NO: 23354 - DNA, 440 bp, Homo sapiens
gctcggcctcccaaagtgctggggttacaggcgtgagccaccgtgcccagccacagtcttcttttttttgagacagggtctctctgtcacccaggctggtgtacagtggcgctatctcagcttactgcaacctccgccttctagactcaagcaatccatattcagataatttttaactatttttttgtagagacaaggccccactatattgcccaagctggtctcaaactcctgggctcaagcaatcctcctgcctcggcctcccaaagtgctgggattacaggggtgagccactgcacccggccagttgatcttaccttatacattagaaggctctgcacccccttcaagccactcttggcctataaaggagtggacagagaattacccaagggtggtgggatcctgggcatttgagagctcaccttctgcccctaaga

SEQ ID NO: 23355 - DNA, 1100 bp, Homo sapiens
  misc_feature (1)...(1100): n = a,t,c or g
cgcgccgcccgcccgctcagcgtccgccgccgccatgggagtgcaggtggaaaccatctccccaggagacgggcgcaccttccccaagcgcggccagacctgcgtggtgcactacaccgggatgcttgaagatggaaagaaatttgattcctcccgggacagaaacaagccctttaagtttatgctaggcaagcaggaggtgatccgaggctgggaagaaggggttgcccagatgagtgtgggtcagagagccaaactgactatatctccagattatgcctatggtgccactgggcacccaggcatcatcccaccacatgccactctcgtcttcgatgtggagcttctaaaactggaatgacaggaatggcctcctcccttagctccctgttcttggatctgccatggagggatctggtgcctccagacatgtgcacatgagtccatatggagcttttcctgatgttccactccactttgtatagacatctgccctgactgaatgtgttctgtcactcagctttgcttccgacacctctgtttcctcttcccctttctcctcgtatgtgtgtttacctaaactatatgccataaacctcaagttactcattttattttgttttcattttggggtgaagattcagtttcagtcttttggatataggtttccaattaagtacatggtcaagtattaacagcacaagtggtaggttaacattagaataggaattggtgttggggggggggtttgcaagaatattttattttaattttttggatgaaatttttatctattatatattaaacattcttgctgctgcgctgcaaagccatagcagatttgaggcgctgttgaggactgaattactctccaagttgagagatgtctttgggttaaattaaaagccctacctaaaactgaggtggggatggggagagcctttgcctccaccattcccacccaccctccccttaaaccctctgcctttgaaagtagatcatgttcactgcaatgctggacactacaggtatctgtccctgggccagcagggacctctgaagccttctttgtggctttttttttttcacccnggggtttt

SEQ ID NO: 23356 - DNA, 427 bp, Homo sapiens
gggaaaaagtaagaaaaagaagagtagggaaaagaatgcaaaggctctaaccttttcatatgaaagatgtttgcagagaaaaaaggattcccatggtctcacaaagccaaggaaaaaaaggtccgtcgaggaaaagtcaagtaagacaaggactagcaggtagaaagcagtttcagcagtgtggagttaaaggtcaaattgccggggattaagataatgaagatgagggggcttagtggttaagagctctggagttgaactgcctggatttggacccagacttcagcatttactgtctgtccttgggcaagattttaaatctatctatgctttattgcctcatatactaaataggaataaaactaatacccatcacagaaaggtgttgtgagaaataaatgagataacctattttaattgctttccc

SEQ ID NO: 23357 - DNA, 406 bp, Homo sapiens
attttatatgtaaatgtgttagcactgatagtcctttttccaatgttttattggggaattaaatagtgtgatgtttggattgatatcgtgaaatcctcagccgagaaattgggctggattgtgctttggttaatacatctttccctaaagaagataaacacaaaatccattccaggtagctcggcaccaactaagaaaaaaagcacaaagttctcagagctctcgaggaaagtggttgtccccgtaccaccatgcactgtaaatatccctcccctctctccctggtcccctcccccatccccaccactgatatcatggggagtaataggaccagagcggtatctctggcaccacactagggactatcaggtaataaaagctttgactccctgaaaaaaaaaaaaaa

SEQ ID NO: 23358 - DNA, 366 bp, Homo sapiens
gccctggcttccatcttgaactcgcaaaatgttagggtttcaggcatgaaccactgcacccaggataaattcttatttatactcggatctgtttctgcctgcctattgctttctattcatctctttcttttttcctgcattgctacattttattatcatgtcagtaaacccattacttttatttttcaaatatgtccagccacacttccatgtttattttaaagataaactgttttactaagttctcctactattctatttgcattgatttttaattaagcggccgcaagcttattccctttagtgagggttaattttagcttggcactggccgtcgttttacaacgtcgtgactgggaaaaacaa

SEQ ID NO: 23359 - DNA, 415 bp, Homo sapiens
  misc_feature (1)...(415): n = a,t,c or g
accagctatgacatgattacgaatttaatacgactcactatagggaatttggccctcgaggccaagaattcggcacgagttaattgaaaagaaagacactcaatttttttcctttttctttattttcaggttatatttcacactatgtgctgactgtatctacagaagatatttaaaaaaaaaaaagataaactttttttcaaagattttgattccaggggaatctttgctttaaatttgngtgtgngtttgngttcgngaattgtaactccaaaagcaatgcctgtacaagctccacaatggacggatttcctctcctgcccaatttgcactcaaactttcgacgaaacaattcgaaagcccatcagttngggttggggccatactgtctgcaanatgngcctgaataaactcc

SEQ ID NO: 23360 - DNA, 407 bp, Homo sapiens
gaccagtggtgtatgagagtacctgtctcaacccattcttgccaactttgcattttatcaaacttgaaaaatatttgctgattggtaacatattcattccaaaaatgttttaagtgacttctgtgtgcaaggcttcttgctctatcctgcaaaacaaaagcaaatcagaaccgtgctttcttcttttctagatgtctgtggtttaatggcagtgagggacaaaaagcaagcaaaccacaatttacaattattttatgtacagatttatcatggaaacaaaggggcagctgtagtaagccattatagtttaatgtaaagtttaaaatgccatagaaatatgggttattgctctttgtgttgcctgcagtatttttcttctcatttgtaaatatattttccatttagtt

SEQ ID NO: 23361 - DNA, 497 bp, Homo sapiens
  misc_feature (1)...(497): n = a,t,c or g
agaacataaaggtaaaacaaaacaaaacaacattttgagaacaaagatgaccataaccactgaagggaatcacatcttttaagacaaattcatattcttttatttgttatggcagatgacaagatggtacaacctttattcttttccaaaataaaacaaagggcacagcatctgtagtcagccgacaactatttcggccttttgggggtgggtctggccgtacttgtgatttcgatggtacgtgaccctctgctgaagacttgccccctgcccgtgtacatagtgcattgtttctgtgggcgggcccagcactttccgtcaacgttgtactgtatgtgatgaattgcgttggtctctgcatttttctgcagaagaggagtaaccgctccaggtaccttgaccttgtacagccagangccaacactgtgggtgtgtgactccttagcananaaaaccatgtggtgatgatntgtatatanangtgaggatgtaccggg

SEQ ID NO: 23362 - DNA, 426 bp, Homo sapiens
gaagaagatgaggaagaaatcgatgttgtttctgtggaaaagaggcaggctcctggcaaaaggtcagagtctggatcaccttctgctggaggccacagcaaacctcctcacagcccactggtcctcaagaggtgccacgtctccacacatcagcacaactacgcagcgcctccctccactcggaaggactatcctgctgccaagagggtcaagttggacagtgtcagagtcctgagacagatcagcaacaaccgaaaatgcaccagccccaggtcctcggacaccgaggagaatgtcaagaggcgaacacacaacgtcttggagcgccagaggaggaacgagctaaaacggagcttttttgccctgcgtgaccagatcccggagttggaaaacaatgaaaaggcccccaaggtagttatccttaaa

SEQ ID NO: 23363 - DNA, 595 bp, Homo sapiens
ggttactggggctataaatacaactttttaaatgaaatttatgttattatcctgctcaaagtaccattatggtttccatatggtaattacattggaaagttctgcaataagattctagttctctcttttctttaagcttatggttgaaggttaaccttgtttgtgcagattaccaaattactgctgatgtagtatgataaagtcagcttcttggatacagacacacccagggcagctgccaatcagaaatgcaaattgctaaattccaaacagaaccagtgactttgctgctacatatttactaaattgaccactttgattcttgcttgtttgtctcagttatagggagttttgtacatggtgcctcttgttttccatcttcatggccttttctgttgagaaacatctaaagtgtattaacagtgcatgcttttactttgtaaatgtggtgccaaatccctgtttgccatcgtttttactgtaccgatgttaactgtagtaatccttagccagtatgttcttttgctgaaactgttgcattttgggacttttttccactttggcatgtgtacatttttaatctgttatagttggc

SEQ ID NO: 23364 - DNA, 638 bp, Homo sapiens
gggagacagatgggcctttatttgaagatgtgcagatgctgagaaagacagtgaaggacgaggctcatcaggcacagaaagatccgaagaaggaccgtcctcttgcacgccgcaagtccgagctgcctcaggacccccacaccaagaaagccttggaagctcactgcagggccgatgagctggcctcccaggacggccgctagcctccggggcgccgcgtcggggccgggccccgccagttcttttccggattctgtagaaaatacatacttcctgtgccataccaatcagttacactcaaagctttcttggaccccgttccgtaggcaataaccgtgcgtccgcctcagcgcgagattaggagttcaaacaatggtgacttcccagagcccgctggcagagccgcgggttgacgacggtgtcctcgcagtgtcgccgccaccccagcgtagtccaagtcagactatttcacaaagtcagagcgataggaaagcaccctgcccttcatcttcatgttctcccaaatggaacttaggatcttttaacataggtggttctgtgataacatcagtgttttccaaatcaaaggaacgctttaaaaaataggacctattttttaaagactttacagcctttgg

SEQ ID NO: 23365 - DNA, 315 bp, Homo sapiens
gctcggctggaacctctgcctcccagatttacaccattctcctgccctcagcctgctgagtggctggggctgcaggcgcctgccaccatgcccggctaattttttgtatttttagtagagatggggttttaccatgttggccaggatggtctcgatctcctgacctcgtgatccgcccgcctgggactcccaaggtgctgggattgcaggtgtgagccaccgcgcccggccagtatgtggatgttttcatgtgttcattctggtgtgtgtgtgcagacttgtgggccatgttgcatacactcctatcccagctcc

SEQ ID NO: 23366 - DNA, 304 bp, Homo sapiens
cgaacgcggagagcacgccatgaaggcctcgggcacgctacgagagtacaaggtagtgggtcgctgcctgcccacccccaaatgccacacgccgcccctctaccgcatgcgaatctttgcgcctaatcatgtcgtcgccaagtcccgcttctggtactttgtatctaagaagtcttcaggggagattgtctactgtgggcaggtgtttgagaagtcccccctgcgggtgaagaacttcgggatctggctgcgctatgactcccggagcggcacccacaacatgtaccgggaataccgggacctg

SEQ ID NO: 23367 - DNA, 385 bp, Homo sapiens
  misc_feature (1)...(385): n = a,t,c or g
agaaagaaaagatttggcattgcaactatttctcttgaactgagtgacccaaaatcagttgtcctttgaattttagtatantaccatagtctgagctcagaagggccttatgatagaccctgtatgttctgggaggcaagaattgagttggtattaatatcttaatgcttttgttttactgctgaataacagatgacccttcaggtcttttcatgttttcctttttcatgtctccctgcctaggatcctaggtgcctaattgcctacttaaactagtttagggaatcttggactgaagccaanacatgtnaaatgccctgaaggttaggcaaagggaagaagttgggtagtatgaaagattaggtcacatcttgtttatctccct

SEQ ID NO: 23368 - DNA, 492 bp, Homo sapiens
cttgactgattacgaatttaatacgactcactatagggaatttggccctcgaggccaagaattcggcacgagaactggagtaccttctactgcctcagtgggcaaatccaaaaccccattagtggcaaggaagaaagtgttccgagcatcggtggctctaacgccaacagctccttctagaacaggctctgtgcagacacctccagatttggaaagttctgaggaagttgatgcagctgaaggagccccagaagttgtaggacctaaatctgaagtggaagaagggcatggaaaactcccatcaatgccagctgctgaggaaatgcataaaaatgtggagcaagatgagttgcagcaagtcatacgggaggttggcatggatcctattagctgtgtaatactggaattatcaatgatatgcactggtggaggtgttatttgtgctttagaagatacttgctgttgagctgggctactgtatacagtgtacaa

SEQ ID NO: 23369 - DNA, 982 bp, Homo sapiens
  misc_feature (1)...(982): n = a,t,c or g
gggttcgaggaagtcagggaggcaccacccagagggtccagggtgttcgggactcaagctggtctttctcctgccccagcctggcttgcttgtgtgccttgttccttggtgacaggagcaggttgccgtccggttgtttgaccaggagagttgtataaggtcactggagggttctgggaaaccaccggtggccactccttctggaccccactctaacagaacccccagcctccaggaggtgaagattcaagtgagtctgtgtggccaacagctttgatgtctattgaacagtgactgggctgaggaagagggaaaagagatgggggatcaggaataggacagtgtgggtagactactgaacgcacatcttgatgtcagactggggtgctctctcccaacacagcgcatcggtatcctgcaacagctgttgagacaggaggtaaaggggctgntagggggccagtgtgtccctcttaanggaggctcttctctggatatggttgaacttcagcccctgctgactganatttctataactctgaatgccacanagcataactctgggacttcccaccttcctggactgttaaaacactcagggctgccaaagccctgtcttccagaggagtgcggggaaccacagccctgccctccggcagagcctgggcccccagaggccttctgtaggagtgagcctgagataccaagagccctcctccaggaacagcttgaagtaccagagccctaccctccagcagaacccaggcccctagagtcctgctgtaggagtgagcctgagataccggagtcctctcgccaggaacagcttgaggtacctgagccctgccctccagcagaacccaggcccctagagtcctactgtaggattgagcctgagataccggagtcctctcgccaggaacagcttgaggtacctgagccctgcctccagcagaacccgggccccttcagcccagcaccc

SEQ ID NO: 23370 - DNA, 449 bp, Homo sapiens
  misc_feature (1)...(449): n = a,t,c or g
gagaaagctaaagatgtgtcttcatctctttttcctctcttccacctcagaggtaaccattaaccggaagctggtgtgcgtgactcccagatatatttttatactttgagtacatataaaaatttgatttctgataatgtcaggctaggtaaatcaagcccaccctcatgataaatatgcctaaatcctacctaaactacacatgcataaatatacttttttctaaactatatttaaaatcttatcaaagtgttatagaacctacaaggtcataaagagctagcaggccagaatttaaggaacggtagaaactagagaggctagctgaacaccagctgcacttggcactgaggcaacccggactgcagtgtcctggggttgggttggggcagatttacttatggnttaccttaccctgggggcgtggnctttcagtaccagcttcatgg

SEQ ID NO: 23371 - DNA, 360 bp, Homo sapiens
aaagaacgaagtttctgagaccgtaactaaaaataaaaattacttttggatgaataaaatataatttttcaggagaaaaaatatgtaatagtttcaccactgaaataaaacatagggtttttgaacacaaatttctcagatttaaaaatatgcatatttcctgtataaaagttgaaaagtgggcagtggctggtggtgcctgtagtcctagctacttgggaggctgaggatcctttgagtccaggaatttgaggtcagccaggacaatacagggggaccccatctcttaaatcagacaaaaataaaagtagaaaaaaatattaaataagaaatttggaaagtggtaaaaacttttaagac

SEQ ID NO: 23372 - DNA, 480 bp, Homo sapiens
  misc_feature (1)...(480): n = a,t,c or g
gagaggatccgaggggaaatgtttagagccctcaggaggaggaagagaccgagttttaggaaaaacatcaaagctggataggttgggcagaagagctggggataacatttagagaggctgagagtcctgggttctgggttatcaaggtgagagaaaccagaggttgccagttgtaggtgggcgtcaggactagagtgatgcttccagaagtttctgcaagtgggccgagtctaaggtagggcagggtacgccagaagttgaggggcactaggtagacaggccgagctggtggctgggtgctcccctcaccctccatgctgctaggagcccgtgagcagggacttgctctcctctccctccctcctggggcctgcctgtctgtctgtgaactcttgtcggccagcgaggccgggagcaggtggccttcatctgcaactgngtctctctaaccttcacagccacggggacaccctgcaccta

SEQ ID NO: 23373 - DNA, 699 bp, Homo sapiens
aacagctatgacatgattacgaatttaatacgactcactatagggaatttggccctcgaggccaagaattcggcacgaggcggcgaacgcggagagcacgccatgaaggcctcgggcacgctacgagagtacaaggtagtgggtcgctgcctgcccacccccaaatgccacacgccgcccctctaccgcatgcgaatctttgcgcctaatcatgtcgtcgccaagtcccgcttctggtactttgtatctcagttaaagaagatgaagaagtcttcaggggagattgtctactgtgggcaggtgtttgagaagtcccccctgcgggtgaagaacttcgggatctggctgcgctatgactcccggagcggcacccacaacatgtaccgggaataccgggacctgaccaccgcaggcgctgtcacccagtgctaccgagacatgggtgcccggcaccgcgcccgagcccactccattcagatcatgaaggtggaggagatcgcggccagcaagtgccgccggccggctgtcaagcagttccacgactccaagatcaagttcccgctgccccaccgggtcctgcgccgtcagcacaagccacgcttcaccaccaagaggcccaacaccttcttctaggtgcagggccctcgtccgggtgtgccccaaataaactcaggaacgccccggtaaaaaaaaaaaaaa

SEQ ID NO: 23374 - DNA, 520 bp, Homo sapiens
  misc_feature (1)...(520): n = a,t,c or g
gtcggagatggaggagccctatctgcaagaatccaaagaggagggtgctcccctcaaactcaagtgtgagctctgtggccgggtggactttgcctataagttcaagcgttccaagcgcttctgttccatggcttgtgcaaagaggtacaacgtgggatgcaccaaacgggtgggacttttccactcagaccggagcaagctgcagaaggcaggagctgcgacccacaaccgccgtcgggccagcaaagccagtctgccaccacttaccaaggataccaagaagcagccaacaggcactgtgcccctttcggttactgctgctttgcagctaacacacagccaggaagactccagccggtgctcaagataactcaagctatgaggaacccttgcacccatctnatnanttatnatatacttcctgccgntgactnggtcngtgtganntnntgctctgannnntnnattnngtcgnnncannggtncattggacantgnntnntntcgantgaaanntctt

SEQ ID NO: 23375 - DNA, 417 bp, Homo sapiens
gagaaaagtggtcatatttactcaccaacatgaaatttaaaattacaggaaaaatagcattcaaaacagtactttagctatctgaatcaagtgctgcaaggttcagtttggaaaccccatcagctgcctgtcaccccataactaaatacagcttgtcagacagagggggtaactcacagaaccagccccagcctgcacagagaaggccatgtagcccgggcgcagaccctgacgttaatgcccgggttgtggttctctcaggatggctggtgctatacttgggttggcctaataatggttaatggaaatgctgacaagaagggaagacagaggctctaggatctgcagaaagaggaaaccatggcaactcacacgcatgggcacaaatgtcctgctacccattcagaaaataatcag

SEQ ID NO: 23376 - DNA, 398 bp, Homo sapiens
gccctgagaaggtctgagatgagtgagaaggtgtgtctgaattcttacatgggggcccagaagggctaatggaaagggttggtcttatcacctctctttgaaaattagagaagcatctttcacatacctgggctaaagaaacttcttttgcaacgttctgatgctattgactttcaacatttaattcttcttacaagaaaattatagtaacatatataaaatgcagaagtgtaaacacacagctactgaccttgaaaacagggaggccaggcagggtggctgaggcctgtaatcacagcactttgggaggccaaggcaggcagatcacctgaggtcaggagttcgagaccagcctgagcaatatggagaaacccccgtctctactaaaaatacaaaaa

SEQ ID NO: 23377 - DNA, 457 bp, Homo sapiens
cctttgacatgattacgaatttaatacgactcactatagggaatttggccctcgaggccaagaattcggcacgagctttgctgaagtgttaatggattggttaatttgtgagcaacactcctaattgtattaaatctctacaaccttattaagcatttgtgcaggattagatcagagagcttggagaagcagcttgccagtggtcagagggagggagtggggagagccaggctaacaagtgagtctgggccactaattgatatccctaagtcccctactccccaaaataaaacaacagactggaaaccccaccactacaagttcagaagtattctaaagcacatacaacagcttctgtgctgtatgtttaaatgccattaaagagagagaatatgcaagccaacttattctttttacttttatttgagggaaaataaatgataattaacataaagaa

SEQ ID NO: 23378 - DNA, 551 bp, Homo sapiens
  misc_feature (1)...(551): n = a,t,c or g
gnngnnntnnnnnttnnnntttggantttgaaaacnctatgactgattacgaatttaatacgactcactatagggaatttggccctcgaggccaagaattcggcacgaggaacaactgggccaaggggcactacacagaaggcgcggagctggtggactcggtgctggatgttgtgagaaaggaggctgagagctgtgactgcctgcagggtttccagctgacccactccctgggtggggggactgggtctgggatgggtaccctcctcatcagcaagatccgggaggagtacccagacaggatcatgaacacgtttagtgtggtgccttcgcccaaagtgtcagacacagtggtggagccctacaacgccaccctctcagtccaccagctcgtagaaaacacagacgagacctactgcattgataacgaagctctctacgacatttgcttcagaaccctaaagctgaccacgcccacctatggtgacctgaaccacctggtgtctgctaccatgagtggggtcaccacctgcttgngcnttcccaggcaa

SEQ ID NO: 23379 - DNA, 512 bp, Homo sapiens
  misc_feature (1)...(512): n = a,t,c or g
tttgaancctttagctcngacatgattacgaatttaatacgactcactatagggaatttggccctcgaggccaagaattcggcacgagaagattggaactaccaagcatgtggctcctggtcagtgtaattctaatctcacggatatcctctgttgggggagaagcaacattttgtgattttccaaaaataaaccatggaattctatatgatgaagaaaaatataagccattttcccaggttcctacaggggaagttttctattactcctgtgaatataattttgtgtctccttcaaaatcattttggactcgcataacatgcacagaagaaggatggtcaccaacaccaaagtgtctcagactgtgtttctttccttttgtggaaaatggtcattctgaatcttcaggacaaacacatctggaaggtgatactgtgcaaattatttgcaacacaggatacagacttcaaaacaatgagaacaacatttcatgtgtagaacggggctggccc

SEQ ID NO: 23380 - DNA, 424 bp, Homo sapiens
gaatagcaatagctcccagatagcaagcatgggtgggtggggggagtattacatgcgtcacttcacttaatcctcatggtctgtctacttattttcagatgagaaaacaggtttagagaagttgtgatctacctaaagtcatgcacagtttcactcaagtgtctgactccagatccgcttgcctctaatctctcatagtaacttgttgacacattttctccagttgtcctgtcttgcttaaaaagctgtggggaagactcagcctgggctcaggtagtattagaccagcagtccctggtgtggcatactcagttttggcattgccttgcctggtatgttttaaagaaaactcatcagaacctttgtatcttttttattttccttgagacagggtctcgctctgtcacccaaggctggagtgcag

SEQ ID NO: 23381 - DNA, 697 bp, Homo sapiens
gctcaacaacccgtacgtgcggaaggccctcaacatcccggagcagctgccacaatgggacatgtgcaactttctggtaaacttacagtaccgccgtctctaccgaagcatgaactcccagtatctgaagctgcttagctcacagaaataccagatcctattatataatggagatgtatacatggcctgcaatttcatgggggatgagtggtttgtggattccctcaaccagaagatggaggtgcagcgccggccctggttagtgaagtacggggacagcggggagcagattgccggcttcgtgaaggagttctcccacatcgcctttctcacgatcaagggcgccggccacatggttcccaccgacaaagccctcgctgccttcaccatgttctcccgcttcctgaacaagcagccatactgatgaccacagcaaccagctccacggcctgatgcagcccctcccagcctctcccgctaggagagtcctcttctaagcaaagtgcccctgcaagccgggttctgccgccaggactgcccccttcccagagccctgtacatcccagactgggcccaaggtctcccatagacagcctgggggcaagttagcactttattcccgcagcagttcctgaatggggtgggctggcccttctctgcttaaagaatgcctttatgatgcactgatccatccaag

SEQ ID NO: 23382 - DNA, 428 bp, Homo sapiens
  misc_feature (1)...(428): n = a,t,c or g
ggaggcgaggtgtaatcaactgtcactcttcagttaaatcatatcacctcacttctgaaatattctttgatctctctacctgtaaatcacgttctactttctctactatagactgtagcatatagatataatcatgacatgacaaattaccaagagcatggagagtatgtctatttaaaagatgattgaaaaacacacacatgcaaatactaacccagacatttactttttaatgtttttcttcttttttgacttgttactagaatataaaattatatgaaacacatactgaggacaagttttaattttttttaatttaaaacacatcaggcatttcttttttactggctttatagtttaggcaatattaacaccttacatctgtaattttagcattttgaatcncagtttttaatgncattatccat

SEQ ID NO: 23383 - DNA, 479 bp, Homo sapiens
  misc_feature (1)...(479): n = a,t,c or g
gtgnnntnnnttggaacctttgactgattacgaatttaatacgactcctatagggaatttggccctcgaggccaagaattcggcacgagtctaatctcacggatatcctctgttgggggagaagcaacattttgtgattttccaaaaataaaccatggaattctatatgatgaagaaaaatataagccattttcccaggttcctacaggggaagttttctattactcctgtgaatataattttgtgtctccttcaaaatcattttggactcgcataacatgcacagaagaaggatggtcaccaacaccaaagtgtctcagactgtgtttctttccttttgtggaaaatggtcattctgaatcttcaggacnaacacatctggaaggtgatactgtgcaaattatttgcaacacaggatncagacttnanaactatgagaacaacatttcatgtgtagaacggggctggtccacccctcc

SEQ ID NO: 23384 - DNA, 441 bp, Homo sapiens
  misc_feature (1)...(441): n = a,t,c or g
ggtttggagagctcagagtcacagattcgcaatgaatggacttagaattgagtgcttgactgactgcagacactaaggtgttaactctgctgcctctttatgcttgggatggtttgcagaacctgctttttgaaaacaagactatttacatgcacgtttctgttcccagtaattcttggcatggatgagggagatgctttgtgtcagattcgcatggtgaggagggggcagctctgagaggagccaggcccaggctgcctccagggcgtccagtgctccccaggcttgcctaggagagtgtcgattcctgctgcacagcaactctcatgaccaagtttaaaatgcattatacgtagaaaagtgtgcttctgtggctcacgcctgtaatctcagcactttgggaggccaaggcgggcggatcatgangtcangagttggaaa

SEQ ID NO: 23385 - DNA, 654 bp, Homo sapiens
ggcaagcctccggagcgcacgtcggcagtcggctccctcgttgaccgaatcaccgacctctctccccagctgtatttccaaaatgtcgctttctaacaagctgacgctggacaagctggacgttaaagggaagcgggtcgttatgagagtcgacttcaatgttcctatgaagaacaaccagataacaaacaaccagaggattaaggctgctgtcccaagcatcaaattctgcttggacaatggagccaagtcggtagtccttatgagccacctaggccggcctgatggtgtgcccatgcctgacaagtactccttagagccagttgctgtagaactcaaatctctgctgggcaaggatgttctgttcttgaaggactgtgtaggcccagaagtggagaaagcctgtgccaacccagctgctgggtctgtcatcctgctggagaacctccgctttcatgtggaggaagaagggaagggaaaagatgcttctgggaacaaggttaaagccgagccagccaaaatagaagctttccgagcttcactttccaagctaggggatgtctatgtcaatgatgcttttggcactgctcacagagcccacagctccatggtaggagtcaatctgccacagaaggctggtgggtttttgatgaa

SEQ ID NO: 23386 - DNA, 339 bp, Homo sapiens
gcctggcactcctactagtcttaaaccattatctcccttgaaaaatgagttctggctcactccttactactaaggctgaggggcaaaggagattatataaatgaaagcaccatgcatgtttgaggtggtttccttttcttcattgttgttttttgagacagggtctcaccttgtcacccaggctggagtgcagtggcacaatcttggctcactgcagcctcaaccttccaagctcaagtgatcctcccaacctcatcctcctgagtagctggggccacaggcatgtgtcactatgtctggctaattttttgtatcttagtagagacaggggttttgcca

SEQ ID NO: 23387 - DNA, 343 bp, Homo sapiens
gaggtggttgtgcaggatggctgacggccggcctacgagcagctgaagctgcatatcacacctgaaaaattttatgtggaagcttgtgatgatggagcagatgacgtacttaccattgaccgtgtgtccacagaggttacccttgcagtcaagaaagatgttcctccttcagctgtcacaagaccaatatttggtatactgggcacaatccatctggtggcaggtaattatcttatagtcattaccaaaaagataaaagtaggtgaatttttcagtcatgtagtctggaaagcaacagattttgatgtcctttcttataagaagacaatgttgcacttaactg

SEQ ID NO: 23388 - DNA, 428 bp, Homo sapiens
accagctatgacatgattacgaatttaataccgactcactatagggaatttggccctcgaggccaagaattcggcacgagctttgatttccccggcccaagcgagcctctcattcagcctcctgagtggctgggaccacagacgccacacacagctaatttttatgtattcgtttttatttttttgcagagacagggtctccctatgttgcccaagctggtcttgaactcctgggctcaagtgatcctcctgcttcagcctcccaaagtgctaggattatagccaccgcacctcgtcttgaaatagccttttaaatgttcacctcagcttgcctcacagtggtaaaaataagcatttttttgttttgtaggatcagggagcttccaaggcatttgatacctttttgatgggaagaagggctctgagga

SEQ ID NO: 23389 - DNA, 599 bp, Homo sapiens
gcgatttcaatataaatgtaacatgggttatgaatacagtgaaagaggagatgctgtatgcactgaatctggatggcgtccgttgccttcatgtgaagaaaaatcatgtgataatccttatattccaaatggtgactactcacctttaaggattaaacacagaactggagatgaaatcacgtaccagtgtagaaatggtttttatcctgcaacccggggaaatacagcaaaatgcacaagtactggctggatacctgctccgagatgtaccttgaaaccttgtgattttccaaaaataaaccatggaggtctatatcatgagaatatgcgtagaccatactttccagtagctgtaggaaaatattactcctattactgtgatgaacattttgagactccgtcaggaagttactgggatcacattcattgcacacaagatggatggtcgccagcagtaccatgcctcagaaaatgttattttccttatttggaaaatggatataatcaaaatcatggaagaaagtttgtacagggtaaatctatagacgttgcctgccatcctggctacgctcttccaaaagcgcagaccacaggtacat

SEQ ID NO: 23390 - DNA, 394 bp, Homo sapiens
gctttgttacttggctttttgatactggggctggaactctgcaaaccacatttctcctttgctggttggctccccggtaggctttgccaatgagagagaggaagctggaagaagatgtgaaactagaggaggaacagggccttgttcctttctgtttctgtaacgtagcaatgcttcttctccttggcagtgtcacttgcttctagtagcagcagttggttcctatttgcagtttttcttttttttaacactctaaggacctgcctcacggaggtctcttggagacatcagctcttgccaactggcctctcctgggaagcctaaatcccagctttgctggaccctctgaactcctgggaaataagcaccagccaggcagcttcctctcctcaga

SEQ ID NO: 23391 - DNA, 326 bp, Homo sapiens
gttggaatcctagagagaagcaccccatttgctgcgagagagcagtagacacaatggatcctgtgggtacctcacttggccgcttgtttctgggggttgctgggagctcgactttggatcgcacttctgacaccatctgttaagggaaaacttgagacaaatttaacagagtttatttgagcaaagaatgatttaagagttgggcagcccctgaaccagaatagattcagagccactctggtgttgttgcatggtcagagaggatttatggatggaaaaaggaaagtgacttatggaaaatggaagtgaggtgcagaagcaggcag

SEQ ID NO: 23392 - DNA, 427 bp, Homo sapiens
  misc_feature (1)...(427): n = a,t,c or g
tntgntacccttatgacaccattacgaatttaatacgactcactatagggaatttggccctcgaggccaagaattcggcacgagggagcacctggagctgttctggtctagagtgaatattcccaaggtgctaagagctgcagaacaagctcatctttgggcagaactggtgtttttgtatgacaagtatgaagaatatgataatgccataattaccatgatgaatcatccaactgatgcctggaaagaagggcaattcaaagatatcattaccaaggttgccaatgtgggaactatactacagagcaatacagttctacttagaattcaagcctctgttgttaaatgatttgctgatggtgctgtctccacggttggatcacactcgtgcagtcaattatttcagcaaggttaaacagctaccact

SEQ ID NO: 23393 - DNA, 496 bp, Homo sapiens
aggaaattggaacatatgatgctggaatggatatttggggaggagaaaacctagaaatttcctttaggatttggcagtgtggaggaactttggaaattgttacatgctcacatgttggacatgtgtttcggaaagctacaccttacacgtttccaggaggcacagggcagattatcaataaaaataacagacgacttgcagaagtgtggatggatgaattcaagaatttcttctatataatttctccaggtgttacaaaggtagattatggagatatatcgtcaagagttggtctaagacacaaactacaatgcaaacctttttcctggtacctagagaatatatatcctgattctcaaattccacgtcactatttctcattgggagagatacgaaatgtggaaacgaatcagtgtctagataacatggctagaaaagagaatgaaaaagttggaatttttaattgccatggtatggggggtaatcaggttttctt

SEQ ID NO: 23394 - DNA, 383 bp, Homo sapiens
gaccagacagaggagttcttctccctgcccttttcaggaggaagacattccctcctgttccctttataaggcagctgctgaaacaggatctcccgtttgcaggggtgggcgtgggtcaggacttgggtggtttttgttgttcttcaaatgcagaggtgtgtagctgacctcatttgcagagctgatgacccaggctctgggctttctccagcctgttgatgcaaccctggctcaaatgtctgttgtagtgagctctgaggcgagcagtgaggacgggatagaagtgccctcgctgccaccagccaggccgcatggcttgcacgctgaccccatgctctcagacaccgaggagaatgcatggggtcttcctcctacccccaggc

SEQ ID NO: 23395 - DNA, 467 bp, Homo sapiens
ctcgcgaggcagaggcaggagaatggcgtgaacccgggagggggagcttgcggtgagccaagatcgcgccattgcactccagcctgggctacagagtgagactccgtctcaaaaaaaagaaagaaaaaaaaagtcttgtgaatttgtacatagaatattgaagttagaagaggcttatcactctctgggctctaatactgcccagaggttatttgtttcttgtttccataagaaaatcctatgtctctccattagcattcctgatccttacctccaattcaaaatgtggccagttccaccttataagcctttataccaaattgactgggtaggtttattatgaatctgtgttcttgtccaaactctacattagacctcgcaggagagttcaaactaaaaactaatgagtaagtgcaatattacaattgaaacgggagcaaacataatttcaagtaggacacataaac

SEQ ID NO: 23396 - DNA, 308 bp, Homo sapiens
ctggcagaggaccctgaaatagatgcatgaactgatgccacgactttggcttgttctggcgggacatacctaaaacatgtaaaaaacagttaactaaaaaaaaatgtaggtaattctatatcaaaaaatgataagcttaattctaactttgtacaagattgtttcaccattaatcttatctgaaaaccctctcacacagaataactttgcatattttttaaaaaaggaacgacagcttaagactacacccattaaatatttgaaatactcagagaaaagagaagactaaccacaaaacttgtttcaat

SEQ ID NO: 23397 - DNA, 460 bp, Homo sapiens
tttaaacccttgactgattacgaatttaatacgactcactatagggaatttggccctcgaggccaagaattcggcacgagcatgaagcctgtctccttgaaggccctgagagccacttgcagattccgtacctgtttgcttgaaggcagggaggcaggcctgcatggtcgtctccttctcagggttacagccccaggaaaatcccagtgtgcggtttttagagccacacctgctgatctggagacagctgttttcctttctcagcatagccctcgggaagcttagcccactttgaggagttgattgcttttgtgggtgtttgattcttacaggcagtgtggtcttgtctgctgggtgccactgaatgggctgagtgtgggcataatgggatgttttctaattctctgactggcttctgtaggtcaactgggaaaagactgcagttttcaaggacatttca

SEQ ID NO: 23398 - DNA, 435 bp, Homo sapiens
gagtcagtgaacctctaccggacagcacataatttgtatgcttatagttgagaattattctgcatcgttatcagttatgtgtaatgtacagagttgtaaaatagcttctctagaatcagaatcaggtaactgaaaggatgtgcccctaacaatgcatttttttctattgaattacaaataatttttctacctgagttactagaaagcttttgattttctacagtttctttagaattgtagataagggatatagagttatggtatgtttgaaagtgttagtacttgcagaaagataaagtgcagaatggtggttgcgattttaaatagaaaggctagggaagactcactgaggaggagatatttgggaaaagagttaaagtagatgaggttttttgcctgaataactgcaatgatggagttgctattaactgaggc

SEQ ID NO: 23399 - DNA, 341 bp, Homo sapiens
ggattcttggcggggcatggtggctcatgcctgtgatcctagcactttgggaagccaatgtgggaggatcgcatgagcctaggagttctagaagagctgtggcagcatagtgagacccttgtctctattttttaaaaaaaagagattcttgggcttaagtccagtcctgctgaattagaattctcaatgataagacacagttcatgtattttgtttttaatatttattattattatttttgagatggagtttcgctcttgtcgcccagggattacaggtgtgagccactgggcccagcatgagtttttttaaatttcttgtgagatagagtcttgctctgt

SEQ ID NO: 23400 - DNA, 345 bp, Homo sapiens
gcaatttcttatttgccatgaggtttctaaactcttcactttcaaaaaggttgcaataaaaggtgtccaaaacaaacaatttgggaacatgtgaaaggagaccttaggtctgttaaggaagaggatgacactacgtgacaacttccgattccagaaacagtctggacttcagggattatatctggggggataaaaagcgcatgcaagtcttcaccgttttcaggaaaatcaaattggccagtagcaactgtcctcctgccaactaatgaaaggtcttcttatttattagcagtgattagataaagcagttaaaccacattccaatcaatttcggttgcttttttt

SEQ ID NO: 23401 - DNA, 1258 bp, Homo sapiens
gttctacttagaatgcaagcctctgttgttaaaggatctgctgatggtgctgtctccacggttggatcacactcgtgcagtccattatttcagcaaggttaaacagctaccactggtgaaaccgtatttgcgttcagttcagaaccataacaacaaatctgtgaatgaatcattgaacaatctttttattacagaagaagattatcaggctctgcgaacatcaatagatgcttatgacaactttgacaatatctcgcttgctcagcgtttggaaaaacatgaactcattgagttcaggagaattgctgcttatctcttcaaaggcaacaatcgctggaaacagagtgtagagctgtgcaagaaagacagcctttacaaggatgcaatgcagtatgcttctgaatctaaagatactgaattggctgaagaactcctgcagtggtttttgcaggaagaaaaaagagagtgctttggagcttgtctgtttacctgttacgatcttttaaggccagatgtcgtcctagaaactgcatggaggcacaatatcatggattttgccatgccctatttcatccaggtcatgaaggagtacttgacaaaggtggataaattagatgcttcagaatcactgagaaaagaagaagaacaagctacagagacacaacccattgtttatggtcagccccagttgatgctgacagcaggacccagtgttgccgtccctccccaggcaccttttggttatggttataccgcaccaccgtatggacagccacagcctggctttgggtacagcatgtgagatgaagcgctgatcctgtagtcacctattttcgtactgaaacatcgtctttacccacttctcagtttataatgggggaaaacaggcaacgtgttcttgtaacctttatttcatgaaggacttctttttgtttctaactataaacttggatcacctatgttaaaaccttatttcacattccacatcattttagaatttattttcgaaggggaatagtttcaatgttttattcacttgggctttttttcttccccctctttctttaaagaactgctcaatattcaatctgttgtgaagaacctgatttgcactctgtagtgtttaaagaaacaaagaaactctaatattgaatctcttaaatttagtgtatgtaaacagcttacaaatacgtattgtctaaatgcatttaaatctgttttattcaaagaaaagctaaagcaaaaacactggcatatg

SEQ ID NO: 23402 - DNA, 585 bp, Homo sapiens
  misc_feature (1)...(585): n = a,t,c or g
aatttttaaaagtcctctttttttcttcttcgtagaaaaccagtgatcagagaaacggtgatatagccaagggagctctcactggaggaacagaggtgtctgcacttccatgtacaacaaacgctccgggaaatggaaagccagttggcagcccacatgtggttacctcacaccagtcaaaagtgacagtggagagcactcccgatttggaaaaacaaccaaatgaaaatggtgtatctgttcagaatgaaaattttgaagaaattataaacttacccattggatctaaaccatccagattagatgtcaccaacagtgagagcccagaaattcctttgaatccaattttggnctttgatgatgannggacacttgggcccctgcctcaggtaatggtgttcanacacancagactgcaggtaancntgcctccanctcccntctgtngncaacagnaatntctgnaaccaaggnggaaacaactgctgcctctaagtangntgtgggaaactttgttctnanaggnccagtnngccanntgganaaatntnccgggcanaaaatngattttgnttggatgggaaa

SEQ ID NO: 23403 - DNA, 626 bp, Homo sapiens
gctgcagtagagttggagtacttagttctcttgttgtccagtatatctaataagtgtttttcatattatttccacgtaagggaaataaggtagtacttttctttttatatttctatgcttaaaattctctttcctagtcaaaaattgcccaaatctgtgtttgctttctgcttgctacatttgtctcccttacttttcttgagctaaagacaggctttttccaccggcatcatcactgctatcatcattaacagcgtaattatacaagcatatttaatgctgagtttaatttaatatgtaatacatatggtaattgtagggtaatacccacaacaactgtagtttcttacttggccaagagaatgcttatttaagtgttagacttccattctggcaaaatcttgccttatcagaagacattggaaagagggattccctttggtgtttggtcttctacttagaaaaacctattgcagttagtttatcttgtagtattcatctttgtattctgaagataaggtttgaattaaattgatacacacagaggggaaccgattttttttatccaatgtgaattataaatgagataatccacagttattcattgtggagttgttgagactatg

SEQ ID NO: 23404 - DNA, 426 bp, Homo sapiens
gtgttgaatgaatggatgggtgaatgataaagcgaaaagaagtgattgagagcctgttcactttcatagctttggaacagtgacacctgcctgctgtataaagtaactggtttcagtggggaccctgggagtttcaatcagaacattctcaaggataatactagtgagtatgcttctctttggtgtgaaaaagtcaagcattcagaacttttaaaattggtgtcatagaggataagagaaatgatgttacatgtgctaagagttgttttctcaaaataaatgtcaacttctaggtatttgggaactttcacagtggattcattgattataataaaaggaataaaaatgttaaaccttatatgtagtgaaggaggctttctctgtttatccagtgttttcaactttggtagttatatgtctcacttg

SEQ ID NO: 23405 - DNA, 333 bp, Homo sapiens
gaaatatggagtcagtggatatccaaccctgaagatatttagagatggtgaagaagcaggtgcttatgatggacctaggactgctgatggaattgtcagccacttgaagaagcaggcaggaccagcttcagtgcctctcaggactgaggaagaatttaagaaattcattagtgataaagatgcctctatagtaggttttttcgatgattcattcagtgaggctcactccgagttcctaaaagcagccagcaacttgagggataactaccgatttgcacatacgaatgttgagtctctggtgaacgagtatgatgataatggagagggtatcat

SEQ ID NO: 23406 - DNA, 516 bp, Homo sapiens
  misc_feature (1)...(516): n = a,t,c or g
tttganaccttttgactgattacgaatttaatacgactcactatagggaatttggccctcgaggccaagaattcggcacgagcatcagccacgatgagatgttctccgacatctacaagatccgggagatcgcggacgggttgtgcctggaggtggaggggaagatggtcagtaggacagaaggtaacattgatgactcgctcattggtggaaatgcctccgctgaaggccccgagggcgaaggtaccgaaagcacagtaatcactggtgtcgatattgtcatgaaccatcacctgcaggaaacaagtttcacaaaagaagcctacaagaagtacatcaaagattacatgaaatcaatcaaagggaaacttgaagaacagagaccagaaagagtaaaaccttttatgacaggggctgcagaacaaatcaagcacatccttgctaatttcaaaaactaccagttctttattggtgaaaacatgaatccagatggcatggttgctctattggactacg

SEQ ID NO: 23407 - DNA, 361 bp, Homo sapiens
cagctatgacatgattacgaatttaatacgactcactatagggaatttggccctcgaggccaagaattcggcacgaggtggaacatgggtgtatcctgcaggtgctcacagtatctccctttgctcaggctctagcctgattttctggctcataaggccaaagggagctggaaaggtccccacggcaggactcatggtggagagagaatgatctagaggattcaggcctctgcacactgtgtctgggtccctccttaaagaatgataaagacaagtaaagagcttgaagcagcctggagtccagccagaaacctttaactgagctttaaaggagatggtcacaacacttttcagaatactg

SEQ ID NO: 23408 - DNA, 357 bp, Homo sapiens
  misc_feature (1)...(357): n = a,t,c or g
ggactccttagcctggagaacaatctaccaagaagagaaagtatctggaattaagaagtcctaccatccaagccctacttcctggttgtgtggccttggaaaagtgactcaacctctttatattcagtttcctaaccatgaagtggaaatgataacacctgcctcactggggcactataacaagtgaaggacttaggaaaacatctggagtatagcgcctggcacccaggagatgcttaataaatgggaaccaggattctttttcttttcttttttttttttgtcgcctgggctggagtncnntgnctcncnaatagnnanttgnaactttngnacctgggancctnnngggcacct

SEQ ID NO: 23409 - DNA, 382 bp, Homo sapiens
gactttgctgccatccttcacggtgacacccacggttacagagagcactggaacaaccagccacaggactaccaagagccacaaaaccaccactcacaggacaaccaccacaggcaccaccagccacggacccacgactgccactcacaaccccaccaccaccagccatggaaacgtcacagttcatccaacaagcaatagcactgccaccagccagggaccctcaactgccactcacagtcctgccaccactagtcatggaaatgccacggttcatccaacaagcaacagcactgcaccagcccaggattcaccagttctgccacccagaaccacctccaccctctccgagtcctagcccaacctccaaggagaccattgg

SEQ ID NO: 23410 - DNA, 405 bp, Homo sapiens
tttgcgtcactgactcttggagaatatgatagaaaaatgtggatcttatttccagggaaaaagcacaaaacaaaaatacatgcaatcttaagcatgtatttttcagtgatgtttgtgtcatagcccttaagtttaagtacccgtggacccctggctaaggcaatttctgtggaggattgtgtaacttaataccttcattgtacagataaggaaaccatatgtatatagcatggaattgtccctttgtgacagatgtgttttacttagctgattggtgccttctactcaagttattttctccagcacgatagaatgttcatgaaaagaaaagcagacctttgcaaatctctgctttgtgaaattccacctgagggtaagcctggctttgagtactaaatgctagga

SEQ ID NO: 23411 - DNA, 430 bp, Homo sapiens
gcgggtctggctgctgggttatggtctcaactctaccccggatgggactgcctcagaaagtgaaggagccctgaacacgtgtgcaggggagggcttcggcaaagcagctgtggcataggagagacaggactggcttaccgcggggagggggagcctcaggtgaggcctcacagagaaggcgacacagctgagtgtgaaaagaggtggtgaggccaggcatagtggctcacacctgtaatcccagcatttcgggaggccaaggcgacagattacgaggtcaggggttcaagaccagcctgaccaacatggtgaaaccccgtctctactaaaaatacaaaaaatagcctggcatggtgacacgcgactgtaatcccagctacttgggaggccgaggcaggagaatcgcttgaacccaggaagcggaggttgc

SEQ ID NO: 23412 - DNA, 915 bp, Homo sapiens
gcgggcgatgacgtagagggacgtgccctctatatgaggttggggagcggctgagtcggccttttccggccgctcccccctccccccgagcgccgctccggctgcaccgcgctcgctccgagtttcaggctcgtgctaagctagcgccgtcgtcgtctcccttcagtcgccatcatgattatctaccgggacctcatcagccacgatgagatgttctccgacatctacaagatccgggagatcgcggacgggttgtgcctggaggtggaggggaagatggtcagtaggacagaaggtaacattgatgactcgctcattggtggaaatgcctccgctgaaggccccgagggcgaaggtaccgaaagcacagtaatcactggtgtcgatattgtcatgaaccatcacctgcaggaaacaagtttcacaaaagaagcctacaagaagtacatcaaagattacatgaaatcaatcaaagggaaacttgaagaacagagaccagaaagagtaaaaccttttatgacaggggctgcagaacaaatcaagcacatccttgctaatttcaaaaactaccagttctttattggtgaaaacatgaatccagatggcatggttgctctattggactaccgtgaggatggtgtgaccccatatatgattttctttaaggatggtttagaaatggaaaaatgttaacaaatgtggcaattattttggatctatcacctgtcatcataactggcttctgcttgtcatccacacaacaccaggacttaagacaaatgggactgatgtcatcttgagctcttcatttattttgactgtgatttatttggagtggaggcattgtttttaagaaaaacatgtcatgtaggttgtctaaaaataaaatgcatttaaactcaaaaaaaaaaaaaa

SEQ ID NO: 23413 - DNA, 527 bp, Homo sapiens
  misc_feature (1)...(527): n = a,t,c or g
tctatgacatgattacgaatttaatacgactcactatagggaatttggccctcgaggccaagaattcggcacgagatcgatcctagacaaatgtatggggaacccatcagaggctattctttagggctagtgttcaatttgactgtttttaatatgaaagattatggatcacatttcaaacagatgtgaacgtggagagaataatacgatgtaccgcagtgtgtccatcactgttcttcagaaattcacattgggtcattttgttttagccatctctttccacattatcttctttttgttcttttaaatttcgggggtaatatgaagcaagcctcagctgggcagaccagagtctgttccctttttatatatcccggcgtcttaaccagctcgtgtctgaatagtgagtaccttttgggcctggcactgggcaggccttcagctgggtcattctctacctggcgatggctttaggtgagttgtggagctcctttcancttttttgcctcatcctgaaaatagttcct

SEQ ID NO: 23414 - DNA, 433 bp, Homo sapiens
gcagagatgtggggaataaattccgattttttggcagtttaaacccagcctaacctccttgttgcatctactcaagagtcagctaaacgtcagtgttccattgctgcttcccttcatgaactatggccttccttttgggcagcaccttggtgattcaggctcttcatctctaagacagagatagtgatattccttctccccactgcttacctgacacataacagtaagacacgattgctgcagtcaccattaatagcaatctgcttgcagcaggttgtggaaggaagcagatatgaaagaagggaaacccttggtaatcaccttaagggaaaccgttcttggccccaggttgatggccgtgaagccaaaagtctaacttccctcttgatcctgagggaaacaagagatgtcattctaccttgctgtttacctg

SEQ ID NO: 23415 - DNA, 378 bp, Homo sapiens
ggctgaaggagctgatgaacacggagcaggccttggaccagctcatccagagctgctctctgagcttcaagcacctgactgaggacaaggccaacaagaggctggcctatgtgacttaccaggatatccgtgctgttggcaactttaaggagcagacagtgattgccgtcaaggcccctccgcagacgagactggaagtgcccgacaggactgaggacaacctgcagatatatctcaagagcacccaagggcccatcgaagtctacctgtgcccagaggaggtgcaggagccggacagtccttccgaggagcctctcccctctacctccaccctctgccccagccctgactctgcccagccccagcagcagcaccgac

SEQ ID NO: 23416 - DNA, 316 bp, Homo sapiens
caggcatgtgccaccacgcccagctaagttttgcattatcagtagagacggggtttcaccatgttggccaggctagtttcgaactcctgacctcaagtgatccacctgcttcggcctctgaaagtgctgggattacaggcgtgagacactgcgcccagcctcatccctgtgaatttcttattgtacacaagttctttcactatctgtgtgcagtgctctgaggggacagacaaggcttgggtgtatatgccaaccagatctcattgaagtatcagcttgtttggtactaggtgcaagtgtagcatgtcacatgtga

SEQ ID NO: 23417 - DNA, 1318 bp, Homo sapiens
gctgctgcgggtgagacgggaggagggtagtcacgggcttagggctggaggctggcgggctagggctgagtgcagcgcctgcttagagaccttcgggagaacttctgccggaaccccgacggctcagaggcgccctggtgcttcacactgcggcccggcacgcgcgtgggcttttgctaccagatccggcgttgtacagacgacgtgcggccccaggactgctaccacggcgcaggggagcagtaccgcggcacggtcagcaagacccgcaagggtgtccagtgccagcgctggtccgctgagacgccgcacaagccgcagttcacgtttacctccgaaccgcatgcacaactggaggagaacttctgccggaacccagatggggatagccatgggccctggtgctacacgatggacccaaggaccccattcgactactgtgccctgcgacgctgcgctgatgaccagccgccatcaatcctggaccccccagaccaggtgcagtttgagaagtgtggcaagagggtggatcggctggatcagcggcgttccaagctgcgcgtggttgggggccatccgggcaactcaccctggacagtcagcttgcggaatcggcagggccagcatttctgcggggggtctctagtgaaggagcagtggatactgactgcccggcagtgcttctcctcctgccatatgcctctcacgggctatgaggtatggttgggcaccctgttccagaacccacagcatggagagccaagcctacagcgggtcccagtagccaagatggtgtgtgggccctcaggctcccagcttgtcctgctcaagctggagagatctgtgaccctgaaccagcgtgtggccctgatctgcctgccgcctgaatgatatgaggtacgggtaatgacacagtcctaaatgtggccttgctgaatgtcatctccaaccaggagtgtaacatcaagcaccgaggacatgtgcgggagagcgagatgtgcactgagggactgttggcccctgtgggggcctgtgagagtgactacgggggcccacttgcctgctttacccacaactgctgggtcctgaaaggaattataatccccaactgagtatgtgcaaggtcgcgctggccagccgtcttcacacgtgtctctgtgtttgtggactggattcacaaggtcatgagactgggttaggcccagccttgacgccatatgctttggggaggacaaaacttgtaagtacagtcaaggacaagacttgtactcaaggctgagatttaataaaattcatatttttactacttcaaaaaaaa

SEQ ID NO: 23418 - DNA, 369 bp, Homo sapiens
  misc_feature (1)...(369): n = a,t,c or g
tcgagtttcaaagctgaagaacatggagtccaatgtttgaggacgggaagcatccaacatgggagaaagctgtaggctgggaggctaagccagtctagtcttttcatgtttttctgcctgctttatattctggtcgtgctggcagctgattagatggtgcccgcccagattaagggtgggtctgcctttcccagcccactaactcaaatgttaatctcctttggtaacactctcacagacacattcaggatcgatactttgcatcctttaatccaatcaagttgactgtattaaccatcacaagtccaccacttgtcaacttaaacacatacatatctcctgagatcattcataatcttcaaatnaaga

SEQ ID NO: 23419 - DNA, 437 bp, Homo sapiens
gggccagagtagagccaccgccctggccagactgtaggaatctataatcaaataattgtaatgggaaggagagtggagtagaagcccatttctacttactctttctctgaagttttaactgtttgacaatttctggaagtcacctattacaaactcagtatttctataaacaaatagtctgatgcatcagtttataaacaccaacacatttatttactatgtgttatcagaaaagcctcacttatcttccttgtgttctttgactaggtgagtacttaccatttattgggctcctactctgtgctaagcacttaaaatatttcacctctcacaggcaaaatgatgctcaaggcacatgctattgtttatattttccagataaacatgagacttcagctgctaagtaacttatcaaagggcacccaggtagaaagggg

SEQ ID NO: 23420 - DNA, 438 bp, Homo sapiens
gctacaatatcctatttataaatcttcctctgggaaaaggagtggtttctggctgaatactatcttaggctcaaggagaaacaaaataaaaattagcttccaggcagcctgtttttaaagaaatgggactaatgggagaagctgtttgtcactctaagagcatccaagccctggcccgtctgtgcactcttggctcctggggagatatatctgccttctaagaaggcaggccaggtcttgggcacagacctgcatttgttgaccttgcactccaactatagtgccttgcaagtgctcaacagtacatattggaatgaagtccctatgagagccatttctggccatgttctatacctcaaagtgaggctggcaggtacagagatgaactgtacacatgtgatacatttaagccactggaaaaacccctgtgcctgaaaa

SEQ ID NO: 23421 - DNA, 665 bp, Homo sapiens
gcgaccgccgctggtcttcgctggacaccatgaatcacactgtccaaaccttcttctctcctgtcaacagtggccagccccccaactatgagatgctcaaggaggagcacgaggtggctgtgctgggggcgccccacaaccctgctcccccgacgtccaccgtgatccacatccgcagcgagacctccgtgcccgaccatgtcgtctggtccctgttcaacaccctcttcatgaacccctgctgcctgggcttcatagcattcgcctactccgtgaagtctagggacaggaagatggttggcgacgtgaccggggcccaggcctatgcctccaccgccaagtgcctgaacatctgggccctgattttgggcatcttcatgaccattctgctcgtcatcatcccagtgttggtcgtccaggcccagcgatagatcaggaggcatcattgaggccaggagctctgcccgtgacctgtatcccacgtactctatcttccattcctcgccctgcccccagaggccaggagctctgcccttgacctgtattccacttactccaccttccattcctcgccctgtccccacagccgagtcctgcatcagccctttatcctcacacgcttttctacaatggcattcaataaagtgtatatgtttctggtgctg

SEQ ID NO: 23422 - DNA, 366 bp, Homo sapiens
gaatgaacattttcatcctcagcatccatctccgagacaaggtcggggatatgggatgcccaggaattcatctcggtttataaacaggcacaacatgccgggccctaaagttgatttttacccaggcccaggtaaaaggtgctgccagagctatgataacttctcttatagatctcgttcatttagacgtagtcaccgccagatgagttgtgtgaataaggagtcccagtatggatttaccccagggaatggacagatgcccaggggcttggaagaaactattactttttatgaagttgaagaaggggatgagactgcttatccaactttacctaatcatggaggtccctctacaatggttcctgc

SEQ ID NO: 23423 - DNA, 519 bp, Homo sapiens
  misc_feature (1)...(519): n = a,t,c or g
gggcagacactggagccacgatgaagcccccaaggcctgtccgtacctgcagcaaagttctcgtcctgctttcactgctggccatccaccagactactactgccgaaaagaatggcatcgacatctacagcctcaccgtggactccagggtctcatcccgatttgcccacacggtcgtcaccagccgagtggtcaatagggccaatactgtgcaggaggccaccttccagatggagctgcccaagaaagccttcatcaccaacttctccatgatcatcgatggcatgacctacccagggatcatcaaggagaaggctgaagcccaggcacagtacagcgcagcagtggccaagggaaagagcgctggctcgtcaaggccaccgggagaaacatggagcaattcangtgtcgtcaatgtgctccaatgccaagatcacnttnagctggtcatgaggagctgctcaaancggcgtttgggggtgtacaactgctgctgaaanncggnccaacactggtcaa

SEQ ID NO: 23424 - DNA, 546 bp, Homo sapiens
gaagagagagagagagagataaccaatgatacaccaatcattgagatgtttatcagaatctttgggtggaaaagagaatagattggaaaagcatatttgatacacttaaaacatgtataaataacaggaaataagccttgataaaactttttgatttctatgctgaagaaacaaaagcactagaaagcattgtagagggacatggattgaaaaaagttaacactgccttgtaattttaattccagatacctcaatctaacttttatttgttcaagttcaaatttactattctagccatcataccttaaatcaaaggtggaagacgggcagcataggggtaaacttaacagtcaggtattttctatttggctgatgcaatagttgtccacatggtggcagtttatttttttcagttttctacatataaaaattaggagttttcacataaaaatttgaattttcagcttctcttgaaaattgagaagatctgataacattgaaccttagtattgcttggcagcagtcctgaaactggggcactacatt

SEQ ID NO: 23425 - DNA, 510 bp, Homo sapiens
  misc_feature (1)...(510): n = a,t,c or g
ggtttgctgccagcctgggcaacgtggcacaaccctgtctttacaaaaaatacaaaagtttgccgggcctggtggcacatgcctgcagtcccagctactcaagaggctgaggtgggaggattacttggacccaggaggtggaggttgcagtgagccaagatcgcaccactgcactccagcctgggtgacagagcaagactctgtctcagaaaagaaaaaaaaaatctctcctcaggtatctcaagaggaatgaattttattatatcagaagtcaccagtgctttctcacagtaggttccaggaatatagaactcttttcaagagcagttctcaccatctttatttccattattagtgagagtttgttgagcatatatttttttttttcttttacttttttttaatttttattgggcacaaaagccacattcaagagcncttatttttttatgnaatatctgcctggagaaaaaatgctcctgtatttaatngtcatcgcaactccaaaaa

SEQ ID NO: 23426 - DNA, 261 bp, Homo sapiens
gaagagcaaagggtccttgttttaatcagcaaggtaaggaagagcttaagttctaagaagatccagaagatggaaagtaggtattcagaggctaggtatgttggaaaaatgagaagagattctgtgctggggaaggggctgtagatgctatgctgacctattcctccttccatttcctgttgttttacctcctgctcccactctctcttttgtcccctgcccctcaacagaaggtgctggggctgctgctggcacattcac

SEQ ID NO: 23427 - DNA, 380 bp, Homo sapiens
ggcgtgggcatggtggctcacacctgtaatcccagtacattgggaggccaaggtgggaggactgctcaggcccaggagtttgagactggcctgggcaacacagaaagactccgtctctatcaaaaacaatttttaaaaattagctgggcatggtggcaagcacctgtggtttgagctacttgggaggctgagttaagactgcagtgatctatgattgagccactgaactccagcctgggcaacaaagtgagaccctgtctcaaaataaattttaagaaataaaataaaataagcatttaaaaaacactttactatctcaattttgacaaatcagatttgacactgtctttatgcttctgtatgtctgcataatcatcagg

SEQ ID NO: 23428 - DNA, 451 bp, Homo sapiens
  misc_feature (1)...(451): n = a,t,c or g
agtgtntttgaacctttgacatgattacgaatttaatacgactcactatagggaatttggccctcgaggccaagaattcggcacgagacgagacactgaccattacacaggctgttatttttctcaatacgaggcgcaaggtggactggctgactgagaagatgcatgccagagacttcacagtttctgctctggtttattaatttgcagcatggtgacatggaccagaaggagagagatgttatcatgagggaattccggtcagggtcaagtcgtgttctgatcactactgacttgttggctcgcgggattgatgtgcaacaagtgtctttgggtataaattatgatctacctaccaatcgtgaaaactatattcancagaattggccgagggggtcatttnnnangaaaggtntngntatannnnncgntacngganaanannnnttgg

SEQ ID NO: 23429 - DNA, 321 bp, Homo sapiens
gcgtatttacctgcattgaagacatacattgtatttgccaactcaatagaagaacagacatatacttgattgtacagctcaacagaaggagaacagacatatacttgattgtagataaataatacaaaagaaaggagctcctccttttctctttcccaacttgagtatcatcacacccctttcctttcagcacccagagttccttttgtttctattattccccctaaacctagagctcactgaaattaaaaagaatgctgtggttcctctcgggactgttgggtgacttgagcctttgacaaatgcattaccctaggtttt

SEQ ID NO: 23430 - DNA, 368 bp, Homo sapiens
ggggggccttatcgtcgtctgtcttttcctgggcctttgcgatggcttcttcatcaccatcatggcccccattgcatttgagctggtgggcccaatgcaggcctcacaggccattggctacctcctgggcatgatggccctgccaatgattgctgggccccccattgcaggcctactccgcaactgttttggggactaccatgtggccttctactttgccggtgtgccccccatcatcggggctgtaatcctcttcttcgtccctctgatgcatcaaaggatgttcaagaaagagcagagagattccagcaaggataagatgttggcccctgacccagaccccaatggggagctactgccgggctccc

SEQ ID NO: 23431 - DNA, 419 bp, Homo sapiens
  misc_feature (1)...(419): n = a,t,c or g
ggaccatcctggccaatatggtgaaaccctgtctctactaaaaatacaaaataattagctgggtgtagtggtgcacctgtagtcccggctactcaggaggctgaggcaggacaattgcttaaacttgggaggcggaggttgcagtgagccgagattgcgtcactgcactccagcctgggtgacggagtgagacgccatctcaaaaaaaaatggtgtttcccaaaaaacaacaaaagagttctttctctgtagtttaagtctttaggacagttttgtaaattgatgtaaccttaaccattttaaaatcagaactgattcctgagggattgttctcaatgacagagtggctgggataatcagngggtttttgtgtttgactgtattctttctttagttatgntataatgccttccatttta

SEQ ID NO: 23432 - DNA, 478 bp, Homo sapiens
  misc_feature (1)...(478): n = a,t,c or g
gnnagnngtnnnttntntatntganatnanatcctttgacatgatnacgaatttaatacgactcactatagggaatttggccctcgaggccaagaattcggcacgagcggcacgaggtatttggtcagtctggggcaggtaacaactgggccaaaggccactacacagagggcgccgagctggttgattctgtcctggatgtggtacggaaggaggcagagagctgtgactgcctgcagggcttccagctgacccactcactgggcgggggcacaggctctggaatgggcactctccttatcagcaagatccgagaagaataccctgatcgcatcatgaataccttcagtgtggtgccttcacccaaagtgtctgacaccgtggtcgagccctacaatgccaccctctccgtccatcagttggtagagaatactgatgagacctattgcattgacaacgaggccctctatgatatctg

SEQ ID NO: 23433 - DNA, 511 bp, Homo sapiens
  misc_feature (1)...(511): n = a,t,c or g
ctnctatgactgattacgaatttaatacgactcactatagggaatttggccctcgaggccaagaattcggcacgagcagcaacacccaggtagttttgctgtcagccacaatgccttctgatgtgcttgaggtgaccaagaagttcatgagggaccccattcggattcttgtcaagaaggaagagttgaccctggagggtatccgccagttctacatcaacgtggaacgagaggagtggaagctggacacactatgtgacttgtatgaaaccctgaccatcacccaggcagtcatcttcatcaacacccggaggaaggtggactggctcaccgagaagatgcatgctcgagatttcactgtatccgccatgcatggagatatggaccaaaaggaaccgagacgtgattatgaaagnagttcgttctggctctaacagagttttgattaccactgacctgctggccagaggcantgtgtgcagcagggtctttagnnttcactatgaccttc

SEQ ID NO: 23434 - DNA, 355 bp, Homo sapiens
gtcttggttccagaacctgacgacccggcgacggcgacgtctcttttgactaaaagacagtgtccagtgctccagcctaggagtctacggggaccgcctcccgcgccgccaccatgcccaacttctctggcaactggaaaatcatccgatcggaaaacttcgaggaattgctcaaagtgctgggggtgaatgtgatgctgaggaagattgctgtggctgcagcgtccaagccagcagtggagatcaaacaggagggagacactttctacatcaaaacctccaccaccgtgcgcaccacagagattaacttcaaggttggggaggagtttgaggagcagactgtggatgggaggcc

SEQ ID NO: 23435 - DNA, 416 bp, Homo sapiens
ggctagcaccatgagcttcaataccctgcgcccgccaccggcgccacgtattcctacatagccactggcgccaccacacgctcctacgccaccaccagcgctcccacttcccccaaggccgccaatggtgcccctacttctccccacaccgtcactggtgctaccacatgctcctacaccaccaccagcacccccacttccccgacactgccacaggcacccccacttcccccaacgccggcactggtgcccctacttctctccacccgccactggcaccaacacctccttctacgccaccaccaggccccccactatctgcaatgacgccaccagcgccccttctccccacgccgcactggcactaccagctgctcctacgccgcaccggcgcccccacccctcccaatgccgca

SEQ ID NO: 23436 - DNA, 435 bp, Homo sapiens
tgaaaccgtttgacatgattacgaatttaatacgactcactatagggaatttggccctcgaggccaagaattcggcacgagccattacaaagccgccgactcgaagcgtgagcagttccggaggtacttggagaagtcgggggtgctggacacgctgaccaaggtgttggtagccttatatgaagaaccagagaaacctaacagtgctttggattttttaaagcatcacttaggagctgctactccagaaaatccagaaatagagctgcttcgcctagaactggccgaaatgaaagagaagtatgaagctattgtagaagaaaataaaaaactgaaagcaaagcttgctcagtatgaaccacctcaggaggagaagcgtgctgaataggattcttctcagtttgaaagacaatgaaaaatggttttgtatgactt

SEQ ID NO: 23437 - DNA, 430 bp, Homo sapiens
cacggtctggaggccgaggaccaccagcaggcaggtggactgactgttgggcaagacctcttccctctgggcctgttctcttggctgcaaataaggacagcagctggtgccccacctgcctggtgcattgctgtgtgaatccaggaggcagtggacatcgtaggcagccacggccccgggtccaggagaagtgctccctggaggcacgcaccactgcttcccactggggccggcggggcccacgcacgacgtcagcctcttaccttcccgcctcggctaggggtcctcgggatgccgttctgttccaacctcctgctctgggaggtggacatgcctcaaggatacagggagcccggcggctctcgacggcacgcacttgcctgttggctgctgcggctgtgggccaacatgggggcttgcagcgtctgtt

SEQ ID NO: 23438 - DNA, 452 bp, Homo sapiens
  misc_feature (1)...(452): n = a,t,c or g
ggagaaagtaagtgggactgtgtatgttctgggtccgctactggaagattaaaggtttgcacattgaactgttcgctgatgatggtagccagccagtctttgagcatgggagctaacacgaatatgtgtgtagggactctacttgtcatgagcctcagggttgacccaaatcaagaagtttttaggtgaagtgacaggaaagcacattgccctagcctggtttctttgtgtgaaatgccttgtcttctgtagttaaaacgcttgcgaaatgcaaacagtttctttggcaaggagttataattaagggcaagagtacgtttgctaatagctaaatattttgccttaaaagctttggttttatgcattaaaaaattattttgtanagaatgggagtattgctatgcacccagccaggctggcctnaggcttctgggcttaagtgaccttctgaa

SEQ ID NO: 23439 - DNA, 280 bp, Homo sapiens
gcctgtccatccctattccctcctctgaaatgcacccctttgtaattgaggacaaggtggttctgtggccttttccctctttgctggcacgttctgcttctcaccctctggtgactctgtgagctgggaaatgagggactggaagtgaggcctgtgttgacccttcctgaaaatcctctagcagcccccgacttcagcagtttctttctttgtttttttgagatggagtttcgctcttgttgcccaggctggagtgcaatggtgcaatctcagctcactg

SEQ ID NO: 23440 - DNA, 636 bp, Homo sapiens
tgacatgattacgaatttaatacgactcactatagggaatttggccctcgaggccaagaattcggcacgagaagcagatgaaatgttaagccgtggattcaaggaccagatctatgacatattccaaaagctcaacagcaacacccaggtagttttgctgtcagccacaatgccttctgatgtgcttgaggtgaccaagaagttcatgagggaccccattcggattcttgtcaagaaggaagagttgaccctggagggtatccgccagttctacatcaacgtggaacgagaggagtggaagctggacacactatgtgacttgtatgaaaccctgaccatcacccaggcagtcatcttcatcaacacccggaggaaggtggactggctcaccgagaagatgcatgctcgagatttcactgtatccgccatgcatggagatatggaccagaaggagagagatgttatcatgagggaattccggtcagggtcaagtcgtgttctgatcactactgacttgttggtaagtctcttaatgctttttaaaaatctaccaaaagttagctttttggggggcaggtttttaagtaacctttgccaacttgggctatttggaagagtaaaagaccacactccaca

SEQ ID NO: 23441 - DNA, 473 bp, Homo sapiens
gtctcttcaggttcttcttcgggctcttcttccacctttgcatcagggtcaatgttcaaactgaggcgaagcattctttctattctatctccatatgctttagtgtctggtaaaagataccctgaccgaagcgttgctgtttcaaacaaaaccacagcaagatccaaaactgttttatcatcttcatcttccttaattcgtcgaagcatgtctctgatcagcgggtgtctgggattaatttcaaatgttttcttctgactcgcatagtaatttgtagagatgtccttgcccgtttggtacgcttgtgctttcatgattctctccatgttgccagaccatccgtactggctggccaccaaagcacacggagattctgtcaggcgctgagacaccacagccttttcaatcttagggaaagaaatcaagtcatataaattaatatcaacagggaaggtcattgagcaattgtcttt

SEQ ID NO: 23442 - DNA, 451 bp, Homo sapiens
  misc_feature (1)...(451): n = a,t,c or g
gtggaagattagaaaaatgaattcatccaagaacactaaaacttgttagataaaaatatactgacagattggggagggcctgtttgacttcattggcttcatgtgtagcgttagtacatatccttaataaagaaaaacaacatgggtactttaaacctctcagaagcagattcttgggtagaatacttaaaagcttatgagaacatgacgatgctgctctaaaatcaatgaagccaaagcaagagaagttatacaaaataatattatttctgataacacatactgtttccccagaaatgattattacctccttttagcatatcatgagaatggcacgtttattttgagtttagagttctaagaagacatttggtatccaaataaaaagtatcgtatggctgggtgtggtggctcatgcctgnaattncagcactttgggagggccanggcc

SEQ ID NO: 23443 - DNA, 505 bp, Homo sapiens
  misc_feature (1)...(505): n = a,t,c or g
gggcatgctgaatgacaagtctctgtggacagacatccctgtgaattttccaaagaatggctgggctgcaattggaactcactcctttgaatttgcacagtttgacaactttcttgtggaagccacacgctaatacttaacagggcatcatagaatactctggattttcttcccttctttttggttttggttcagagccaattcttgtttcattggaacagtatatgaggcttttgagactaaaaataatgaagagtaaaaggggagagaaatttatttttaatttaccctgtggaagattttattagaattaattccaaggggaaaactggtgaatctttaacattacctggtgtgttccctaacattcaaactgtgcattggccatacccttaggagtggttgagtagtacagacctcgaagccttgctgctaacactgaggtagctctcttcatcttatttgcaagcggtcctgtanatggcagtaacttgatcatcactga

SEQ ID NO: 23444 - DNA, 289 bp, Homo sapiens
ggggtctccccagccaggctttcgagtatatcctgtacaacaaggggatcatgggtgaagacacctacccctaccagggcaaggatggttattgcaagttccaacctggaaaggccatcggctttgtcaaggatgtagccaacatcacaatctatgacgaggaagcgatggtggaggctgtggccctctacaaccctgtgagctttgcctttgaggtgactcaggacttcatgatgtatagaacgggcatttactccagtacttcctgccataaaactccagataaagt

SEQ ID NO: 23445 - DNA, 437 bp, Homo sapiens
gctgcatagggctcggcgtgggaggtgggcacagaggacatgtacgggaatcacggaggattatctgtttcaatcattcagaaccaagtccttcagcgaacaggggggttaaagctatctaacaaagaggggaggtatttttatattatgatctatagttatcttgttgcttctcctgttaataccttatgaaaattccctaagaacaaggaccacattgccatatctttttctctttgtatccttccatgcaataattgtgtaactgatgaatgaatgatcaataccacagcatagaaagttatgaaatacattataataagcagattaaaaggtggtattgagtaatagttgaaatggaaccatagtcagcaagaattcaaatcccagttctgccatttactagctgcacgtctttgggcacattacttttggta

SEQ ID NO: 23446 - DNA, 413 bp, Homo sapiens
gtttgttttgaatttgagacattttctagaatattgctgtttgaatgaggcttcagtactttacagaatcgttgcctgcacatcttggaaacacttgctgggattacttcttcaggttaacccaacagaaggctaaagaaggtatattgctgttgacagtgagcgactgtaaacatcctcgactggaagctgtgaagccacagatgggctttcagtcggatgtttgcagctgcctactgcctcggacttcaaggggctactttaggagcaattatcttgtttactaaaactgaataccttgctatctctttgatacatttttacaaagctgaattaaaatggtataaattaaatcactttaaaaccatgtctggacatttttagagggcttcagcagggcattgaggaagtgc

SEQ ID NO: 23447 - DNA, 618 bp, Homo sapiens
gagtagctagctttgatggcagaggaagtggttaccaaggagataagatcatgcatgcaatcaacagaagactgggaacatttgaagttgaagatcaaattgaagcagccagacaattttcaaaaatgggatttgtggacaacaaacgaattgcaatttggggctggtcatatggagggtaccgtaacctcaatggtcctgggatcgggaagtggggtgttcaagtgtggaatagccgtggcgcctgtatcccggtgggagtactatgactcagtgtacacagaacgttacatgggtctcccaactccagaagacaaccttgaccattacagaaattcaacagtcatgagcagagctgaaaattttaaacaagttgagtacctccttattcatggaacagcagatgataacgttcactttcagcagtcagctcagatctccaaagccctggtcgatgttggagtggatttccaggcaatgtggtatactgatgaagaccatggaatagctagcagcacagcacaccaacatatatatacccacatgagccacttcataaaacaatgtttctctttaccttagcacctcaaaataccatgccatttaaagcttattaaa

SEQ ID NO: 23448 - DNA, 458 bp, Homo sapiens
  misc_feature (1)...(458): n = a,t,c or g
caggagctacagcgcggagactgggaaacatggttccaaaactgttcacttcccaaatttgtctgcttcttctgttggggcttctggctgtggagggctcactccatgtcaaacctccacagtttacctgggctcaatggtttgaaacccagcacatcattatgacctcccagcaatgcaccaatgcaatgcaggtcattaacaattatcaacggcgatgcaaaaaccaaaatacttttcttcgtacaacttttgctaatgtagttaatgtttgtggtaaccaaagtatacgctgcctcataacagaactctcaacaattgtcatcggagtaagattccgggtgcctttactccactgtgacctcataaatccaggtgcacagaatatttcaaactgccagagatcacgggattntcacggatcctggggntccagttacctggtncncctttaactc

SEQ ID NO: 23449 - DNA, 429 bp, Homo sapiens
  misc_feature (1)...(429): n = a,t,c or g
atgcctacgaatttaatacgactcactatagggaatttggccctcgaggccaagaattcggcacgaggtctcgatctcctgacctcgtgatccccccacttcggcctcccaaagtgctgggattacaggcgtgagccaccgcgcccagcctgtaaaaacattttcatctttgtttataaataaaacatctgattatacaacaatacttttatgggactcaaagaggggagtcagggttggggtggggtctgtcatttatttacttatttttaaaagatacctggcctggttctgtggcggtggcttttcttcgctaatcatgagctgtactttgagtatgcagtagattccgtcagcatctcagtgggagaaaggggggaaagaggggttttaacacagtgttctctttgcattgagtgaanaagctgt

SEQ ID NO: 23450 - DNA, 329 bp, Homo sapiens
ccgccatgccggacagctgggacaaggatgtgtaccctgagcccccgcgccgcacgccggtgcagcccaatcccatcgtctacatgatgaaagcgttcgacctcatcgtggaccgacccgtgaccctcgtgagagaatttatagagcggcagcacgcaaagaacaggtattactactaccaccggtgtcgacgcggtcgcgaattccagatctatgaatcgtagatactgaaaaaccccgcaagttcacttcaactgtgcatcgtgcaccatctcaatttctttcatttatacatcgttttgcttcttttatgtaactatactcctcta

SEQ ID NO: 23451 - DNA, 352 bp, Homo sapiens
gaacaagacattatatgcctctccataagagtgctgcacaattcttcctataaagtgttttagacaaaaatcagaactcacataggatcaagactcagggattcttcactcttttgtgctccaaagggcttgggcaggctagtgagtccaattgaaccccttttgataataatattttaaagacataaaataaaacacaaaagttggtaagtgtattagtccatttcacactgctaaaaggaatattcaaaactgggtaatgtacaaaaggaagaggtttaactgactcacagttccatctgagtggggaggcctcaggaaacttacgatcatgacagaaggtgaggaagaa

SEQ ID NO: 23452 - DNA, 334 bp, Homo sapiens
ggcaagatgcaggatgacaatcaggtcatggtgtctgagggcatcatcttcctcatctgaggaggcctcgtctctgaacttgggttgtgccgagagagtttgttctgtgtttcccaccctctccctgacccaagtctttgcctctactcccttaacagtgttgaattcaactgaaggcgaggaatgttggtgatgaagctgagttcaggactcggtggaccctttgggaatgggtcatgaaagctgccatggggtgaggaaagaggagacagtgggagaggacaatgactattgcatcttcattgcaaaaagcactggctcatccgccctactt

SEQ ID NO: 23453 - DNA, 397 bp, Homo sapiens
  misc_feature (1)...(397): n = a,t,c or g
gcggtggttcatgcctgtaatcccaaatcccagcaccttgggaggccaaggcaggaagatcattgacatcaggagttggagacaagcctgaccaacatagtgcaaccccatctgtactaaaaatacaaaaattagccaagcacgtggggcatgcctgtaatcccagctactcgggaggctgagacaaggggatcacttgaatccaggacgtagaggttgcagtgagccaagatcgcacccctgcactccagcctgggtgacagagactatctcaaaataaaaaagagtgcctttaattattaaatcgaagcaaatgtctttaacaattaagaatatacttaaccgggctccttcttgnttgctgatggtaacctccggggattctctctctgtttca

SEQ ID NO: 23454 - DNA, 464 bp, Homo sapiens
aacagctatgacatgattacgaatttaatacgactcactatagggaatttggccctcgaggccaagaattcggcacgagcggcacgagtggtgggacttgcagaaaccgtggccatttttcatcacagcctttcctatactgtgtgacctcaagaacttcctgctttaggatgcccagttaataatatggtatctgtgggatggagtgaactctttaacaaatatttaccaaatacttactttgagcaagacactgtgcttggtgatggttgagtaccgagaagttgcaactggtggttcattctctgtggggagatggcgaactggaagaagcgaagtttgggcctgtggtaggtgctgtgagctgttgggtggagagggcacttggtttagggtattgtttagggtatttagagtaaaggcctgaaggatgagaaggaaccaggtaggcaaggagcccctat

SEQ ID NO: 23455 - DNA, 427 bp, Homo sapiens
  misc_feature (1)...(427): n = a,t,c or g
ggaatgggaagcagaaacccctttataagggaaatttccagaacacagaagcagcaggagcctcaggactcagccttacccactcagtgtcactttcagccccacaggtgggaaggtcctcagcatcccctacctccacgcaagccaactttctgtgctcctgcttgtaccacacagaccctccctgaatttgttaatgatcaaccttccaggctggcgcgagccttccaaggggacaatgaccacctgcaggaaaaatggccagaggcaggttctgcatcaatttattaggtttaaagaaaaaaaaaagtcctgaagaaaaagcagcagctaanacatggtatttccagaaaatttgtattattcttttgnnggcctcttctctttgaaggacgcaggtggcctgggaagcatctgaggaatgaaa

SEQ ID NO: 23456 - DNA, 328 bp, Homo sapiens
gaaaaaaaccaacacaggagcatgtttcactgcagattcctaggccgtacatccaaaggttctattaggttctataataattcagagggactgacgtgggtgggacccaggaatatgcattttaaataaataaactcaagttattcaagatgtagagggcctgtgggtctgtggatcactcctagagactagtttaaatgtacatccagaagtgaaggactcattttgagattcccttggaatggcagaaacattggtagctgagcagatagaagtatttcagtattccacatgcctcggaaagggaaaagtctgaatgcaagtacat

SEQ ID NO: 23457 - DNA, 361 bp, Homo sapiens
gggacctaggtgagggtgacctgaataaagtggctgatgcctgcttgatttacctcagtgtcaaacagcccgtgaaattacaagaggctgccaggagcgtcttcctccacttgatgaaggtggacccagactccacctggttcctcctgaacgagctttactgccccgtgcagttcacacctccccaccccagcctccaccctgtgcagctgcacggggccagcgggcagcagaacccctacacgaccaacgtgctccagctgctcaaggagctgcagtgaccctgctcccccaccacagaggccaccgatccctcccctactgccagccagaagctgggctgaccccaccccggcatagg

SEQ ID NO: 23458 - DNA, 433 bp, Homo sapiens
  misc_feature (1)...(433): n = a,t,c or g
ggctctgccctggaatagaaggtaacgttatacaaagaagcaaactcacaagttaataagatcaggacaaaaagtgttaaaatggagataagtgaggctagtctgcgctaccaggggaagtcactgtggcctgagtgtttaagcttttggaggaagagagacagacctcaacaactcggggtgccccctacatactcacaaagctttgcctgcccctgggtgtgtgtctgctctcagtgaagaataccagtatccactgttccttgtgggtcattattttctgcttgataagaaattgtttactttggcaaaacatgcctatatgcttaacatgcctgtcttacctcttttgtggtaaatgaaccaaattgcattctcgtattttctgtttgacagtgacagctgtgcagattcaattcangccccttggact

SEQ ID NO: 23459 - DNA, 397 bp, Homo sapiens
gcgggcgtgagccactgcgcccggccctagttgaatcatttttaaaatccattcttgagccgggcgcggtggtttatacctataatcccagcactttgggaggctgaggcaggaggattgcttgagctctaggagtttgagaccagcctgggcagagagatcctgcctctaaaaaaaaaatttttttaaatccattctgacaatcttgccttttaattggagagttgagtcaattccatttcaagtaattactgaggctgggcgcggtggctcacgcctgtggtcccagcactttgggaggccaaggtgggcacatcacttgaggccaggagtttgagaccagtctgaccaacatggtgaaaccccgtctctaataaaaatacaaaaagtagccggg

SEQ ID NO: 23460 - DNA, 442 bp, Homo sapiens
  misc_feature (1)...(442): n = a,t,c or g
ttggaaaccccntttgannttgacnttnnnnnatctngaaacccntatgacatgattacgaatttaatacgactcactatagggaatttggccctcgaggccaagaattcggcacgagtgttaagaagtgccttgagctcttctctgagctggcagaagacaaggagaattacaagaaattctatgaggcattctctaaaaatctcaagcttggaatccacgaagactccactaaccgccgccgcctgtctgagctgctgcgctatcatacctcccagtctggagatgagatgacatctctgtcagagtatgtttctcgcatgaaggagacacagaagtccatctattacatcactggtgagagcaaagagcaggtggccaactcagcttttgtggancgagtgcggaaacggggcttcgaggtggtatatatgaccgagct

SEQ ID NO: 23461 - DNA, 365 bp, Homo sapiens
gatccaaaaacagcaaaccccatcctccttgtttctgaggaccagaggagtgtgcagggtgccaaggagccccaggatctgccagacaaccctgagagatttaattggcattattgtgttctcggctgtgagagcttcatatcagggagacattactgggaggtggaggtaggggacaggaaagagtggcatataggggtgtgcagtaagaatgtgcagagaaaaggctgggtcaaaatgacacctgagaatggattctggactatggggctgactgatgggaataagtatcggactctaactgagcccagaaccaacctgaaacttcctaagacccctaagaaagtgggggtcttcctggacta

SEQ ID NO: 23462 - DNA, 476 bp, Homo sapiens
  misc_feature (1)...(476): n = a,t,c or g
gctggaacgctaattagatgtttgttagaacttctcttcctttccaacacatttttaacgcttctcctattttcatctctttgcttctctgtgctaaattctaagttatttttatttttttgttcactaataaagatatttagtgctgtctgaggctatttttaacctgaactccaggacctcttagaaattaatttactgtatttgatttccataaaagtgttccttccaaatgtagatttacagattaaagaactacaacaacaaccattctcatcctttcagcataagtcttttcctcatctcatctaacattcaaaataattttggaagtaggtacaactgaaaccatttaaaaatgtataaaactgaagctcagaggttaacctgtcaatgctataaaagtcaaaccctcatctttcattctaaaccgatggtcttgacaagaaacctttttggccacattcatangtcca

SEQ ID NO: 23463 - DNA, 519 bp, Homo sapiens
gccgcgggttaccccggcaggacgtccgcgcctccgcccctggggtgggcgctcccgctgcgcgcggagagggctgaccctcggtcctggcacccgcctccctgcccttcgctatcctgacgctggtgaacgccccgtacaagcgaggattttactgcggggatgactccatccggtacccctaccgtccagataccatcacccacgggctcatggctggggtcaccatcacggccaccgtcatccttgtctcggccggggaagcctacctggtgtacacagaccggctctattctcgctcggacttcaacaactacgtggctgctgtatacaaggtgctggggaccttcctgtttggggctgccgtgagccagtctctgacagacctggccaagtacatgattgggcgtctgaggcccaacttcctaccgtctgcgaccccgactggagccgggtcaactgctcggtctatgtgcagctggagaaggtgtgcaggggaaaccctgtgatgtcaccgag

SEQ ID NO: 23464 - DNA, 462 bp, Homo sapiens
  misc_feature (1)...(462): n = a,t,c or g
tttgganacctntganganccgnttacgaatttaatacgactcactatagggaatttggccctcgaggccaagaattcggcacgagggagattatactgctgctatagccttccttgataagattttagaggtttgtgtttgggatgcagaactacgggaacttcgagctgaatgttttataaaagaaggagaacctaggaaagctataagtgacttaaaagctgcgtcaaagttgaagaatgataatactgaagcgttttataaaataagcacactgtactaccaactaggagaccacgaactgtccctcagtgaagttcgggaatgtcttaaacttgaccaggatcataaaaggtgttttgcacactataaacaagtaaagaaacttaataagctgattgagtcagctgaagagctcatcagagatggcagatacacagatgctaccagcaaatatgaat

SEQ ID NO: 23465 - DNA, 747 bp, Homo sapiens
agaaagagtcggaagacaaacctgaaattgaagatgttggttctgatgaggaagaagaaaagaaggatggtgacaagaagaagaagaagaagattaaggaaaagtacatcgatcaagaagagctcaacaaaacaaagcccatctggaccagaaatcccgacgatattactaatgaggagtacggagaattctataagagcttgaccaatgactgggaagatcacttggcagtgaagcatttttcagttgaaggacagttggaattcagagcccttctatttgtcccacgacgtgctccttttgatctgtttgaaaacagaaagaaaaagaacaacatcaaactctatgtctcaattttatccgtggtgtggttgactctgaggatctgcccctgaacatctcccgagaaatgctccagcagagcaaaatcttgaaagtcattcgcaaaaacattgttaagaagtgccttgagctcttctctgagctggcagaagacaaggagaattacaagaaattctatgaggcattctctaaaaatctcaagcttggaatccacgaagactccactaaccgccgccgcctgtctgagctgctgcgctatcatacctcccagtctggagatgagatgacatctctgtcagagtatgtttctcgcatgaaggagacacagaagtccatctattacatcactggtgagagcaaagagcaggtggccaactcagcttttgtggagcgagtgcggaaacc

SEQ ID NO: 23466 - DNA, 984 bp, Homo sapiens
  misc_feature (1)...(984): n = a,t,c or g
tatgacatgattacgaatttaatacgactcactatagggaatttggccctcgaggccaagaattcggcacgagtgtctttttagctatgggcaaatcaaaagctgcacttcctgatttaactaaagtgattcaattgaagatggacttcactgcagcaagattacagagaggtcacttattactcaaacaaggaaaacttgatgaagcagaagatgattttaaaaaagtgctcaaatctaatccaagtgaaaatgaagaaaaggaagcacagtctcaacttataaaatctgatgaaatgcagcgtttgcgttcacaagcacttaacgcttttggaagtggagattatactgctgctatagccttccttgataagattttagaggtttgtgtttgggatgcagaactacgggaacttcgagctgaatgttttataaaagaaggagaacctaggaaagctataagtgacttaaaagctgcgtcaaagttgaagaatgataatactgaagcgttttataaaataagcacactgtactaccaactaggagaccacgaactgtccctcagtgaagttcgggaatgtcttaaacttgaccaggatcataaaaggtgttttgcacactataaacaagtaaagaaacttaataagctgattgagtcagctgaagagctcatcagagatggcaagatacacagatgctaccagcaaatatgaatctgtcatgaaaacagagccaagcattgctgaatatacagtttcgttcaaagggagaaggattttgccactgcttttcctaaaggacgaagaaagcctgttggaagctattaagggttttgntccggaattttttacagaatgggaacctgacaatgttgaatggccctggaangatccnagcaaanaggcctaatttgatnnagggaaatgtttnatgaaacnattccggnntttngaaactggtccaggaacccatggaaaatggcga

SEQ ID NO: 23467 - DNA, 519 bp, Homo sapiens
gaacactctgttttctttctgttgtctaaagggggcgaacttgtatttccatccctagtctaggaatttggttgaaagcttttgtattgtgtggctgttcacagacttcatgctcagctgccgtgggaaaatatgacagcctctaggctatttggtgactaatccaacaacttataatgctgatattcaaaatggcttgtacgtcccaccctgttatttaatagttgtcagtttttaaaaaggtcctttaaaaatgtttctgccatcatattcacatagttttgtggtgtgtgtgtcacctagggaaaggcaaattgcccactttctgagttgccagaaagtcttatctgcatacatttttggcatgtaagagaggcaggctctccttaaattatcccatataggtccaaagctagagctagcatcaaccacacaaaatttaattctcagtttttttcatgtagattttttggagactctctgtatctcctctgaaatggagagtttccaggaaattat

SEQ ID NO: 23468 - DNA, 345 bp, Homo sapiens
gcctggatgactcttgggaaaatgcaggagaggatgaaggagttgtgcctggaaccacgcctctagatatggccaccagctggcaggtatttgacatattaaatgggaaaccatatgagccagagtttacatctgatgatttactagcacaaggagacatgaaacagctggctgaagatgtgaagctgcagctgtataagttactagaaattcctgatccagacaaaaactgggctactctggcgcaaaaattaggtctggggatacttaataatgccttccggctgagtcctgctccttccaaaacacttatggacaactatgaagtctctgggggtacagtcg

SEQ ID NO: 23469 - DNA, 676 bp, Homo sapiens
tgaatcccattgctatgacatgattacgaatttaatacgactcactatagggaatttggccctcgaggccaagaattcggcacgagcattttgctaagagttagcaaatatatgattttttccccctccttcaatatggagtgttcatgtgtcaatttcaggaatttcttagagattttcaactcttttacattaggtagctcattttttatatccagaaatgggaatgatttcaaggataattaccattttgaaatgggatcatttgcttgctagaaaatgttaacattgactccagccaagtacagaacattaaaaacaatctggaaaaaggggtgtggatcaaaatagattatgagccaaatctgtctcgaggaaggaagagagtagagtttagcatttataatacatggcctatcccaagagaggggagggactattttatacataaaaaaatattaaaagccttactttgaccaataaattaaaaagaggccatcagaaacaagagccgtggagggacataatgacacataggctggggctagtactggagttcattttgtgacactctggtggcaaatcctgtcagttctggtcctgtctctgcctctgccatggccttcattgaggagggttaggggatttggtggcagcaggagcacactgctgatcc

SEQ ID NO: 23470 - DNA, 430 bp, Homo sapiens
ctatcacagctatgacatgattacgaatttaatacgactcactatagggaatttggccctcgaggccaagaattcggcacgaggagagctagcaccatgagaataccctgtttctagtaaaaatacaataattagccagacatagtggtgcgtgcctgtaatcccagctactcaggaggctaaggcaggagaatcacttgaacccagaagcagaggttacagtgagccaagatcgcaccactgcactccagcctgggctgcagagcgagactttgtctcaaaaaaaaaaagaaaacaccaacttaaggttacaagttatcttcctttccccaggaagtcagcctctcagtagcttccatgcccctctgaacctttaaagacattaacatgtgaccaggaggaaggagcaacccaaagcttgtgggaacta

SEQ ID NO: 23471 - DNA, 554 bp, Homo sapiens
  misc_feature (1)...(554): n = a,t,c or g
ttganancccttnacatgacacnaatttaatacgactcactatagggaatttggccctcgaggccaanaattcggcacgagcaatcatgtctgaaccaatcagagtccttgtgactggagcagctggtcaaattgcatattcactgctgtacagtattggaaatggatctgtctttggtaaagatcagcctataattcttgtgctgttggatatcacccccatgatgggtgtcctggacggtgtcctaatggaactgcaagactgtgcccttcccctcctgaaagatgtcatcgcaacagataaagaagacgttgccttcaaagacctggatgtggccattcttgtgggctccatgccaagaagggaaggcatggagagaaaagatttactgaaagcaaatgtgaaaatcttcaaatcccagggtgcagccttagataaatacgccaagaagtcaagttaaggttattgttgtgggtaatccagccaataccaactgctgactgcttccaagtcagctccatccatccccaggagaacttcagttgcttgactc

SEQ ID NO: 23472 - DNA, 438 bp, Homo sapiens
tatgacatgattacgaatttaataccgactcactatagggaatttggccctcgaggccaagaattcggcacgagcctacctggacatcgtgcgggaggtaaaggacaagcaccctgacctccctctcgccgtgtaccacgtctctggagagtttgccatgctgtggcatggagcccaggccggggcatttgatctcaaggctgccgtactggaggccatgactgccttccgcagagcaggtgctgacatcatcatcacctactacacaccgcagctgctgcagtggctgaaggaggaatgatggagacagtgccaggcccaagaactagaactttaaaacgttcccggggcctcagacaagtgaaaaccaaagtaaatgctgtttttagaactgtgccctcatgccctcttcctgctcacatgctagcggggcccagc

SEQ ID NO: 23473 - DNA, 366 bp, Homo sapiens
gccattatgaaagaaaactacaaaaataatacttcttttccacccgtctttgggtctcgctatgtcacccaggctgaagtgcagtggtatgatcatggttcactacagcctcaacctcctgggctcaaggaatcctcccacctcagcctcctgtgtagctgagatagctgggactacaggtgcgtgccaccacaccccactaatttttgtatcttttgtacagatagggtctctctgtgttcctcaggtggtctcaaactcctggcctcaagcagttttcaggcctcttaaagtgctgagattacaggtgtgagccactgtgcccagccaggtatgccactcttgaaactggctcccaacattttc

SEQ ID NO: 23474 - DNA, 338 bp, Homo sapiens
gaaatcagatgttgaattcttttgccaagggaattatagccgcaggttctctctcactgccatcaaactgtaaaagattaaactgcgaagtcaagctcaacagattattttggaaagtttttgtattaagggatttagtaacatcattttgttttccaccaggcagggagtagggcttagtgttttaaaacacctctgctttctgatgttgccttaatattctgctattgcagcaattaaaaattgtcttcatgtacatttggaactaacacgtgatgtgatatattcctaaactatgaaacctttttcctagtagtcagctagatcatttgttctgg

SEQ ID NO: 23475 - DNA, 311 bp, Homo sapiens
gctctgtatccttagactcacttgtttcttaattcatatcctcatctactaaggtgcctaatggccacccacctagcatattttagtaaggcatgtgtgtacagacaggtcacctattcattgttaatagaattcaatttgcagtttccctggaaataaggcagtttctgatcttcaaatcacccaagtgtcttactcgttagaatgcaggttcctttgtcacattaggaaggacagtaatatttatttatgaaaaagttgaaaaaatactgtaataaatggtgctgggttaattaatagtcgacgcggcc

SEQ ID NO: 23476 - DNA, 343 bp, Homo sapiens
gcccggattcaagcaattcttctgcctcagcttctggaataactggatttttatagagatggggtttcaccatgttggctaggccggtctcggactcctgatgtcaggtgatccgcccgcctcggcatcccaaagtgctgggattacaggcgtgagccactgtgcctggacttactagtgttaattgtaactagagattacatgtagtgtgcaacctttgtcatattcttctgctaattggcacttttccattctacagaaaccttagagcacgtcaactttattcaccacctaattatccagtaaattattgtgtattttagctttttatgtatttaaaacc

SEQ ID NO: 23477 - DNA, 733 bp, Homo sapiens
gcggcacgaggaggtgacctgactctctgaggctcattttgcagttgttgaaattgtccccgcagttttcaatcatgtctgaaccaatcagagtccttgtgactggagcagctggtcaaattgcatattcactgctgtacagtattggaaatggatctgtctttggtaaagatcagcctataattcttgtgctgttggatatcacccccatgatgggtgtcctggacggtgtcctaatggaactgcaagactgtgcccttcccctcctgaaagatgtcatcgcaacagataaagaagacgttgccttcaaagacctggatgtggccattcttgtgggctccatgccaagaagggaaggcatggagagaaaagatttactgaaagcaaatgtgaaaatcttcaaatcccagggtgcagccttagataaatacgccaagaagtcagttaaggttattgttgtgggtaatccagccaataccaactgcctgactgcttccaagtcagctccatccatccccaaggagaacttcagttgcttgactcgtttggatcacaaccgagctaaagctcaaattgctcttaaacttggtgtgactgctaatgatgtaaagaatgtcattatctggggaaaccattcctcgactcagtatccagatgtcaaccatgccaaggtgaaattgcaaggaaaggaagttggtgtttatgaagctctgaaagatgacagctgctcaag

SEQ ID NO: 23478 - DNA, 541 bp, Homo sapiens
  misc_feature (1)...(541): n = a,t,c or g
ttcgggcacgagaaagaccagaaggtggccaggcacggtagctcacatctgtaatcccagcactttgggaggccaaggcaggcagatcacttgaagtcaggagtttgagaccagcctgcccaacatggtgaaaccgcatctctcttaaaaatacaaatacttagccaggcgttgtggcatgtgcctgtaatcccagttactcaggaggctgaggcaggagaattgcttgaatccgggaggtggagattgcagtgagctgagagggagccattgcactccagccttggtgacagtgagacttcatctcanagataaataataaataaataaataccaataggtanangtcctatagtaaatcttacaggtaacctgtaattacttaaagtcaaagttctttttacntttcancatatacaatctctggtnagttttattttagtaatgcagctnnaacctcatgaagnccatttttttgtctaatttaaaancgggtgggggggnangannnngaannggtcctggggnggnaanagagtcg

SEQ ID NO: 23479 - DNA, 475 bp, Homo sapiens
  misc_feature (1)...(475): n = a,t,c or g
gtatcatttgcagcgtgtggatttctgggcatttaccacttgggggcagcatctgcactttgcagacatggcaaaaaacttgtgaaggatgtcaaagccttcgctggggcgtctgcgggatcgttggttgcttctgttctgctaacagcaccagaaaaaatagaggaatgtaaccaatttacctacaagtttgccgaagaaatcagaaggcagtctttcggggcagtaacgcccggttatgacttcatggcccgactaagaagtgggatggagtcgattcttcctcccagcgctcacgagctggcccagaaccgactgcacgtatccatcaccaacgccaaaaccagagaaaatcacttagtctccactttttcctccagggaggacctcattaaggtcctcctagccagcagttttgtgcccatttatgcaggactgaagctagtggaatacaaagggcanaagtgggtggacg

SEQ ID NO: 23480 - DNA, 569 bp, Homo sapiens
  misc_feature (1)...(569): n = a,t,c or g
gggtgctctatgacttcttgaaagcatactcatagctgagtgtctaccctactctgcaagggatnttttgaaggacaaacagtttataatcactaccttaggttccccactcaaagtccacactcattcataaaaggattagaagttggctatatgcagttgtgctggaagaagtagaacaagtttggggaaagtttgtacagcacttcacagtttacagaacttttcacattaattgttccttctgatcctcaaaaccacctgtggcacagctttcccacactacttattagtagaactttcctactgatgagagaagcaaagctcttagcagttagatgacgtgcctaggatcgctcantaaatggcaganctggattattaggacccaggcctgggtcttttactactaggaanatgagcagatgaatggtgggatgaaaacctttccncatagccttcanttcacacttgctgtttcaggaaccaccttttgaagttttgtcgtattactcacttcgnctcganttctttactgattnaccttattnagtgantaangactgccc

SEQ ID NO: 23481 - DNA, 338 bp, Homo sapiens
ttctcctgccttgcctcctgagtagctgggattacaggcgtgtgtcaccacgctcggctaatttttgtatttttagtagagacagggtttcaccatgtcaagctggtcttggactcctgacgtcgtgatccacccgccttggcctcccaaagtactgggattacaggcgtgagccactgtgcctggctgagttttcttaaagtgagcttaatttctgaactcttagtgattcatatatgtacataaatctgtgatcccatttcttattgcaccattcaggaacactttatataaatgagtggctttttatttcatattattagtagtatcatggttcc

SEQ ID NO: 23482 - DNA, 788 bp, Homo sapiens
  misc_feature (1)...(788): n = a,t,c or g
gcgagagagcacactttccattagagcctggtaatacccatatcacctctgctctgaggctgggcctgcagctgtgtagtctttggaagaggtagcccctgaacgcagagcctaagagaagcaagtcggccctgacgccaggccccagtgggcgcctcacactcagaacctcataccccagagcaaaccgatggtcagggagagggctagagctcacacccagctcggaatagatcttccctgatgacatttcatgccctctaaggcagtttttaaatgaaggtacacacatccaggggtgttcacaggctttcacagcaagggtacctatttcatggcaaaataggcagttttaaaagaataaacaagctaggtgtggtggctcatgcctgtaatcctagcactttgggaagccaaagctgatggatcgcttgagcccaggagtttgagaccagcctgggcaacatggcaaaaccccatctctacaaaaaatacaaaaagtaggccgggcacggaggttcacacctgtaatcccggcattttgggaggccgagataggtggatcacctgaagtcaggtgtttgagaccagcctggccaacatggtggaacccaatctctactaaaaatacaaaaaaactagccggatatggnggcgggtgcctgtaatctcagctacttgagaggctgaggcagganaatcgcttgaacttgggagcacaggtgagctgagtgcagtgagccaagaccatgccattaccttaagcttgggcacnagagccnaacttt

SEQ ID NO: 23483 - DNA, 522 bp, Homo sapiens
  misc_feature (1)...(522): n = a,t,c or g
tggaagaccatctatgacatgattacgaatttaatacgactcactatagggaatttggccctcgaggccaagaattcggcacgagccaatttgtatgtaaaaagacacatctgttttgtggtaggattttttcacatttttgggtactatgagctgcattgatggaagacagcaggcaatatgtggtgacagttaactcacagacataaacatgcaaaatactttgctgtctctggggatattgccatttttcttactgtgagcaacagcaccaacaccaagttaacaggatgcaacatgtgtatgactctaaaagccctaagtagttggtagcttcctgggccttcaatcatagcaatttgatgagggaaggaaggggagaggatttgttgggtaatcaagacattcccgtatatgtctgatttcatggaactgctctattttgatagngtgtattgnatatgtatatgtgtatgtgtgccgngnatgngtgtgactgtagcttccgttttaantgtaagg

SEQ ID NO: 23484 - DNA, 560 bp, Homo sapiens
  misc_feature (1)...(560): n = a,t,c or g
gtgcagcagcaaggatccagacgaagtggaaacagagagcaggggccctcccaccacctctgacctccttgccccagacctgctggagcaaggggactggagcctgtcccagaacaagagcgccctggactgccctcatcagcacctagacgtaccgcacgggaaggaggagcagatctgctgacctcggggcctgacagtgtgggacaggctcttctttcccaaaattagggagctcttgacagaaagcagttctgatgcttacatctggaatctgaggcatcctctgactccactcaaagagggtgagggccttcttaagatacaaatggcggaggattgctgccagagaagtctggtcagagccacagggtctgcctccagccaaacgggagcttttggtgagaaggtgttggacaggggattggcgcccccctttggtttggcctncatcctcatctctcttgggccaaccaactgctaggtcccccaagcatggggganccctttcccatttaagttgaaaaagngcctgccttancnggangcttntnatggaa

SEQ ID NO: 23485 - DNA, 317 bp, Homo sapiens
gggggcatgactattcgatttgactcaagcttcagtagactcagaagaagcttggatgacaaaccctataaatgtactgaatgtgaaaagagtttcagtcagagttcaactctttttcaacaccagaagatccatactggaaagaaatcccataaatgtgctgattgtgggaaaagtttctttcagagttctaatctcattcagcatcgacggatccatacgggggaaaagccctacaaatgtgatgagtgtggagaaagcttcaaacagagctcaaatctcattcagcaccagagaattcatactggagaaaaacc

SEQ ID NO: 23486 - DNA, 430 bp, Homo sapiens
gaagatcttctggtattagatgagttaaaatcttctaaatcagtaaagttaaaagaggatctactctctcacaccacagctgagcttaactatgggttagctcattttgtcaatgagatccgacggccaaatggagagaattatgcacctgacagcatctattacctttgccttggaatacaggagtatttgtgtggaagtaatcgaaaagacaacatatttattgatcctggataccaaacatttgagcaagaattgaataaaatactgcgaagctggcaaccaagcatacttccagatgggtcaatattctctcgagttgaagaagactatctctggaggataaaacaactaggatcacactctccagtagctcttctgaatacactgttctactttaacactaagtattttggcctgaaaacagtga

SEQ ID NO: 23487 - DNA, 376 bp, Homo sapiens
gtgaattttgagaatattgtcaagaaaattagctgaggacagggtatagcccattttgactagttatttgagggtccatatgagctccaatataggcctatattttttaaacaattacaaattttggctgagccactgcgcctggcctataagcttttttttaaagagacagaatcttgctgtcactgaggccagagtgcagtagcgtagtcctcactcactgcagccttcaactcctggactcaggctatcctgcctcagcctcctgagtaactaggactacagatgcaccaccacactcagctaatttttaaatttttgtagagacagggtctcgctatgttgcccaggttagtcttgaactcctgggctcaag

SEQ ID NO: 23488 - DNA, 552 bp, Homo sapiens
gctggtctgtttaaaagccatgggaggcataaatgtagatggaatgaaggaaacacaaagttgccattaggacagcaatgtggtaattactacaaacacgatctacccatggatgctaggaaataacaaaatctctgtattgtcttaaagtatctcctccaagatatttttaattacaaagagaaaaatagtaattttaggatggatcaacacagcagacacacccttaaacaagtggccagggatcacatcaccagtagaaaagcacgctggcatcacagacccccgggtgtgaggcacagagcagggccccgcacccctgtgggttcttgccaatgatgcatcaccgcaacctaatcatgagaaaacttcagacgaacccagatggagggacgcaccagaaaacaactgacatcctaaaaatgactcctcagaaatatcaacgtgtggtggggcgtggcgcctcacacctacaatctcaacactttgggaagctgaagtgggtggtcactgggcccaagaggtcaaaccagactggcaacatggtgaaac

SEQ ID NO: 23489 - DNA, 491 bp, Homo sapiens
  misc_feature (1)...(491): n = a,t,c or g
tnntnnnnnnnanttggntccnaacagctatgacatgattacgaatttaatacgactcactatagggaatttggccctcgaggccaagaattcggcacgagccagctgacccactctctggggggcggcacggggtccgggatgggcaccctgctcatcagcaagatccgggaagagtacccagaccgcatcatgaacaccttcagcgtcatgccctcacccaaggtgtcagacacggtggtggagccctacaacgccaccctctctgtccaccagctggtggaaaacacagatgaaacctactccattgataacgaggccctgtatgacatctgcttccgcaccctgaagctgaccacccccacctacggggacctcaaccacctggtgtcggccaccatgagcggggtcaccacctgcctgcgcttcccgggccagctgaacgcagacctgcgcaagctggcggtgaacatggtgcccttcctcgctgc

SEQ ID NO: 23490 - DNA, 414 bp, Homo sapiens
  misc_feature (1)...(414): n = a,t,c or g
accntnnatgacatgattacgaatttaatacgactcactatagggaatttggccctcgaggccaagaattcggcacgagaactggaagagcctacaatgttccccagcatgctgttggcattgttgtaaacaaacaagttaagggcaagattcctgccaagagaattaacgtgggtattaagcactttaagcactctacaagctaagagaatttcctgaaacgcatgaaggaaaatgatcagaaaaagaaggaagccaaagagaaagttacctggattcaactgaagcaccagtcagctccacccagagaagacaatgtgagagaaccaatgggaaggagcctgagttgctggaaccacttccctatgaattcatgcataatacatatatacacatatatgtgtgtgtacatat

SEQ ID NO: 23491 - DNA, 283 bp, Homo sapiens
gacaaaacattagccaggggtggcggcaggtgcctgtggtcccagctgctcaggaggatcacttgagcctgggaggttgaggctgcaatgagctgtgattacaccttgcactccagcctgggcaatagagcaagaccctgcctctaaataaatacataaataaaatatacgtaaatacaaatctagtcaaatagtaatagctaatatgatatgaatggttattcttcttaaccagaaaacataaggggcttggtgcgaaaccactcatctttttttttttttt

SEQ ID NO: 23492 - DNA, 358 bp, Homo sapiens
gctctgtcaagaataagaagcttaaaggtccctataaccaacacagaattcaatggcctctgtcgtgtaagtaatgctggcagctacaacaagcaatcccatctcagtggcttaacaaaacaaacatttagttcttgctcatgttataggccagtggggaacagtttgtgggaggggtttggggaggaatattgtgcgccatgcaggtattcaggtatccagacttctatctactgacctggctgtgccctaaggtctcagagccttgaagttctccactggaacctctgcaactggttgcccagacaaggagagagagagagagagaaagaaagaacatgtaaatttacaagagaag

SEQ ID NO: 23493 - DNA, 400 bp, Homo sapiens
gcagaactcaggctgcctccagccagcctttgcccgctagactcactggccctgagcacttgaaggtgcagcaagtcactgagaatgagcactttcttctcggacacagcatggatctgcctggctgtccccacagtactatgtgggacagtattttgcacatacaagaagagctcagggcagctgtggagctggatggtctgcctggcaggcctctgtgcagtctgcctgctcatcctgtcccctttttggggcttgatcctcttctcggagtcatgcttcctcatgcatacttacttatctggccaagaattgctacctgtggatcagaaggcagtcctggtgacaggtggtgattgcgggcttggccatgctttgtgcaagtatctggatgagctgg

SEQ ID NO: 23494 - DNA, 382 bp, Homo sapiens
  misc_feature (1)...(382): n = a,t,c or g
gtgccaatggaaacgagtcacatgtttatattttaacagtcacatgtttatattttaaaagagtggaatatttgtggtaagtgcagttgtggcttaatacctctgctattccttttagctatccaaaccagaggtgctacttcctgaaagtggcagaattcaaagaatctaaccatgacatgcttttgatttttgttattaaggagatctagggctagaaattgctaaagtagcataataacatggcttagtatagaaaccaggagctgcagcccaagatctcggcagtaccatgtatagggtatatgactctgagttctctcttttttttttganatggagcctcgctctgtcgcccaggctggagtgcattggcttgatc

SEQ ID NO: 23495 - DNA, 608 bp, Homo sapiens
ggccggaaccgccatcttccagtaattcgccaaaatgacgaacacaaagggaaagaggagaggcacccgatatatgttctctaggccttttagaaaacatggagttgttcctttggccacatatatgcgaatctataagaaaggtgatattgtagacatcaagggaatgggtactgttcaaaaaggaatgccccacaagtgttaccatggcaaaactggaagagtctacaatgttacccagcatgctgttggcattgttgtaaacaaacaagttaagggcaagattcttgccaagagaattaatgtgcgtattgagcacattaagcactctaagagccgagatagcttcctgaaacgtgtgaaggaaaatgatcagaaaaagaaagaagccaaagagaaaggtacctgggttcaactaaagcgccagcctgctccacccagagaagcacactttgtgagaaccaatgggaaggagcctgagctgctggaaccacttccctatgaattcatgcataataggtgttaaaaaaaaaattaagggacctctggtcgacgcggccgcgaattccagatctatgaatcgtagatactgaaaaaccccgcaagtt

SEQ ID NO: 23496 - DNA, 346 bp, Homo sapiens
ggacaactaaacaataaaaagacaacccaattcagacaggggcaaaggacctaaaaagacatttctgcaaggaagatatgcaaatggccagtaatcacaccgaaaagatccttgacatcattagtcagcagggaaatgcacatcaaaaccactaggatggcggaaattaaaaagtcagataataataagcattggtgaggacgtggagagatcagaaccctctacgctgctggtgggactgtaaagtggtacagctgctctggaaaacagtctggcagttccttaaaggattaaaccaatagttaccgcatgacccagtaattccactcctaggtatatacccaag

SEQ ID NO: 23497 - DNA, 355 bp, Homo sapiens
gtgtgaatgggaataaaatgagaaattttgttattgtatgaaagcatttggtagatactggcttatgcattctgtactacttgaatgtttaaaagcgttattttgagttgtttgcattatgtttatatgatattttgaaaaatacttttatacagcagaattgtgattaagattattttatgaatcatttcttgagataatatagagggtagtaaggaagtatctggctttggagttagatagtttagcatgaatctaaatccttactctgccactcttaggctgcaggactatgggcaagttagttcacctctccgagtcttagttttctttgtgaatagaagttgatagatag

SEQ ID NO: 23498 - DNA, 1036 bp, Homo sapiens
gggcacagctgatgaaacaagcaagagcgggaagcaatcaattgccattgatgactgcaccttccaccagtgtgtgcgactcagcaagtttgactctgaacgcagcatcagctttatcccgccagatggagagtttgagcttatgaggtatcgcacaaccaaggacatcatccttcccttccgggtgatcccgctagtgcgagaagtgggacgcaccaaactggaggtcaaggtggtcatcaagtccaactttaaaccctcactgctggctcagaagatcgaggtgaggatcccaaccccactgaacacaagcggggtgcaggtgatctgcatgaaggggaaggccaagtacaaggccagcgagaatgccatcgtgtggaagatcaagcgcatggcaggcatgaaggaatcgcagatcagcgcagagattgagcttctgcctaccaacgacaagaagaaatgggctcgaccccccatttccatgaactttgaggtgccattcgcgccctctggcctcaaggtgcgctacttgaaggtgtttgaaccgaagctgaactacagcgaccatgatgtcatcaaatgggtgcgctacattggccgcagtggcatttacgaaactcgctgctagctgccactaggcagctagcccacctccccagccaccctcctccacaggtccaggtgccgctccctcccccaccacacatcagtgtctcctccctcctgctttgctgccttccctttgcaccagcccgagtctaggtctgggccaagcacattacaagtgggaccggtggagcagcccctgggctccctgggcaggggagttctgaggctcctgctctcccatccacctgtctgtcctggcctaatgccaggctctgagttctgtgaccaaagccaggtgggttccctttccttcccacccctgtggccacagctctggagtgggagggttggttgcccctcacctcagagctcccccaaaggccagtaatggatccccggcctcagtccctactctgctttgggatag

SEQ ID NO: 23499 - DNA, 397 bp, Homo sapiens
aaaaacacttgctttagcaaaatcttaactatagcattattctgaaggattttcaaagtctccatgtgttttgttgcatttaggattaacaatggacaacacaaagcccagtcttactatttatatgtacagtatttggtgatagagagcaaaggaaaaacacatcagaacagttgccttaacactgaaaaacataccctgcattttgaaaatgtttatggatgtctcagcagttcttaaaagaagaaaaaaaccactaacaaatggccagtaagatgctggacacaatcattagggaagtgtaaatcaaaactactatgaggtcgggtgtagtggctcatgcttgtaatcccagtactttaggaggctgtggtaggtggatcacttgaggtcagga

SEQ ID NO: 23500 - DNA, 457 bp, Homo sapiens
ggaaaaatcttatagatggcctgaaaagcaaaatggacacattacaagagcaaattgataaattggaagcttgtgctgagtgggtttttattgaagaatataatgcaacaagagaaaaaatagaaagcatgaaggaaaagcagcatagatccacaggttctaatctctgctgagagcagtctcagaggagtgaactaaaaatgaataggaagaaataatcaaagaactaatagaagaaaattcctcttagattagaagggccctgtgagtgtgaagcaaggtgactgaaaaagatcaatgtttgtttatataattgtgaaattttagaacatctagaatagagaaaactctaaaagcttgtgagagataaatatttagaatacaacagaacaagactaaaattaataccagtattttcattttacaattacagaaaataaactgagaaatttatttt

SEQ ID NO: 23501 - DNA, 385 bp, Homo sapiens
ggacactctatgaccctggaccctcgggggacctgaacttgatgcgatgggaggctgtgcaggctcgcggcggcgcttttcggattccgagggctgctgggcctttgcaacaacttctcttatgtggtgatgctgagtgccgcccacgacatccttagccacaagaggacatcgggaaaccagagccatgtggacccaggcccaacgccgatcccccacaacagctcatcacgatttgactgcaactctgtctctacggctcccccgggttctcgtcagtgggatttgtgctgctggaagcttcgtcctggttgccttttctcattctgtggggaccagcctgtgtggtgtggtcttcgctagcatctcatcaggccttggggag

SEQ ID NO: 23502 - DNA, 779 bp, Homo sapiens
  misc_feature (1)...(779): n = a,t,c or g
ggctgtgcaggctcgcggcggcgcttttcggattccgagggctgctgggcctttgcaacaacttctcttatgtggtgatgctgagtgccgcccacgacatccttagccacaagaggacatcgggaaaccagagccatgtggacccaggcccaacgccgatcccccacaacagctcatcacgatttgactgcaactctgtctctacggctgctgtgctcctggcggacatcctccccacactcgtcatcaaattgttggctcctcttggccttcacctgctgccctacagcccccgggttctcgtcagtgggatttgtgctgctggaagcttcgtcctggttgccttttctcattctgtggggaccagcctgtgtggtgtggtcttcgctagcatctcatcaggccttggggaggtcaccttcctctccctcactgccttctaccccagggccgtgatctcctggtggtcctcagggactgggggagctgggctgctgggggccctgtcctacctgggcctcacccaggccggcctctcccctcagcagaccctgctgtccatgctgggtatccctgccctgctgctggccagctatttcttgtagctcacatctcctgaggcccaagaccctggaggggaagaagaagcatagagcgcacccggcagcccctcataanaaccgaggccccggantcnaanccaggctcagctccancctctcctttgngaaagntgacagagtcaaggacttctgngnacaangnacctngacntaaat

SEQ ID NO: 23503 - DNA, 332 bp, Homo sapiens
ggaaccgagggattgctactcgcctttggcttggcggtctctgtgctcgggggtccgaaaactgctggaaggcccccggtctctggaggggagcaggcggtagcgagtttagtgacgtggagcaggcgcagaacagtcggaggtgcctgagtggttattaaaaacgatttgaagagatttcctgggtgtggagtgtgactttccaaaaccagcttttccttgagctgtatttgttagcagcaatgtttaggagattgacttttgcacaactgctttttgccactgtccttggaattgctggaggagtatatatttttcaaccagtatttgaa

SEQ ID NO: 23504 - DNA, 368 bp, Homo sapiens
gaacagaatgaaatatgagatatccataaatatgtggaaattgaataacatctttctaaataaactgtgggttaaagaaatcacaagtagacttcaaaaatattttgaatgtagtgaaaataaaaccacaacatatcaaaagttataggatgcaaaacaaaatgaaccagtgccagggatatttatgggtatttatggctttaagtgcctgaatttcaaaacgaaaaaggcttcttatcaattacctaagcttctaccttagtaaactggaaaaataagagccaactaaacccaaagcaagcagcaggaaagtagtaataaaaataagaatgtggctgggcgctgtggctcacgcctataatcccagc

SEQ ID NO: 23505 - DNA, 1176 bp, Homo sapiens
  misc_feature (1)...(1176): n = a,t,c or g
aacagctatgacatgattacgaatttaatacgactcactatagggaatttggccctcgaggccaagaattcggcacgagacagcaggtcctactatcgcctccctctagtctctgcttctctggatccctgaggagggcagaaggaagaaaacagcccaaagatgagagtgattcgcgtgggtacccgcaagagccagcttgctcgcatacagacggacagtgtggtggcaacattgaaagcctcgtaccctggcctgcagtttgaaatcattgctatgtccaccacaggggacaagattcttgatactgcactctctaagattggagagaaaagcctgtttaccaaggagcttgaacatgccctggagaagaatgaagtggacctggttgttcactccttgaaggacctgcccactgtgcttcctcctggcttcaccatcggagccatctgcaagcgggaaaaccctcatgatgctgttgtctttcacccaaaatttgttgggaagaccctagaaaccctgccagagaagagtgtggtgggaaccagctccctgcgaagagcagcccagctgcagagaaagttcccgcatctggagttcaggagtattcggggaaacctcaacacccggcttcggaagctggacgagcagcaggagttcagtgccatcatcctggcaacagctggcctgcagcgcatgggctggcacaaccgggtggggcagatcctgcaccctgaggaatgcatgtatgctgtgggccagggggccttgggcgtggaagtgcgagccaaggaccaggacatcttggatctggtgggtgtgctgcacgatcccgagactctgcttcgctgcatcgctgaaagggccttcctgaggcacctggaaggaggctgcagtgtgccaatacccgtgcatacagctatgaaggatggcaactgtacctgactggangagtctggagtctaaacggctcanatagcatncaanagaccatgcaggctaccatncatgtccctgccancatgaanatngncctnaggattaccacagatngtaangcntcacttgtcgnaaaattttnctagggcccacttgnntnncnaaaatttggnattanctngcaaanttgtnnttancaatgnncnaaaantttgatttntnnggnngtttnaatcc

SEQ ID NO: 23506 - DNA, 405 bp, Homo sapiens
gatctgtcaagtctcggggtctgccttgcactgagttattcgtggctcctgtgggtgtagccagcaagcgccacctctttgagaaggaactggcgggccagagccgagcagaaccagcctccagccggaaggagaacttgaggctctcaggggttgtgacatcaaggctcaacctgtggatcagcaggacccaggaatctggagatcaggacccccaggaggcacagaaagcatcatctgcaaccgagaggactcagtggggacagaaatctgactcctcgctggacgctgaggtgtgacaagccccgccaagacagacctgcaagtcttcgtctcaagggacctccctcatgccaggcccctgcctctcacagcagcaccctttcctctcattgtccctgttcc

SEQ ID NO: 23507 - DNA, 459 bp, Homo sapiens
gcctatctattactgctatgttgtcagtcccacagtgttttgtgtcgccccacggaggccaagaaagccgcagatgaggccaagatgagatttgcccacatagatggagatcatctgacactgctgaacgtctaccatgcttttaaacaaaatcatgaatcggttcagtggtgttatgacaacttcattaactacaggtccctgatgtccgcagacaatgtacgccagcagctatctcgaattatggacagatttaatttgcctcgtcgaagtactgactttacaagcagggactattatattaatataagaaaagctttggttactgggtattttatgcaggtggcacatttagaacgaacagggcattacttaactgtgaaagataaccaggtggttcagttgcatccctctactgttcttgaccacaaacctgaatgggtgctttataatgagttt

SEQ ID NO: 23508 - DNA, 1024 bp, Homo sapiens
ggtaaagaaacacagatccccctgaaattacgctttggaggacttcttctaacagaaaaacccattgttctaaaggctgagtcaagggatgagaccgtaagtggagcctgatttccctaaggacttctggtttgctcttcaagaaagctgtgccccagaacaccagagacctcaaattactttacaaatagaaccctgaaatgaagacgggcttcatccaatgtgctgcataaataatcggggattctgtacgtgcattgtgctctctcatggtctgtatagagtgttatacttggtaatatagaggagatgaccaaatcagtgctggggaagtagatttggcttctctgcttctcataggactatctccaccacccccagttagcaccattaactcctcctgagctctgataacataattaacatttctcaataatttcaaccacaatcattaataaaaataggaattattttgatggctctaacagtgacatttatatcatgtgttatatctgtagtattctatagtaagctttatattaagcaaatcaataaaaacctctttacaaaagtattattggatgtttcctgcacattaaggagaaatctatagaactgaatgactgagaaccaacaactaaatattttgatcattgtaatcactgttggtgtgggaactggagtgcagtggtgcaatcttggctcactgcgagctctgcctcccaggttcacgccattctcctgcctcaacctcctgagtagctgggattacaggtgcctgccgccacgcccggctaatttttctatttttagtacagacggagtttcactgtgttggccaggatgctctcgatctcctgaccttatgatcccagcactttgggaggccaaggcaggcagatcatctgaggccaggagttcgggaccagcctgaccaacatagtgaagccccctttctactaaaaatacaaaaattggctaggtatggtggcacacgcctgtgatctcagctacccaggaggct

SEQ ID NO: 23509 - DNA, 231 bp, Homo sapiens
aactattcccgctgggtcaacctgccggaagagagcttgctgcggcccgcctacgtggtaccttggcaggacccctgggagccattctacgtggcaggaggcaaggtgcccaccttcgacgagcgctttcggcagtacggcttcaaccgaatcagccaggcctgcgagctgcatgtggcggggtttgattttgaggtccttgaacgaaggtttcttggttcataagggctt

SEQ ID NO: 23510 - DNA, 331 bp, Homo sapiens
gcggcacgaggggtctgctgtgagggtctctaacatgccctggagacatttgccccattgtcttggtgattaacatttggctcctcattacttatgcaaatttctacaacccagtctcctgagaaaatagatttttcttttctgttgcatcatcaggctacaaattttctgaacttttatgctctgcttcttctcgaatgctttgctgcttagaaatttcttctgtcagataccttaaatcatctctctcaagttcaaagttccacagatctctagggaactctagaaaaaaattcttattttgactctttcccgcctatcttatgcccgt

SEQ ID NO: 23511 - DNA, 349 bp, Homo sapiens
ggcttctcatcttgtctcctattgacgcaactgaaatctctggaaaagcccaaccaccttttcaggcttttttacttgagagactcagaaatgtgtgcttccagctgggaagcagcagtgagaccattgtcaataatatactcgctttcagtttcataaacacttctgatgcatgccctttcttctgcaaaggtctgtctctgggggtacctgacccatcagggagagatgccaattaaatccacatggaatctgaacatactcaaatcaggactgtgccaaacctatcagtgtaatgattctgggtgtcatcaaagtcttgggagtatctgagatggtagatggatgt

SEQ ID NO: 23512 - DNA, 580 bp, Homo sapiens
cgcgcgtggaggagacactgccctgccgcgatgggggcccggggcgctccttcacgccgtaggcaagcggggcggcggctgcggtacctgcccaccgggagctttcccttccttctcctgctgctgctgctctgcatccagctcgggggaggacagaagaaaaaggagaatcttttagctgaaaaagtagagcagctgatggaatggagttccagacgctcaatcttccgaatgaatggtgataaattccgaaaatttataaaggcaccacctcgaaactattccatgattgttatgttcactgctcttcagcctcagcggcagtgttctgtgtgcaggcaagctaatgaagaatatcaaatactggcgaactcctggcgctattcatctgctttttgtaacaagctcttcttcagtatggtggactatgatgaggggacagacgtttttcagcagctcaacatgaactctgctcctacattcatgcattttcctccaaaaggcagacctaagagagctgatacttttgacctccaaagaattggatttgcagctgagcaactagcaaagtggattgctg

SEQ ID NO: 23513 - DNA, 462 bp, Homo sapiens
  misc_feature (1)...(462): n = a,t,c or g
gntgtngtaccgttatgacatgattacgaatttaatacgactcactatagggaatttggccctcgaggccaagaattcggcacgagaacgatgctcgagagctggtggtgaactgctgcactgaattcattcaccttatatcttctgaagccaatgagatttgtaacaaatcggaaaagaagaccatctcaccagagcatgtcatacaagcactagaaagtttgggatttggctcttacatcagtgaagtaaaagaagtcttgcaagagtgtaaaacagtagcattaaaaagaagaaaggccagttctcgtttggaaaaccttggcattcctgaagaagagttattgagacagcaacaagaattatttgcaaaagctagacagcaacaagcagaattggcccaacaggaatggcttcaaatgcagcaagctgccaacaagcccagcttgctgctgctcagcc

SEQ ID NO: 23514 - DNA, 452 bp, Homo sapiens
aatttaatacgactcactatagggaatttggccctcgaggccaagaattcggcacgagcacacgcgagtgttcccagccctcaagccagctgctcctccgttcattttctgcaccctcttcgcaaagcaccccccgggatcactctccgagggcgactttttgagaaatctcggtggagtagtggaccagagctggggagtttttaaaagccggggcgcgagaaacaggaaggtactatggcttcctcgtctggcaacgatgatgatctcactatccccagagctgctatcaataaaatgatcaaagagactcttcctaatgtccgggtggccaacgatgctcgagagctggtggtgaactgctgcactgaattcattcaccttatatcttctgaagccaatgagatttgtaacaaatcggaaaagaagaccatctcaccaagagcatgtct

SEQ ID NO: 23515 - DNA, 715 bp, Homo sapiens
cgactttttttgtgttgcaaagcctttaattagaatgtttgtattttttacatcatgcataacttcacatttgtgattaattagtaattatttcaatacttgtaagctcatctgcctcagatttaatcataatacatgaattaaattaatcaaattaaggaacagcaatttagaaagaaacacactttaaaaaatcaaaattctcaattcaggcagtctgtttctatcatttggtattctactcctttaaaaatttcatattgcccaacaaaaagtggttatttttactgtttttggagatgactgaacagatgaaggcatcagatgccttcatcagctggtattttgcctaagatctatttaagataaccttttcttatattttttacttaatattgggcataatcgtatcattcaagattaagtctgggttatttctttgataagaactgaatgtggccgggcgcagtggctcacgcctgtaatcccagcactttgggaggccgaggtgggtggatcacaaggtcaggagatcgagaccatcctggctaacacggtgaaaccctgtctctactaaaaatacaaaaaattagccgggcgtggtggcgggcgcccgtaatcccagctactcgggaggctgaggcaggagaatggcgtgaacccgggaggtggaggttgcagtgagccgagattgcgcctctgcactccagcctgc

SEQ ID NO: 23516 - DNA, 357 bp, Homo sapiens
aaaaatatttacgtcttacaggagctggataatccaggtgcaaaacgaattctagagcttgaccagtttaaggggcagcagggacaaaaacgtttccaagacatgatgggccacggatctgactactcactcagtgaagtgctgtgggtctgtgccaacctctttagtgatgtccaattcaagatgagtcataagaggatcatgctgttcaccaatgaagacaacccccatggcaatgacagtgccaaagccagccgggccaggaccaaagccggtgatctccgagatacaggcatcttccttgacttgatgcacctgaagaaacctgggggctttgacatatccttgttctacaga

SEQ ID NO: 23517 - DNA, 717 bp, Homo sapiens
gatttatatcctagtaatcctgtgtcttggtttgcagtgggatgttactatctcatggtcggtcataaaaatgaacatgccagaagatatctcagcaaagccacaacacttgagaaaacctatggacctgcatggatagcctatggacattcatttgcggtggagagtgagcacgaccaagcgatggctgcttacttcacagcagcacagctgatgaaagggtgtcatttgcctatgctgtatattggattagaatatggtttgaccaataactcaaaactagctgaaaggttcttcagccaagctctgagcattgcaccggaagacccttttgttatgcatgaggtcggcgtggttgcatttcagaatggagaatggaaaacagccgaaaaatggtttcttgatgctttggaaaaaattaaagcaattgggaacgaggtaacagttgacaaatgggaacctttgttgaacaacttggggcatgtctgcagaaaacttaaaaagtatgctgaggccttggattaccaccgtcaggcactggtgttgattcctcagaacgcatccacctactctgctattggatatatccacagtctgatgggcaactttgaaaatgctgtggactacttccacacagcccttggtcttaggcgagatgatacattttctgttacaatgcttggtcattgcatcgaaatgtacattggtgattctgaa

SEQ ID NO: 23518 - DNA, 660 bp, Homo sapiens
gtaaggaagctgcccttcagccgcctggcaagagaaatatgtgttaaattcactcgtggtgtggacttcaattggcaagcccaggccctattggccctacaagaggcagcagaagcatttctagttcatctctttgaggacgcctatctcctcaccttacatgcaggccgagttactctcttcccaaaggatgtgcaactggcccggaggatccggggccttgaggagggactcggctgagctcctgcacccagtgtttctgtcagtctttcctgctcagccaggggggatgataccggggactctccagagccatgactagatccaatggattctgcgatgctgtctggactttgctgtctctgaacagtatgtgtgtgttgctttaaatatttttcttttttttgagaaggagaagactgcatgactttcctctgtaacagaggtaatatatgagacaatcaacaccgttccaaaggcctgaaaataattttcagataaagagactccaaggttgactttagtttgtgagttactcatgtgactatttgaggattttgaaaacatcagatttgctgtggtatgggagaaaaggttatgtacttattattttagctctttctgtaatatttacattttttaccatatgtacatttgtac

SEQ ID NO: 23519 - DNA, 366 bp, Homo sapiens
gcatgagtgcagcgaatgttggaaagtcttcagccattaacctcattcagcaccagtaaaccatcttggagaaagaccttaggaatgcaggcaggcaaagtgcttttgccagcagataaaatagtaaagctgtggatattagcttttgtgagggagacctcaaccagaaatagaatcttacatccaaacatccacacaagggaggtttgttgtaattgtctgctatatgagaagcttttgtgaattaccttgcactttctgacctgcctgggatccttgccagtgttaagtcactgaaagtgtgtactacaaaagacttccatccactattagctgatatcacagtgtgtatcaccttaaaatgct

SEQ ID NO: 23520 - DNA, 432 bp, Homo sapiens
tttgaaaaaccctatgacatgattacgaatttaatatcgactcactatagggaatttggccctcgaggccaagaattcggcacgagcgtgagggaagcctttggccagaagatcggccacttccagttgatgcaggggaagatggctgacatgtacacccgcctcatggcgtgtcggcagtatgtctacaatgtcgccaaggcctgcgatgagggccattgcactgctaaggactgtgcaggtgtgattctttactcagctgagtgtgccacacaggtagccctggacggcattcagtgttttggtggcaatggctacatcaatgactttcccatgggccgctttcttcgagatgccaagctgtatgagataggggctgggaccagcgaggtgaggcggctggtcatcggcagagccttcaatgcagacttt

SEQ ID NO: 23521 - DNA, 484 bp, Homo sapiens
  misc_feature (1)...(484): n = a,t,c or g
ggataggggctgggaccancgaggtgaggcggctggtcatcggcagagccttcaatgcagactttcactagtcctganacccttcgcccccttttcctgcacctantggcctttcttgggaagtaganatgtggcggctttcccaccctgcccanagcaggccctcctgcccagctgctcttgtcagccctctggcctctggatgaggttgagttctccacaacagctcccaagcatcatgggcctcgcagccgggcctgtgccacggctaatgttgtgtgatttaaaatggactcagcaggaagcatattgtctggggaatgttgggaacaggttttggtgaccctgtgcccttggtctccaaatttctgagccanctcccaagggtnggcanctggggggcatgccnggntncccacgncccaaggtanggnacctngggggcatccaggtnaccaacttctttcncttgggtggagnccct

SEQ ID NO: 23522 - DNA, 434 bp, Homo sapiens
  misc_feature (1)...(434): n = a,t,c or g
cggnnacagctatgacatgattacgaatttaatacgactcactatagggaatttggccctcgaggccaagaattcggcacgagtgtctacgtgctgatgagtgggctggacctggagcggctggtgctggccggggggcctcttgggctcatgcaagcggtcctggaccacaccattccctacctgcacgtgagggaagcctttggccagaagatcggccacttccagttgatgcaggggaagatggctgacatgtacacccgcctcatggcgtgtcggcagtatgtctacaatgtcgccaaggcctgcgatgagggccattgcactgctaaggactgtgcaggtgtgattctttactcagctgagtgtgccacacaggtagccctggacggcattcagtgttttggtggcaatggctacatcaatgactttcc

SEQ ID NO: 23523 - DNA, 324 bp, Homo sapiens
gtggggcgttccagggcagctcccctcctggaatagaatctttctttccatcctgcatggctgagagccaggcctcctgcttggtctccacaggaggctgtggcagctgtggcatccactgtggcatctccgtcctgcccaccttcttaagaggcgagatggagcaggcccatctgcctctgccctttctagccaaggttatagctgccctggactgctcactctctggtctcaatttaaaatgatcccacggccacagggctcctgcccaggggcttgttaccttcccctcctccttcctgagtcactccttcataaaaggcc

SEQ ID NO: 23524 - DNA, 452 bp, Homo sapiens
  misc_feature (1)...(452): n = a,t,c or g
gcagacacagggcctgtgccccgagattccagatgcgaccactgtgtgtaaatcagatgccagctgtactgccggctctgccggcacccacagcaacggagtctcaacaggcaggtgcgtagctttcaacgggtccgtcaagacgtgtgaggtggcggcctggtgcccggtggaggatgacacacacgtgccacaacctgcttttttaaaggctgcagaaaacttcactcttttggttaagaacaacatctggtatcccaaatttaatttcagcaagaggaatatccttcccaacatcaccactacttacctcaagtcgtgcatttatgatgctaaaacagatcccttctgccccatattccgtcttggcaaaatagtggagaacgcaggacacagtttccaggacatggccgtggagggaggcatcatgggcttcanggcactgggactgc

SEQ ID NO: 23525 - DNA, 362 bp, Homo sapiens
gaaaccacaccacttcctaactctgtccactgaaaagtcccagaaatgatgattgccctacagcaagagtatccctgatacccagattgtggtctccaaacactgtttcctgccagaaggaataggggctccatgaagaatgagtgtggggcacaaaatatacaagatagtctgggacatcttgtcacaccaggaaacaagctacaaaagaccataggccaggtcatgaatgctcaagaaggggctcctactagccaaaaatgggataatttgaacatcagtgaagataattaactgaaaacaatggaaactcattaaataggctcatattaatgaatttgcagtgatattaaaacaccaaa

SEQ ID NO: 23526 - DNA, 506 bp, Homo sapiens
  misc_feature (1)...(506): n = a,t,c or g
gctcccagaagggtgttgctcatcgtttcttcccggagacatctgcagagactagcttttcaggctaaggtatcctccatgatgttaccattgcaaggtgcccagatgctgcagatgctggagaaatccttgaggaagagcctcccagcatccttaaaggtttatggaactgtctttcacataaaccatggaaatccattcaatctgaaggctgtggtggacaagtggcctgattttaatacagtggttgtctgccctcaggagcaggatatgacagatgaccttgatcactataccaatacttaccaaatctactccaaagatccccaaaactgtcaggaattccttggatcaccagaactcatcaactggaaacagcatttacagattcaaagttcacagcctagcctgaatgaggctatacaaaatcttgcagccattaagtccttcaaagtcaaaccaacacaaccgcattctcttttggaacttgaaccagccanggactt

SEQ ID NO: 23527 - DNA, 369 bp, Homo sapiens
gttcaggttggggggtgaggtgtgtccagtgcggctggagagcaggatgggtggtgcaatgcccagggtgcaagcatactccatgaggcccagtctgtgaacagagaccaggtctaaccccttcttccaggaaagcctcgtagggccttctggccaagaggccacgagtggtgaagactgcagactctgaaatcagaaatacctgggctccactgtcagcatggcagctgaggaagagtgaaaattcctctaagttcttttagaagtcccagcctccccatgtaactggggaactgatgggaggagcagagctgtctgtgcacataagaagttctcagtaaatggagacagttactatttctgttatta

SEQ ID NO: 23528 - DNA, 428 bp, Homo sapiens
aattcggcacgagggcggagcgcgggtacagcttttcgctgactacattcagcccgtctggtaaacttgtccagattgaatatgctttggctgctgtagctggaggagccccgtccgtgggaattaaagctgcaaatggtgtggtattagcaactgagaaaaaacagaaatccattctgtatgatgagcgaagtgtacacaaagtagaaccaattaccaagcatataggtttggtgtacagtggcatgggccccgattacagagtgcttgtgcacagagctcgaaaactagctcaacaatactatcttgtgtaccaagaacccattcctacagctcagctggtacagagagtagcttctgtgatgcaagaatatactcagtcaggtggtgttcgtccatttggagtttctttacttatttgtggttgg

SEQ ID NO: 23529 - DNA, 455 bp, Homo sapiens
gtggccccgagaactcactcaatacttgaggactattttttccttggaaggcctgggacagggctggatgcagctcactctgggaaggagcactcgggtctccttttttggctctatcaggggcgttctcagtcattggctgtgacgatgggaccaagtttcttctctcttgatttggcctcttcagcttagtgttacacatcaggccttcttgttgaactacttgatctgcattgagaaaagacacatttatcgttccagtaaaagggcccatggatgaaaggcctctagcaccaagtgcaaaattgccctttaaatgcaacagacaagacctagagaagaaaacagacacggtcaaaatggctggaggtacaagaggagcagagcccagcaggcttcattttactgcccgtattctcctttgtacccctgtggcctaaggaaatggggggacc

SEQ ID NO: 23530 - DNA, 449 bp, Homo sapiens
  misc_feature (1)...(449): n = a,t,c or g
aacngntatgacatgattacgaatttaatacgactcactatagggaatttggccctcgaggccaagaattcggcacgagagctcttctcctcagcttggggcagccattggcctctgtctcgttttgggaaaccaaggtcaggaggccgttgcagacataaatctcggcgactcggccccgtctcctgagggtcctgctggtgaccggcctggaccttggccctacagccctggaggccgctgctgaccagcactgaccccgacctcagagagtactcgcaggggcgctggctgcactcaagaccctcgagattaacggtgctaaccccgtctgctcctccctcccgcagagactggggcctggactggacatgagagccccttggtgccacagagggctgtgtcttactagaaacaacgcaaacctctccttcctcagaatagtgatg

SEQ ID NO: 23531 - DNA, 470 bp, Homo sapiens
  misc_feature (1)...(470): n = a,t,c or g
gtcaataccctgcctggagttcgcctccagctgagctgggcatcccacatcctcttcctggggccactggccccactctgcccccagggtcacctgtgactcagggctgcaggcccaacccagcaccagccctatgggcaccgcccacacctgcaggggctcaggagccaacgcgggtgagcactgtgtgcagtccctctcctctgtccccatagctggtttttcccaccaatcctcacctaacagttactttacaattaaactcaaagcaagctcttctcctcagcttggggcagccattggcctctgtctcgttttgggaaaccaaggtcaggaggccgttgcagacataaatctcggcgactcggccccgtctcctgagggtcctgctggtgaccggctggccttgccctacagcctggaggccgctgctgacaacactgacccgactnaaanagactngaagggcc

SEQ ID NO: 23532 - DNA, 380 bp, Homo sapiens
ggttctgtcttccctctgctagacctaaccactgggctaacctgtgattcatcatttgttaatatttttcacataaacacagaaattgccttcctatgctcagcaacagctaaatctggcacacatgattcccatgtcccccggtccttcagcaggactggccaccaatgaatcctcaccacccacaggcactggtggagaccctgctgagggctgggagtgggggtggggaggcgatgaggcaggcagacaggttatcctcaaaagactcctgatccagtctaggcaacaaggacatctatgaaatggcatgtccccaacaggaccgggcggtagatcctagagccagctgagctgtcttgacaacaagtgcttcagga

SEQ ID NO: 23533 - DNA, 327 bp, Homo sapiens
ttttatttggctgtatatacaatttaagctattaaaatttgtacaatatttacaaattaaataatcatctgaaactgtctccaacaactcttgtaacacaaaaccaaggggaaaagacaggggcaggcaggtcccagctcctgtggtccctccttggcacagagccttttctaaactggaaagaccaggagtctggcactcctgttcctctttcccgggattaagcattcaacttcaaaagacaaaatttaagccaaaagacactagtaaggaagtaattccaattctaaacttcagaagttctgccagttgagaagtggccttcct

SEQ ID NO: 23534 - DNA, 559 bp, Homo sapiens
  misc_feature (1)...(559): n = a,t,c or g
ggggagaatagatatcgtgagacaggtgaagtctcagcattggatggccttcctctagcgagcttgaagtgggctcagccctggtcagaagggagggcagtggccccggtgcatgaagggaaacaagcctttgttgaaaatgtcctagattctaatctctgtactggatgctttcttatgttctgtcccccaggcatcacagtccccgtgtgatgtgggtattgttatgttcaagttacaggcaggaaaattgagattctgaggaagtcatgtgccggaggtcatacagctgggaggcatgacgtgctgtgactctagagctttggaatggagcctgtgctctttccactaccttacacctcccttgcatctgggatccaaagctaggaaataaaaataggcctctttaggccgggtgcagtggctcacgcctgtatcccagcactttgggaagccaangcgggcggtcatgangtcatgagatcnagaccatcctggntaacacgtgaaacccgtctctactaaaatacagaaaacttacccggctggggngggcgcc

SEQ ID NO: 23535 - DNA, 434 bp, Homo sapiens
  misc_feature (1)...(434): n = a,t,c or g
gcgcaggcccttcttttccattttcatgctgtggcttgacatttaattttaaaagccattctgaatgacatggcaaggggcgagagaaagtggtgtctcaactgacagatgctcactttgaatgttatttgcagtggggcttatcattctttaatccacagcaggcaaacccagccagcttttgaaggagagggaatcaaagtataaaattgcgtcctctctaagttgcagtagatatgactgactaggcaggtcaaattatttgtcccacctttccccagctgacctattttgcagagttgcacctcctctgaagactgaagctaaatgcaagcccgtcgagggggaatgtgtttcttgggggtcgtgaagcggggacttggctttttccctcatgntgcttttctctgngnctcctcaagacccgtcgggcc

SEQ ID NO: 23536 - DNA, 416 bp, Homo sapiens
gaggagcccgggggtgcccctggccccagtgtaccccttcccccatcacagggtgtggggctggcctcgctcgtggcacctctgctgatctcacaggccatgggactggccctctatgtcctgccagtgctgggccaacacgttgccacccagcacttcccagtgcagaaggctgaggctgtggtgctgacactgctggcgatttatgcagctggcctggccctgccccacaatacccaccgggtggtaagcacacaggccccagacaggggctggatggcactgaagctggtagccctgatctacctagcactgcagctgggctgcatcgcctcaccaacttctcactgggcttctgctggccaccaccatggtgcccactgctgcgcttgcaagcctcatgggccccggacctt

SEQ ID NO: 23537 - DNA, 432 bp, Homo sapiens
ggcgcttttgcaaagccgcggaggtgaagtgaacttagaggttgtggggccgaggggtcgtcttatagctaccagcccacaggcatttagtctacgttggaggtaaacaaatacgggtcctgcttaggagaaaagaaaaacgtcttacagccagtgtctaaactccaaacaacggaatgtatcaatgagaccttgtatatggatacacgtgcatttaaaaccgccctgccggcttgtagagcttttgccgttctccagcgctttacaggggttatcgcacttaagcctcggaacaactttaccagtgattctaccagaaaggaatgaagaacagaaccttcaggaattgagtcacaatgcagacaaatatcaaatgggagattgttgcaaggaagagattgatgatagtattttctactagccattgggaaa

SEQ ID NO: 23538 - DNA, 154 bp, Homo sapiens
ggcatatcctccctgtggggacagatgtaaatatccatcttggctggggcctagtcttagcttgattcgttaatgcttgatctttttctatttttgttttgagacagggtgtcactctgttgccctagctggagtgcagtggcgtgagcttggc

SEQ ID NO: 23539 - DNA, 1616 bp, Homo sapiens
  misc_feature (1)...(1616): n = a,t,c or g
aattcggcacgagaacaaaaagacatttggtttcatcctttacagcagtaggacaattgcaaaggtttttcctttttcataaggagacacattaataggtaactctgtttcttgagcaggggttcacttattctgagagcattagttctcctaaaaagctccagcatagaaagggaagataaaccaaattctagcttgtgttttacccacagaaggatacaggacaaaggaatagtaactggcctgtttggatactaaaattgaaaataacttttagcctcctccttatgatagccgccagagtaaatgttgagcattactacagaaaagccacaaaccaagaatctacctgtttggaaagatcttttgcatctctgaaggtgcttaaagcatacttagtgcctttccttttaactgggaagataaaagaagtatctgtccaagatattaatatgtaagataacattgtagacatgttcttctgataatacaaggtttattctatttgcattaggatatttgtggacatgtccatctaatataaaggaaagttttttaatcattgaggcatgtagggctgagttatataatgtagaaacttctaaagataattggatgagaatatacatattgacctgtatattatgactaatcatgactcagatcttaatacagggatgatctcatagcatttagatatcagaaaaggttttgacctatatgtctttaatattgtttgaatacatgtataatctttatcattcctcagtgtttcatttctcaaattctgtaaaaggaatataagaggaaagacaattcatatacaaagacaacgagattaaaaatatgcagtaggaaaaataattacttaaggggagattttttttacatgaaatctgggctttggatgtgtgtgtgtgtgtgtgtgtgtgtgtgtgcacatatgcactgtggtgggagtggggcancttggggaatatgttacatgtgtgactttgttttgccctggcaaagttaatgttgttcagaaagggtaaatgtttggacacttgcaattgctcatggatgaatttatatgttttagtcatagaaaaattgtaccctttgatagaagcacattttctttccaaagttggttattaaccacagaattatagcaggtattcataacttaagtttgaaaatcaatagcgtctgcaaatggattaacagattagagaatcaacagcatcggaaaataggttaatgcatattgcttctaacaagtgcatgaagaaatagaagaagctatgtagctttcagttctgacagaaaagggtgaaggagggtatcatttcaagaaaaaaaatagctatcacgcaatggttatctctgaaaatatttgtattaagatgtgtatacatggccaggcatggtggctcatgcctgtaatcccagcactttgggaggcaggtggatcacgaggtcaggagatcaagaccatcctggccaacatggtgaaacctcatctctactaaaaatacaaaaatgagcggggtgtggtggcccatgcctgtagtcccagctgctcgggagactgaatctcttgagcctgggaagcagaggttgcagtgaac

SEQ ID NO: 23540 - DNA, 470 bp, Homo sapiens
  misc_feature (1)...(470): n = a,t,c or g
cgaggccaagaattcggcacgaggataaatgtcctgtgcattgatgcactgcaaaggactaagcccatttcttgctgttcctccaagccctatagaaaggggactgcagagtcagcaccactgaatcaaattattaaagtggaaggaagcttatacatcatccactcggcattcctcgtacacaaaggcacattggtgtaggaatatgcagtgaccaattcatgaccacactcttgttaatgggagagtggagattaaaatatgacatggacctctacttggggattcaggatgctactacttctgagatttttcaagtattttcattcatccagcaatgacttataaatactataagtattaatagtctctgaaacatcaatggcttgaagaagcagcacatcttactggaaacaattgcctggctttgaattctggtttatanctttttaccangaatgggtactgac

SEQ ID NO: 23541 - DNA, 502 bp, Homo sapiens
accagctatgacatgattacgaatttaatacgactcactatagggaatttggccctcgaggccaagaattcggcacgagcacacacacactctctctctctctctctctacttctaaaggtaaggaaggatcaatcaattttaaaaggctatgtaaatatcaaagacccaaacaggaaaagataaaaacaaagtaattcagaaagattggagagagagaaaaggaaggggaatctgttatctttttttaaaagagtccatttttactttaatgttaataattctttttttcagctgataaatgaaatatggtttccacaaagtcaacaactagatggttatcaaggcatttttttcctttctacctgttattattatctatagcctgaaagaaaccataattgtcaagaagaaaaaaactcaacattatgcctcttacacaaggatgtcctccaccagggtgtgaagggcactgggatttcggatcaagtttgcaaaggaac

SEQ ID NO: 23542 - DNA, 315 bp, Homo sapiens
  misc_feature (1)...(315): n = a,t,c or g
gcccttcaaccccataatggcctaactactggtcaacatgatctcctggacctaaaggctggtaatactgtggattctatcatataagggcttttggttttgctctgtttttggtttacaaacacttgtctgttngatagncctttttatactgtatctatgtatgcgnatagcnanaatctgcgnattantgttaagangancnncatcgcnnnnacaatnctagancagacactanangcanaancagnngaaaccnacttgagnngcntncaacntaaagacncannnnnnanttaaacngnctcaagaaac

SEQ ID NO: 23543 - DNA, 420 bp, Homo sapiens
gagcatctggagtctttttctcaatgagaagttaaaggaggaagcttcagtggagccttgttgacaaaaacagtgtggtacagattcccagttgcataattcagagcactggggaagttttgacctgtgttttgctcgtcaattcctgagcaagaggaaataatgaagttgctcaggagggattgccttgtgggcgagacctgtgacagagtctgtcattttgaaccttctgttctggaaatactttttacagtgtcttctgccttttttctttttaaagattgttttaaaaacaccacttctcgctttctctccttatctttcagtaatttgttgcagggcattttggataggaatatttcactgatattcttgtttgagctgacggtcatgcccaaatgtgtttgctgcagaatgtgg

SEQ ID NO: 23544 - DNA, 482 bp, Homo sapiens
  misc_feature (1)...(482): n = a,t,c or g
ggatgtntgcnntaaacncttgacatgattanaaatcnaatacgactcactatagggaatttggccctcgaggccaagaattcggcacgaggataacgaagctctctacgacatttgcttcagaaccctaaagctgaccacgcccacctatggtgacctgaaccacctggtgtctgctaccatgagtggggtcaccacctgcctgcgcttcccaggccagctcaatgctgacctgcggaagctggctgtgaacatggtcccgtttccccggctgcacttcttcatgcccggctttgccccactgaccagccggggcagccagcagtaccgggcgctgaccgtgcccgagctcacccagcagatgtttgatgccaagaacatgatggctgcctgcgacccccgccatggccgctacctgacggttgccgccgtgttcaggggccgcatgtccatgaaggaggtggatgagcaaatgcttaatg

SEQ ID NO: 23545 - DNA, 1020 bp, Homo sapiens
agctgctgcgacagtccactacctttttcgagagtgactcccgttgtcccaaggcttcccagagcgaacctgtgcggctgcaggcaccggcgcgtcgagtttccggcgtccggaaggaccgagctcttctcgcggatccagtgttccgtttccagcccccaatctcagagccgagccgacagagagcagggaaccggcatggccaaagccgcggcgatcggcatcgacctgggcaccacctactcctgcgtgggggtgttccaacacggcaaggtggagatcatcgccaacgaccagggcaaccgcaccacccccagctacgtggccttcacggacactgaacggttgatcggtgatgccgcaaagaatcaagttgcaatgaaccccaccaacacagtttttgatgccaaacgtctgattggacgcagatttgatgatgctgttgtccagtctgatatgaaacattggccctttatggtggtgaatgatgctggcaggcccaaggtccaagtagaatacaagggagagaccaaaagcttctatccagaggaggtgtcttctatggttctgacaaagatgaaggaaattgcagaagcctaccttgggaagactgttaccaatgctgtggtcacagtgccagcttactttaatgactctcagcgtcaggctaccaaagatgctggaactattgctggtctcaatgtacttagaattattaatgagccaactgctgctgctattgcttacggcttagacaaaaaggttggagcagaaagaaacgtgctcatctttgacctgggaggtggcacttttgatgtgtcaatcctcactattgaggatggaatctttgaggtcaagtctacagctggagacacccacttgggtggagaagattttgaccagcgtgtcatggaacacttcatcaaactgtacaaaaagaagacgggcaaagatgtcaggaaagacaatagagctgtgcagaaactccggcgcgaggtagaaaaggccaaacgggccctg

SEQ ID NO: 23546 - DNA, 405 bp, Homo sapiens
gccaataggtacaatacggaatgaagaagaggggaaaatggggagaaagatggttaaaatacataataatccacgtttaaaaggagcgcacttgtggctgatctatgccagatcaccatcttcaaattggcacaactgaaatttccccactctgttggggcttccccaccacattcatgtccctctcccgtgtaggtttcacattatgtccaggtgcacataggtggtattgaatgctcagcagggtaggggctgaccactgtccctgattcccatcgttctcaggcggattttatatttttttaaagtctattttaatgattggatatgagcactgggaaggggacgctaactccccttgataaagtctcggttccatggaggacttgagtggcccaaaggctg

SEQ ID NO: 23547 - DNA, 396 bp, Homo sapiens
ggctccatggaagataaaggcagagatttacaagccaaggaatgtcaaagacggccagcacaccaccagaagctagcagagaggtatggaacagattcttcttcacaacctcagagggaaaaccctgctgatacctggatttcaaactcctggcctccagaacgacaaagtcttgcttgctctgtcgctcaggatggagtgtagtggtatgatcttagctcactacaacctctgcctcccaggttcaagtgattctcctgccttacgctcccaagtaactgggactacaggcacacaccaccacacccagctaatttttgtattttttgtagagacggggttttaccacgttagccgggctggtcttgaactcctgacctcaggtgatccacccgc

SEQ ID NO: 23548 - DNA, 400 bp, Homo sapiens
gaactggaagagatggggcatcagccagactctacccagtggacgccagctaggtggagtcttcatcctggaagtgaccctgtccatttgccccctggaagccaggatgggtcctcaggagggacaagtccaagaaactggagaggttagaaacatggacccatcgggacattgccgagttgatccatgagtggctgacaggttgtaaatttcacagggtgtgaggttgtgactccagctaatgcctgtgttgactcttccagcgtggctgccatgctttttctatggttggccagtcttggtagggggtgggccaggtaatgcgtggcattgaggcactcttactcagtaccacaagcccgtgctgtcactggcaggacttttccagaaggattcttaa

SEQ ID NO: 23549 - DNA, 331 bp, Homo sapiens
attgtattttgtaaaggtgaaaggatcgaaataccactttgacagttataaaccagagtagatttgagaactgattgctcacatcacacttacgaatagtctcagaagcctttaagagaaacttacttctcaatggacacttagaagaatttgatgatcttactgtcataaaatcagtaatgaaattctcagcaaaactatttggtaaacattgcaccctgtatttttacccaacatcttgttatgaaaattatcaaatacattaaaaagttaaaataattttatagtgtactcactacctagatgctaattagcattacctatgcttgct

SEQ ID NO: 23550 - DNA, 375 bp, Homo sapiens
gcttgtcctccgcatgacgcccgtgccggagcccacgtgagcctttgccaaggagagattcagagatatgagcagaaaaactggaagacggacttcttcaataaggcagcgggacggtttggctgatggaagatgtttcccggaagcctgttcacgctccaccctgaaagtcccagggccgtgagagtcagccgggccgccgaggcggtgccctccaggctgcaggatgatccagggactgttttcctcagcactgtgtaggtttcagcttatgagttctgtccatgttttgtgagatttatagctaagtatttaccttttcgaatgattataaacaacatagtagttttaattttagtgtctacttgttttttg

SEQ ID NO: 23551 - DNA, 508 bp, Homo sapiens
  misc_feature (1)...(508): n = a,t,c or g
tnntttgannncntttgaanccatgctatgacatgattacgaatttaatacgactcactatagggaatttggccctcgaggccaagaattcggcacgagactggaagacctgtcacagttttatcatcaatgagaagatgaatgggaaagtgtgggaccttttccccgaggctgacaaagtccgcaccatgctggttaggaagatccaggaagagtcactgaggacctacctcttcacctacagcagtgtctatgactccatcagcatggagacgctgtcagacatgtttgagctggatctgcccactgtgcactccatcatcagcaaaatgatcattaatgaggagctgatggcctccctggaccagccaacacagacagtggtgatgcaccgcactgagcccactgcccagcagaacctggctctgcagctggccgagaagctgggcagcctggtggagaacaacgaacgggtgtttgaccacaagcagggcacctacgggggcta

SEQ ID NO: 23552 - DNA, 573 bp, Homo sapiens
  misc_feature (1)...(573): n = a,t,c or g
gaaagaggcagctgtagcagtggtgacagaagtggagtctgctgtacagcaggaagtggcctcccctggggaggatgcagcagaaccttgcatagatcctggttcccagtcaccctctggcatccaggcacagatgccacctgaacttcagagcaattcggctacccagcaggacccaaatggcagtggagccagtttctcatcttctgccaggggcacccagccgcatggctacctggccaagaagttacacagccccagtgatcagtgcccacccagagcaaagaccccagagcctggagcccagcagtctggcttccctacactctcgcggagccctcctggcccagcaggaagctccccaaagcangggcacggtancggtgtggagagtgtggcaaggcattctaacagctgtgccacctaaagaagcacgcatttgtgcacacgggccacaaagcccttttttgnanctngtgtggcaagactattacttaaaggaganctnaaagcccatatgctgggccnccccggggtgcggccnttccttgtcacaatgcgacaaggctatgg

SEQ ID NO: 23553 - DNA, 360 bp, Homo sapiens
gctatgacatgattacgaatttaatacgactcactatagggaatttggccctcgaggccaagaattcggcacgagaaaaaaagaaacagggccatctgtctttgaggcagagggatttacacccttgctaagacactaaagttttttgctaaggcactaaactttttaggcccttcccccagtattacacatgagagatgataatcaagcctttgttgcctatgagtgaaaaggaatctaaaaatcactgaaataaataataatagtttttcaaggaatttcaaagaagttttttcacatgggaaaggactgctaggctggatgtggtggctcacgcctgtaatcccggcaatttgggag

SEQ ID NO: 23554 - DNA, 478 bp, Homo sapiens
aacagctatgacatgattacgaatttaatacgactcactatagggaatttggccctcgaggccaagaattcggcacgagtttttttttttactctatttcttcaagtctccacagtgaacatgtattattttgttagaagaaaaaaagttttgtgcttaagataaaatgctaaattttttttcttttgagacagagtcttgctctgtcgcccaggctggagtgcagtggcatgattacggctcactgcaacctccgcctcccagactcaggtgattctcctacttcagcctcccaagtagctggggccacagaagcatgccaccatgcttggctaatttttgtattttttgtaaagacagggcttcaccatattgtccaggctggtctggaactcctggactcaagcccaaagttttaggaatacagacgtgagccatcatggctggcttacattggtttactcttggatttgaggag

SEQ ID NO: 23555 - DNA, 357 bp, Homo sapiens
gcaaaatataaaggaagaagaatgagtggtgatttcccagacagctatcagaacagactataaagctacagttattaaaacagcactgccttgcttctggattacataaattgaaggaggaagtggagccgggccctggcagccttctcagtgtaactcaggaccccgtggacggggtgtctgagccagcaggaagagacagggcctgctgcagaggacgtaacaacagaaccacgcacctgcagcaaggcagtcccatctccgtctcagctgagacacagagcaaccacccagctaggcagtcccatctcagctggagcacatccacgaggaatccaaatgcacacaaaaaaataa

SEQ ID NO: 23556 - DNA, 526 bp, Homo sapiens
cagcatcagagatcataatcttctgctctcgtggcaagaaatttgtgcggatagagttgatacacctcacttgaagttggcctggagaaaagaggcgtcggactcctggacggggttgggaaacggtcaccagtttcggctcaaagcagcctgtttccaggagaccgccatggtcgaggcagcgtcctggtcccacggtgcggggccggacgatcatttatgggatataaataaaaggactatgaggtggtaaataaaagactaccaactagaagccatagggagtcatttgaaggagaaataggcacggctcatctgtggttgagggaaagggatcttgaaagatgattaggagaacttgggttctggggaaagtgcgggaagacattctggcagagaagcaaacgtgaggaaagagttttgctcttgttgccaggctggagtacaatggcgcaacctcggctcaccacaacctccgcttccaggttcaagcgattctcctgctcacctctgagtcctgggatac

SEQ ID NO: 23557 - DNA, 898 bp, Homo sapiens
cagctatgacatgattacgaatttaatacgactcactatagggaatttggccctcgaggccaagaattcggcacgaggcggcgccgtcaggtccccttccacctgcacatcaacctggagctgctggagtgtgtctacctggtgtctgccatgctcctggagatcccctacatggccgcccatgagagcgatgcccgccgacgcatgatcagcaagcagttccaccaccagctgcgcgtgggcgagcgacagcccctgctgggtccccctgagtccatgcgggaacatgtggtcgctgcctccaaggccatgaagatgggtgactggaagacctgtcacagttttatcatcaatgagaagatgaatgggaaagtgtgggaccttttccccgaggctgacaaagtccgcaccatgctggttaggaagatccaggaagagtcactgaggacctacctcttcacctacagcagtgtctatgactccatcagcatggagacgctgtcagacatgtttgagctggatctgcccactgtgcactccatcatcagcaaaatgatcattaatgaggagctgatggcctccctggaccagccaacacagacagtggtgatgcaccgcactgagcccactgcccagcagaacctggctctgcagctggccgagaagctgggccagcctggtggagaacaacgaacgggtgtttgaccacaagcagggcacctacgggggctacttccgagaccagaaggacggctaccgcaaaaacgagggctacatgcgccgcggtggctaccgcagcagcagtctcagacggcctactgagctctccactctgtttcccgctgggccatccaaccttgaagtcctaaaccacacctcagtcactaaaggtctgtta

SEQ ID NO: 23558 - DNA, 425 bp, Homo sapiens
  misc_feature (1)...(425): n = a,t,c or g
ggttcgcattgctcttcctttattttgctgcaggcttttttcacaacctggttattttggattttccatatgtttaataaagtaggttagagtagctggtgtttatgtctgctttagtttagaatgaggagactagaactggtttggaagcaagttgaaaactggcctttattacctaggaggccaccaaagtactgtaacaaggagggctttactttatggtacaactctgtggcacaaacatacaaatgtagtgttgttctgattctcctagattggtttgttcagtgttttttgtaaggagccttattttgcctagtggtcaatgccttgcacattatgcaagatcttgaattccaaactgattgaattctgtgagtaatagggagctattgnagattcttttttaaaaggtatttttcatt

SEQ ID NO: 23559 - DNA, 491 bp, Homo sapiens
  misc_feature (1)...(491): n = a,t,c or g
gtgatgagcttgtggccatcattgcccggacagacctgaagaagaatcgggactacccactagcctccaaagatgccaagaaacagctgctgtgtggggcagccattggcactcatgaggatgacaagtataggctggacttgctcgcccaggctggtgtggatgtagtggttttggactcttcccagggaaattccatcttccagatcaatatgatcaagtacatcaaagacaaataccctaatctccaagtcattggaggcaatgtggtcactgctgcccaggccaagaacctcattgatgcaggtgtggatgccctgcgggtgggcatgggaagtggctccatctgcattacgcaggaagtgctggcctgtgggcggccccaagcaacagcagtgtacaaggtgtcagagtatgcacggcgctttggtgttccggtcattgctgatggaggaatccaaaatgtgggtcatattgcnaaagcttggcct

SEQ ID NO: 23560 - DNA, 238 bp, Homo sapiens
  misc_feature (1)...(238): n = a,t,c or g
caaaccccattcttaaaaaatagtaaatattaaagtatcaatgacatttaagttaagcattatacaatttttcattttctcttttgtaaaaataaaattttattcaaacaataagctgaaatcctaatgtcatttcattcccattctagattactagagtagcagtatgacctgaatagcctcaaaacaatgcctaaattactctcaaagaaaggggataattgccatnaaaggcttt

SEQ ID NO: 23561 - DNA, 669 bp, Homo sapiens
tatgacatgattacgaatttaatacgactcactatagggaatttggccctcgaggccaagaattcggcacgagcgcctcggaggcgttcagctgcttcaagatgaagctgaacatctccttcccagccactggctgccagaaactcattgaagtggacgatgaacgcaaacttcgtactttctatgagaagcgtatggccacagaagttgctgctgacgctctgggtgaagaatggaagggttatgtggtccgaatcagtggtgggaacgacaaacaaggtttccccatgaagcagggtgtcttgacccatggccgtgtccgcctgctactgagtaaggggcattcctgttacagaccaaggagaactggagaaagaaagagaaaatcagttcgtggttgcattgtggatgcaaatctgagcgttctcaacttggttattgtaaaaaaaggagagaaggatattcctggactgactgatactacagtgcctcgccgcctgggccccaaaagagctagcagaatccgcaaacttttcaatctctctaaagaagatgatgtccgccagtatgttgtaagaaagcccttaaataaagaaggtaagaaacctaggaccaaagcacccaagattcagcgtcttgttactccacgtgtcctgcagcacaaacggc

SEQ ID NO: 23562 - DNA, 924 bp, Homo sapiens
gactggggtctgctctcaccaacattggcatccccatcagtcagcatgatgacaatggaggtgctcctctctgggagctctccagtggcactgctggacctgcccacgtttctgtaaaatcaggatacgtggctttagtaagcagaccaagcgcttcgtggcagggaaagcagcgtgcggggaagtcactgaaaagtgctgcctaaggaagtttggaaatagtccctgttccagattgccttgaattttaaaacattttgctttgggaaagtaggtcagcagcacctaagatcaaggatgcgttccattttcacacttcacagtcatgaaaactgagaagactgtcttcagcgtgaactaaagttcacaggcagatcactgatccagaacacttcaagaactcgtcaaacagctcgataagcctttttgactgtgtacatctgtaccgggaataacattcctaggctgaaatttccacaaagaatagaacctgtacccagttcttcaggctgatttccctgacctcttgggcatttgtatttgtagtaaagtattgcagagattcctaagtattttatagcagccatcaaaattggactttgtattgtttattcataaaagacacttggtaatagacttcagtgaactctgtatgaatgcagtagtgtgcgtgcaaaatccgcttcctgagcgtagggtgctgagctggcgctagggctcggttgtgaaatacagcgtagtcagcccttgcgctcagtgtagaaacccacgtctgtaaggtcggtcttcgtccatctgcttttttctgaaatacactaagagcagccacaaaactgtaacctcaaggaaaccataaagcttggagtgccttaatttttaaccagtttccaataaaacggtttactacctgaaaaaaaaaaaaaa

SEQ ID NO: 23563 - DNA, 328 bp, Homo sapiens
gaatgaaactatgtagttaaagaataaacagaatacgtgtccaatgtagctagtgtggagtataacaaaaatatcttctatcaataattccaaaatgtggatggacaagtagatttatgcagttatatggtacaaactaagaatatactaaggatgggccagtcatggtggttcatgcctgtaataccaaagactcaagaggccaaggtgggaggatagcttgaggccaggagtttgagaccagcttgggccaatatatcaagaccacaactctaccaaaaattttaaagctagctcggggtggaggcacgcacctgcagccctagct

SEQ ID NO: 23564 - DNA, 421 bp, Homo sapiens
ggtctattgcaagtcagcatttctcactggctatgatggagatggacttgggatcctaggaagaaggcccggaaacaacatttcttctccttttatgatttcagtgaagaatgcaaattgcacatcagattttgaggaatactttgccaaaagaaaactggaggaacgcgatggtcatgcagtcagcatcgaggagtaccttcagcgcagtgacacagccattatttacccagaagcccctgaggagctgtctcgccttggcacgccagaggccaatgggcaagaagaaaatggtgaggctgtaaatcatttttagccactgcactgacctctgcagctgttacaattacaaatgcactacatgcctgggtgtttaccttaaaatttgaagaacagctgcagaggcatggaatttcatgag

SEQ ID NO: 23565 - DNA, 510 bp, Homo sapiens
  misc_feature (1)...(510): n = a,t,c or g
ctgaataccgttatgacatgattacgaatttaatacgactcactatagggaatttggccctcgaggccaagaattcggcacgagcatcccttagcatttacctttaaaagtagtttaggttttaattgtctctttaagtcaactcctagaactgaacctaatacctcagatatgttaagactaatgcaaagttttaattatgaagtaaggaaactgatttttgtatgacttgatggtgggatttagaagctgttctgagcaatgagcttgatggaactttcacttttttccctctatgcacttttttttttgggatggggtcttgctctgtcactcaggtggagtgcagtggcacaatcagagctccatgcagccttgaactcctggcctcaagcgatcctcctgccttagcctcccaagtagctggaacgngcaggtgtgcgccactgtgcccagctaangntttacattttttgtaaaaatgaactcttgctttgttgcccaggcagg

SEQ ID NO: 23566 - DNA, 507 bp, Homo sapiens
  misc_feature (1)...(507): n = a,t,c or g
tgacttnatnccanagctatgacatgattacgaatttaatacgactcactatagggaatttggccctcgaggccaagaattcggcacgagaacactttgccatgatgcagcgggacagctgggaggacatcttcgagcttctcttctggggcagaacctctgctggtaccagacagccccagttcattagccgggactggcacggtgtgccagggcaagtggacgcagccatggctggccgcatctacatctcaggcatggcaccccgcccctccttggccaagaaacaaaggtttaggcatcgcaaccgcaaaggctaccgttcacaacgaggccacagccgtggccgcaaccagaactcccgccggccatcccgcgccacgtggctgtccttgttctccagtgaggagagcaacttgggagccaacaactatgatgactacaggatggactggcttgtgcctgcacctgtgaacccatccagagtgcttcttcttctctggagac

SEQ ID NO: 23567 - DNA, 545 bp, Homo sapiens
gctcggaaacaagctcacatcttcctgtgggaaaccttctagcaacaggatgagtctgcagtggactgcagttgccaccttcctctatgcggaggtctttgttgtgttgcttctctgcattcccttcatttctcctaaaagatggcagaagattttcaagtcccggctggtggagttgttagtgtcctatggcaacaccttctttgtggttctcattgtcatccttgtgctgttggtcatcgatgccgtgcgcgaaattcggaagtatgatgatgtgacggaaaaggtgaacctccagaacaatcccggggccatggagcacttccacatgaagcttttccgtgcccagaggaatctctacattgctggcttttccttgctgctgtccttcctgcttagacgcctggtgactctcatttcgcagcaggccacgctgctggcctccaatgaagcctttaaaaagcaggcggagagtgctagtgaggcggccaagaagtacatggaggagaatgaccagctcaagaagggagctgctgttgacggag

SEQ ID NO: 23568 - DNA, 464 bp, Homo sapiens
ggtcccttataacagaagacattatcgtgataacttcaaaggagaagaaaatgaactgctacttaaatctgagcaggaaaagacacttctggaattagtggaggcatggctggaaagaactccaggtttagagccacatggatttaacttctggggaaagcttgaaaaaaatatcaccagaggcctggaagaggaattcataaggattcaggctaaagaagagtctgaagaaaaagaggaacaggtggctgaatttcagaagcaaaaagaggtgctactgtccttatttgatgagaaacgtcatgaacatctccttagtaaaggtgaaagacggctgtcatacagagcacttcagggagcattgatgatatatttttacagggaagagcctaggttccaggtgccttttcagttgctgacttctcttatggacatagattcactgatgaccaaatggagatata

SEQ ID NO: 23569 - DNA, 449 bp, Homo sapiens
  misc_feature (1)...(449): n = a,t,c or g
gctgaagtggaagagctagatagtgcccctggaagtgtcaaacagaagggtcctaaaacaccagtacattcttctggggatatggtacaacccttgtcaccatctcaggggcagagcactcacgtgcatgatgcccaatgtgagaacacaccagagaaagaattgcctgtaagtcctggtcatcggaaaaccccattcacaaaagacaaacattcaagccgcttggaggctcatctcacaagagatgaacttagggcaaaagctctccatatcccattccctgtagaaaaaatcattaacctccctgttgttgacttcaacgaaatgatgtccaaagagcagttcaatgaagctcaacttgcattaattcgggatataccgtangaaggggtaagaataaaatggctgctcagaattgccaaaaagaaaactggaagattnntagaact

SEQ ID NO: 23570 - DNA, 474 bp, Homo sapiens
gagttaataatgttaatcatactagatactggctatgaggccctagtcgacaagaccacagcaataatgttgtagtcctccaccgtgaggtgcctgctgcttattattttccaggtttaagaacaggcaacactgggctgttaaacggacaagcagcagggaatacttatctcctttatcccttttatgttatataaatgaggttttatgtaacaactttcaatccttcaagggcctattttaacttacattgaaccatattaactattttaatgggatttatataatcctattttatcaagccaatttttgagtgccaaaaatttaattttaatttattatttattgtgacatggagtctatgttcaatacgagatctttaaggcactgagtacaacaactatgagcaattcaatcaagatataaaataaggcatagctatttttaaaaagctatttaactaccttttaaaac

SEQ ID NO: 23571 - DNA, 470 bp, Homo sapiens
  misc_feature (1)...(470): n = a,t,c or g
gggatttttaggatactgcattttgttttttttaagaaaatctgtaataaaattgtgtatcttgaaaaatgatatggtgctttttattttcatttttttagttgtttaaagtggagtctcactctgttgcccaggctggaatgcagtggcgcgatctcaagcgattctccaacctcagcctcctgagtagttgggattacaagtgtgcaccaccacactcggctaatttttgtatttttggtaaaaatggggttttaccgtgttggccaggctggtcttgaactcctgacctcaagtgatcctcctgcctcggcctcccaaagtgctgggattataggcataagccactgtgcctgtcctgataatggtgctttttttggattgatgatgtggttttcagtangaagggtttggattttttggttattaattatttagagataggctctttgctgggttgcccangatgt

SEQ ID NO: 23572 - DNA, 352 bp, Homo sapiens
ggtcattggaggtcaggcaaatcaaaacatagctggagatgggagacctgcacgggccacatgctgtggccccaagtgtgacaaggggttactcctactcggtcttggaggcagaggcagctgagataaggggccggggacaggaaccctcaggaggggcgttggagagagacggcagtccttgggcactgcaggcccgcacgccctccctggcgcctggtgcgctgagccctggagaacgccccctctgcaggctcccgacagcagaacatctctcaggaggaggggctccataagcaagtgaaggaggccatagtcttccggccaggaggaagctcagtgtgggggcccg

SEQ ID NO: 23573 - DNA, 478 bp, Homo sapiens
  misc_feature (1)...(478): n = a,t,c or g
gtgnnnntnnttgaaaccttgaaancnttatgactgattacgaatttaatacgactcactatagggaatttggccctcgaggccaagaattcggcacgagtactgggagtaccagttccagcaccagcccagtcaggaggagtgtgaaggcagctccctgtcggctgtgtttgaacactttgccatgatgcagcgggacagctgggaggacatcttcgagcttctcttctggggcagaacctctgctggtaccagacagccccagttcattagccgggactggcacggtgtgccagggcaagtggacgcagccatggctggccgcatctacatctcaggcatggcaccccgcccctccttggccaagaaacaaaggtttaggcatcgcaaccgcaaaggctaccgttcacaacgaggccacagccgtggccgcaaccagaactcccgccggccatcccgcgccatgtggctgtccttg

SEQ ID NO: 23574 - DNA, 353 bp, Homo sapiens
gagtaagtgaagttatgtgtatgaggaatatgacctttaacataatcattataaagcatttaataacctcccacatatgcaataacacaaccccagtcctgtatgattgtgccaagagccagaatcacatgtataaagtagttattagcacacagttccctagcattaagttgaaatttgaagaaatgttctaaatcatgttatgcattttaatatttttagcattaaatttgataattacataattttctgatgttagacccaagcatgcctcctgactacagcacctgttcttactctgaatttatgcttctctttggcaaggaatgcagcccctcaccctccatttgggg

SEQ ID NO: 23575 - DNA, 346 bp, Homo sapiens
gtttcaaatccatcagtcagtacctgcatgcgggtccgcctgtgtactttgtcctggaggaagggcacgactacacttcttccaaggggcagaacatggtgtgcggcggcatgggctgcaacaatgattccctggtgcagcagatatttaacgcggcgcagctggacaattatacccgaataggcttcgccccctcgtcctggatcgacgattatttcgactgggtgaagccacagtcgtcttgctgtcgagtggacaatatcactgaccagttctgcaatgcttcagtggttgaccctgcctgcgttcgctgcaggcctctgactccggaaggcaaacagaggcc

SEQ ID NO: 23576 - DNA, 417 bp, Homo sapiens
ggctgcccggttcctagtggagaagattcttgtaaaccaccaaagctttcctaatgaagaaaacgatgtggacaaaattaagctagatcaagagaccttgagagcagagaacaaatcccagtgttgctgatatatggcttctgcttctcttgtgtgtgcctcagctctgaagaagttcctgagaatgggttacagatgtcatgttagctgggagtcttcccacatgtggcacttcaaaaggcagcaccactgggcgcctgcacttatttgaaaatggaactttgggagaagtatccctgctagtggctctgtaacttaacagatgacaattaggcttttgtcattgttgccatcatatggaagataatgtttacatccttttaaacatttttatatgacaattcctcaggatttggg

SEQ ID NO: 23577 - DNA, 367 bp, Homo sapiens
gcgcagcccggcctcgaagaacttctgcttgggtggctgaactctgatcttgacctagagtcatggccatggcaaccaaaggaggtactgtcaaagctgcttcaggattcaatgccatggaagatgcccagaccctgaggaaggccatgaaagggctcggcaccgatgaagacgccattattagcgtccttgcctaccgcaacaccgcccagcgccaggagatcaggacagcctacaagagcaccatcggcagggacttgatagacgacctgaagtcagaactgagtggcaacttcgagcaggtgattgtggggatgatgatgcccacggtgctgtatgacgtgcaagagctgcgaagggccatgaa

SEQ ID NO: 23578 - DNA, 512 bp, Homo sapiens
gcagacagctgcctcagcccctgggatgtgtgatttcagctcctgtcacctcatgcaagggcgtggagaccagtagaggtgtggaggccaggcagagagaggagcccgctctgcggggggcccagctcatgggcactgccccttcagctagcctgcctccgtcccctgagtccaacagtgggagccctagctgggaagttctgatccccaaagccacagcaggggactgatggctatagcagaatgaggtcgggtcaggaccctcaaacaccatctgggaacaccaagcaccctgaatcgagactgcaggagccctgcggggtgagactgtgtcagagatacactgctggccacaagtgtcccctctcagtcccaccttttcgggctgtcccatgtctatctcaagggcccgttacctctctgcagcagtcccccatcccagccacaccaaggtctgtccggcaaacctcttcccaagggaaaggagaaaagagaaaacaaggttgggcccg

SEQ ID NO: 23579 - DNA, 364 bp, Homo sapiens
cggacgcgtgggctgaaaaccacgtgtaagaagtgatgcttttgccagtggatgatctggaatgcgaccggagcacttgctctgaggaatcccagggtgactctgtcggggaagaatccggtcacagcctcccctcagagacaggcctcagttcgagggcagcccattatctgtcgcagacatctgccatgtccctgagactgcgggaggcaggggatgcatgggtgtccccatctgtccctggtgagaagcaaggctagctctgccttccacatgcttctcaggatgccaagaggcctaggaacccagaaacccccttggaggagctgtgtatgcgggggtgccaggaagggcatagctcctg

SEQ ID NO: 23580 - DNA, 508 bp, Homo sapiens
ataacatagtgtcttccatagagttgttgtgagaatcaaaggagggtagtgggcatgggaacacttggaaaactagaaattgtcatacaaatgttagttaagatggacttactttcaggatcttactgcttacacattaaaaaaaaatctgattttccccttcttccttccttcattagaatgaagcccaaactgccaaggagtttattaaaatcatagagaatgcagaaaatgagtatcaggggactcaagcatatccattgactatagcattacttttctgttcacaaccagccccatttctgttcaagcaactcatcttcaattatctattgcagacagcaattagtgaaaactatcaaacaatgtcagataccacattcaaggccttgcgccggcagcttccagttacccgcaccaaaatcgactggaacaagatactcagctacaagattggcaaagaaatgcagaatgcttaaaggctgaatgtaggattcttcagtatgtg

SEQ ID NO: 23581 - DNA, 791 bp, Homo sapiens
tgacatgattacgaatttaatacgactcactatagggaatttggccctcgaggccaagaattcggcacgaggccttggccctccctgcccatagctacagtggccgggagcgggtctacttcttcaaggggaaacagtactgggagtaccagttccagcaccagcccagtcaggaggagtgtgaaggcagctccctgtcggctgtgtttgaacactttgccatgatgcagcgggacagctgggaggacatcttcgagcttctcttctggggcagaacctctgctggtaccagacagccccagttcattagccgggactggcacggtgtgccagggcaagtggacgcagcgccaagaaacaaaggtttaggcatcgcaaccgcaaaggctaccgttcacaacgaggccacagcccgtggccgcaaccagaactcccgccggccatcccgcgccacgtggctgtccttgttctccagtgaggagagcaacttgggagccaacaactatgatgactacaggatggactgggcttgtgcctgccacctgtgaacccatccagagtgtcttcttcttctctggagacaagtactaccgagtcaatcttcgcacacggcgagtggacactgtggaccctccctacccacgctccatcgctcagtactggctgggctgcccagctcctggccatctgtaggagtcagagcccacatggccgggccctctgtagctccctcctcccatctccttcccccagcccaataaaggtcccttagccccgaaaaaaaaaaaaaa

SEQ ID NO: 23582 - DNA, 798 bp, Homo sapiens
tatgactgattacgaatttaatacgactcactatagggaatttggccctcgaggccaagaattcggcacgagtggagcagttctgtggcataaataaaggtgtcataaagacagggcgggactcatgcttacaaggggcacgagcgtctcggagctgccagaatgacttccgctcagtgcccggcactagcgtgtgtcatgtccccgctgcgtttctggggcccatggcccctccttatgtggcaactattgtggctactagtcaaggaggctcagcctctggagtgggtcaaggacccgctccagctgacctctaaccccctggggccgcctgagccctggtcttcccactcctcccatttcccacgggaatctccccatgcgcctactctcccagcagacccgtgggactttgatcacctggggccctctgcttcctcagagatgccagccccaccccaggaatcgactgaaaatttggttccattcctggacacctgggattcagctggagagctgcccctggagccagagcagttcttggcttcacagcaggatttaaaggacaagctgagtccacaggaaaggctccctgtttcgcccaagaagctgaagaaagatccagctcagcgttggagccttgctgagattattggaattatacaccaattatccacacctcagagtcagaaacagactttgcagaatgaatattccagctcgtgccgaattcttggcctcgagggccaaattccctatagtgagtcgtattaaattcgtaatcaggtcatcaatttg

SEQ ID NO: 23583 - DNA, 438 bp, Homo sapiens
aatctcttctatgacacgattacgaatttaatacgactcactatagggaatttggccctcgaggccaagaattcggcacgagggatcctggaatggggtatctgtaaccaagacagattaaaagcagcagcatatgggtttccagccttcccctcttctgtttctctgtggtcctcaactaaagaatgaatcatgactattctcccatactgttttagctactcagtgacactgcactgaaacttgatcctttttacactgtggacatttctttaatattttttttcctaagtagagacagggtctcactacattgctcaggctagtcttgaactccgggtctccagcaatcctcctctcacctcagcctcctcccaaagtgctgggattacaggctaacaccccagcccacccccacccccgctttttttttttttt

SEQ ID NO: 23584 - DNA, 415 bp, Homo sapiens
gtttttttcggcggggggagggtcttctagtcagacctaagaatgaggcggggccttctgcatcaaacttggatctccttgggtgtgaggccacgttccctttggctccacgcagtgcctagccctaggatccccagtggtatgtgttagatatggcctagataaatgcagcagtgatgagtgttgggaagagctaaatggcttcacaatagagccctcctctctcaggggcctgggactttctgaacagccaccaggcccaccccatttctgtgatctgcttcctaggggaagggagttctgagggatgggaggctcctgacctgggcttgggtgtttggtgcctcttttgccttttggggaggagacacaggcctggtgggaggaggaggaggagaaagggctgtctgaagca

SEQ ID NO: 23585 - DNA, 402 bp, Homo sapiens
ggattttcataccagtaatggttttttaaaatccattattgtggttcccttctgaaaatcctgatgcattattatactgatggataggtggcttactcccgtaatcttagcacttcaggtgtcccaaagcaggagaatcgttgagcccaggagtttgagaccagcctagccaacatggtgtgaccccatctctacaaaaaaaagaaaaaaaaaatcaaaaaattacccaggtatggtgtcatgtgcctgtagttccagctacatgggaggctgaggtgggaggatcactcacacccagaaggtcaaggctgcaataaattgtgttcatgcactgcactgcagcctgggcaacagagcaagaccctgtctgaaaagtaataataatatataataataacttta

SEQ ID NO: 23586 - DNA, 290 bp, Homo sapiens
gttcagactgggaaatgggaacctgatccaacaggcaccaagagctgctttgaaacaaaagaagaagttcttcagtactgtcaggagatgtatccagagctacagatcacaaatgtgatggaggcaaaccagcgggttagtattgacaactggtgccggagggacaaaaagcaatgcaagagtcgctttgttacacctttcaagtgtctcgtgggtgaatttgtaagtgatgtcctgctagttccagaaaagtgccagtttttccacaaagagcggatggaggtgtgtga

SEQ ID NO: 23587 - DNA, 506 bp, Homo sapiens
  misc_feature (1)...(506): n = a,t,c or g
ggttccttgtacgcagaggcggtagtgacacaggcacaactgacagtggcagaagctcagctgacaaggactggggacggcggtgtccttgtcttgcctttgtcgcccccgcccctctcttccctggctggacttgcggagtccccgccgaagaacccgaggagccatatattgaagaccatgtctggaagcttctactttgtaattgttggtcaccatgataatccagtttttgaaatggagtttttgccagctgggaaggcagaatccaaagacgaccatcgtcatctgaaccagttcatagctcatgctgctctcgacctcgtagatgagaacatgtggcttgtcgaacaacatgtacttgaaaactgtggacaagttcaacgagtggtttgtgtcagcatttgtcaccgcggggcatatgaggnttattatgcttcatgacntaanacnngaanatggaataangacttnttantgggggtangantaaanntnaaaatttt

SEQ ID NO: 23588 - DNA, 450 bp, Homo sapiens
cgctatgacatgattacgaatttaatacgactcactatagggaatttggccctcgaggccaagaattcggcacgagcaagtaggtggtaactataagaatcctaggatcctcggtgtttctgaagatgtatgtgataaataacagcagcactaacatttagtgagtgcttactgaatgcaagacacactgctaaggtctctgtcactataataaccctgggagggagggaggtatttttttcacttaaaattagagaactggccaggtgtggtggttcacacctgtaatcctagcagtttgggaggctgaggcaaacagattgcctgagctcagtagttcaagaccagcctgggcaacatggcaaaaccccatctctactaaaaatgcaaaaaattagttgggcgtggcagcgcacccctgtagtcccagctacttaggaggctgaggcc

SEQ ID NO: 23589 - DNA, 489 bp, Homo sapiens
  misc_feature (1)...(489): n = a,t,c or g
ggttattttatgttttctatcgagtgcgatcatgaatatatagcagtagatgctcagtaaatattagtgattttaaaggatgaattagcaatggctcacgcctgtaatctcagcaattcagaaggctgaggcgggaggattgcctgatgccaggagtctgagatcactgtggggaacacagcgagaccctgtttctaaaaaaagtttaaaaattagccaggtgtggtggcacacaccagtagtccctgttactctggaggctgaggcgagaagattgcttgagcctaggaattggaggctgcagtgagccgtgattatgccactgcactctactccagcctgggtgactgacagatactggtgtctcaagaaaaaaagaaaggatggatgaaatgtttataacctgctttctcttttctggctaccanccttanntgcttaagcccnaaagggctttcanaaggganntntttcccnnttgaaaagggc

SEQ ID NO: 23590 - DNA, 334 bp, Homo sapiens
gataaaatgttaagcatgctcaacgaacaccaactattcatatgaggccaatagctgataataatcaattatcattaatacctgaatccaggttatttctctttaattcatccagcaaatattaattgggcatctgcttgatgacaggatttgtgttagaagttggggatgcacaaatgaacatggtaaactgattcctatctttgtgcatatttgtaaataggtaattatggtatggcataataaatgttaccatgggaagagttcagagtgcactgagagcaaccggatggaaaatcaaacatggtccagggagtcaggaaggcttcttgga

SEQ ID NO: 23591 - DNA, 382 bp, Homo sapiens
gaaatacagacacttgccatataccagctgccccaacacatgcatagcctcttccctccctatcaacatctcccacaagaacatgtaaagcaaacatctcccacatttgttacaactgatgtatatatacggacacatctttatcacccaaagtccataatttacttttggcttcagtcttgtacattctgtggctttggacagagtctcactctgtcacccaggctggagcacagtggcacaatcttgactcactgcaacttccacctcctgggttcaagccattctcctgcctcagcctcctgagtaactggaattacaggtgtgcgccaccatgcccggctaatttttgtatttttagtagagacggggttttgccagg

SEQ ID NO: 23592 - DNA, 411 bp, Homo sapiens
ggcctggaagccggcgggtgccgctgtgtaggaaagaagctaaagcacttccagagcctgtccggagctcagaggttcggaagacttatcgaccatggagcgcgcgtcctgcttgttgctgctgctgctgccgctggtgcacgtctctgcgaccacgccagaaccttgtgagctggacgatgaagatttccgctgcgtctgcaacttctccgaacctcagcccgactggtccgaagccttccagtgtgtgtctgcagtagaggtggagatccatgccggccggtctcaacctatagccgtttctaaagcgcgtcgatgcggacgccgacccgcggcagtatgctgacacggtcaaggctctccgcgtgcggcggctcacagtgggagcccgcacaggttcctgctcagcta

SEQ ID NO: 23593 - DNA, 337 bp, Homo sapiens
ggaattcaccagatctcaagagagaaggagaaaaccccaagactcacggacatgaaaaacttatgattggtaagatgaataattattttggactgtaccaccccccttccacacaccaaaatgataccactgtgagagaatttccttttacctgcggttactgaaatgggaagagggaatttcaagtggacatatattctatgcataatgatatgcatatctggtcaagaaaagcaaaactacgtaacacacacacacacacacacacacacacacatattctatgttccaaagaagctgagattacaggagtgggccaccacacccagctactttt

SEQ ID NO: 23594 - DNA, 349 bp, Homo sapiens
ggcttaaagcatttataatggataaaactgccaatactgagtgcctgacataatatttgaaaggtggcaggcattcaaccatggtcactgaatgagagatgtagggaagatgatggcagggaggtttttagatatcaacaccctgatagttctcattttaaccacgcccggccttatttttatttttgagacagtctcactctgccgcccaggctggagtgcagtggtgcgatctcggcttaccgcaatctctgcctcccaggttcaagcgattctcatgcctccgtctcccaagtagctgggattacaggcacctgccaccatgcccggctaatttaacgcccagcta

SEQ ID NO: 23595 - DNA, 275 bp, Homo sapiens
gtctgccaagtgggtggtatagaggctcttgtgcgtactgtccttcgggctggtgacagggaagacatcactgagcctgccatctgtgctcttcgtcatctgaccagccgacaccaagaagcagagatggcccagaatgcagttcgccttcactatggactaccagttgtggttaagctcttacacccaccatcccactggcctctgataaaggctactgttggattgattcgaaatcttgccctttgtcccgcaaatcatgcacctttgcgtga

SEQ ID NO: 23596 - DNA, 455 bp, Homo sapiens
tgccttacatgacttgaaagatataaacagatcttctatcagtagcagtattgttacttctttccaggatgcaaggtctattatcccaacagaagagaaaatatttttatatttaaggattatgctgcactgtactacaaaattgtagtacttttttttgttttcttttttaaagaaatggaaaatgtttactattacagggacctcaacactgccctcccatacaggctggataaaactgtttttaagtcagtgattttagactgacctccatttaaattatgtttatatatgaactttactctgacctgtgatcatgtttcaggaaggaatgaaagagagttctttcttaataaagaaaaacactcaaggactttgttcatttccaaagctacttgtttacattgtacactgcgaccaccttgccgcttttcatcacaagcttgaatatttaa

SEQ ID NO: 23597 - DNA, 506 bp, Homo sapiens
ggacagaaccgagaagggggtgacagtcctccatccacgtggcctctctctctctcctcaggaccctcagccctggcctttttttttaaggtcccccgaccaatccccagcctaggacgccaacttctcccaccccttggcccctcacatcctctccaggaagggagtgaggggctgtgacatttttccggagaagatttcagagctgaggctttggtacccccaaacccccaatatttttggactggcagactcaaggggctggaatctcatgattccatgcccgagtccgcccatccctgaccatggttttggctctcccaccccgccgttccctgcgcttcatctcatgaggatttctttatgaggcaaatttatattttttaatatcggggggtggaccacgccgccctccatccgtgctgcatgaaaaacattccacgtgccccttgtcgcgcgtctcccatcctgatcccagacccattccttagctatttatccctttc

SEQ ID NO: 23598 - DNA, 496 bp, Homo sapiens
  misc_feature (1)...(496): n = a,t,c or g
gcattttaaaagggaacattatctcactgcaataaaatggaaaaccagcaacacttgccataaatagaagatagccataaaaataaataatgtaacttctaggataaaaagccatgtatctggatccacttgaaatcattttgttatcgccattcactcacattttaagaaacatggaactaagggacttaaataacatgggctccggccctaccctctcccagtggttaccatttctgtcaatctcatgtgacttccagccagtatccccttgccctgggtggatctcaagggcttaaggtgggggctccttggcccttgggaaattcagagcagctgcgtcatttcttctgtgttctttaatcctcggggcccaagtggccttttgtgggtaggagcagcagactcaggtttgaggctggaaaaagaatcatcccttcctttcgagttgagantggttttcattttataagtagcttttattttatttgaaatt

SEQ ID NO: 23599 - DNA, 489 bp, Homo sapiens
gagagcatctggcacgttgtcggccctcaataagagttagctttgagtttgtttcctgtctgtcttagtgatcaaagcctgagcgaatgcacttgtgccttggtgggggcagatgctgagcattgtagaggctattgtaacccccaccctctcctaatctggcctctccgagagactgcccgttcttctcatttgagaacagggattaacagcagacgtgactttggtcctggacactgaacttgagaatccgattgttggagaagccctcaaccatgcagcatctgtttggtggcagcaaaaacacgctgtagtcctccaaaggtttgctttaccctctattcgtctctgttcttatatatttgaccttctttctttgaaaggctgggcaatgaaacttggcacgttcttgaatttgctaagggtttaaaaaaagaaatctacttctcaaatagcaactttctagagtgaggaaggagggaaagccat

SEQ ID NO: 23600 - DNA, 359 bp, Homo sapiens
gcatgctcactgtacttaatgtcactgaacagtacatttaaaatgatttaagatacacgaggtcaggagatcgagaccatcctggctaacatggtgaaactccgtctctactaaaaatacgaaaaattagccgggcgtggtggtggacgcctgtagtcccagctactcggaaggctgaggcaggagaatggcgtgaacccgggaggtggagcttgcagtgagcagagatcgtgccactgcactccagcctgggcgacagagcgagactccgtctcaaaaaaggaaaaaaaaaatgatttaagatagtaaattttatttatttttaccgcaatttttaaaaaggaaaagatttttaaaat

SEQ ID NO: 23601 - DNA, 404 bp, Homo sapiens
gggaggctggagggagctgagcccccggggagggggcccgattccgcctcgccgcgcctctggctgctgggccgtgggtttttctcttctcctgggagtaaggaggacgacggcccctaacccctgaattagccttctatttccattagtgacttagaagctacccggcgcctcatctgggctcacctgagctgaggatcaggaaggggagggggcacagtcattgcctcgcggacgcggcgggaccccagcggacggctttgtgcggactttcggcaccgttatgcccccctagcccgacaccacctggggctggcgcgccacgttactgttcagggtcagacgcaccgccctgcctgctccggggagccggacctccgatcccggggatgggggaccccgag

SEQ ID NO: 23602 - DNA, 467 bp, Homo sapiens
  misc_feature (1)...(467): n = a,t,c or g
tnnnttggnnncnttggnnnccnaacagctatgacatgattacgaatttaatacgactcactatagggaatttggccctcgaggccaagaattcggcacgaggccgtgtgcgacatcccgccccgcggcctgaagatggcctccaccttcatcggcaacagcacggccatccaggagctgttcaagcgcatctccgagcagttctcagccatgttccggcgcaaggccttcctgcactggttcacgggtgagggcatggatgaaatggagttcaccgaggcggagagcaacatgaacgacctggtatccgagtaccagcagtaccaggatgccaccgccaatgacggggaggaagcttttgaggatgangaananganatnnnnggntnnnnnnantnnanccnnccnanntnnnancctcnnnnncannnnccttttgaccctgnngcctctacctatggncctga

SEQ ID NO: 23603 - DNA, 444 bp, Homo sapiens
  misc_feature (1)...(444): n = a,t,c or g
tttatgacntgattacgaatttaatacgactcactatagggaatttggccctcgaggccaagaattcggcacgaggagatactacggtggtggctatggctctacccaggccaccttcatggtgttccaagccttggctcaataccaaaaggacgcccctgaccaccaggaactgaaccttgatgtgtccctccaactgcccagccgcagctccaagatcacccaccgtatccactgggaatctgccagcctcctgcgatcagaagagaccaaggaaaatgagggtttcacagtcacagctgaaggaaaaggccaaggcaccttgtcggtggtgacaatgtaccatgctaaggccaaagatcaactcacctgtaataaattcgacctcaaggtcaccataaaaccagcaccggaaacagaaaagaagcctnangatgccagaac

SEQ ID NO: 23604 - DNA, 650 bp, Homo sapiens
  misc_feature (1)...(650): n = a,t,c or g
gctcgaaggctcacgcctataatcccagcacttcaggaggccaaggcgggcatatcacctgaggtcaggagtttgagaccagcctggccaacatggtgaaaccccgtttctactgaaaatgcaaaaatcagccaggcatgttggtgggcacctgcaggcccagctagtctggaggctgaggcaagagaatcgcttgaacctaggaggtggaggttgcagtgagctgagatcgcaccactgcactccagccttggtgacagagcaagactccatctctaaaaaaataaataaataaatgaggagactggactagatggtttgtaagggcagaggcagcatcgtggtgtggttaagggcgccagttaaggccagctaggtttgagtcttggccctgccacttgctgtgtgtatggccatggggcaagtgatttgactactctgtgcctcagtttccttgtctgtaaaaggaccataatacagaatttacctcatggagaatttaccttcatttgtagaattaaatgtaacatgtttttaaaatctctgaatagttaaaaaatatgtggccaggcatcggggttcacgcctataatcccagcactttgggaggccaaggcnnnnnnatcacttgaggtcaggagttcaagacc

SEQ ID NO: 23605 - DNA, 394 bp, Homo sapiens
  misc_feature (1)...(394): n = a,t,c or g
ggtaccatgactccaatgagtgcccagggcgtccaggcaggcgtccgttcaacagccatcctacctgagcagcagcagcagcagcaacagcagcaacagcaacagcagcagcagcagcaacagcaacagcagcagcagcagcagcagtaccacatccggcagcagcagcagcagcagatcctgcggcagcagcagcatcagcaacagcagcagcagcagcagcagcaacagcaacagcagcagnagcaacagcaacaacagcaacaccagcagcaacagcancaacaggcggctcctccccaaccccagccccagtcccagccccagttccagcgccaggggctttagcagacccagcagcanaacagacagcanctttggccgnaacttcaac

SEQ ID NO: 23606 - DNA, 358 bp, Homo sapiens
gctggcacttctcgagggaagtcatcgcagctgccatggagccagcatttgtcagggacctggcacgcaggccaccggctctgggagagggctgaggagccgtggggctcacgtttcagggattagcttgtgtaacttgacttgttcccccaaattctacaagtacagagaatatgcagaaatctgtgagagaaacaaccttctgcagctcgttgttgtggggattatattagtaagatgcctagaaaatacgattcagaaggaatgtgggtgcgtgtgactttgtggtgggtgggctccactcaccaccctccctccgcacctgtccgaggcatttgaaccagagcaactccatttc

SEQ ID NO: 23607 - DNA, 465 bp, Homo sapiens
  misc_feature (1)...(465): n = a,t,c or g
gttgnnnnnccnttgancnttttgataccgtttgacatgattacgaatttaatacgactcactatagggaatttggccctcgaggccaagaattcggcacgagcttccttccaaaatgtcaccattcctgtatctggttctcttggtacttgggcttcatgctacaatccactgtgcatcacctgaaggcaaagtaacagcctgccattcatcccaaccaaatgccactctctacaagatgtcatccattaatgctgactttgcattcaatctgtaccggaggttcactgtggagaccccagataagaacatcttcttttcccctgtgagcatttctgcagctttggttatgctttcctttggggcctgctgcagcacccaaactgagattgtggagaccttggggttcaacctcacagacactccaatggtagagatccagcatggcttccagcatctgatctg

SEQ ID NO: 23608 - DNA, 399 bp, Homo sapiens
gggtggattcttgggcatttgctattaacttccttccaaaatgtcaccattcctgtatctggttctcttggtacttgggcttcatgctacaatccactgtgcatcacctgaaggcaaagtaacagcctgccattcatcccaaccaaatgccactctctacaagatgtcatccattaatgctgactttgcattcaatctgtaccggaggttcactgtggagaccccagataagaacatcttcttttcccctgtgagcatttctgcagctttggttatgctttcctttggggcctgctgcagcacccaaactgagattgtggagaccttggggttcaacctcacagacactccaatggtagagatccagcatggcttccagcatctgatctgttcactgaa

SEQ ID NO: 23609 - DNA, 438 bp, Homo sapiens
  misc_feature (1)...(438): n = a,t,c or g
aacngctattacatgattacgaatttaatacgactcactatagggaatttggccctcgaggccaagaattcggcacgagctggaggccacatcctatgccctcttggccctactgcagctaaaagactttgactttgtgcctcccgtcgtgcgttggctcaatgaacagagatactacggtggtggctatggctctacccaggccaccttcatggtgttccaagccttggctcaataccaaaaggacgcccctgaccaccaggaactgaaccttgatgtgtccctccaactgcccagccgcagctccaagatcacccaccgtatccactgggaatctgccagcctcctgcgatcagaagagaccaaggaaaatgagggtttcacagtcacagctgaaggaaaaggccaaggcaccttgtcggtggtgacaatgtacca

SEQ ID NO: 23610 - DNA, 405 bp, Homo sapiens
ttcttatgaacagatatttttaacttaatggcacaaagtcttagaatattattatgtgccccgtgttccctgttcttcgttgctgcattttcttcacttgcaggcaaacttggctctcaataaacttttaccacaaattgaaataaatatatttttttcaactgccaatcaaggctaggaggctcgaccacctcaacattggagacatcacttgccaatgtacataccttgttatatgcagacatgtatttcttacgtacactgtacttctgtgtgcaattgtaaacagaaattgcaatatggatgtttctttgtattataaaatttttccgctcttaattaaaaattactgtttaattgacatactcaggataacagagaatggtggtattcagtggtccaggg

SEQ ID NO: 23611 - DNA, 413 bp, Homo sapiens
gacaaatgtgaaggtagaggaggtaagaaaggagcagtagagtgctgtcccaattgccgaggtactggaatgcaaataagaattcatcagataggacctggaatggttcagcaaattcagtctgtgtgcatggattgctcagggccatggggagcggatcagtcctaaagatagatgtaaaagctgcaacggaaggaagatagttcgagagaagaaaattttagaagttcatattgacaaaggcatgaaagatggccagaagataacattccatggtgaaggagaccaagaaccaggactggagccaggcgatattatcattgtgttagatcagaaggaccatgctggttttactcgacgaggagaagaccttttcatgtgtatggactacagcttcgttgaaacactgtgtg

SEQ ID NO: 23612 - DNA, 346 bp, Homo sapiens
  misc_feature (1)...(346): n = a,t,c or g
cttcgggtagagggcacttactgtactttgagactatatgaatagtctcatgtactttcattcactggttttagcatccactgatgaaggattcctacctaaaacagttagtacgcaaagtagctgggattacaggcataagccactgtgcccggccatggattccttttttttttccnttttaaananctaaaataacttacctaagccctaagntnaaanngaannctangntnggnntgnnggatcncccgangncnngagttcnagaccatcctggnnaacanggnnaaacccnatcttntantaaanatacagncnntatgccagactggantggaaagcc

SEQ ID NO: 23613 - DNA, 330 bp, Homo sapiens
gtgtgtggagctttgggattgtgatgtgggaggtgctgagctttggggacaagccttatggggagatgagcaatcaggaggttatgaagagcattgaggatgggtaccggttgccccctcctgtggactgccctgcccctctgtatgagctcatgaagaactgctgggcatatgaccgtgcccgccggccacacttccagaagcttcaggcacatctggagcaactgcttgccaacccccactccctgcggaccattgccaactttgaccccagacaccgaacttcagtgctggctgctgatgctcagaggccaaggccaaccagatcag

SEQ ID NO: 23614 - DNA, 354 bp, Homo sapiens
  misc_feature (1)...(354): n = a,t,c or g
gtgctaacccattttgagagatgaactgtttgaatatcaaggtgtcatgtaggcaagaatattgtataaatataagcttgtttagaattctgtgtcattaattgcatttactctatcagttaattagagattcttttttgttggctttttttgagacagtgtcacttcgtcacctaggttggagtgcaggggtgccatcacagctcactatagccccgacctcctgggcttaagaaatcctctcaccttatcccccaagaggctgggactaagggtgcacaccaccatgcctgggtgatnntctgtttttgttttttttttaaatagggacgaggttttgccatgttgcccagg

SEQ ID NO: 23615 - DNA, 1248 bp, Homo sapiens
gaagcccgacggggtcttccaggaggatgcgcccgtgatacaccaagaaatgattggtggattacggaacaacaacgagaaagacatggccctcacggcctttgttctcatctcgctgcaggaggctaaagatatttgcgaggagcaggtcaacagcctgccaggcagcatcactaaagcaggagacttccttgaagccaactacatgaacctacagagatcctacactgtggccattgctggctatgctctggcccagatgggcaggctgaaggggcctcttcttaacaaatttctgaccacagccaaagataagaaccgctgggaggaccctggtaagcagctctacaacgtggaggccacatcctatgccctcttggccctactgcagctaaaagactttgactttgtgcctcccgtcgtgcgttggctcaatgaacagagatactacggtggtggctatggctctacccaggccaccttcatggtgttccaagccttggctcaataccaaaaggacgcccctgaccaccaggaactgaaccttgatgtgtccctccaactgcccagccgcagctccaagatcacccaccgtatccactgggaatctgccagcctcctgcgatcagaagagaccaaggaaaatgagggtttcacagtcacagctgaaggaaaaggccaaggcaccttgtcggtggtgacaatgtaccatgctaaggccaaagatcaactcacctgtaataaattcgacctcaaggtcaccataaaaccagcaccggaaacagaaaagaggcctcaggatgccaagaacactatgatccttgagatctgtaccaggtaccggggagaccaggatgccactatgtctatattggacatatccatgatgactggctttgctccagacacagatgacctgaagcagctggccaatggtgttgacagatacatctccaagtatgagctggacaaagctttctccgataggaacaccctcatcatctacctggacaaggtctcacactctgaggatgactgtctagctttcaaagttcaccaatactttaatgtagagcttatccagcctggagcagtcaaggtctacgcctattacaacctggaggaaagctgtacccggttctaccatccggaaaaggaggatggaaagctgaacaagctctgccgtgatgaactgtgccgctgtgctgaggagaattgcttcataccaaagtcggatgacaaggtcac

SEQ ID NO: 23616 - DNA, 422 bp, Homo sapiens
gcccgccgaaagtctcttcaaggagtcctattaccagctcatgaagacagccctcaaggaagatggtgtcctctgctgccagggcgagtgccagtggctgcacctggacctcatcaaggagatgcggcagttctgccagtccctgttccccgtggtggcctatgcctactgcaccatccccacctaccccagcggccagatcggcttcatgctgtgcagcaagaacccgagcacgaacttccaggagccggtgcagccgctgacacagcagcaggtggcgcagatgcagctgaagtactacaactccgacgtgcaccgcgccgcctttgtgctgccgagtttgccgcaaggccctgaatgatgtgagctgagcccaggcgccaccactgatgccacccaggacctcggaccttggacctgcg

SEQ ID NO: 23617 - DNA, 410 bp, Homo sapiens
gctgagttcatgggctgtacctaaacaggtgttgagcccgattctgtggcacatgtggtttgctgccccctgggcattggtcagggggcctgggttctgccttctcgattgctatccgcgtgggggatctgggggagggatcactgttcttcttgcttttggcctccttggggaggatgggagggtagcccaggggtgctcacccaggccccgtgtcagtcttctatgaaacttttaaagaatagtgatgactgactgtctgtctgtatggtactttccttaaacctaaaactggtcccaaataaagtctcttaatttgaaagatgctgaagcccgggccataccccacactgattctgtgtctggggatggggcgtggggcctgggcctcactcaatgttttctctcaa

SEQ ID NO: 23618 - DNA, 434 bp, Homo sapiens
gctttttacaaatgacagtcttagcatgctgcctgctagcgagcgactcagcaggggacctggggaagtaaaagaaaacataactggactcacttgatttctgggggatttgacctgactctttaaaaagcccatgttcttgagagagagagtcctggggatttacacaaatatgcattttgttcatcatcctgcacagttcttctcaaaactcatgtctgattttattaggtaaagtaaagtatgtgtaatggagccatagggtcacaataagaagatcccttttaacatacagccttcttcctgaaacccatttgaaagaaaacagctgccctgcaattggcatttgtgtaactatattggcaataatcattgttgacactttgataatgggctacaaaaagccgccttgtcgattctcaggcactgtgaat

SEQ ID NO: 23619 - DNA, 394 bp, Homo sapiens
gcttagcaccctggtcagcaagaatgcctttgtgtgcatctacctcatcagctgcttcacccagctcatcgacctgtccacgacgctctcagatgtggctggctacacgcacagaattgggcagcttcgggagacgcttctggacatgtccctgaagtcacaggactgcgagatcctgggcgagagcgagtggggcttggacacacccccagggtggccagcggcagagccagcagacacagcatttctccttgagcgggtctccatctctgccccctcctctgacaaacccctaatcaaggatctgagcctaaagatctccgagggacagagcctgctcatcacaggcaacacgggcactggcaagacctccttgctccgggttctgggtggc

SEQ ID NO: 23620 - DNA, 463 bp, Homo sapiens
  misc_feature (1)...(463): n = a,t,c or g
ttganacccttntgacatgattacgaatttaatacgactcactatagggaatttggccctcgaggccaagaattcggcacgaggacccgctatggggcctccctccggaaaatggtgaagaaaattgaaatcagccagcacgccaagtacacttgctctttctgtggcaaaaccaagatgaagagacgagctgtggggatctggcactgtggttcctgcatgaagacagtggctggcggtgcctggacgtacaagtgagtctagttccttgtggtatttggaagtgtgtggaccacataggcccaaattccaggttgctgctggatgggctagttttaacactttctcaggactgagagaataaggatgcctttgtattttcaggattcttccgtggtggtttattttcagttattgaaagagtaaacacaaaactaccaaaatagaagtcggaaatctaatt

SEQ ID NO: 23621 - DNA, 425 bp, Homo sapiens
ggagctttagaaataaaatctgggctgggcactgtggcttatgcctgtaatcccagcactttgggaagctgaggtgggaggatcacttaaggccgggagtttgagaccagcctgggcaacaaagcgagacacctgtctcaaaaataataaaataataaataaaagtaaatacattttttaaaggaaataaaatttgactagggatgcaaggaataactaggagacaaaaggtccaggttccagtccatcttgaagtcatcaaggctccccaggtttcagtattctctttaataaaatggagggattactctctgaagtattttccagtcctatgagtccatagcagcttactttgaaaaggggtgtttatgtttgtgggcatctctgagagaagctagctcacagcttagagcactacccttggc

SEQ ID NO: 23622 - DNA, 345 bp, Homo sapiens
aaaagataagtaagggtgtgatgtcaacaaaagaggttgtatatatcaataatgagcaaaagccaaattaagccagtcacagattcctgtctcaaattgctcatggaatgaaatagggtataaataattatttagagtacctcagtggtatatattctactaagaaactcttgggagttcttacactgtaatgttggttcagaaaacagtactttattaatcttataaccctaaattctatgcttagcagtaaattattgtgccaataaagagtttttctattattatacctatttagtaccttactacatggaaaactctgctattcctcaacataaacgagca

SEQ ID NO: 23623 - DNA, 458 bp, Homo sapiens
  misc_feature (1)...(458): n = a,t,c or g
tttgnnnaatttgaataccgttatgacatgattacgaatttaatacgactcactatagggaatttggccctcgaggccaagaattcggcacgaggcactttataatacctcaaatggcagacagcagcctggatttgtctgaattggcaaaagctgctaagaagaaacttcaatctctaagtaatcatttgtttgaagaacttgccatggatgtgtacgatgaagttgacaggcgagagacggatgcagtctggcttgccacgcaaaaccacagcgccctggtaaccgagacaacggtcgtcccctttcttccggtcaatcctgagtactcatcaacacgaaatcagggcagacagaagttagctcggttcaacgcccatgagtttgccacgctggtcattgacattctcagtgacgccaagaggagacagcagggcagttctctctcgggttcaaaa

SEQ ID NO: 23624 - DNA, 453 bp, Homo sapiens
accgttatgacatgattacgaatttaatacgactcactatagggaatttggccctcgaggccaagaattcggcacgagcctcaaaccatttcttgtaatagtggctgaggtgattcttttagtggccaccattctgctttgtgaaaagtacacacaaaagaaaaagaagcactcagatgaggggaaagaatttgagcagattgaacagctgaaatcagatgatagcaatggtatagaaaataatgtccccaggcatagaaaaaatgagtctctgggccagtgaatacaaaacatcatgtcgagaatcattggaagatatacagagttcgtatttcagctttgtttatccttcctgttaagagcctctgagtttttagttttaaaaggatgaaaagcttatgcaacatgctcagcaggagcttcatcaacgatatatgtcagatctaaagggtc

SEQ ID NO: 23625 - DNA, 364 bp, Homo sapiens
  misc_feature (1)...(364): n = a,t,c or g
acagccttcaccgtagactctgtagtggacacagatatagcataaatgaaattgttaaattatttcattgtagttaattcccactataggaatgctttatcatagtgaagtttcttttgagaagaaacggaactccttgaggcttctctttgggatgtatatgagcgtgtacatattattctatgtgtttataatataatattttcccaaatgaaaaaaaaagggnnggccgtttnaangnanccntggggggcccnaanttnccccgggntgncaacncnanantnttnnccntntngggngngnnnttnnaanntnggccnngcccgtattttancaccncngnnncnggaaaatnttttac

SEQ ID NO: 23626 - DNA, 380 bp, Homo sapiens
ctcgtatagaagtcttcatgaaatgctatgtcatttcatgtcctgtgtcagtttatgttttggtccacttttccagtattttagtggaccctgaaatgtgtgtgatgtgacatttgtcattttcattagcaaaaaaagttgtatgatctgtgccttttttatatcttggcaggtaggaatattatatttggatgcagagttcagggaagataagttggaaacactaaatgttaaagatgtagcaaaccctgtcaaacattagtactttatagaagaatgcatgctttccatatttttttccttacataaacatcaggttaggcagtataaagaataggacttgtttttgtttttgttttgttgcactgaagtttgataaa

SEQ ID NO: 23627 - DNA, 452 bp, Homo sapiens
gcggcacgagctcggacctaggtcgcggcgacatggccaaacgtaccaagaaagtcgggatcgtcggtaaatacgggacccgctatggggcctccctccggaaaatggtgaagaaaattgaaatcagccagcacgccaagtacacttgctctttctgtggcaaaaccaagatgaagagacgagctgtggggatctggcactgtggttcctgcatgaagacagtggctggcggtgcctggacgtacaataccacttccgctgtcacggtaaagtccgccatcagaagactgaaggagttgaaagaccagtagacgctcctctactctttgagacatcactggcctataataaatgggttaatttatgtaacaaaattgccttggcttgttaactttattagacattctgatgtttgcattgtgtaaatactgttgtattggaaaagcatgcca

SEQ ID NO: 23628 - DNA, 404 bp, Homo sapiens
gaatgccttctcattgaagtcatctattctgttcccataaagatcaggatagtttaggtagtggtgaataaataaggttctcaatggcctattagtttttttaaatgttcaaaagatagtagcatgttgggaaaagagatgaattccacatttcttttggtacagtacaacttactgaaattgctttcttatttcaacaaggatttaccaggttgtgtgtagtggttaaaagcatggactttacagccacattacatgggttcaaatccacttactagttatgttaaccacaggaagttagctaatgtctctctgcctcagttttctgtttgtaaattaggataaaaatctccgtagatgtgaatatgtatagctaagatagtagattgtattcaaaatcccaa

SEQ ID NO: 23629 - DNA, 354 bp, Homo sapiens
gtgtgaggcaaggtgatcactatttcctcagaagcaatttactaggttgttatgacagatatttttatatttatctttttctcagtggttttccaatttattggtttcaggatactgttgccctcttaaaaattagtgaggaccccaagagctttttttaatatgagttattttgatcttcactgtatttgacattagaactgaaaaatttttattttaaaatgttaaaaataatattttctaggaaaaataacttttcaaaagaatgaaagagtggcattttatgtttttgtacatctgtttaatgtctggcttaagagaaaacagcttgattaccatttgcttctgcattca

SEQ ID NO: 23630 - DNA, 383 bp, Homo sapiens
cccacgcgtccggctgtctcaccggtgagacctggaagcgggcgagtctcgtgctgtgtcggacctgcagcccctggccttccgccaccatggagtacctcatcggtatccaaggccccgactatgttcttgtcgcctccgaccgggtggccgccagcaatattgtccagatgaaggacgatcatgacaagatgtttaagatgagtgaaaagatattactcctgtgtgttggagaggctggagacactgtacagtttgcagaatatattcagaaaaacgtgcaactttataagatgcgaaatggatatgaattgtctcccacggcagcagctaacttcacacgccgaaacctggctgactgtcttcggagtcggaccccatat

SEQ ID NO: 23631 - DNA, 331 bp, Homo sapiens
  misc_feature (1)...(331): n = a,t,c or g
gtcagatcaaacatattcataacctctggcttcaaatcttgaagaacaaaatattacaaacaagaactgaagtccgctttgaagtcctttcctgtctcatcttccctccctccccagatacaatcacaattctaggttagtctgtatcccaggtaactttcagtcctctgttttgattcttaaggtttaatgcttgctgtttccttctttataatctctaagaactggcatcagaaaataaactaatagctcttttcttggaaatgggggcatgcccatcangtatggcnggctctctctcantttggcctctaagntctcctctgngact

SEQ ID NO: 23632 - DNA, 443 bp, Homo sapiens
  misc_feature (1)...(443): n = a,t,c or g
tgacngcttgacatgattacgaatttaatacgactcactatagggaatttggccctcgaggccaagaattcggcacgaggtgtgcccactggaagagctgtgtgatgtggcccatgagtttggagcaatcaccttcgtggatgaggtccacgcagtggggctttatggggctcgaggcggagggattggggatcgggatggagtcatgccaaaaatggacatcatttctggaacacttggcaaagcctttggttgtgttggagggtacatcgccagcacgagttctctgattgacaccgtacggtcctatgctgctggcttcatcttcaccacctctctgccacccatgctgctggctggagccctggagtctgtgcggatcctgaagagcgctgagggacgggtgcttcgccgcagcaccagcgcatcgtcaaactcatgag

SEQ ID NO: 23633 - DNA, 441 bp, Homo sapiens
ggcgtagtgagaagcagaagaaggaggagattcttaagacgacatgcttcatctgtggtctggagagggacaagtttgataacaagacagtgtcatttgaggaacacatcaagctggagcacaacatgtggaactacttgtacttcattgtgctggtccgcgtgaagaacaagaccgactacacgggccctgagagctacgtggcccagatgatcaagaacaagaacctggactggttcccccggatgcgggccatgtcccttgtcagcaatgagggcgagggggagcagaatgagattcggattctccaggacaagctcaactccaccatgaagctggtgtcccacctcactgcccagctcaacgagctcaaggagcagatgacggagcagcggaaacgcaggcaacgcctaggctttgtggatgtccagaactgcatta

SEQ ID NO: 23634 - DNA, 229 bp, Homo sapiens
gccccaacatatcttcagatgagtcttatactttacttgtgaaagaaccagtggctgtccttaaggccaacagagtttggggagcattacgaggtttagagacctttagccagttagtttatcaagattcttatggaactttcaccatcaatgaatccaccattattgattctccaaggttttctcacagaggaattttgattgatacatccagacattatctgccagc

SEQ ID NO: 23635 - DNA, 445 bp, Homo sapiens
cacgaatttaatacgactcctatagggaatttggccctcgaggccaagaattcggcacgagcaaattacagaatactggtacgtagccgaggctctatggaggttcaggtgacaggaatttcatcatcacaagggcgtaacagaagcatgagctggaacctgggaaacaagaaagagcccagtagtctgcacaggtcaagtcatcaaagagtcagagatataggtgactgtctgggagttcaggaaatatgacataaatcagtcagctggccagatggttctatcccagcacttcctgtctcagaaacagcaaaggaagtgaggcatcatgaagactgcaggtggcagaaatcaatgtgattgatgaaagcagacagaggaaaaggcaacatcaaagtgatgacaaaattctttatcaatctggcacattagttactactataac

SEQ ID NO: 23636 - DNA, 411 bp, Homo sapiens
  misc_feature (1)...(411): n = a,t,c or g
acccctatgacatgattacgaatttaatacgactcactatagggaatttggccctcgaggccaagaattcggcacgagttttttttttgagacagagtgaaattttaaaagtttgcatttatctaaacaatttctgatgatgggagtggtacagtatcttaacgtggatttccctaaagaaaagtccctgagacaaagattcaggtggaggtagctcatttaaaatgtgttcccaggaggcacaaggaagaatgagagggtgagaggaagagccaataaagggttaatgagcagatttctgctgcggctgtgcattgttttactattgctgcaaaaccacctcaaaacctagnggngtaaaacaaccacttattgngctcacagcttctgngggtcaaaattgggataggc

SEQ ID NO: 23637 - DNA, 333 bp, Homo sapiens
gcggcacgaggtttataaatatagagtttattcagtgttagatagctaagagttataaagattcttaggtctatgcatttcttgggaaaattcataaaggaatttcaaagttggaagaaatcttaagtgtcacaatccagagcttttcaaggtatatgagctattgagcctcttagctctctgggcggctgggctcatcctgggatggctaagcccttgtgctggtcacctgtggctgcaagcattcttgtctgtttatcgtagtgtgctgtacaaaaccattttctagggacaccgtgacatgaagggattataaggagactgtctttgtcc

SEQ ID NO: 23638 - DNA, 352 bp, Homo sapiens
gctggaagatgaagattataactgtttatttacctaattaaaaggaaaggcagtgccaaatatgagaggataaacaatattagttaacatttctgttatttatgatgccaattagtagtaagataattccacagctgtcaactttgtttggggctggcaacttctctgcttaaacaggctaaaagtttagtattctgggagaagtggctggaagaaggggtaatatggtgaaagcaaattccctttcccaggagtcaagagaatttatgtgaggtggctcccgcctgtaatctcagcactttgggaggccaaggcaggcaatcacctgagggcaggagaccagcctgactaa

SEQ ID NO: 23639 - DNA, 533 bp, Homo sapiens
  misc_feature (1)...(533): n = a,t,c or g
ttgaaaccgnttgacatgattattaattactacgactcactatagggaatttggccctcgaggccaagaattcggcacgagagactgtccactccatggatggtgccatctgtcccctcgaggagttgtgtgatgtgtcccaccagtatggggccctgaccttcgtggatgaggtccatgctgtaggactgtatgggtcccggggcgctgggattggggagcgtgatggaattatgcataagattgacatcatctctggaactcttggcaaggcctttggctgtgtgggcggctacattgccagcacccgtgacttggtggacatggtgcgctcctatgctgcaggcttcatctttaccacttctctgcccccatggtgctctctggagctctagaatctgtgcggctgctcaagggagaggagggccaagccctgaggcgagcccaccagcgcaatgtcaagcacatgcgccagctactcatggacangggcctttctggcattccctgcccaancacatnattcccatccg

SEQ ID NO: 23640 - DNA, 408 bp, Homo sapiens
gtgtgttctttttgcctttttgtatatcttaaatatatggtagtgccatgattagcaggcttaatagccttgtgagtttaaatgtcactttcaaatgctgtatttttggtggagttgcttaaacacattccccttggaatctatacaaccagttaaaaaaatcatgtataaaccaccatgaaatataatgaaatgtactgtatatgcattttcatgaatgttgtgtcaaagggcttgtaggaaaaaaagatcgttaactcttttgcattcagtgaaaataggtggctttggaaatagtttcagccttgctaacagtttttttttcatgcttagaattaaacgaaataatttggaattctaggtagatgagaaatttaatatagttaagagtttgaaatgttcgatttc

SEQ ID NO: 23641 - DNA, 576 bp, Homo sapiens
tgacatgattacgaatttaatacgactcactatagggaatttggccctcgaggccaagaattcggcacgaggggccctccgggaagatggcggccgtgcaggcggccgaggtgaaagtggatggcagcgagccgaaactgagcaagaatgagctgaagagacgcctgaaagctgagaagaaagtagcagagaaggaggccaaacagaaagagctcagtgagaaacagctaagccaagccactgctgctgccaccaaccacaccactgataatggtgtgggtcctgaggaagagagcgtggacccaaatcaatactacaaaatccgcagtcaagcaattcatcagctgaaggtcaatggggaagacccatacccacacaagttccatgtagacatctcactcactgacttcatccaaaaatatagtcacctgcagcctggggatcacctgactgacatcaccttaaaggtggcaggtaggatccatgccaaaagagcttctgggggaaagctcatcttctatgatcttcgaggagagggggtgaagttgcaagtcatggccaattccagaaattata

SEQ ID NO: 23642 - DNA, 417 bp, Homo sapiens
gacgctctccatcaaaacaaaacgaaacaaaacaaactagcaaaataggctgtccccagtgcaagtgcaggtgccagaacatttctctcattcccaccccttcctgccagagggtaggtggctggagtgagggtgctggccctactcacacttcctgtgtcacggtgaccctctgagagcagcccagtcagtggggaaggaggaaggggctgggatgctcacagccggcagcccacacctgggggagactcttcagcagagcaccttgcggccttactcctgcacgtctcctgcagtttgtaaggtgcattcagaactcactgtgtgcccagccctgagctcccagctaattgcccacccagggcctctgggacctcctggtgcttctgcttcctgtgctgccaacaacttctggaa

SEQ ID NO: 23643 - DNA, 433 bp, Homo sapiens
cacggctaacacctccccccggcccgtctccggcatggagagagagcggaaagtgagtatgcggctgcaccgcggggcccccgtcaacatctcctcgtccgacctcacaggccgacaagatacctctcgcatgtccacctcacagaatagcattcctttcgaacaccacggcaagtagctgctcgtctcccatcggaaggcagcactggattcctggtcgggtggcttccagtggtcttcagtctgtcgtgcaccgatgagaactctccttattgctgtgaagggcagacaatgcatggctgatctactctgttaccaatggctttactagtgacacgtcccccggtctaggatcgaaatgttaacaccgggagctctccaggccactcacccagcgacgctcgtgggggaaacatactaaacggacagactc

SEQ ID NO: 23644 - DNA, 336 bp, Homo sapiens
attgaattttacatatgaacagactatatatactggttttttagagaaatgtccatttggtctgccacacctatcgggctcatcctaaatcctctcattgtcttcagaggacttgcaactccatgctgtttccgtatttccagccttccggggtaggtgcaatgtctcaagtataatacatttctcccttttcctttacacagtgcagagtatatgggcttaggttatgtagattctgtttcactccaggtcactgtctttctctaaattcaaggcggtattcaacggagtgcagtagtttggcttgtcagaaggcacgtagcctggcagacacaa

SEQ ID NO: 23645 - DNA, 1062 bp, Homo sapiens
aacagctatgacatgattacgaatttaatacgactcactatagggaatttggccctcgaggccaagaattcggcacgagtgtcttcaggcacaatgaccctgaccacctaaagaaacttctagagaagtctaaccctaagatacccaaaattgtggcctttgagactgtccactccatggatggtgccatctgtcccctcgaggagttgtgtgatgtgtcccaccagtatggggccctgaccttcgtggatgaggtccatgctgtaggactgtatgggtcccggggcgctgggattggggagcgtgatggaattatgcataagattgacatcatctctggaactcttggcaaggcctttggctgtgtgggcggctacattgccagcacccgtgacttggtggacatggtgcgctcctatgctgcaggcttcatctttaccacttctctgccccccatggtgctctctggagctctagaatctgtgcggctgctcaagggagaggagggccaagccctgaggcgagcccaccagcgcaatgtcaagcacatgcgccagctactcatggacaggggccttcctgtcatcccctgccccagccacatcatccccatccgggtgggcaatgcagcactcaacagcaagctctgtgatctcctgctctccaagcatggcatctatgtgcaggccatcaactacccaactgtcccccggggtgaagagctcctgcgcttggcaccctccccccaccacagccctcagatgatggaagattttgtggagaagctgctgctggcttggactgcggtggggctgcccctccaggatgtgtctgtggctgcctgcaatttctgtcgccgtcctgtacactttgagctcatgagtgagtgggaacgttcctacttcgggaacatggggccccagtatgtcaccacctatgcctgagaagccagctgcctaggattcacaccccacctgcgcttcacttgggtccaggcctactcctgtcttctgctttgttgtgtgcctctagctgaattgagcctaaaaataaagcacaaac

SEQ ID NO: 23646 - DNA, 436 bp, Homo sapiens
  misc_feature (1)...(436): n = a,t,c or g
gctaaaagttactcctctctgaagcagcaattagagctccaagacagttttctacttgaaattaaaattccctcatgactacttgaataaagacgtccagtagtaatgttgaagttatgaatgtgtttcagctcacagagctgtcttcttataataaatggaagatgtgtgtgaagttggaatttagttaaatatagaccatcctggagatagtagaagtgctgcgggttatgttaccaacaataatctaacttgtcctgcacctgctgttggacctcctccatattattacttctgccactgactcccaaaagccaggttattaatctgaagacaactcaagacccaagccacatcattactggtgnaaaccagaataaaatctaagcccccaaccaactgaatgcccccttctnttggccggggcattcaaagt

SEQ ID NO: 23647 - DNA, 421 bp, Homo sapiens
ggggaaatatctctatgaagttccctcagataatgtcatcatccatcccaatggtcaggattaagtcacttgttcatcctctaactgcagggaaggttgggtaagtcagcatttggcattttaaaccaacatattgggagaagttttctgcttatcaaaaaggccaagagaatgtcaagaacatcagtcacaaatgacaaatccacagtctccttgaggtaactggaatttcaccaagctacagtctgcaggaataaatggaataatatcactcgaccctaccaagccccagggacactttcccacatggctcttgcagtatgtccccaaaggttgtccacctacttctctcatatgagtctactgattgcctcccttccttttgaggaactgctctcttcttctgggatcctctggccca

SEQ ID NO: 23648 - DNA, 440 bp, Homo sapiens
gcggcacgagggcacggcaacctgtgcttagataagattaatgttcttcataaaccaccatatgaacatccaaaagacttgaagctcagtgatggtcggctgcgtgtaggatatgtgagttccgactttgggaatcatcctacttctcaccttatgcagtctattccaggcatgcacaatcctgataaatttgaggtgttctgttatgccctgagcccagacgatggcacaaacttccgagtgaaggtgatggcagaagccaatcatttcattgatctttctcagattccatgcaatggaaaagcagctgatcgcatccatcaggatggaattcatatccttgtaaatatgaatggctatactaagggcgctcgaaatgagctttttgctctcaggccagctcctattcaggcaatgtggcttgggataccctgggacaa

SEQ ID NO: 23649 - DNA, 374 bp, Homo sapiens
gcccaggcatcggtattttttaagcatcctggaagattccacagtcaagacccactgcagaggcactcaggcttgttctctttctctggctgtggtctcctggcctggagtttgagaacagtggatgtctgccatgtgagatgggatgggtgagccctagagagcaagcaagaccatgtaatctagaatgtggtaaagccctgtggggagaagcctgcctctgtggctggctgtgcagggttcttgtgctctggacgtcataacctggtctaaacgttgaagggaaagtggtacctccccactcactcctgaaaggacaggagcggatggctgtgggagttggatctttatctctaggacttgatctgcctcct

SEQ ID NO: 23650 - DNA, 436 bp, Homo sapiens
  misc_feature (1)...(436): n = a,t,c or g
gctgggcgatgggggatattaaacaaaagagtaagaataatgtttaaagctttttgtatcttaactaagatagctagatgctgtcttcagttatataattaacaatctattacactgttaggttaaaagctatggttcaatgacaaagaaatttaatcaaagttttatttcttaaatataaaagcagcttgcttccatatattaaaaatggtggatgagacagaaagtgataaagggctctgcatcccagttcccaaggcaggagagacaacagtcatctatggcagcggtccccaacccctgggccatggaccggtactactctgtggcctgttaggacctggatcacacaccaggagatgagcagtgggcaagtgagtaaagcttcatctggattttacagatgctcccaccactcacattactggctgngctc

SEQ ID NO: 23651 - DNA, 395 bp, Homo sapiens
ggggctcaggtgattgtcccacctcaacctctcaagtagctgggaccacaggtgtgcaccaacatgcgcagctaatttttgtagagatggggtttcgccgtgttggccaagctggtctcgaactcctgggccaagcaatcggcctcccaaagtgttgagattacaggcgtgagctactgcaccaggccacacatgcttattttactcagtcttgcccctgaatacccgaaggtctaaacttaggaaaaagtcaggggagggatgagtttgtcattctttggagtcgttatatttgggtgagtgctggcactatgggtaggatattatttagaagctgagttgtgtgctgagcaaatgtttctttaaaaaccaaagccgtatgagatctggtataa

SEQ ID NO: 23652 - DNA, 388 bp, Homo sapiens
tgaaagccattttgtttttcagctcacttcaagggtacctgaagcgaattggcaccaaagcagcagctgtattgccgcagttctagcttcaccttcacgatgtttcccttggtcaaaagcgcactaaatcgtctccaagttcgaagcattcagcaaacaatggcaaggcagagccaccagaaacgtacacctgattttcatgacaaatacggtaatgctgtattagctagtggagccactttctgtattgttacatggacatatgtagcaacacaagtcggaatagaatggaacctgtcccctgttggcagagttaccccaaaggaatggaggaatcagtaatcatcccgtcgacgcggccgcgaattccagatctatgaatcgtaaa

SEQ ID NO: 23653 - DNA, 489 bp, Homo sapiens
gcaagctggtcaaggtatggaacctggctaactgcaagctgaagaccaaccacattggccacacaggctatctgaacacggtgactgtctctccagatggatccctctgtgcttctggaggcaaggatggccaggccatgttatgggatctcaacgaaggcaaacacctttacacgctagatggtggggacatcatcaacgccctgtgcttcagccctaaccgctactggctgtgtgctgccacaggccccagcatcaagatctgggatttagagggaaagatcattgtagatgaactgaagcaagaagttatcagtaccagcagcaaggcagaaccaccccagtgcacctccctggcctggtctgctgatggccagactctgtttgctggctacacggacaacctggtgcgagtgtggcaggtgaccattggcacacgctagaagtttatggcagagctttacaaataaaaaaaaaactggcaaaaaa

SEQ ID NO: 23654 - DNA, 424 bp, Homo sapiens
  misc_feature (1)...(424): n = a,t,c or g
ggtcagctctagaattgttacatttaacccagtaggggcaaacaagaagcaaagaaactacaaataatctaccatccagagtccctaggtcatcattacaaggtatacaatcacgtttattattttttttcctaactttccataatttttttatgtggactaggaaatacaaatgtcgattcctgtttttccccctatacttacacaaaatgacacattctgtgtaatgttctgcttcttgctttattcaccatatctacatatctacatatcaccatatcttctctacgtatctatgtagagaactgtttttccccccatgcctggactgttagatttttttttttaagcaaaattgtgttctgatagttcaaacagggctgctataatgaataaccatgcttatgtcngggnatatntgaga

SEQ ID NO: 23655 - DNA, 450 bp, Homo sapiens
  misc_feature (1)...(450): n = a,t,c or g
gttgtaaatttcctaagtgcataggtcattgtacatcactggcaaaccacagcttcccaaggggaaggcatctgttggaatagaacctagggaagcagcgaaatctcatctctataaacaatttaaaaattagctgggtgtggtggcatacgcttgtagtcccaactattcaggaggctgaggtgggaggatcacttgagcctgggaggtggaggccgcagtcagctgagatcacaccactgttctccagcctgggtgacagattgagatcgtgtctcaaacaaaatgaaacaaaacaaaaaaacgaagaagtctgccaggtagccagggtgatagatgcggaggcttggacactagaataggaacagtggaggtggagagaagttgatgtatatgaaatagaaatcgcaggntatagctagtgatgaattggatgangggtggaaggga

SEQ ID NO: 23656 - DNA, 325 bp, Homo sapiens
gagaagctgccttccatcccattgaagagtacatggtgcatgttgaagaacattttcagcttcttgcacgcagaatgcaagtggacaaaaaaagagtgtatttggccacagatgacccttctttattaaaggaggcaaaaacaaagtaccccaattatgaatttattagtgataactctatttcctggtcagctggactgcacaatcgatacacagaaaattcacttcgtggagtgatcctggatatacattttctctctcaggcagacttcctagtgtgtactttttcatcccaggtctgtcgagttgcttatgaaattatgca

SEQ ID NO: 23657 - DNA, 365 bp, Homo sapiens
cccacgcgtccgggctgctgtgctgctctcaaagctcttggagcaattgtctacattaccgaaatcgaccccatctgtgctctgcaggcctgcatggatgggttcagggtggtaaagctaaatgaagtcatccggcaagtcgatgtcgtaataacttgcacaggaaataagaatgtagtgacacgggagcacttggatcgcatgaaaaacagttgtatcgtatgcaatatgggccactccaacacagaaatcgatgtgaccagcctccgcactccggagctgacgtgggagcgagtacgttctcaggtggaccatgtcatctggccagatggcaaacgagttgtcctcctggcagagggtcgtct

SEQ ID NO: 23658 - DNA, 435 bp, Homo sapiens
  misc_feature (1)...(435): n = a,t,c or g
tttganttctgaataccntttatgacatgattacgaatttaatacgactcactatagggaatttggccctcgaggccaagaattcggcacgagccagatcggcaccaagttttgggaagtgatcagcgatgagcacggcatcgacccggccggaggctacgtgggagactcggcgctgcagctggagagaatcaacgtctactacgatgagtcatcctgccagacgggtgcagggaacaactgggcgaaagggcactacacggagggcgcggagctggtggacgcagtgctggacgtggtgcggaaggagtgcgagcactgcgactgcctgcagggcttccagctcacgcactcgctgggcggcggcacgggctcaggcatgggcacgctgctcatcagcaagatccgtgaggagttcccggaccgcatcatgat

SEQ ID NO: 23659 - DNA, 465 bp, Homo sapiens
  misc_feature (1)...(465): n = a,t,c or g
tcagctatgacatgattacgaatttaatacgactcactatagggaatttggccctcgaggccaagaattcggcacgagtgatgaaaatgagcaccagttatctttaagaacggtcagtttaggggctggtgcaaaggatgagttgcacattgttgaagcagaggcaatgaattacgaaggcagtccaattaaagtaacactggcaactttgaaaatgtctgtacagccaacggtttcccttgggggctttgaaataacaccaccagtggtcttaaggttgaagtgtggttcagggccagtgcatattagtggacagcacttagtagctgtggaggaagatgcagagtcagaagatgaataggaggaggatgtgaaactcttaagtatatctggaannnnnnctgcccctggaggtggtancaaggttcccagaaaaaagtaaaacttgctgctgatgaanatgat

SEQ ID NO: 23660 - DNA, 422 bp, Homo sapiens
  misc_feature (1)...(422): n = a,t,c or g
gagcaattcttctgcctcagtctcccgagtagctgggattacaggcatgtgccaccatgcccagctaattttttgtatctttagtagaggtggggtttcaccacattggacaggctggtcttgaactcctgacctcatgatcctcctgcctcagcctcccaaagtgctgggattacaagaatgagccatcatgcctggcccaaatatgctgaatttctagtagtaaatactggctgctggcttctgtagtttcttcacaaagaagtagatgggcttttggcaacttgattgtttagtaatgaggccactcctcacccctgttctgttctgtcccattgctgggatgggccaggaggcacaaatgtagagagcacaggctgcaggggaggcagcaccatnagggcgaggaggcccccaggccc

SEQ ID NO: 23661 - DNA, 306 bp, Homo sapiens
ggaaaagcagaataagcctcagaaacaaaatgatggccaaaggaaagacccttctaaaaaccaaggaggtgggctctcatcaagtggagcaggagaagggcaggggcctaagaaacagaccaggttgggtcttgaggcaaaaaaaagaagaaaatcttgctgattggtattctcaggtcatcacaaagtcagaaatgattgaataccatgacataagtggctgttatattcttcgtccctgggcctatgccatttgggaagccatcaaggacttttttgatgctgagatcaagaaacttggtgttg

SEQ ID NO: 23662 - DNA, 420 bp, Homo sapiens
cgcagtagataattcagggaaaacagcactgatgatggctgctgagaatgggcaggcaggcgctgtggatattttggtgaacagtgcccaggctgatctgactgtaaaggataaggacttgaatacacccttacatttggcttgtagtaaaggtcatgaaaaatgtgccttgttaatactggaaaagataacagatagaaacctcatcaatgcaaccaacgcagccttgcaaacacctctgcatgttgctgcccgaaatgggctaacaatggtggttcaggaacttttgggaaaaggagcaagtgtgcttgcagtagatgaaaatggctataccccagctttggcctgtgctcccaataaggatgtggctgattgcctggctctcattttggccaccatgatgcctgtctcatcaagtag

SEQ ID NO: 23663 - DNA, 375 bp, Homo sapiens
ccaccatcttgctttcctttaatccggcagtgaccgtgtgtcagaacaatcttgaatcatgaagctactaaccagagccggctctttctcgagattttattccctcaaagttgcccccaaagttaaagccacagctgcgcctgcaggagcaccgccacaacctcaggaccttgagtttaccaagttaccaaatggcttggtgattgcttctttggaaaactattctcctgtatcaagaattggtttgttcattaaagcaggcagtagatatgaggacttcagcaatttaggaaccacccatttgctgcgtcttacatccagtctgacgacaaaaggagcttcatctttcaagataacccgtggaattgaagcagt

SEQ ID NO: 23664 - DNA, 406 bp, Homo sapiens
gggcctgggcacttggcgaatggaatctatagagaaaatggaatctgattttaaaaactgccatatgtttcttgtaaccattttaaacaaagccgtctgtagaggatcctttccccatttttccatagggctgcctgttgtctgcatccgacgctggagcctactgtccacaggaggtttgggagggacctaaacctgcgtcagttcttgctgcttctggccttggtggtgtggaggtgctgcagaagctagggcctctcatcatgaagatgagccagatgcctccttcgggagccacaggatccagagagtcaatgaaagtaaaacttcaggactgtctggatttattacgccagggaggaagttgagccctggagactgtcaggtcgtacgactgcaattcttc

SEQ ID NO: 23665 - DNA, 502 bp, Homo sapiens
gtttaggaaaacaaggataagattctgtcataggcatagagagttgcacataaaaaataccgaagaaaacccaaaattcaatcaacaattctgtcttattgaagagttgctaggattcagagtaaaactcaaaggattcagtttgagcctagaatgatggttgaacttgtagtcactgggcttttgttttgctttatggaaatcattgaaggtctggatccctttctctgaatggagagattgagagggatgtcgggcagttcccattagatttagtggccttcatgttattcagaattgttttggtgatacctcacccctgtaatcccagcactttgggtgggtgaggcaggcggatcacttgaagccaggacttcaagaccagcttggccaacatggtgaaacctcatctctactaataatacaacaattagccaagtgtgatggcacatacctgtaatcccagctacttggaattggaaatcgcctgacccaggaggcg

SEQ ID NO: 23666 - DNA, 472 bp, Homo sapiens
  misc_feature (1)...(472): n = a,t,c or g
ggngnttntnnnntttgaaanttttgnagaaccctatgacatgattacgaatttaatacgactcactatagggaatttggccctcgaggccaagaattcggcacgagctggagcagcgttcttttatctccgtccgccttctctcctacctaagtgcgtgccgccacccgatggaagattcgatggacatggacatgagccccctgaggccccagaactatcttttcggttgtgaactaaaggccgacaaagattatcactttaaggtggataatgatgaaaatgagcaccagttatctttaagaacggtcagtttaggggctggtgcaaaggatgagttgcacattgttgaagcagaggcaatgaattacgaaggcagtccaattaaagtaacactggcaactttgaaaatgtctgtacagncnacggttnccttgggggctttgaaatancaccancannggtnttttgt

SEQ ID NO: 23667 - DNA, 471 bp, Homo sapiens
  misc_feature (1)...(471): n = a,t,c or g
ggagttatgttccctgatggtccacacaagagatttaaacagacagatacaactaaaatctaaaaagcctatattgatcttacacactatgaggctcttattaagaaaaaaaggcattggaaatttaagttttatgaagtactctgagcagtgacagattttcttagactagaaaaacatcaaggtgctcccatttggaaatgtacttgttcatttttgtgttgtattgatttctgtccaggtattttctttccaagttttatagtttttttcctttctaattgtgtcgataacaagggaactggtttatagcgtggctgtgaggaacagcagtgctctggggctgggcatcctgcactcaattaaccttcatatttcacacctaatcattgcagtgtggcaaagcgctccctggcctttcaagcaagaggactgctgtggaactgggggnnctctgagggcangggccat

SEQ ID NO: 23668 - DNA, 391 bp, Homo sapiens
  misc_feature (1)...(391): n = a,t,c or g
gacctgaagaaccttctcaaacagcagaagaagtaagtctatttttctcttcgaaaattaaacttattttctattttctttgcttaacatccattaaatatgtcttatctaaacttgggtttagaaagaagtgatagcataagtgttcatgtgattatactgtaactaggtcttttttagaacatagagacagggtctcactatgttgcctaggctggccttgaactcctgggctcaagtgatccacccgcctcagcctcctgggtagctgggtcttacttggaatgtagtgtagtatcaaattcctcaacatgagtactattttgcaagcctgctgtctgctgagttgtctttttttttttttgaaatgaattctngccctngtcnccca

SEQ ID NO: 23669 - DNA, 375 bp, Homo sapiens
ggtatgtttaccataaatctctactctgaaatgttctgcctgcagaggttggaattttagagttgataattacaaagagtaagtcaagtttttatcttttaatctgaaataaccagaatgatggttattcccctcacaagaaattcccaccattgtttacatggttgttcaggttttggtcttcagttgggtacttttaagacagaccttacctgtgactcttggaatttttcagttccatttggtaattcagaaacatcatgtgaccagtgacttttcagtgcttttggaaggatattggccactttatcagctttatacacacaaagtgcccattttaccgtcgtttcttgccttctacatccatttcttcct

SEQ ID NO: 23670 - DNA, 431 bp, Homo sapiens
ctactgtgggtcgccactcctgctacacagcacggctttttcaaggctgtattgagaagggaagttaggaagaagggtgtgctgggctaaccagcccacagagctcacattcctgtcccttgggtgaaaaatacatgtccatcctgatatctcctgaattcagaaattagcctccacatgtgcaatggctttaaaaagccgaaaccaggggttctgggaattttgcaagttatcctgtggccaggtgtggtctcggttaccaaacacggttacctgcagctttttagtcctttgtgctcccacgggtctgcagagtcccatctgcccaaaggtcttgaagcttgacaggatgttttcattactcagtctcccagggcactgctggtccgtagggattcattggtcggggtgggagagttaaacacatttaa

SEQ ID NO: 23671 - DNA, 403 bp, Homo sapiens
gggcttcggcagcggcttcagcagatcggcggcatcagcggtagcaccagcactagcagcatgttgagccgggcagtgtgcggcaccagcaggcagctggctccggttttggggtatctgggctccaggcagaagcacagcctccccgacctgccctacgactacggcgccctggaacctcacatcaacgcgcagatcatgcagctgcaccacagcaagcaccacgcggcctacgtgaaacaacctgaacgtcaccgaggagaagtaccaggaggcgttggccaagggagatgttacagcccagatagctcttcagcctgcactgaagttcaatggtggtggtcatatcaatcatagcattttctggacaaacctcagccctaacggtggtggagaacccaaa

SEQ ID NO: 23672 - DNA, 557 bp, Homo sapiens
  misc_feature (1)...(557): n = a,t,c or g
tgattacgaatttaatacgactcactatagggaatttggccctcgaggccaagaattcggcacgagacaaacgcacttttgatgctggaaaacttcatagatggaaaatttttaccttgtagctcatatatagattcttacgacccatcaacaggggaagtgtattgcagagtgccaaatagtggaaaagacgagatcgaagccgcggtcaaggccgccagagaagcctttcccagctggtcatcccgcagcccccaggagcgctcacgggtcctgaaccaggtggcggatttgctggagcagtccctggaggagtttgcccaggccgagtctaaagaccaagggaaaaccttagcactggcaagaaccatggacattccccggtctgtgcagaacttcaggttcttcgcttcctccagcctgcaccacacgtcagagtgcacncanatggaccacctgggctgcatgcactananggtgcnggccccgtgggannccntnaatgctgttcannnnagnncacnnccccggtttcttcnaaaggncgaaaaaatatt

SEQ ID NO: 23673 - DNA, 424 bp, Homo sapiens
  misc_feature (1)...(424): n = a,t,c or g
gcaaccgccggagagtagcgcgtagggaggaccgagcctcgtttccaaggaggggcaggggaaccgaacagggtggattaggaattgggctttccaaagctgtgcagagtttcagggaagggcactaagtctcttaaaagggaagtaaaaccttttctttcagttgggctattggcaagctatctggccctgctttcctgtcccccaggttcccatttccacggcttattcggctgacccagccccttcccctgcaagggcggagcgctccttgccgctgtccagcagctgtttctactgccaggtgctgcgtcccgcgatcgttataacacatgcgtacaaatgagcacaacgcgccataaaagtgttattggtattactattgntgctgatttgcttttcaancttnaccacagaactaatg

SEQ ID NO: 23674 - DNA, 449 bp, Homo sapiens
gggaaatagggttgagtgtgatgggacatgggatgaagagatgggctggagaggaaaattgagagctggaaagataagctagtctcttgaaaggtcttacaaggcatgattttatcctgggggcactgaagaaccactgcatggtttgaagtagggtatgacgtgatcagatttgtgtattcagaatatccagtaatagtacatttgttccctagaacctaggcacaagtcttggaattggcctcagagcatccatgtataataggtgctgcccacttacagcctcagggagacagcataacacaggctgcctaaaaaacgaaagacctgggtgtggtggatcatgtctataatcccagcacttttggaggctaaggtgggaggatcacttgaggccagaagttcgagacaagcctggacaacagagcaagatcctgcttctccaaaag

SEQ ID NO: 23675 - DNA, 442 bp, Homo sapiens
  misc_feature (1)...(442): n = a,t,c or g
ggtaagaagttctgtgattcatttatataatacgttaatttggtgtacactttataaaacaatgccagagattttcttttatttatttgtgttgggtttttttccttcctgcagaaaaaagagccagtgggagatgatgagtctgtcccagagaatgtgctgagtttcgatgaccttactgcagacgctttagctaacctgaaagtctcacaaatcaaaaaagtccgactcctcattgatgaagccatcctgaagtgtgacgcggagcggataaagttggaagcagagcggtttgagaacctccgagagattgggaaccttctgcacccttctgtacccatcagtaacgatgaggatgtggacaacaaagtanaaaggatttggggtgattgtacagtcaggaaaaagtactctcatgtggacctagtctgcacaacatggt

SEQ ID NO: 23676 - DNA, 336 bp, Homo sapiens
gggtgttttacgccaggacgctgatgcgtttgggttctcgtctgcagaccctctggacctggtcacgattccataatgtaccacaacagtagtcagaagcggcactggaccttctccagcgaggagcagctggcaagactgcgggctgacgccaaccgcaaattcagatgcaaagccgtggccaacgggaaggttcttccgaatgatccagtctttcttgagcctcatgaagaaatgacactctgcaaatactatgagaaaaggttattggaattctgttcggtgtttaagccagcaatgccaagatctgttgtgggtacggcttgtatgtatttc

SEQ ID NO: 23677 - DNA, 443 bp, Homo sapiens
ggagctgaacacacacttgctttggcatcaaatggagatgtgtatgcctgggggagcaattcagaagggcagctcggcttaggccataccaaccatgttcgagaaccaaccctggtaacaggtctgcaagggaaaaatgttcggcagatctcggctggccgctgccacagtgctgcatggacagcaccacctgtcccaccaagagcaccaggtgtgtcagtacctctgcagctgggcctgcctgacacagtgcccccgcagtatggggcgctgagagaagtcagcattcacacggtgcgggccaggctccggctgctctaccacttctctgacctcatgtactcatcctggagactgctgaaccttagccccaacaaccagaacagcacatcccattataatgctggaacttggggcattgtacagggacaacttcggccttt

SEQ ID NO: 23678 - DNA, 374 bp, Homo sapiens
gggcatgtgacatgtgcagtcacacaaggccccattcttagaagggcctcacacttggtttaatgagctgctgccaccatcttgtaattcttaatcaagttttttaaagggactctgtattttcattttgcactagtccctccaattatatgtttggacctgacagacatatgttgctgctaggactggtgagaaaggaaatgaggccatcccactaactgtagtatttatagatggcagatcctggtggttgtgaaaagtgggggctttgtgcacttgtaagagcatttgcagtgcagtacatggtaacactcatccatgaaataatgaccagtttgaaatgctttctaagtataaacgctacaagtgatgtc

SEQ ID NO: 23679 - DNA, 1060 bp, Homo sapiens
  misc_feature (1)...(1060): n = a,t,c or g
ttatgactgattacgaatttaatacgactcactatagggaatttggccctcgaggccaagaattcggcacgagggctggggaggtcttgcaatcatgacagaaggcaaatgggaagcaaagtcatgtcttatgtggtggcgggcagggggacttgtgcacaggaactcctatttatacaaccatcagatatcttgagacaagaacagtatggggctccctggtgtgattccgtcctgcgcggttgttctctggagcagcgttcttttatctccgtccgccttctctcctacctaagtgcgtgccgccacccgatggaagattcgatggacatggacatgagccccctgaggccccagaactatcttttcggttgtgaactaaaggccgacaaagattatcactttaaggtggataatgatgaaaatgagcaccagttatctttaagaacggtcagtttaggggctggtgcaaaggatgagttgcacattgttgaagcagaggcaatgaattacgaaggcagtccaattaaagtaacactggcaactttgaaaatgtctgtacagccaacggtttcccttgggggctttgaaataacaccaccagtggtcttaaggttgaagtgtggttcagggccagtgcatattagtggacagcacttagtagctgtggaggaagatgcagagtcagaagatgaagaggaggaggatgtgaaactcttaagtatatctggaaagcggtctgcccctggaggtggtagcaaggttccacagaaaaaagtaaaacttgctgctgatgaagatgatgacgatgatgatgaagaggatgatgatgaagatgatgatgatgatgattttgatgatgatgaagctgaagaaaaagcgccagtgaagaaatctatacgagatactccagccaaaaatgcacaaaagtcaaatcagaatggaaaagactcaaaaccatcatcaacaccaagatcaaaaggacaagaatccttcaagaaacaggaaaaaactcctaaaacaccaaaaggacctagttctgtagaagacattanagcca

SEQ ID NO: 23680 - DNA, 410 bp, Homo sapiens
gccagcggcgctacattggggtgatgatgctgaccctgagtcccagcatccttgctgaactacagcttcgagaaccaagctttcccgatgttcagcatggtgtactcatccataaagtcatcctgggctcccctgcacaccgggctggtctgcggcctggtgatgtgattttggccattggggagcagatggtacaaaatgctgaagatgtttatgaagctgttcgaacccaatcccagttggcagtgcagatccggcggggacgagaaacactgaccttatatgtgacccctgaggtcacagaatgaatagatcaccaagagtatgaggctcctgctctgatttcctccttgcctttctggctgaggttctgagggcaccgagacagagggttaaatgaaccagtgggg

SEQ ID NO: 23681 - DNA, 345 bp, Homo sapiens
gtcagattattaacctgagaagcacatgcataggcaattacgtttgcatttcttagcctaattagtagatcaattttttgtccatgcatttgttttgtatttcttgtattgcttccatctttaaactctttttatcttgttttatgtgggccaccttacatcctttctggagcaaggcaggtataaataatattaccataaccatggcacagtgataatgtctgtatttttatagtactttgaaatttatagccacattctcattttcattacctcagttagtcctttcaggcaagcgttactatacccattttatagtcgagtaaaataaaacttagattaagg

SEQ ID NO: 23682 - DNA, 307 bp, Homo sapiens
ggaaaagtacattctgatttccagccggctgtgaatttacaaacttttggaatgcaatctatttctaggttggagaatggcattactaaactgctcaatttaataattagaggtagaaaatataattgggttatctttgtagtcaaatagcaatttcatatatgcagataattcgaatctgaatgtacagccaagtattcaaaatataaatagatgcagagaaaaaatcaaaagcacatataattcccccagaccctacataaagcaaaaggaaccactgcagaaaagaatagaaaaaccccactcc

SEQ ID NO: 23683 - DNA, 609 bp, Homo sapiens
  misc_feature (1)...(609): n = a,t,c or g
ctatgacatgattacgaatttaatacgactcactatagggaatttggccctcgaggccaagaattcggcacgagggttagcgcggcgtgagaagccatgagcagcaaagtctctcgcgacaccctgtacgaggcggtgcgggaagtcctgcacgggaaccagcgcaagcgccgcaagttcctggagacggtggagttgcagatcagcttgaagaactatgatccccagaaggacaagcgcttctcgggcaccgtcaggcttaagtccactccccgccctaagttctctgtgtgtgtcctgggggaccagcagcactgtgacgaggctaaggccgtggatatcccccacatggacatcgaggcgctgaaaaaactcaacaagaataaaaaactggtcaagaagctggccaagaagtatgatgcgtttttggcctcagagtctctgatcaagcagattccacgaatcctcggcccaggtttaaataaggcaggaaagttcccttccctgctcacacacaacgaaaacatggtggccaaagtgggatgangtnanttccacatcanttcaaatgaagaaagngtnatntcnggctgtaactgttggtcacgt

SEQ ID NO: 23684 - DNA, 222 bp, Homo sapiens
gctgacctcaggtgacccacctgtctcagcctcctgaagtgctgggactagagacacaagccactatgaccagccaactttttaattttttgtagagatgacgtctcacaatgttgcccattctggtctcaaacccctaggctcaagtgatcctctcatcttggcctcccaaagtgctgtgagattacaggtgtgagccacagagcccagcacatttatttc

SEQ ID NO: 23685 - DNA, 538 bp, Homo sapiens
cctatttatgacatgattacgaatttaatacgactcactatagggaatttggccctcgaggccaagaattcggcacgagtggatagattaattatcactcaatactgggcttgccttgatggaagaattcctccgttactttttcactccactgcttgcttaattcccacgtccgacatgggttacaaatatcagcacatttcaaagccatctgtaaaaccaaatgtctgtgtctggtgtcttctaggcataaatcacctctatccaaatgggacctaaacaaagacagatactcattctggcgactgatgtctgtggctagtatcagagcacctatctgtgtctccatttgttgcctgctttctaatggcagatgtgagaataagcctgattctctcaataagcccactgcagatctccagtggtgattttccagtactgaggtattcttgtataaagttgccaagtaatggttagttttaataaggaaaggttgattaacacctggatgatccagatcatgagtggcagctgcaat

SEQ ID NO: 23686 - DNA, 685 bp, Homo sapiens
  misc_feature (1)...(685): n = a,t,c or g
ccgccgacgacctgtctcgccgagcgcacgccttgccgccgccccgcagaaatgcttcggttacccacagtctttcgccagatgagaccggtgtccagggtactggctcctcatctcactcgggcttatgccaaagatgtaaaatttggtgcagatgcccgagccttaatgcttcaaggtgtagaccttttagccgatgctgtggccgttacaatggggccaaagggaagaacagtgattattgagcagagttggggaagtcccaaagtaacaaaagatggtgtgactgttgcaaagtcaattgacttaaaagataaatacaaaaacattggagctaaacttgttcaagatgttgccaataacacaaatgaagaagctggggatggcactaccactgctactgtactggcacgctctatagccaaggaaggcttcgagaagattagcaaaggtgctaatccagtggaaatcaggagaggtaggaatgtctgttgtcaccacagtgttctaaacttcagtgtgctttaaggcattgattccttggacctaaggaaagtgttaacttgaggaaattaatccttctctcattcctcctcttggcctggagaaatcttaaactgggttttcctttagcaagcttggctgtatggtgggnaggtactggtaagnaattttgatattttac

SEQ ID NO: 23687 - DNA, 393 bp, Homo sapiens
  misc_feature (1)...(393): n = a,t,c or g
ggacgggcccagaggaattcagagttaaaccttgagtgcctgcgtccgtgagaattcagcatggaatgtctctactatttcctgggatttctgctcctggctgcaagattgccacttgatgccgccaaacgatttcatgatgtgctgggcaatgaaagaccttctgcttacatgagggagcacaatcaattaaatggctggtcttctgatgaaaatgactggaatgaaaaactctacccagtgtggaagcggggagacatgaggtggaaaaactcctggaagggaggccgtgtgcaggcggtcctgaccagtgactcaccagccctcgtgggctcaaatataacatttgcggggaacctgatattccctagatgcccaaagggaaaancccat

SEQ ID NO: 23688 - DNA, 398 bp, Homo sapiens
gggttcagtaggaagaagtgatatcctccccagaccatctgctttggggagcttggctaaactgtccagcaaaatgaaaagactcacgtgctttttcatctgcttctttctttctgaagtatcaggcttcgaaatccccataaatggactttctgaatttgtagactatgaagatcttgtggaactggccccaggcaaatttcaattggtggcagagaaccggagatatcagagaagccttccaggagaatcggaagaaatgatggaagaggttgatcatgtaactctttatagctataaagtccagtctactattacttctcggatggccaccaccatgatccagagcaaagtggtgaacaattccccgcagcctcagaatgtcgtgtttgatgttc

SEQ ID NO: 23689 - DNA, 292 bp, Homo sapiens
cctgaattagctacagatcctgagttagagaagaagttgctacaccacctctctgatctggccttaacattgcccactgatgctgtgtccatctgtcttgccatctccacgccagatgctcctgccactcaagatggggtagaaagcctcctgcagaagtttgcagctcaggagttgattgaggtaaagcgaggtctcctacaagatgatgcacatcctactcttgtaacctatgctgaccattccaagctctctgccatgatgggtgctgtggcagaaaagaagggccctg

SEQ ID NO: 23690 - DNA, 435 bp, Homo sapiens
  misc_feature (1)...(435): n = a,t,c or g
gggnntnnntntngctntgaatccttggaaacgctttaatacgactcactataggnaatttggccctcgaggccaagaattcggcacgaggaggtgctagtccgccgcgccttattcgagaggtgtcagggctgggagactaggatgtcggacacgtggagctctatccaggcccacaagaagcagctggactctctgcgggagaggctgcagcggaggcggaagcaggactcggggcacttggatctacggaatccagaggcagcattgtctccaaccttccgtagtgacagcccagtgcctactgcacccacctctggtggccctaagcccagcacagcttcagcagttcctgaattagctacagatcctgagttagagaagaagttgctacaccacctctctgatctggccttaacattgccactgatgctg

SEQ ID NO: 23691 - DNA, 372 bp, Homo sapiens
gaaactgattaggaactgactaccacctgcaggtcagggccaaggttatggggtcccaggttcacctcctcagcttcctcctcctttggatctctgataccagggcagaaacgacactcacgcagtctccagcattcatgtcagcgactccaggagacaaagtcaacatctcctgcaaagccagccaagacattgatgatgatatgaactggtaccaacagaaaccaggagaagctgctattttcattattcaagaagctactactctcgttcctggaatcccacctcgattcagtggcagcgggtatggaacagattttaccctcacaattaataacatagaatctgaggatgctgcatattacttctgct

SEQ ID NO: 23692 - DNA, 390 bp, Homo sapiens
gaataacagttgcagatgttcttgcctgctaaatatcgtagtggataatcttcctatagtgaactctattcaaatagagtagttatgtggttgattagaacttgatagagtgctactagggcacattccagtatgctcagagatatactttaagttgtagatgttctttgcttttgatgattgccactaccatcacacactgtaaaacgtaatgttttgccatgtttgtgaaaggcttcagtgtttggtacaaaggagttgtcacttggagtctgttataagaagagtgggttttcaagtcaagggttactttatgtaggatcatgttttcgctgagcttctccccatgttaacttagaacatttcttaatgtactgtagtattaaatgg

SEQ ID NO: 23693 - DNA, 404 bp, Homo sapiens
  misc_feature (1)...(404): n = a,t,c or g
gcttgccttccttcctctctgccctcctcactgcgttgtctttggtccttgtatttgccccattataacccaaactggctgtcccagcttcagctgtcatgtctgcacttacgtgtctgaagctggaggcaggaggagaagaggttttcctcagtgcccttgtttcttttatccaaaagcaaaacttccccagaaacctcctggcagactcccctagttcaaggaaagctgggaagacaagtatgtagtggaaagagatgggaaagccaagatggacctagaccagtgatttttctcttggggtgtggcacactcctgctccaaacagaactgaggctcttggtataaatgagtttctcagcctcagcactggtaactttctggcctggnaaaatctctggggg

SEQ ID NO: 23694 - DNA, 319 bp, Homo sapiens
  misc_feature (1)...(319): n = a,t,c or g
cttgtgaacccctgtcttaaaatgaggtgacgaggggaaggttgcaataaatataagttctattaactaggtcaaacaagtggctggtgcaatgacatcaactctagctagagaaacatttcaacttgatttacacagagaaaggcaaaatttccttttttaaaaaaataatgaagattggaaaagctggattaatattttccagcctattcctgaatacaacatcccttctcattatagatgagagtctatagtcgacgcggccgcgaattccagatctatgaatcgtagatactgaaaaaccccgcnagttcacttt

SEQ ID NO: 23695 - DNA, 408 bp, Homo sapiens
agttgaagtgaacttgcggggtttttcagtatctacgattcatagatctggaattcgcggccgcgtcgaccatgagggtccccgctcagctcctggggctcctgctgctctggctcccaggtgccagatgtgacatccagatgacccagtctccatcctccctgtctgcatctgtaggagacagagtcaccatcacttgccgggccagtcaggatatcaataggtggttggcctggtatcagcagaaaccagggaaagcccctaaactcctgatctataaggcgtctactttacacagtggggtcccatcaaggttcagtggcagtggatctgggacagatttcactctcaccatcagcagcctgcagcctgatgattttgcaacttattactgccaacagtatagca

SEQ ID NO: 23696 - DNA, 411 bp, Homo sapiens
  misc_feature (1)...(411): n = a,t,c or g
gtatgaaaatccttgtcccttacattcaagtgctggcctgtgagaaaatttgctatatgtagaaggaaagctgtctggatggaagggaaatgcttattttcagggtaggggactgtgaacacgtcattcagatcatgttagaagttatgtcgtggccagggggtggcagataaaaattaaaaagttagtagtcatctggatgttccttccacagagtggctgagctcccttcgggcccatgttgtgcgcactggcattggacgagcccgggcagaactctttgagaagcagattgttcagcatggcggccagctatgccctgcccagggcccaggtgtcactcacattgtggtggatgaaggcattggctatgancgagccttccgcnttttanantacccaanttgcccc

SEQ ID NO: 23697 - DNA, 498 bp, Homo sapiens
ccactcgaatcgaacacgtcttgctaaacttcttaggttccagtcttctcatcatccaactgacattactagcctagaccagtatgtggaaagaatgaaggaaaaacaagacaaaatctacttcatggctgggtccagcagaaaagaggctgaatcttctccatttgttgagcgacttctgaaaaagggctatgaagttatttacctcacagaacctgtggatgaatactgtattcaggcccttcccgaatttgatgggaagaggttccagaatgttgccaaggaaggagtgaagttcgagagcctctgctgaattggatgaaagataaagcccttaaggacaagattgaaaaggctgtggtgtctcagcgcctgacagaatctccgtgtgctttggtggccagccagtacggatggtctggcaacatggagagaatcatgaaagcacaagcgtaccaaacgggcaaggacatctctacaaattactatgcgagtcag

SEQ ID NO: 23698 - DNA, 408 bp, Homo sapiens
  misc_feature (1)...(408): n = a,t,c or g
tttgannacctgctatgacatgattacgaatttaatacgactcactatagggaatttggccctcgaggccaagaattcggcacgagaggacaaggacaaggaggctggcgagaagccatcaggtggagccccggctgcggatggcgagcaggacgagaggagccccagccgttctgaaggcgaggctgagagcgagagcagcgactccgagtccctggacatggcccccagcgacacggagcggactgaggggagtgagcgttctctgcaccaaacaacagttattaaggccccggtcactggcgccctcattaccgccagcagtgctgggagtggtgggagcagcggcggcggcggcaatagtttcagcttcagcagcgccagcagtcttagtagcagcancaccag

SEQ ID NO: 23699 - DNA, 403 bp, Homo sapiens
  misc_feature (1)...(403): n = a,t,c or g
gcggcacgaggtgtttggctctttctgctcttgcttttaattctcacagtaacactctgaagtggattccatcatcattcccattttgcaagggaggaaacagattagcgaagtgaggcctcagcgtatgtgtgagagggaaggaggtctgtttatttcagaaacgttgctctttctctgcccagctccttcctgctctctttcctcacaccagcccagtaatcctacttttaaaaaaacgtatcttggctgggcgcagtgggtgacacctgtaatcccagcactttgggaggccgaggcgggtggatcacgagggcaggagatcaagaccatcctggccaacatggtgacacctcgtctctactaaaaatacnaaaattagctgggtgtggnggtgcgtgcc

SEQ ID NO: 23700 - DNA, 343 bp, Homo sapiens
aggagcaattgatacccaaaataaacccatcacctctgagaaaatcaaagagcttgtcgtcacgcagctgggctatgacacacgtgtgaccatcctcgggcacgtgcagagaggagggaccccttcggcatttgacaggatcttggccagccgcatgggagtggaggcagtcatcgccttgctagaggccaccccggacaccccagcttgcgtcgtgtcactgaacgggaaccacgccgtgcgcctgccgctgatggagtgcgtgcagatgactcaggatgtgcagaaggcgatggacgagaggagatttcaagatgcggttcgactccgagggaggagcttt

SEQ ID NO: 23701 - DNA, 395 bp, Homo sapiens
  misc_feature (1)...(395): n = a,t,c or g
gtngnnnntnatttgaanccattgaanancagctatgacatgattacgaatttaatacgactcactatagggaatttggccctcgaggccaagaattcggcacgaggcaaaggaggaagtgaggcgaattctggggctgctggatgcttacttgaagacgaggacttttctggtgggcgaacgagtgacattggctgacatcacagttgtctgcaccctgttgtggctctataagcaggttctagagccttctttccgccaggcctttcccaataccaaccgctggttcctcacctgcattaaccagccccagttcnnnnntgtcttgggnggaagtgaaactgtgtganaanatggcccanntngatgctannnagntnncnnanacccnccta

SEQ ID NO: 23702 - DNA, 426 bp, Homo sapiens
  misc_feature (1)...(426): n = a,t,c or g
gggcgtggtcaatcgctccctcccacccccattctaaagtgcctccagggcccaggagggggaaagcagaaggaaggcctggggctgcagcacaggcagcggaacaggcagaggttcacccaccttcaagcgggccttctcccttacctgcacgtcaaccacctgtgtggcaaattcctccgacccctagccttaagacaacaacaaggagaggcgcccagccacagcactcaaggaaacgacttgcctaatctcggagcgtgtctgttttgttcaggaaaatgtgaaccagctgtaacattctgtctctccaaaggtgcagccacaccgcaacatggctaaagatagcccggtgattgtatgcttgcagggaggcacagaattanncacagccaagttggccaaggttgtccatgcccaagtgac

SEQ ID NO: 23703 - DNA, 353 bp, Homo sapiens
ggaacttctgaccccaaatgatctgcctgccttggcctcccaaagtgttgggattacaggcgtgagccactgcgcccagccttgaggtagcatactttctgaaataaaaaagtagattatgtccgaagcagttgacctaaaaactgccttggactgacatttgttaggtggtctaagatgttctcttcacgctttgcaaaaaaatgagcttttttggagtttaaattaagcatccctctggtgtgtttggttttttagccaccaaaaatttaacaaatttgataacctgtcacgtgtaagttcagaaagcactttggtcttaattggtgacttgggggttatttggataaaaa

SEQ ID NO: 23704 - DNA, 345 bp, Homo sapiens
gccacagacctcctaaatcagaacctccagggagacacaggagcctgcactttaaacacacacctccagtgattctgttactcgttgaggtttgagatgcactatctagtctccacgtgacttctctgtgctgcctgtccccaccattctctgacaagttcccccagaccctcctcacatgctctttaaattatctggattactgtaacagtctccacttttgcctgttcaactgcagtcacaggttcacacagctgcttgcccacccacagctcttcccaacactgggtcatgctcctttcgcatccccatagtgggagtctcacatctcttctcttcctgtaa

SEQ ID NO: 23705 - DNA, 519 bp, Homo sapiens
gcaataccctgacatcagaaaatgctagaggatgcggaacaaccagaactcattcactgttgatggaaatgcaactgtacagctacattgggagacaccataacagtcttattttttatttactttgatagatgactgagagatagacaggcaggatctcactcttgcccaggctggagtgcagtggcacattcgtaactccctgcagcctggaactcctgggctcaagcgattttcccaccgtagcctcctgaggagctgaaactacaggtgcgcaccaccacacccactaattttttaaattttttgtagcgatgggtctcactgtgttgctcaggctcatcttgaactcctggcttcaatcttcccacctcagtctctcccaaagtgtttgcattacaggcatgggccactatgtccagcccactctgacagtttcttacaaaactacacataccttaccacctaatccagaaatcatggatcattaatatttatcccaatgagttggaaactttt

SEQ ID NO: 23706 - DNA, 991 bp, Homo sapiens
  misc_feature (1)...(991): n = a,t,c or g
tgacatgattacgaatttaataccgactcactatagggaatttggccctcgaggccaagaattcggcacgagcaccatggcggctgggaccctgtacacgtatcctgaaaactggagggccttcaaggctctcatcgctgctcagtacagcggggctcaggtccgcgtgctctccgcaccaccccacttccattttggccaaaccaaccgcacccctgaatttctccgcaaatttcctgccggcaaggtcccagcatttgagggtgatgatggattctgtgtgtttgagagcaacgccattgcctactatgtgagcaatgaggagctgcggggaagtactccagaggcagcagcccaggtggtgcagtgggtgagctttgctgattccgatatagtgcccccagccagtacctgggtgttccccaccttgggcatcatgcaccacaacaaacaggccactgagaatgcaaaggaggaagtgaggcgaattctggggctgctggatgcttacttgaagactaggacttttctgggtgggcgaactagtgacattggctgacatcacagttgtctgcaccctgttgtggctctataagcaggttctagagccttctttccgccaggcctttcccaataccaaccgctggttcctcacctgcattaaccaanccccagttccggggctgtcttgggccaaantgaaaactgtgtganaagatgccccantttgatgcctaaanaattttgcanaaaacccaancctaaanaagganacnccacgggaaaagaaaaaggtttcacngggaaaaaaaancaaaaaccccnagggcttnaaccggaaaggaaggaaaaaaaaagggggntgcccctnccccttgaaagnaagaaaanggaatgaaatnttaancaggcctngggntggttnaaccccaanggccaagggaacncttcctcnnccccngcccaaaaattnccttnttnttggaaaaaa

SEQ ID NO: 23707 - DNA, 561 bp, Homo sapiens
  misc_feature (1)...(561): n = a,t,c or g
gcaaagccgctgtagcaaagaagccctaaatacagtggctcgaataagacagaagtttatttctctctcgtgtaatagtttagacctcaacaatggctctgctctaaaattccagaattgggatttctatcttgtagctctaccagcccctagggcagagctcagagttcaaaatgcacatgagtaccctgggtggtttcattaaattgcaggttccagggccaggcacggtggctcatgcctgtaatcccaacactttgggaggcaaaggtaggaggattgcttgaggccaggaatttgagaccagtctggacaacatagcaagacctgtctcgacaacaataacaacaacagaaattagccaggtgtggtggtgcacgcctgtagtcccagctactggggaagggaaggccagggttggaggatcccttgagcacaaganttggaggttcaatganctatgattgcacaatgantccaacccnggtgaaaancaagaaccctttcttaaagaaaagaaaccagnggntggngaatggccaaangnnnttcccacnttgg

SEQ ID NO: 23708 - DNA, 461 bp, Homo sapiens
gcggaactctgaggtggtccattatggctgacatgcaaaatctggtagaaagattggagagggcagtgggccgcctggaggcagtatctcatacctctgacatgcaccgtgggtatgcagacagtccttcaaaagcaggagcagctccatatgtgcaggcatttgactcgctgcttgctggtcctgtggcagagtacttgaagatcagtaaagagattgggggagacgtgcagaaacatgcggagatggtccacacaggtttgaagttggagccgagctctgttggttacagcttctcagtgtcaacagccagcagaaaataagctttccgatttgttggcacccatctcagagcagatcaaagaagtgataacctttcgggagaagaaccgaggcagcaagttgtttaatcacctgtcagctgtcagccgaaagtatccaggccctgggctgggtggcct

SEQ ID NO: 23709 - DNA, 417 bp, Homo sapiens
gtgcggaggcggtgcggagcatttcggctctgagcggctgggcgaccggcgcgtcgcgcggggctgcggcggagcctccttaaggaaggtgcaagaggttggcagcttcgattgaagcacatcgaccggcgacagcagccaggagtcatgagcgacagcggcgagcagaactacggcgagcgggaatcccgttctgcttccagaagtggaagtgctcacggatcggggaaatctgcaaggcatacccctgcaaggtctcgctccaaggaagattccaggcgttccagatcaaagtccaggtcccgatctgaatctaggtctagatccagaagaagctcccgaaggcattatacccggtcacggtctcgctcccgctcccatagacgatcacgtagcaggtcttacagtcgagattat

SEQ ID NO: 23710 - DNA, 294 bp, Homo sapiens
agaagatggatatattctgtgccttaaccgaattcctcatgggaggaagaaccattctgacaaaggtcccaaaccagttgtcttcctgcaacatggcttgctggcagattctagtaactgggtcacaaaccttgccaacagcagcctgggcttcattcttgctgatgctggttttgacgtgtggatgggcaacagcagaggaaatacctggtctcggaaacataagacactctcagtttctcaggatgaattctgggctttcagttatgatgagatggcaaaatatgacctacc

SEQ ID NO: 23711 - DNA, 449 bp, Homo sapiens
tttgaataccgttggaacaccattacgaatttaatacgactcactatagggaatttggccctcgaggccaagaattcggcacgagtgtctgttttattctagccatcctagaaggtgtgaggtgatatctcattttggttttaatttgcatttccctaatgactaatgatgtgtgtgtcttttcatttgcttattggctatttgtatatctttggggaaatttctattcagatcctctgcctattttttgactggattgtctttttattgttgagttgtaagagttctttatatattctggatatgagccatgtatccgatgatttgcaaatatgggacaattttggtgtccttggaagcacaaaagttttattttttatcaagcataatttatctgttttttcttttgttgcttgtgatttttggtgtcatatccaagaaggctttgc

SEQ ID NO: 23712 - DNA, 551 bp, Homo sapiens
ggggaagatggcggacattcagactgagcgtgcctaccaaaagcagccgaccatctttcaaaacaagaagagggtcctgctgggagaaactggcaaggagaagctcccgcggtactacaagaacatcggtctgggcttcaagacacccaaggaggctattgagggcacctacattgacaagaaatgccccttcactggtaatgtgtccattcgagggcggatcctctctggcgtggtgaccaagatgaagatgcagaggaccattgtcatccgccgagactatctgcactacatccgcaagtacaaccgcttcgagaagcgccacaagaacatgtctgtacacctgtccccctgcttcagggacgtccagatcggtgacatcgtcacagtgggcgagtgccggcctctgagcaagacagtgcgcttcaacgtgctcaaggtcaccaaggctgccggcaccaagaagcagttccagaagttctgaggctggacatcggcccgctccccacaatgaaataaagttattttctcattcccaaaaaaaaaaaaaa

SEQ ID NO: 23713 - DNA, 443 bp, Homo sapiens
gactgtgaagacccagcaggaagccaggctgagtgagccacagaccacctgcttctgaactcaagctgcgtttattaatgcctctcccgcaccaggccgggcttgggccctgcacagatatttccatttcttcctcactatgacactgagcaagatcttgtctccactaaatgagctcctgcgggagtagttggaaagttggaaccgtgtccagcacagaaggaatctgtgcagatgagcagtcacactgttactccacagcggaggagaccagctcagaggcccaggaatcggagcgaagcagagaggtggagaactgggatttgaacccccgccatccttcaccagagcccatgctcaaccactgtggcgttctgctgcccctgcagttggcagaaaggatgttttgtcccatttccttggaggccaccgggacagacctg

SEQ ID NO: 23714 - DNA, 326 bp, Homo sapiens
caactctagaactccagcatgtataggtagagaaatgggaatatttgctctcttacaaatctaatccttcaaatatttctccatttagaataatgctatctcttgattaaaaaaaacggcggccgcgtcgacgtcgacccggccgcgaattccagatctatgaatcgtagatactgaaaaaccccgcaagttcacttcaactgtgcatcgtgcaccatctcaatttctttcatttatacatcgttttgccttcttttatgtaactatactcctctaagtttcaatcttggccatgtaacctctgatctatagaattttttaaatga

SEQ ID NO: 23715 - DNA, 429 bp, Homo sapiens
  misc_feature (1)...(429): n = a,t,c or g
gnnnnnnnntnnnnnnnntttanattcgctatcacatgattacgaatttaatacgactcactatagggaatttggccctcgaggccaagaattcggcacgagcgagctctcacagtgccggaactcacccagcaggtcttcgatgccaagaacatgatggctgcctgtgacccccgccacggccgatacctcaccgtggctgctgtcttccgtggtcggatgtccatgaaggaggtcgatgagcagatgcttaacgtgcagaacaagaacagcagctactttgtggaatggatccccaacaatgtcaagacagccgtctgtgacatcccacctcgtggcctcaagatggcagtcaccttcattggcaatagcacagccatccaggagctcttcaagcgcatctcggagcagttcactgccatgttccgc

SEQ ID NO: 23716 - DNA, 588 bp, Homo sapiens
cccttgactgattacgaatttaatacgactcactatagggaatttggccctcgaggccaagaattcggcacgagcggcacgaggacttctaaaaggaactatgtctggaaggctgtggtccaaggccatttttttttgctagttataagcggagtgggtctccggaaccaaagggagcacacagctcttcttaaaattgaaggtgtttacgcccgagatgaaacagaattctatttgggcaagagatgcgcttatgtatataaagcaaagaacaacacagtcactcctggcggcaaaccaaacaaaaccagagtcatctggggaaaagtaactcgggcccatggaaacagtggcatggttcgtgccaaattccgaagcaatcttcctgctaaggccattggacacagaatccgagtgatgctgtacccctcaaggatttaaactaacgaaaaatcaataaataaatgtggatttgtgctcttgtatttttaagtggattaaaaaacttactaccttaaattgatttgctacatgcttaaaatgatagaggttgctcagcatttttggagtacaagggggtcagagaga

SEQ ID NO: 23717 - DNA, 465 bp, Homo sapiens
gccctctagtcagttcttcacagtgacaccagggtgatggttcccaaaggcaacctgatcctgtcatgccaatgcctataaacatggcatagtagcttcccatgggctctaggataaaatgtagattatttaacaggcttacctgttgtatattctctatatctttccagccattttttcttctaattatttgatcaggcagtgtatccctcattctctttccttcacatgtgattcctaatgcctatgagccattccatctcttcatcccatctgtttttccccaactcaccagggtgtaactactaaccattctttaattcttacctgacttccaagactgagttagattttctattatgtactcccatggcaacagcattttccacttaacttgttggaaaagggacaactgcctctgggggctctggtgccaataattggtccactttctctttcattttc

SEQ ID NO: 23718 - DNA, 350 bp, Homo sapiens
gcaggatttttttcttaatcctaagtaaacctcttccactgttttgtcctaaaacggtattcttcactcgaaagcaaaaccaagcctttcatacttggaaagcaaattaaaactgtgttataataacgtattttgaaagaacaggtgtttaaagttagctattctccccccttgtattgccagattaatcatctttgcaaaaagtgcttatgtaagcaagaatttaacattcagaattttttcttttcttgggctataatgggcttaaaggctataatgtgtagtccattttcatgtttataaggcagggatttgaattatatcctataaggtttatcccagagagcaag

SEQ ID NO: 23719 - DNA, 322 bp, Homo sapiens
gggagaggaggttccccgtaccattattgtaaccacccgttctcagtacgggttaccatgaagatgccatcgtatactgtaactttaatcagttgtataaaattgacccttctactttgcagatgtgggcaaacattctgaagcgtgttcccaatagtgtactctggctgttgcgttttccagcagtaggagaacctaatattcaacagtatgcacaaaacatgggcctgccccagaaccgtatcattttttcacctgttgctcctaaagaggaacacgtcaggagaggccagctggctgatgtctgcttggacactccact

SEQ ID NO: 23720 - DNA, 491 bp, Homo sapiens
gtgaactgcatggcgagaaatatagaaacactgcacttaaagagatcatatatggtaagtgttgagaaccacaggatcctcaattaccacaaaacatgccaaaattataaaaaaatcaaaacaggtttggctggagagcgatgtgtgtaaccacccaggcactgacactgcagtatccacagcaatgacagtagacactgggcaagcacagcacacctgcctgcgtctgagtgctcagaaaaatatgggggcaggagaaaaagaataaaatatataagccggggggaaaaggtgaaatatttctattttcagggaatttaatcatatatgtcaaaagctgatgcctttgtagcagagagaagcagcattgaaaaactggtagtcctgagttccatcttgataaatgggtatatttagcatacacatagagatgcaatgaaaaggtctccatgttctaatagtcacattcaacaacattatgccatataaat

SEQ ID NO: 23721 - DNA, 398 bp, Homo sapiens
gagccgctgccgccgattccggatctcattgccacgcgcccccgacgaccgcccgacgtgcattcccgattccttttggttccaagtccaatatggcaactctaaaggatcagctgatttataatcttctaaaggaagaacagaccccccagaataagattacagttgttggggttggtgctgttggcatggcctgtgccatcagtatcttaatgaaggacttggcagatgaacttgctcttgttgatgtcatcgaagacaaattgaagggagagatgatggatctccaacatggcagccttttccttagaacaccaaagattgtctctggcaaagactataatgtaactgcaaactccaagctggtcattatcacggctggggcacgtcagcaagag

SEQ ID NO: 23722 - DNA, 374 bp, Homo sapiens
aagtgccagtttcttgttctgttacatatccaatgtcccatgtgtcatcacggtaagttaatatttgttgtatactatgtagagtttataacttacccaagcattttaattagcaagcatttctgttcccatcctcatcccattcagttcagtaaaacattgcactgggtctagaatgctctactgtctagttcctaatacttgccatctgctttccttgaagcttttagcccctgggctatctctacctttatctcagatgaccagtatcccaacttcaacttttctatgttttcttctccattaaaatatgcaactggctttagcattagagcattttattttaaaagaatgcaagcttttctctaagatag

SEQ ID NO: 23723 - DNA, 648 bp, Homo sapiens
  misc_feature (1)...(648): n = a,t,c or g
tgacatgattacgaatttaatacgactcactatagggaatttggccctcgaggccaagaattcggcacgagggcggcgggaaatcggctgtgggagagaggctaggcctctgaggaggcgaatccggcgggtatcagagccatcagaaccgccaccatgacggtgggcaagagcagcaagatgctgcagcatattgattacaggatgaggtgcatcctgcaggacggccggatcttcattggcaccttcaaggcttttgacaagcacatgaatttgatcctctgtgactgtgatgagttcagaaagatcaagccaaagaactccaaacaagcagaaagggaagagaagcgagtcctcggtctggtgctgctgcgaggggagaatctggtctcaatgacagtagagggacctcctcccaaagatactggtattgctcgagttccacttgctggagctgctggaggccctggggttggtagggcagctggtagaggagtaccagctggggttccaattccccaggcccctgctggattggcaggccctgtccgaggagttgggggaccatcccagcaggtaatgactccacagggaagaggcactgtacnnctgctgctgntgntgcgactgccanattgctggagcccc

SEQ ID NO: 23724 - DNA, 301 bp, Homo sapiens
ctttattcaataagatgtgtctttacaagtttaaaaagactggacaccattattttttatgaataatgcacataaccattttaaaaaacattttacttggccgggcacggtggctcacacctgtaatcccagcactttgggaggccaaggcggggtggatcacaaggtcaggagttcaagaccaacgtgacgtgaccaatatggtgaaaccccatctctactaaaaatacaaaaattagctgggcgtggtggcacgtgcctgtaatcccagctacttgggaagctgaggcaggagaattgc

SEQ ID NO: 23725 - DNA, 373 bp, Homo sapiens
  misc_feature (1)...(373): n = a,t,c or g
ggaagcacaaccatttgataaaacatcaataacactacatttggtagtggctgagtgacaggtgtcatagtattggtgtccaaaaatgcccaggtgccagattggttgagctgccaggtgtgaatcagatgtgactctcaggtgtgagtcatcatccccttttgtcagatcttttactccagaattctgcaggggctcattggtttctcagaccaggggttgtgtccnaggnatggctttaaagagcccttgganattaaaatnncnngngannggatttttttattatnttnangnncctannngnngtantnnancctnggtnngactcnnanttcnnaatatnnngntctcgncttnnnnntntgctccc

SEQ ID NO: 23726 - DNA, 459 bp, Homo sapiens
tgaagacccttatgacatgactacgaatttaatacgactcactatagggaatttggccctcgaggccaagaattcggcacgagcaaaaattgtctgactcacagaaaatgcccacttcatggttagcagaaatgacttcatctgttatatctgtaaaaaatgcctcttctgagtactctgggacatacagctgtacagtcagaaacagagtgggctctgatcagtgcctgttgcgtctaaacgttgtccctccttcaaataaagctggactaattgcaggagccattataggaactttgcttgctctagcgctcattggtcttatcatcttttgctgtccgtaaaaagcgcagagaagaaaaatatgaaaaggaagttcatcacgatatcagggaagatgtgccacctccaaagagccgtaccgtccactgccagaagctacatcggcagtaatcattt

SEQ ID NO: 23727 - DNA, 461 bp, Homo sapiens
  misc_feature (1)...(461): n = a,t,c or g
gtggaaatgttggagtgttgggtgtgtgtttcagctacttctatctttgtggtaaacctgaatacaggtgtttatctcccattctctctgcactaagctgaggagaaaatctgtggcaaatgcctttactaacattcaggttgtgccttctgatcctggggaaatagctgttggaagcgtgcctattatatgttcacctcttcattttctgtggtctcagcccacccaggaatgcaaagctccatcaacttcaagagctaggtcattaaggagacagatcccagggttggagccatagaagtagtggcactcagtgcatggccaagctccttcctgtaagaatgagtagacctggatttatttatggggtgagccagaggaaagtttcatgaagttcccttgctaaagctgtaatagggctattgnttgtttgctccatgatctccgtggtgcaagtttgt

SEQ ID NO: 23728 - DNA, 320 bp, Homo sapiens
gcatttttcaaaatctgttgaatgcacgcttaaaatctgtgcatattcttgcatggaaattatccctcaatgaaaggaatgtgaaaagatcttcccatgttttgtccttccatggattttgaaccctggtcagtcagttcatttcaaaaggtgataaggattaatctgtttgtggtccttcctgaccacccagccttttcctgttcacagacctgttcagaaaaggctttcattccaaggaagcagaatggaaaacagggtggcccactacagcctttgggccaaatctgctcaatcacatttttgtaagtaaagttgta

SEQ ID NO: 23729 - DNA, 458 bp, Homo sapiens
  misc_feature (1)...(458): n = a,t,c or g
ntttgaannntaaagccatgactgattacgaatttaatacgactcactatagggaatttggccctcgaggccaagaattcggcacgagaaagctgggtatcactaccattaaagttaacattcgtaatgccaattccctgggaggaggcttccattgctggacctgcgatgtccggcgccgaggcaccctacagtcctacttggactgaacaggcctgatggagcttgtggctggcctcagatacacctaagaagcttaggggcaaggttcattctcctgctttaaaaagtgcatgaactgtagtgctttaaacaatcatctccttaacaggggtcgtaagcctggtttgcttctattacttttctttgacataaagaaaataacttctgctaggtattactctctactcctaaagttatttactatttggcttcaagtataaaaatttggggaaagg

SEQ ID NO: 23730 - DNA, 337 bp, Homo sapiens
  misc_feature (1)...(337): n = a,t,c or g
gagagttccttgtttcttgtgaggattgcatgaaataaagggctcagcacagtcttggcagatagaacttaacatgtaaatgtcagctgttatgtttattactgtaaagcctttgatacgtgcacacttatacagtaaacttttttttttttngcaaaanccngtncaaaanncanttcaaaaatancccaatnttngcaannttacccaaaantaattnctttaccaggccncntananaaggggcacanaantnttttgaaanccncatncccngtcttgcangcccacgggnaaaacccgacttacttgggccttcccaaaatatttgcaaaac

SEQ ID NO: 23731 - DNA, 442 bp, Homo sapiens
  misc_feature (1)...(442): n = a,t,c or g
ggaaaccagcccactggataactctgatgcttttctctctactcatttaaagctgttccctagcgcttctagcaattccttctacgagtctgagctaccacaaggtttccaggattattacaatttaggccaattcacagatgacgatcaagtgccaacacccctcgtggcaataacgatcactaggctagtggtgggtttcctgctgccctctgttatcatgataagcctgttacagcttcattgtcttccgaatgcaaaggggccgcttcgccaagtctcagagcaaaacctttcgagtggccgtggtggtggtggctgtctttcttgtctgctggactccataccacatttttggagtcctgtcattgcttactgacccagaaactcccttggggaaaactctgatgtcctgggatcatgtatgcattgctctancatc

SEQ ID NO: 23732 - DNA, 507 bp, Homo sapiens
  misc_feature (1)...(507): n = a,t,c or g
ggtcccttaaagattttctgcttgaagtctcccttggaaatctgccatgagcacaaaattatggtaatttttcacctgagaagattttaaaaccatttaaacgccaccaattgagcaagatgctgattcattatttatcagccctattctttctattcaggctgttgttggcttagggctggaagcacagagtggcttggcctcaagagaatagctggtttccctaagtttacttctctaaaaccctgtgttcacaaaggcagagagtcagacccttcaatggaaggagagtgcttgggatcgattatgtgacttaaagtcagaatagtccttgggcagttctcaaatgttggagtggaacattggggaggaaattctgaggcaggtattacaaatgaaaaggaaacttgaaacctgggcatggtggctcacgcctgtaatcccagcactttgggaggccaaggtgggcaaatcactggaggtcagganttcgaaccanctnggcaa

SEQ ID NO: 23733 - DNA, 498 bp, Homo sapiens
gccatgtcaaggttaagtctttcgagaaggaaaggcagacagagaagcgtgtgctggagactgaacttgtggaccatgtactgcagaaactgaggactaaagtcactgatgaaaggaatggcagagaagcttccgataatcttgcagtgcaaaatctgaaggggtcattttctaatgcttcaggtttgtttgaaatccatggagcaacagtggttcccattgtgagtgtgctagccccggagaagctgtcagccagcactaggaggcgctatgaaactcaggtacaaactcgacttcagacctcccttgccaacttacatcagaaaagcagtgaaattgaaattctggctgtggatctacccaaagaaacaatattacagtttttatcattagagtgggatgctgatgaacaggcatttaacacaactgtgaagcagctgctgtcacgcctgccaaagcaaagatacctcaaattagtctgtgatgaaatttataaca

SEQ ID NO: 23734 - DNA, 344 bp, Homo sapiens
cggctgtgggaagatgccagaaaaggaaccaaggaactgccatactgcccactctgggtctctgccacccacctgcttcagggccaggcctgggttcaactgggtgcccaaaaagtggcaattagtgaatttagcaggtgcctcgagctgctcttccgggccacacctgaggaaaaagaacaaggggcagctttcaactgtgagcagggatgtaagtcagatgcggcactgcagcagcttcgggcagccgccctaattagtcgtggactggaatgggtagccagcggccaggataccaaagccttacaggacttcctcctcagtgtgcagatgtgcccaggtaa

SEQ ID NO: 23735 - DNA, 482 bp, Homo sapiens
  misc_feature (1)...(482): n = a,t,c or g
tntgncgtttgacatgattacgaatttaatacgactcactatagggaatttggccctcgaggccaagaattcggcacgagcggcacgagggactatcattactcctccaacaccaatcatcccagacgatcatccactctggatgtcatccaaatggctttccatgaatgtcttaatgctagatgaaaaacgtgttatggtggatgccaatgaagttccaattcaaaagatgtttgaaaagctgggtatcactaccattaaagttaacattcgtaatgccaattccctgggaggaggcttccattgctggacctgcgatgtccggcgccgaggcaccctacagtcctacttggactgaacaggcctgatggacttgtggctggcctcagatacacctaagaagcttaagggcaaggttcattctnctgctttaaaaagtgcatgacctgantgctttaaacaatcatcttcttaaccagggg

SEQ ID NO: 23736 - DNA, 472 bp, Homo sapiens
atttgggaaatccttatgactgatcacgaatttaatacgactcactatagggaatttggccctcgaggccaagaattcggcacgagtgcaactgaaggaattgttgtgaaaaaagggacagcgagtttgaaataaaagttgttagagtggtactgaggagaaaaaagaatccgagaccatgtactgcgcatacacaatcccgggcatgggcggcaactctttgatgtactactataatgggaaagcggtctatgctccatcagcaagcactgccgactacaatagggactcgccaggctatccttcctccaaaccagcaaccagcactttccctagctccttcttcatgcaagatggccatcacagcagtgacccttggagctcctccagtgggatgaatcagcctggctatgcaggaatgttgggcaactcttctcatattccacagtccagcagctactgtagcctgcat

SEQ ID NO: 23737 - DNA, 299 bp, Homo sapiens
  misc_feature (1)...(299): n = a,t,c or g
ttgnnnnntaaattgaaaactttgatgccagcttgacatgattacgaatttaatacgactcactatagggaatttggccctcgaggccaagaattcggcacgagtgctgaaataattattttggcacataggtgctaagcattgcacatgaacagcaaaaatggtagaagctttagtagctctttctgtcatttctggctgttcctagttcatcctctccccaacccctttgctgtctgtagagagacagcaggtgccatgcttctgctctgactctggaaccatactgcccgagtctg

SEQ ID NO: 23738 - DNA, 650 bp, Homo sapiens
cttacaaacagaactcccaggacttcatggatgagatttttcaggagctcgagaacttcagcttggagcaggaagaggaggacgtgccagaccaggaacagagcagcagcatcgagaccccatcagaggaggtggcctctccccacagctgaggggctggggctaggggtgggtggagcccttttaaaatacccttcccttcaacaactctccagctctgaatggagaaactctctaggccatcccctcttctacctcctgcaacccacccatcctattagcctcccacattcaaggcccgtgatacagggatgaggtcagcaccagcaaactctggactggtggaagaattccccaccagatctccttgaagcagaattagggatcaagcatcattaacaccttccccaccccctccccgcaggcagacagtgaagagaatcagaaaacatgattatgtgtcactttaatacaggaaatttaggtgttttttggtgtttttgtttttgtttttgttttctttccaaagctcacctcggggacaattccttgggcttctcctgaggtaatgatttacccccccacccacagctgagtctgtgaggccccatcctttccctacgttttctcccatcttttttcctcttcag

SEQ ID NO: 23739 - DNA, 538 bp, Homo sapiens
  misc_feature (1)...(538): n = a,t,c or g
gcggcatccttagtcctgccacgtctgaggcagtgtgccaagagagaatttaatatggagttcagagacaacccagggaactttgttaaaacagaagaaactttatttgaaattcagggaattgaccccatagcttcagctatacaaaaccttaaaacaactgacaaaacaaagccctcaaatctcgtaaacacttgtatcaggacaactctggatagagctgcgtgtttgccacctggagaccataatgcattatatgtaaatagcttcccacttctggacccatctgatgcaccttttccctcactcgattccccgggaaaagcaatccgaggaccacagcagcccatttggaagccctttcctaatcaagacagtgactcggtggtactaagtggcacagactcagaactgcatatacctcgagtatgtgaattctgtcaagcagttttcccaccatccattacatccaggggggattccttcgnatcttaattcanctttaatggagagacttaagacncnttgaaaccggcct

SEQ ID NO: 23740 - DNA, 417 bp, Homo sapiens
aacagctatgacatgattacgaatttaatacgactcactatagggaatttggccctcgaggccaagaattcggcgaggagcatcagaccctagactggagattgggacataagcaggcttgtgcacaaccagatcatctggaccatataattccagaccacaacttcctttttccagaatttgaaattgtaatagaaacagaagatgagattatgcctgaggttgtggaaaaggaagattactcagagattatagggagcatgggtgaagcacttgaggaagaactggattccatggcaaaacatgaatccagggaagataaaatttttcagaagtttaaaactcagatagcccttgaaccagaacagattcttagatatggcagaggtattgcccccatctggatttctggtgaaa

SEQ ID NO: 23741 - DNA, 480 bp, Homo sapiens
  misc_feature (1)...(480): n = a,t,c or g
gnnnntnnnnnnnntnnattgaanncnatgagaccttatgacatgantacgaatttaatacgactcactatagggaatttggccctcgaggccaagaattcggcacgaggaggaggcttccattgctggacctgcgatgtccggcgccgaggcaccctacagtcctacttggactgaacaggcctgatggagcttgtggctggcctcagatacacctaagaagcttaggggcaaggttcattctcctgctttaaaaagtgcatgaactgtagtgctttaaacaatcatctccttaacaggggtcgtaagcctggtttgcttctattacttttctttgacataaagaaaataacttctgctaggtattactctctactcctaaagttatttactatttggcttcaagtataaaattttggtgaatgtgtaccaagaaaaaattagtcacctgagtaacttggccactaataattaaccatc

SEQ ID NO: 23742 - DNA, 417 bp, Homo sapiens
  misc_feature (1)...(417): n = a,t,c or g
ggtttcaactgtgacaatttttactaagaagcctacagtgctataatggtatattatggtgattgtgccccaatatgcaggggcttgtcctgagaaaaggatgtttcaactcatagatgaaaaatgaatcaggaactaatcaggtggaatgggcacagatgtccaggctttggaaatacacgtgtaaaggccttgtatccacacctaaatctcatcttgaattgtaactcccacaattcccacgtgtcatgggaggaacccagtgggaggtgatggaattatgggggtgggtaatatttctcgtaatagtgaatgagtcccatgacatctgaggggtnaaaaaaatgggagtttccntacacangctctctcttttgncggccaccattcatataanaangttcttgctcctccttg

SEQ ID NO: 23743 - DNA, 406 bp, Homo sapiens
  misc_feature (1)...(406): n = a,t,c or g
gtgcctcaggtcatccccaagtctgagaacagcagccagccagccaagaaagccaagggggctgcaaagacaaagcagcagctgcagaaacagcaacatcccaagaaggcctccttccagaagctgaatggcatctccaaaggggcagactcagaattgtccactgtaccttctgtcacaaagacccaagcttcctccagcttccaggatagcagtcagccagctggaaaagccgaagggatcagggagccaaaggtgactgggaagctaaagcaacgatcacctaaattacagtcctccaagaaagttgctttcctcaggcagaatgcccctcccaagggcacagacacacaaacaccggctgtgttatccccatncaagactcaagccaccctgaaacctaagg

SEQ ID NO: 23744 - DNA, 427 bp, Homo sapiens
  misc_feature (1)...(427): n = a,t,c or g
gggactgtggagaggccatcagaccacagccagcctaaatggcaagtgagggaaatcctggtgggagctgatgagccgagtgcatgggagctgggaattatggacaagtgtcaggagcaagtgacttcctggctggctctgaaggatgaagagctttcaggcaaagtggcacgaagaggggcattttaggaagcccaagcatcatgtgccaggaaagggctagtctgggacttcggtggctctgggcagtgtgagatatcgggggtgggggccagtggtgatgggcatggccaatgtagatgcctctaaggggagccgcaagcacgcgggcctctggggcacagctatatgttctgaaaatgaacaccttcatttggtttctctgggctttcaagaattcgggtcccctgaaaaagtncccncttcg

SEQ ID NO: 23745 - DNA, 802 bp, Homo sapiens
ggaaaatttgtgacaactgagtttgagccatgctttgatgctgctgacttcattcgagctggaagagatatttttgcacagagaagccaggttacaaactacctaggcattgaatggatgcgtaggcatcttgctccagactacagagtgcatatcatctcctttaaagatcccaatcccatgcatattgatgctaccttcaacatcattggacctggtattgtgctttccaaccctgaccgaccatgtcaccagattgatcttttcaagaaagcaggatggactatcattactcctccaacaccaatcatcccagacgatcatccactctggatgtcatccaaatggctttccatgaatgtcttaatgctagatgaaaaacgtgttatggtggatgccaatgaagttccaattcaaaagatgtttgaaaagctgggtatcactaccattaaagttaacattcgtaatgccaattccctgggaggaggcttccattgctggacctgcgatgtccggcgccgaggcaccctacagtcctacttggactgaacaggcctgatggagcttgtggctggcctcagatacacctaagaagcttaggggcaaggttcattctcctgctttaaaaagtgcatgaactgtagtgctttaaacaatcatctccttaacaggggtcgtaagcctggtttgcttctattacttttctttgacataaagaaaataacttctgctaggtattactctctactcctaaagttatttactatttggcttcaagtataaaattttggtgaatgcatct

SEQ ID NO: 23746 - DNA, 330 bp, Homo sapiens
ctcaggtgcaaccccctgcgtggtcctctgtggcagccttctctcattcagagctaaaaagaaaactcagtagaagataatggcaagtccagactggggatatgatgacaaaaatggtcctgaacaatggagcaagctgtatcccattgccaatggaaataaccagtcccctgttgatattaaaaccagtgaaaccaaacatgacacctctctgaaacctattagtgtctcctacaacccagccacagccaaagaaattatcaatgtggggcattccttccatgtaaattttgaggacaacgataaccgatcagtgctgaaaggtggtcc

SEQ ID NO: 23747 - DNA, 347 bp, Homo sapiens
gaaatagtataaagcagaagaccatggcaatcagccacttatttttgaagtcgatagagtatttatggcttataattagatgtatctggtatgattttgtccaggtggaatattttaaatcatggggtgagcctatggaaatataaaactgaaaggactcagccaggcgtggtggctcacgcctgtaatcccagcattttgcaaggctgaggcagtcaggtcacgccgtcaggtgttagagaccagcctggccaaaatattgaaacctcgtctctactaaaaatacaaaaaattagctgggcatggtggcaggtgcctgtaatcccagctactcgggaggctgaggc

SEQ ID NO: 23748 - DNA, 400 bp, Homo sapiens
gctgggaaaggcggtgttgggaaaagcacattcagcgcccaccttgcccatggcctagcagaggatgaaaacacacagattgctcttctagacatcgatatatgtgggccatcgattcccaagataatgggattggaaggagagcaggttcaccagagtggctcaggctggtctccagtgtacgtggaagacaacctgggggtgatgtcagtgggcttcctgctcagcagtcctgatgatgctgttatctggaggggacccaagaaaaacggcatgatcaagcagttcctccgagatgtggactggggagaggtcgactacctcattgtggacaccccacctgggacgtcggatgaacacctctcggtcgtccggtacctggccacagcacacatcgatg

SEQ ID NO: 23749 - DNA, 315 bp, Homo sapiens
gcgcagtccgggtcctggcttcggcctcagccccaccatggtgacgcttgctgaactgctggtgctcctggccgctctcctggccacggtctcgggctatttcgttagcatcgacgcccatgctgaagagtgcttctttgagcgggtcacctcgggcaccaagatgggcctcatcttcgaggtggcggagggcggcttcctggacatcgacgtggagattacaggaccagataacaaaggaatttacaaaggagacagagaatccagtgggaaatacacatttgctgctcacatggatggaacatacaaattttg

SEQ ID NO: 23750 - DNA, 512 bp, Homo sapiens
gctatttgatgccctacagctatgacatgattactaatttaatacgactcctatagggaatttggccctcgaggccaagaattcggcacgagggaaggaggtgtgggccaggaaagagcatatgtctgatgcctgggattccaggacagaaagtacagccgactccaagctcttgggatgggattggagggtctcaaaaccttgccagctttggagtcagagagaaaagagtcccaaccccagatttatcatttgctaacaaatgtgaccttgggcaaatcagctcacctctctggccctcaacagagataatcctgggacctatttcacagtcatggagaggattaaatgggaagaggaataaaaggagtttggagaagtgcccaggacatagtatgcactgagcaaattccatagtaagaggagtattagtaatagctactattgattaggtggtgttgtgagttgaacagtgtcccccaaaattcatgtccacccagagacacagaatg

SEQ ID NO: 23751 - DNA, 439 bp, Homo sapiens
ggggagaaagaaaaactgctttgtgtgccaaaagcaaaactcttggtgtttttgtttgtgaaataggctccttctcctgaaaaagccgaggaggagagtgagaggcttctgagggaactctatttgtttgatgttctccgcgcagatcgaactactgctgcccatggtcttgaactgagagtcccatttctagatcatcgattttcttcctattacttgtctctgccaccagaaatgagaattccaaagaatgggatagaaaaacatctcctgagagagacgtttgaggattccaatctgatacccaaagagattctctggcgaccaaaagaagccttcagtgatggaataacttcagttaagaattcctggtttaagattttacaggaatacgttgaacatcaggttgatgatgccatgatggcaaatgcacccaaaa

SEQ ID NO: 23752 - DNA, 492 bp, Homo sapiens
  misc_feature (1)...(492): n = a,t,c or g
ttgaannccgnttnacatgattacgaatttaatacgactcactatagggaatttggccctcgaggccaagaattcggcacgagtcagactggcccttctgctctgatgaagactggaactacaaatgcccttctggctgcaggatgaaagggttgattgatgaagtcaatcaagattttacaaacagaataaataagctcaaaaattcactatttgaatatcagaagaacaataaggattctcattcgttgaccactaatataatggaaattttgagaggcgatttttcctcagccaataaccgtgataatacctacaaccgagtgtcagaggatctgagaagcagaattgaagtcctgaagcgcaaagtcatagaaaaagtcagcatatccagcttctgcagaaaaatgttanagctcagttggttgatatgaaacgactggangtggacattgatattaagatcccgatcntgtcganggtcatgccgta

SEQ ID NO: 23753 - DNA, 396 bp, Homo sapiens
gcatcttcatggcatttcggtaacacttatttagtgcctactgtctattgagtgccatccctggctctgaagggaactgtatcctgatgtttatgctgcggagtgatgtggcggagggaggccagggagggtgtcaggagcctgccacactgggcagcaccaggcctcatttctagggcaacgcaggacctctggctgaagcaggggagggatccagcccctcagggtgttgtcttctgtgttttgctggggggaagtaagtcttcctcccttatccagaagataggagactccgggagatgcttctgtggacactgtcctgaagggtccctctccctcgcccactgggttgggcgcccaggccttcccgccagccggttaaaacatcttcctgct

SEQ ID NO: 23754 - DNA, 443 bp, Homo sapiens
  misc_feature (1)...(443): n = a,t,c or g
gtaaaatccttgtacagaaggaattaggttaccaaaacattttgaaaataattttacaaatagccggagagaagcctgggtgcctggggaatattgctgaagtagagtagttatcatatgaataaatggaaacaaatttctacataataagataattatttccggaagaaagtcttcagcttaccaactttcagccctctctctggtacttgaacttgcctgaggttgatgcctttcatgtcagtttcagagaggaggcttactatgtaaatgctgtggatactagcttctaaaatatccttctcaggaaagcctganagctgattcaggaagtgtacagaagaaacagctgctaaggaataagaggcggggctagaggcactgtggggtaggctgctatagggtgatgggaaggcactgggacactgaaggagaattatgaa

SEQ ID NO: 23755 - DNA, 352 bp, Homo sapiens
gtttatattgtattaaaagtaaaatcgtcaatgtttcattacttctacttttatttaatattgtatagacagtgagtacattgggccctttagtgattaatttgatttaaatgtttgaaatgtaacataatgtcaaaagaactcttttcttttcaatttaaactgtgtgtttttggccaggcacagtggcttacacctgtaatccctgcactttgggtggccgaggcgggtggatcacttgaggtcaggagtttgagaccagcctggccaatatggtgaaacatggtcttaataaaaatacaaaaatgagccaggtgtggtggccgtgtgcctgtaatccagtactcggaag

SEQ ID NO: 23756 - DNA, 521 bp, Homo sapiens
  misc_feature (1)...(521): n = a,t,c or g
ggaacaggtggatgtatagcatttttattcatgccatctgttttcaaccaactatttttgaggaattatcatgggaaaagaccagggcttttcccaggaatatcccaaacttcggaaacaagttattctcttcactcccaataactaatgctaagaaatgctgaaaatcaaagtaaaaaattaaagcccataaggccagaaactccttttgctgtctttctctaaatatgattactttaaaataaaaaagtaacaaggtgtcttttccactcctatggaaaagggtcttcttggcagcttaacattgacttcttggtttggggagaaataaattttgtttcagaattttgtatattgtaggaatcctttgagaatgtgattccttttgatggggagaaagggcaaattattttaatattttgtattttcaactttataaagataaaatatcctcaggggtggggaaantggcgntttcataacttgctgaatttcaggcattttggtctacatgaggctca

SEQ ID NO: 23757 - DNA, 409 bp, Homo sapiens
gaacactccaaacagtggttatacacagtctcaagttcagtgctccccgggattactctggctatcaacgggatggatatcagcagaatttcaagcgaggctctgggcagagtggaccacggggagccccacgaggtaatattttgtggtggtgatcctagctcctaagtggagcttctgttctggccttggaagagctgttaatagtctgcatgttaggaatacatttatcctttccagacttgttgctagggattaaatgaaatgctctgtttctaaaacttaatcttggacccaaattttaatttttgaatgatttaattttccctgttactatataaactgtcttgaaaactagaacatattctcttctcagaaaaagtgtttttccaactgaaaattatttttc

SEQ ID NO: 23758 - DNA, 406 bp, Homo sapiens
gactttacaaattgagaaatggagtttaattacttgccttgggccaggagactagctggtgatgaaggtgaaatgagaattctcagggaggtgaaattagaatttccagccactgaattccacataccttattaaactcccaatgggagtctacccactctcctgttggtgttagaatgttatttcttacatgaatgaatcagtgtcacagatcagtaggtgaagatgactggtttccctaagctgccaacactgtgattatctgagtgtcaatgacccataggcagtcacagtggtcccgagagccccgtccctgatgcctgggagctctcagtctagtgaagtttggccttgcatatttatagtttatccactctaacatctgggaagtgaagactctggttgc

SEQ ID NO: 23759 - DNA, 378 bp, Homo sapiens
ggctcatccccacctgtcttcaacagctccccattaccctcaggacaatgtctgaactctccagcttcgcgtgagaagtccccttccatcccagagggtgggcttcagggcgcacagcatgagaggctctgtgcccccatcaccctcgtttccagtgaattagtgtcatgtcagcatcagctcagggcttcatcgtggggctctcagttccgatttcccaggctgaattgggagtgagatgcctgcatgctgggttctgcacagctggcctcccgcgttgggcaacattgctggctggaagggaggagcgccctctagggagggacatggccccggtgcggctgcagctcacccagccccaggggcagaagagaccca

SEQ ID NO: 23760 - DNA, 507 bp, Homo sapiens
  misc_feature (1)...(507): n = a,t,c or g
gtgntaataanctnatacctcnnnaaacccttntgactgctacgaatttaatacgactcactatagggaatttggccctcgaggccaagaattcggcacgagcatcaatctgcctgcaaagattcagactggcccttctgctctgatgaagactggaactacaaatgcccttctggctgcaggatgaaagggttgattgatgaagtcaatcaagattttacaaacagaataaataagctcaaaaattcactatttgaatatcagaagaacaataaggattctcattcgttgaccactaatataatggaaattttgagaggcgatttttcctcagccaatannnnnnnnnatcctncaccgagtggtcngaggatctgagaacnagaatttgaagccctgaacgcaaagtcatagaaaaagntcagnatatccagcttntgnngaaaaatggtatagctcaattngnntgttttgaaaacgactgggaggnggacattgnttttaaaa

SEQ ID NO: 23761 - DNA, 398 bp, Homo sapiens
gtcggaagggtaagtgttcagtaaacaaatccagaggaagtatcaaagatgagctccagatacagagcttttattttgtagactggactatgcccagtagacaaacggctaacaaaagccaattcgatcttacataaaaaagataaactataagtaagtagcctgtgtcttgaataacaggttgtaacaacagcagtatgctgcctttgtatgtagcatcactgggaactggtcctaagcttagtggcccggctcctcctccagctggcccttaggcatttacactgtgagggtgagcaaggattgttagtttgcacacaccctcactgacttgcttatcccaaatgcagattaatatgtcttcaattctcaaacttaaaggcagagaagggcccggg

SEQ ID NO: 23762 - DNA, 494 bp, Homo sapiens
  misc_feature (1)...(494): n = a,t,c or g
tatgactgattacgaatttaatacgactcactatagggaatttggccctcgaggccaagaattcggcacgaggcccaaggcaagagtgcagatgtaccacaggcctcatccttaattgttatacttcaagctaacaaacaattaagtacaatatgtcctatcagctgatcttgacaagtataccttcgtggccactgggaaggccagtttgatgtagaatccctgcctcctgggggttctgcaggttgggttccctggaccacccaattccctttccatccctggctctgtgttgtacctcaggagcttcctacatttgtgggacattcctggccatacctccaaggtccacctgcatgccccttggccattctttgggcctagaggtgcacacagctgtgtggccaccttccagaagacggacctgggaaaacagacttgaaattctctaagcagagaatctggggctccgggtattccaagaatggnctaaa

SEQ ID NO: 23763 - DNA, 507 bp, Homo sapiens
  misc_feature (1)...(507): n = a,t,c or g
gggctcggcgtggaggtgcgcacctgcagttccagcaactcaggaggctgaagttgggggactgtttgagcctggaagatggaggtggtggtgagatgagatggtaccaccacactccagtctgagcaacagagctaggccctttctcaaaaaaataaagtaaaataaaaataaaataacccctaagatggcaaatattgatagataaaattcatataaacaaaagctctccaggatcctactattagggaagacctgctgtccatccaccatcactgaactctccaccaaggccctggctggaggaccggccaacagctctgagagagggacctgaggtcaaatgctgcctcaccatgcaggtgccaaactgtggctggtccacaaatcactctttgtttacaattaccaaagtacagaaattgaaaccaacctttanaacactaagagcaactgtcactgccacacaacaacacatgctcatgggcttgtatggggtgtggcttg

SEQ ID NO: 23764 - DNA, 296 bp, Homo sapiens
  misc_feature (1)...(296): n = a,t,c or g
catttttggagctatttgttttaaatttccagtttcttgctttttcattcttatatcagttgtgtaagtatgtgtgtgtgtgcaagtgctgttgtcttttgttgttctgatattacataaatttatagtcatcttgtctttgctcttgagttttttatgtttcaatttgttgaatttggtgcacagtttgcgtgatttttttttattcaaacctttatgacgttctcgtttctgtatttgagcttccctgttgacttgtttgtgaatacttactgtttgccatagtctgcttntgg

SEQ ID NO: 23765 - DNA, 444 bp, Homo sapiens
  misc_feature (1)...(444): n = a,t,c or g
tttnnnaactctatgacatgattacgaatttaatacgactcactatagggaatttggccctcgaggccaagaattcggcacgaggaagaacaataaggattctcattcgttgaccactaatataatggaaattttgagaggcgatttttcctcagccaataaccgtgataatacctacaaccgagtgtcagaggatctgagaagcagaattgaagtcctgaagcgcaaagtcatagaaaaagtacagcatatccagcttctgcagaaaaatgttagagctcagttggttgatatgaaacgactggaggtggacattgatattaagatccgatcttgtcgagggtcatgcagtagggctttagctcgtgaagtagatctgaaggactatgaagatcagcagaagcaacttgaacaggtcattgccaaagacttacttccctctaa

SEQ ID NO: 23766 - DNA, 345 bp, Homo sapiens
gaggaagctcagagccaaattagtggctcccttcgagcgaatgcccaggacttcaacgcatgcactttgtgttgacctcatccctggcttcaccttggtttttcccatcctagttctccctatgcctgaatatcctgtcttttcttttttataagcaaccacactgtattggatgaccctagatcttctttgagacaaggcaggctgtggccatgtagccccatcacactgtgtttgtgattgtctgtgtgtctgtctcccccaccagactgtgagctccatgagggcagggaccgtgtcttgtccgttctctgtatccccagtgcttggaacagagcgagtgct

SEQ ID NO: 23767 - DNA, 505 bp, Homo sapiens
  misc_feature (1)...(505): n = a,t,c or g
gggggacagcatgccgtcttgctgtggccactcccaagtgtgccctcttccctctttacacatcaggtgtctctggcacaggacttggcactaagctccatgctgagacaccaggctatgtgggcccccaccttgtttcccagcctgcaccttagaagccgaaggtgctttcatcagaaccctaaaatggtcgttgaaggcgcctgggccgcagcccagcagtagttggagaggcaggcagagggcagtggttctcccaaataggagacctggggcctggccaggccagggtttgggcctaatggctttgactaaattacccccatcctccttgcccggaaaagggagagctagagccactcactgtcattctgctctgaccttgaagggggcggtgttggcctggcttctggaatggactgagtccatcgtggaaanggctgggggcaagaagaagtngggaagggcactcctgcggaagggaggntnaatcattaacccaatg

SEQ ID NO: 23768 - DNA, 433 bp, Homo sapiens
gagcaaaggcagtgaggaggatgtggtgtcaaagaatcaaggcgatagtgccagaaagcagcctggctcatccacctccagttcttctcacctagcgaagccttccagcagcagactgtgtgacaccagttctgcaaggcaggaaagtaccagcaaagcagaccttaactgttctaagaacaaagacctatatcaagaacaggtagaagtaatgttagatgtgacagatacaagtatggatacttatttggaaagagaatgggggaataaaccaagtgactgtgtaccctacaaagatgaagaactttatgatcttccagctccttgtactcctttgtcccttagttgccttcagctcagtactccagaaaatagagagagctctgtggtccaagcaggaggttccaaaaagcactcaaaccatctcagaaaa

SEQ ID NO: 23769 - DNA, 484 bp, Homo sapiens
  misc_feature (1)...(484): n = a,t,c or g
ctcactatagggaatttggccctcgaggccaagaattcggcacgaggtagttaggttcatagagacagaaggcaaaatgttggtttccaggggttggaagcagtggaatggggagttactgtttactgtatagagtttcagttggggaagatgaaaaaaagtcctggaaatggaagcttcttatggttgcacaacaatatgaatgtacttaatgtcacttaaaaatggctaaattggtgaattttatgttgatgtattttactacaactaaaactgaaaaaaaaattaataaatgatttgggatgttactttacatctttaaaatatctttacttttgccatattctgttagcaagaagcaagttataggtctcgcccacacttgggggaaagtattagacagggcttgagtaccaaggggattggggaccatgggggcaccttanagtctgtctgcccatttccccaaccctcaccaaaaaaa

SEQ ID NO: 23770 - DNA, 593 bp, Homo sapiens
gtttattgcttaatccctctctcccccttcttttttgtctcaagattatattataataatgttctctgggtaggtgttgaaaatgagcctgtaatcctcagctgacacataatttgaatggtgcagaaaaaaaaaaagaaaccgtaattttattattaaattctccaaatgattttcatcaatttaaaatcattcaatatctgacagttactcttcagttttaggcttaccttggtcatgcttcagttgtacttccagtgcgtctcttttgttcctggctttgacatgaaaagataggtttgagttcaaattttgcattgtgtgagcttctacagattttagacaaggaccgtttttactaagtaaaagggtggagaggttcctggggtggattcctaagcagtgcttgtaaaccatcgcgtgcaatgagccagatggagtaccatgagggttgctattgttgtttttaacaactaatcaagagtgagtgaacaactatttataaactagatctcctatttttcagaatgctcttctacgtataaatatgaaatgataaagatgtcaaatatctcagaggctatagctgggaa

SEQ ID NO: 23771 - DNA, 437 bp, Homo sapiens
gcggcacgaggaagagatcaagttagtggaagtggagcaaataacacagaatgggacactggctatgacagtgatgaacgaagagatgcaccctctgttaacaaactggtgtatgaaaatataaatgggctatctatccctagtgcctcaggggtcaggagaggtcgtctgacatccaccagtacctcagatacccagaatatcaacaactcagctcagagaagaactgcattattaaactatgaaaatctaccatctttgcctcctgtttgggaagcccgcaagctaagtagggatgaagatgacaatttaggaccaaagaccccatctctaaatggctaccataataatctagatccaatgcataactatgtaaatacagagaatgtaacagtgccagcaagtgctcacaaaatagaatattcaaggcgtcgggg

SEQ ID NO: 23772 - DNA, 458 bp, Homo sapiens
  misc_feature (1)...(458): n = a,t,c or g
ggtgntnnnnnnttgganttgnatnaccgttatgactgattacgaatttaatacgactcactatagggaatttggccctcgaggccaagaattcggcacgagtgaagtcctgaagcgcaaagtcatagaaaaagtacagcatatccagcttctgcagaaaaatgttagagctcagttggttgatatgaaacgactggaggtggacattgatattaagatccgatcttgtcgagggtcatgcngnagggntttagctcgngaagtagatctgaaggactatgaagatcancagaagcaacttgaacaggtcattgccaaagacttacttccctctagagataggcaacacttaccactgataaaaatgaaaccagttccagacttggttcccggaaattttaagagccagcttcagaaggtacccccagagtggaaggcattnncagacatgccgcaga

SEQ ID NO: 23773 - DNA, 478 bp, Homo sapiens
  misc_feature (1)...(478): n = a,t,c or g
ggagaggatggtagtgtctgacttccacgttttcgtcagggatgtgttgcagcatgtggattccatgcagaaagactaccctgggcttcctgtcttccttctgggccactccatgggaggcgccatcgccatcctcacggccgcagagaggccgggccacttcgccggcatggtactcatttcgcctctggttcttgccaatcctgaatctgcaacaactttcaaggtccttgctgcgaaagtgctcaaccttgtgctgccaaacttgtccctcgggcccatcgactccagcgtgctctctcggaataagacagaggtcgacatttataactcagaccccctgatctgccgggcagggctgaaggtgtgcttcggcatccaactgctgaatgccgtctacgggtggagcgcgccctcccaagctgactgtgcccttcttgtngttcaggctntgccaacgcctatgtgacacaaaggg

SEQ ID NO: 23774 - DNA, 704 bp, Homo sapiens
  misc_feature (1)...(704): n = a,t,c or g
gcttcattctaccaatagacagagaacaaaccatctgttagttgggtggtgatgggtgtcaactttgggaaatccacattccttaagcatgaagtcagactttcataagctaccctcttggaatttcttgtttcagtgctggccatcgagctccttgcagcctgccagggcatagaagttctacgtcccctgaaaacaaccactccgctggagaaggtctatgacctggtgcgctctgttgtaaggtaagatcaaacaggtctctgaaaattacatcagttcagcactgtgaaccctggcagggtttcatgtttggctgatgggcggatgtgctctccctgtaggccctggataaaagatcgcttcatggccccggacatcgaggcagcccacaggctgctcctggagcagaaggtttgggaagtagctgctccatacattgaaaaatacagaatggagcatattccagaatcaagacctctttctccaacagccttttcactgcaatttctgcacaagaaatccaccaaaatcccggagtctgaggacctttaatgggctttgtcatgaagtagcagatgagagggcagtcagtttagcacannnnnntactaggctgaaggagagacctgagaactttcctaggtagatcaatccattgtatcattcagttcttctaaagcctacgttggttaggctgatgg

SEQ ID NO: 23775 - DNA, 345 bp, Homo sapiens
aaaggtgcttcgggagggggagagactgaccctgccgcagctggctgacacctacgagacgctggccatcgagggtgcccaggccttctacaacggcagcctcacggcccatattgtgaaggacatccaggcggccgggggcattgtgacagctgaggacctgaacaactaccgtgctgagctgatcgagcacccgctgaacatcagcctgggagacgtggtgctgtacatgcccagtgcgccgctcagcgggcccgtgctggccctcatcctcaacatcctcaaagggtacaacttctcccgggagagcgtggagagccccgagcagaagggcctgacgtacca

SEQ ID NO: 23776 - DNA, 451 bp, Homo sapiens
  misc_feature (1)...(451): n = a,t,c or g
gcaataatttcagatgtttaatgggactttgaaaagataggaaaaaatagaaatgaaaatttatctcacctttaatactgtgaatactatttggagggtccctggtcagacatttaaatatcaaacttaagaactgacatggagcctttgattagtttatatacatgatctgaatatttacacacatagcacactatagcaacctcttgtaaaaaatcatgaagatagaattcaacagtgtatattctattaaaaagtaaattggctgggtgtggtggctcatgcatgtaatcccagcactttgggaggccgaggcaggaggatcgcttgagcccaagagtttgagaccagcctaggtgacaaagtgagaccccatctctacaaaaaaattaacaaattatccagatgtggnggtgtttgcctgcggcctagctcccncggaagttgagca

SEQ ID NO: 23777 - DNA, 340 bp, Homo sapiens
agagaacaaaaaaatgagacacaaaaaggttaaataactttttcaagaaatatctgctagtgatgattcttaagtttggtgaaatcttagtctccttctctgtgatattattattttatggtatgttgatttatctgcaagatgttatcctcatagttttgtgctctgaaaaggagaatttagaaagtggaaattgaaccattatgtgcaagtgaaagttttggtttctgggcagcagcatctcctattataacagagcttaaaaatagcaaattgttctttaaatcaacaggtccttctcttccaattgtcttttactcaaatatggaatcattgcttt

SEQ ID NO: 23778 - DNA, 322 bp, Homo sapiens
gaaaagcaaacaggtctgggaggcagttctgttgccactctctctcctgtcaatgatggatctcagaaataccccagccaaatctctggacaagttcattgaagactatctcttgccagacacgtgtttccgcatgcaaatcaaccatgccattgacatcatctgtgggttcctgaaggaaaggtgcttccgaggtagctcctaccctgtgtgtgtgtccaaggtggtaaagggtggctcctcaggcaagggcaccaccctcagaggccgatctgacgctgacctggttgtcttcctcagtcctctcaccacttttcaggat

SEQ ID NO: 23779 - DNA, 1675 bp, Homo sapiens
  misc_feature (1)...(1675): n = a,t,c or g
gaaccttcctgccgtcgcgtttgcacctcgctgctccagcctctggggcgcattccaaccttccagcctgcgacctgcggagaaaaaaaattacttattttcttgccccatacataccttgaggcgagcaaaaaaattaaattttaaccatgagggaaatcgtgcacatccaggctggtcagtgtggcaaccagatcggtgccaagttctgggaggtgatcagtgatgaacatggcatcgaccccaccggcacctaccacggggacagcgacctgcagctggaccgcatctctgtgtactacaatgaagccacaggtggcaaatatgttcctcgtgccatcctggtggatctagaacctgggaccatggactctgttcgctcaggtccttttggccagatctttagaccagacaactttgtatttggtcagtctggggcaggtaacaactgggccaaaggcccactacacggagggagccgagctggtcgactcggtcctggatgtggtgaggaaggagtcagagagctgtgactgtctccagggcttccagctgacccactctctggggggcggcacggggtccgggatgggcaccctgctcatcagcaagatccgggaagagtacccagaccgcatcatgaacaccttcagcgtcatgccctcacccaaggtgtcagacacggtggtggagccctacaacgccaccctctcggtccaccagctggtggaaaacacagatgaaacctactccattgataacgaggccctgtatgacatctgcttccgcaccctgaagctgaccacccccacctacggggacctcaaccacctggtgtcggccaccatgagcggggtcaccacctgcctgcgcttcccgggccagctgaacgcagacctgcgcaagctggcggtgaacatggtgcccttccctcgcctgcacttcttcatgcccggcttcgcgcccctgaccagccggggcagccagcagtaccgggcgctcacggtgcccgagctcacccagcagatgttcgactccaagaacatgatggccgcctgcgacccgcgccacggccgctacctgacggtggctgccatcttccggggccgcatgtccatgaaggaggtggacgagcagatgctcaacgtgcagaacaagaacagcagctacttcgtggagtggatccccaacaacgtgaagacggccgtgtgcgacatcccgccccgcggcctgaagatgtcggccaccttcatcggcaacagcacggccatccaggagctgttcaagcgcatctccgagcagttcacggccatgttccggcgcaaggccttcctgcactggtacacggggcgagggcatggacgagatggagttcaccgaggccgagagcaacatgaacgacctggtgtccgagtaccagcagtaccaggacgccacggccgacgaacaaggggagttcgaggaggaggagggcgaggacgaggcttaaaaacttctcagatcaatcgtgcatccttagtgaacttctgttgtcctcaagcatggtctttctacttgtaaactatggtgctcagttttgcctctgttaggaaattcacactgttgatgtaatgatgtggaactcctctaaaaattacagtattgtctgtgaaggtatctatactaanaaaaaagc

SEQ ID NO: 23780 - DNA, 467 bp, Homo sapiens
  misc_feature (1)...(467): n = a,t,c or g
gnagtgtnnntttgagtttcgttatcncatgantacgaatttaatacgactcactatagggaatttggccctcgaggccaagaattcggcacgagaataaccgtgataatacctacaaccgagtgtcagaggatctgagaagcagaattgaagtcctgaagcgcaaagtcatagaaaaagtacagcatatccagcttctgcagaaaaatgttagagctcagttggttgatatgaaacgactggaggtggacattgatattaagatccgatcttgtcgagggtcatgcagtagggctttagctcgtgaagtagatctgaaggactatgaagatcagcagaagcaacttgaacaggtcattgccaaagacttacttccctctagagataggcaacacttaccactgataaaaatgaaaccagttccagacttggttcccggaaattttaagagccagcttcagaaggtc

SEQ ID NO: 23781 - DNA, 311 bp, Homo sapiens
taaatcagtaaattagttgagttgtttttgggggggaggtgggggtagggggcacagaacaccagaaagagtgttggtgtgtaggtagattccatattaatgaggaacactgaactagttggaaattactgctttctctagaaatataaagcaaagcactattccaaggctatggagtagctctacagcctggcctcaactctaaaagtgtgaagaatgcaatgggcagagacctacctgcagtggactgtcattttcctttctttctctgaattactgctttttctgtgggcattaactatattgctaca

SEQ ID NO: 23782 - DNA, 214 bp, Homo sapiens
  misc_feature (1)...(214): n = a,t,c or g
gcggcacgagttctctcaaccgtctcacggagaggccgcacattcagtggaaagtgtcgttttggagtcagcaaattgggtttaagttctggctccatggctgtgtggccttgagcaggttgcttggcctctctgtacctcantttgctctcctgttaaatgaaagagctctnnnnanccatntcngaangngtttgccacattnttcgnnctc

SEQ ID NO: 23783 - DNA, 358 bp, Homo sapiens
gcacagcctcctgttatccagggaaacagaaaaactgcaggataggtgattccacaacccccaccaccactcatagccaggcagctagaacttccagcccagcagtcccacttctgtctgaactctgatggcaggaacagcctctagaatataacccaacagcaggtcaggcaactgcacccaaacccgccactcatagccaggaaatccatgtctgatagagcttccagcccagcattcccacatctgcctgaactctgtgtgtggccacaacttcttgaacccccggaaagcacctagacaggggattaagtgaccccaccccatcccacagctcttagatgatcaggacttggtg

SEQ ID NO: 23784 - DNA, 494 bp, Homo sapiens
ggttggcgttgcgcagaaggcggcggcggtggtggcttgtggtgcggcctcaccatacaggaacagggcagacgttagcgtgagtgatcactctcaatcccggggacccggtggccttagtctttcaggtggaacggtgtgcgacatgggaaagaaaaccaagcggacagctgacagttcttcttcagaggatgaggaggagtatgttgtggagaaggtgctagacaggcgcgtggttaagggacaagtggaatatctactgaagtggaaaggcttttctgaggagcacaatacttgggaacctgagaaaaacttggattgccctgagctaatttctgaatttatgaaaaagtataagaagatgaaggagggtgaaaataataaacccagggagaagtcagaaagtaacaagaggaaatccaatttctcaaacagtgccgatgacatcaaatctaaaaaaaagagagacagagcaatgatatcctcggggcttt

SEQ ID NO: 23785 - DNA, 174 bp, Homo sapiens
gaagatgtagacattttctaccaactgggagctaaggctttccaaagactgaactagagaaagaaaattgttttttgcctgtgacaatgtgtggaaacatttgaaaaggtacctacgtaagaacagttttggagaaaacctttggtcatccagaaacattaaaaaaaaaaaaaa

SEQ ID NO: 23786 - DNA, 875 bp, Homo sapiens
gttatgacatgattacgaatttaatacgactcactatagggaatttggccctcgaggccaagaattcggcacgaggagtgctcctcaggagccagccccacccttagaaaagatgttttccatgaggatcgtctgcctggtcctaagtgtggtgggcacagcatggactgcagatagtggtgaaggtgactttctagctgaaggaggaggcgtgcgtggcccaagggttgtggaaagacatcaatctgcctgcaaagattcagactggcccttctgctctgatgaagactggaactacaaatgcccttctggctgcaggatgaaagggttgattgatgaagtcaatcaagattttacaaacagaataaataagctcaaaaattcactatttgaatatcagaagaacaataaggattctcattcgttgaccactaatataatggaaattttgagaggcgatttttcctcagccaataaccgtgataatacctacaaccgagtgtcagaggatctgagaagcagaattgaagtcctgaagcgcaaagtcatagaaaaagtacagcatatccagcttctgcagaaaaatgttagagctcagttggttgatatgaaacgactggaggtggacattgatattaagatccgatcttgtcgagggtcatgcagtagggctttagctcgtgaagtagatctgaaggactatgaagatcagcagaagcaacttgaacaggtcattgccaaagacttacttccctctagagataggcaacacttaccactgataaaaatgaaaccagttccagacttggttcccggaaattttaagagccagcttcagaaggtaccccaaagtgggaaggattaacagacatgcc

SEQ ID NO: 23787 - DNA, 415 bp, Homo sapiens
cccacgcgtccggaaggaacggaagcgaagtagagacagagaaaggaaaaagagcaaaagccgtgaaagaaagcgaagtagaagcaaagagaggcgacggagccgctcaagaagtcgagatcgaagatttagaggccgctacagaagtccttactccggaccaaaatttaacagtgccatccgaggaaagattgggttgcctcatagcatcaaattaagcagacgacgttcccgaagcaaaagtccattcagaaaagacaagagccctgtgagagaacctattgataatttaactcctgaggaaagagatgcaaggacagtcttctgtatgcagctggcggcaagaattcgaccaagggatttggaagagtttttctctacagtaggaaaggttcgagatgtgaggatgatttct

SEQ ID NO: 23788 - DNA, 446 bp, Homo sapiens
ggactaaaaacacagacagtgatttatgaccgagggaaaatgaaactttactgtggcttacaaatagaaaagaaggaaatatgaaatttggtctgtacttcatttactagcatatgctaattcttcaagagttactaataatgaatgaaaacaacataaataattactcatgctggctgcttgggtgtgtggttatttaataagttggtagaaggaccacacctattacattaagccatcaatcagtagctggttattttaggtacttacgacatggtataatgagaccaaggtcaaaggtttaattttatatagatcttccccattagttcacagatataggctcagcccttattcttatttgctattttgcaaatctgtgctcctttttttagcaaacaccctcccctgccaaaaatggaaggaagtctctaattaaaaaagat

SEQ ID NO: 23789 - DNA, 394 bp, Homo sapiens
cggacgcgtgggatcttgataaagctgcctctgagtgccaccctcactattcttttagccgtctggacaataaactttcaaagtctgtctcctccgggtacaacttcagatttgccagatattaccgagacgcagccggggtggagttccgcaccctgatgaaagcctacgggatccgctttgacgtgatggtgaacggcaagggtgctttcttctgcgacctggtactcatctacctcatcaaaaagagagagttttaccgtgacaagaagtacgaggaagtgaggggcctagaagacagttcccaggaggccgaggacgaggcatcggggctggggctatctgagcagctcacatctgggccagggctgctggggatgccggagcaacagga

SEQ ID NO: 23790 - DNA, 572 bp, Homo sapiens
  misc_feature (1)...(572): n = a,t,c or g
tgnnnnntnnttgaaaccctttgaaancccttgacatgattacgaatttaatacgactcactatagggaatttggccctcgaggccaagaattcggcacgagaaaagctttcccatgcaagagggctgatgttataacagtagactattatgctgcagtgtgttttcaccaggtgaaaaaaaaagcttttttatggtttggatcttctggaaacatcagagaaagactgtccttgtcatccacactacaacaaaacttcagaaccttgggctttgggtttatggtctcacaactgagaagggtcccgggtccctccacacttttggaactgtgcatccattggaacccttgaggtaaagctgaccagggaaatgtttcccgagaagcagatggcatccttgatatgaacagtttttccctaattcacagattaagacttctactgtcatgaaactcttatctttgaatattttttcttatgcctctatgaacaatagaagtagaaaaggggtctgttatgtgcattaatgtggtgnacttttattgtgaaggagtttgcagccagccttata

SEQ ID NO: 23791 - DNA, 367 bp, Homo sapiens
gcaaacccttcatgatctagaatctggagactgtgtcttctgggaatagtatcagagaaagactgcccttactgcccacatgtagcaaaactttgagacgttgaattatgggtccataatctcacaactcagaggggcacctctagactcttggaactgtatatctattggagactttaaggtaaagctgaacagagagacgtttttctccagaagcagacagcaccatagtcatggacagctttcccaagatcacagatcaagacttctctgccgtcatgagactcataacctcttaattttttcttgcttatgcttctgtgaacaatagaattggaaaaggggtggtcccgcgtgcacccatagg

SEQ ID NO: 23792 - DNA, 430 bp, Homo sapiens
ggcaaggttcaagatcctgaagttttcttgcagtgtggatggcaaggacagtctttctctgatgttctcagaagatccaatcttcgggttctacattgtgaaggggttgactattctcagtgaaacatgaaaagctttctttacctgatgaaaatgcaggacagtataataatcgactgttataacatcagccctcttgcatgggagagcttttatacaaccagaaaatatgcactaaaagtgacaattgagagctgggcacggtagctcatgcctgtaatctcagcactttgggaggccaagttggacggatcacctgaggtcaggagttcgagacaagcctgaccaacatggtgaaaccccgtctctactaaaaatgaaaaaattaactgggtgtggtggcacacacctgtagtcccagctacttggg

SEQ ID NO: 23793 - DNA, 352 bp, Homo sapiens
gcccatgtgtggggagacccaccaggccctgcagggggccatggagaagctgtggagccgctttatggagctcatgcaggagagaaggtggacttgaaggagagggttgaggaactggaacattgctgcatctagctgtctggagagagacagacaccatcggggagtgggaagccagggcacggcaaagagagctgcacattggtcagaggggccccagcgtctgagtcctgtcctcctgcaggagagtacatcgcactgtaccagagccagagggcagtgcggaaggaggaggagtgcatcagcaggctggcccaggacaaggggagaggtgaaggtgaagctgctggaa

SEQ ID NO: 23794 - DNA, 330 bp, Homo sapiens
gcgcctgcccttccttgatattgcacctttggacatcggtggtgctgaccaggaattctttgtggacattggcccagtctgtttcaaataaatgaactcaatctaaattaaaaaagaaagaaatttgaaaaaactttctctttgccatttcttcttcttcttttttaactgaaagctgaatccttccatttcttctgcacatctacttgcttaaattgtgggcaaaagagaaaaagaaggattgatcagagcattgtgcaatacagtttcattaactccttcccccgctcccccaaaaatttgaatttttttttcaacactcttacaccg

SEQ ID NO: 23795 - DNA, 421 bp, Homo sapiens
gaaagcatttctgagggagggtcagctcatgtgattagttatatttgcttctgaaatatgtaatatatggatagtgctttcaaattttaatactgggtaattagtagattaattttatactcaaattagggctgttatgtggacattagccagattctgggtcactatgaatttattattgaatgaaggtactaatgtgtatcccagtgcaggttatttcttgggttaaggttttattcagccacaggtgtttgcattaaacagcttgttcccagcactttgggaagcctaggtgggcggtagatcgcatgagctcaccagtttgagaccagcctgggtaaccgtggtgaaaccccatctctacaaaaaataccaaaaattagccgggcatggtggtgcatgcctgtagtcctagctactc

SEQ ID NO: 23796 - DNA, 501 bp, Homo sapiens
ccgttatgacatgattacgaatttaatacgactcactatagggaatttggccctcgaggccaagaattcggcacgagacttaatagtataacctaggcgttttgtttattatatataactttataaaaacatttttgttagctgcatggtgttctaccttgtggatgaatatcgttttacctaacaattcccttattaatgaatattatgcaattttcagtttttgtttatagtaaataatacgcagtgaatatttttgtgcctataactgagtgtgcattttacattttttttagggaggagaaattgctggtaaagtcctaaaaggaaatttcctaagtaacaaggtattatttttacattaaagagtagtgtatttttattaccaaatctgtcgtgtttattattgagaaatttaaaagtataaataggaggccaggctagatggctgacacctgtaatcccagcacagtgggaggccaatgcagatgggttgcttga

SEQ ID NO: 23797 - DNA, 413 bp, Homo sapiens
aacagctatgacatgattacgaatttaatacgactcactatagggaatttggccctcgaggccaagaattcggcacgagtggcattgctgggatgctgatgtgacttccctgcacttaagagcatgcattgctttggccccactttcagagggtggtggaagactggtttaaaatattgcttcctactaaacatgcagatacgggcttggaaaaaaatagttgcacaagctaatcactcacaaatctggatatatttcaggatgttttgacagttttccccacataacatctgtacttaagaagcctcacgctattggtaaagtattaacttgatttatctgctcacatccagggcactgcatggttctgccctgctatccccagatcccctgccaggcgctcccctacaggc

SEQ ID NO: 23798 - DNA, 443 bp, Homo sapiens
gggccgtggtttctgtcccagccgtctgtttccatagaaaaaggtaacgggcataagcagtttccaggagaaatacaaatggccagagtggagacagcctacatgtccatcagcaacagaaaggatcagcaggttgtggtgggtccatttggggaatgcagtgagaaggaataacttacagcagcacacaagacctgggcgacagctgtctccgggggtgccaggatagaattgctgagccgccagaggtagtcagcgtcttgatctgcatggtggtgtggagcatgtgaataataattttcatccttagaaagaaaccaccctttgcactttgatttttaaatatgttacagtgtaggttgggcgcggtggctcacgcctgtaatcccagcactttgggaggccaaggtgggccggatcacttgaggtcaggagtttgaaaa

SEQ ID NO: 23799 - DNA, 474 bp, Homo sapiens
  misc_feature (1)...(474): n = a,t,c or g
gnnnnnnnntttnnnncccccccttgganaccgttatgactgattacgaatttaatacgactcactatagggaatttggccctcgaggccaagaattcggcacgagacatggacaggggctgaaactgcagtaccagcagatggggagcttaagaaggaagctagttcatggcacagcacccgtaaagtccccagaattggaggcaccagattcttctgaaagaaaaggagcaattcagcacttgtcatgcagataagaggtcaacaccccaggacggagtgaaaacctaagggtcatcaagacaggaggatatgaggcagaatcaccacacaagctaacctgatgtacatatgacattaatccaatagacttaggaataagatacagggggttttcctgaatgattcgagtatatccccattcatattaagaaaacaaagtattggccaagcgtggtggctcacgcctgtaat

SEQ ID NO: 23800 - DNA, 333 bp, Homo sapiens
ggaggtcaacaccccaggacggagtgaaaacctaagatgggactgtctagttgcaggaaaacaagttcagggttcccactgattctacattatgggtcatcaagacaggaggatatgaggcagaatcaccacacaagctaacctgatgtacatatgacattaatccaatagacttaggaataagatacagggggttttcctgaatgattcgagtatatccccattcatattaagaaaacaaagtattggccaagcgtggtggctcacgcctgtaatcccggcactttggaaggccgaggccagtggatcacctgagatggactcaacgactct

SEQ ID NO: 23801 - DNA, 511 bp, Homo sapiens
atttaatacgactcactatagggaatttggccctcgaggccaagaattcggcacgagcctctttgcacaagactcacactatcttctcactgctgggagtggaccatgcttatgtcaccagtattggcagactcattggaatcgttactctaaaggagctccggaaggccatcgagggctctgtcacagcacagggtgtgaaagtccggccgcccctcgccagcttccgagacagtgccaccagcagcagtgacacggagaccactgaggtgcatgcactctgggggccccactcccgtcatggcctcccccgggagggcagcccttccgacagcgacgacaaatgccaatgagcccctcgtgggtggcctaggatggtgctagccatgcccgtcagcccagaatgtgcatctttcattccttctgccttcggaaggcaggaggcagctacagctggaggctgcaccccagcccctcagacctggggtgccagcttctccagttcatccta

SEQ ID NO: 23802 - DNA, 456 bp, Homo sapiens
gctcctaaactatttccatttaaaattgttctagtgtatcaacacaccaatcactttgactccatgcaagctggtctctgcatttcaaacctagcttccgtgtgttagtcctttttgacatttttatagggtttctccaggaaaaaaaagaagagcatagcaaaggtatgagccatccttatggagtgccagcctagagggaaagaggaactaaacattgtttgtatacttaccacctatgagggcccctccaccatgtttgacacactcttcttgcagctaactggtgaaatagatgttttgtccctggttttatatctaaaaatactatactgaggttaagtaacctgcccagagtctcacacggggtaagaagggacaccagaattcagtgataattgtatcattcccaagcctcttggctttttaaatttatttactctaaaccatactgcc

SEQ ID NO: 23803 - DNA, 415 bp, Homo sapiens
  misc_feature (1)...(415): n = a,t,c or g
cccacgcgtccgggcggacgccggcattcgccgcgtggttcccagcgacctgtatcccctcgtgctcggcttcctgcgcgataaccaactctcagaggtggccaataagttcgccaaagcgacaggagctacacagcaggatgccaatgcctcttccctcttagacatctatagcttctggctcaacaggtctgccaaggtcccagagcgaaagttacaggcaaatggaccagtggctaagaaagctaagaagaaggcctcatccagtgacagtgaggacagcagcgaggaggaggaggaagttcaagggcctccagcaaagaaggctgctgtacctgccaagcgagtcggtctgcctcctgggaaggctgcagccaaagcatcaagagagtagcaacagtgaaagantccaatt

SEQ ID NO: 23804 - DNA, 431 bp, Homo sapiens
  misc_feature (1)...(431): n = a,t,c or g
gaaaacacactcagtaacttggataatgtcatagagtggtccttcccacagcagagtcaatgtaaagacctatgggagggcttcaggaatgactcctcagacaggagccctgggaagggcttctccaagagagaaagtgcactccagaggcaagagcactggccaagtcctgacctgataccggatgagctgtgtgatcatgggcacatcacgtctctgagccttggtgttcttcctgtgagatgggccaataacaccaggcacctcataggatggatgtgaagactgcatgatagagtagatagaaggcagttaaagcaacacctggtgctatggtttggatgtggtttgaccctgcaaaagctcatgttgaaatttggttcccaaggtggcagtgatgggaggtgggacctantgggggatagttgagt

SEQ ID NO: 23805 - DNA, 461 bp, Homo sapiens
gtcccactgcttggcaggataaacaagcccttgcagatcagaagaaggccaaattccaccagactgaaggggaccacctcaccctgctagctgtgtacaactcctggaagaacaacaagttctccaacccatggtgctatgagaactttatccaggctcgttccctgcgccgggcccaggacattcgcaagcagatgttaggcataatggacagacacaagctggatgttgtttcctgtggcaagtccacagtccgagtgcagaaggccatctgcagtgggttcttccgtaatgctgccaagaaagacccgcaggagggttaccggacactgatcgaccagcaggtggtctatatccatccttccagtgccctcttcaacagacagccagaatgggtggtgtaccatgagctggtgctcaccaccaaggaatacatgcgtgaagttaccaccatcgaccct

SEQ ID NO: 23806 - DNA, 367 bp, Homo sapiens
gggcttcttatatccgtttattaccaggactgaacctttcactataagggctatgaaaataagggggaaaatgttctataagctttaagtatgattttttctaagcaaatgtcaaattctattctgcataatgtaattggataaggaattgcttattttaactcactttgaattggattcattagtatttgaatttgggtagtgatttataactttaaaagcagttcttgtttgaaattcctagtgcccgaaggaggaaacagtgacagacctggagactgcagttctctatccttcacacaggtatgacatcctgtcatgctgcttaaggaaagtattcctctctaatggaaggaggaaacttggt

SEQ ID NO: 23807 - DNA, 309 bp, Homo sapiens
gagaaatgatggcaaccctgggttgctaaccaatcatcatgaagagaagaaaagcggtttgttttttaagataccactcagggtgcttgtctctggatgaacttacccagcgcctcaccaagacttcaggcctcataaagctgggtagagaagcaggaaggtctacctaaccaaggaaaaatgaaactggagatgtgtcctggcacagacctggtcttaagacacgagttttactaaggagggtcaggaaaagtggggagtgggagacactggagcttcgatgaggaaaaagccagaatgagaagactg

SEQ ID NO: 23808 - DNA, 527 bp, Homo sapiens
cccacgcgtccggctgggctgcagggactgcggcgcctgagggagtcgctgacgggcacgctgactggaggctggcggacaggcgacagcgacctgcggcaggaccagaggagcgagagcagcaagaaccacacccagcagcaatgtcagcggaagtggaaacctcagagggggtagacgagtcagaaaaaaagaactctggggccctagaaaaggagaaccaaatgagaatggctgacctctcggagctcctgaaggaagggaccaaggaagcacacgaccgggcagaaaacacccagtttgtcaaggacttcttgaaaggcaacattaagaaggagctgtttaagctggccaccacggcactttacttcacatactcagccctcgaggaggaaatggagcgcaacaaggaccatccagcctttgcccctttgtacttccccatggagctgcaccggaaggaggcgctgaccaaggacatggagtatttctttggtgaaaactgggaggagcaggtgcagtgcccg

SEQ ID NO: 23809 - DNA, 436 bp, Homo sapiens
  misc_feature (1)...(436): n = a,t,c or g
ggatgaggaaaaacaagggcaagtcactcaagaccacacagtgactgagtggtgctgaaattcaagcctgggtctgtgagtccagaactccagcttctcaggtcacttcctgatcgcacctggagctgggctctgctgccctcagtggagtgagcacccgcctgctttgatccaagctgagattcccgtggggccctctctcacaggtgtgggtcctacagtgcaggttttgctacttccacaaactcagccaccactgagtgagcattccctgtgtgtcctcaccggcccctttcttggttttgggtggcaaagcttcttatctgtgtgtagcaagagcagcctgtttgggctactgtccccaagagagtggggctgcacagcaaagtagggcatccggntgcctacctcangacaggtgaaaggcagacgggct

SEQ ID NO: 23810 - DNA, 601 bp, Homo sapiens
ggaagcgttttcggcttcctgcccggagctgtgcagcaaacagtcgacccccatggggctcagccttcccctgagtactagcgtccctgacagcgcggaatctgggtgcagttcctgcagtaccccactctacgatcagggtggcccggtggaaatcctgccctttctgtacctgggcagtgcgtatcacgcttcccgcaaggacatgctggatgccttgggcatcactgccttgatcaacgtctcagccaattgtcccaaccattttgagggtcactaccagtacaagagcatccctgtggaggacaaccacaaggcagacatcagctcctggttcaacgaggccattgacttcatagactccatcaagaatgctggaggaagggtgtttgtccactgccaggcaggcatttcccggtcagccaccatctgccttgcttaccttatgaggactaatcgagtcaagctggacgaggcctttgagtttgtgaagcagaggcgaagcatcatctctcccaacttcagcttcatggccagctgctgcagtttgagtcccaggtgctgctccgcactgttcggcagaagctgggaaccccgccat

SEQ ID NO: 23811 - DNA, 414 bp, Homo sapiens
  misc_feature (1)...(414): n = a,t,c or g
gaaggaaccctatctgatgctgaatggaatttctttctccgaggttctgcaggattggaaaaggtacctgattcccatttaggtgatgattgatatggtttggctgtgtccccacccaaatctcattttgaattgtagctagcataattcccatgtgctgtaggatggacctggtgggagattactgaatcacgggggcagtttcccccatactgttctcgtggtagtgaataagtctcatgagacctgatggttttataaggggaaacccttttcacttcgttttcattctcacttgcctgctgccatgtaagatgtgccttttgccttctgccatgattgtgaggcctccctactgcatggaactgngagttccatgtgagtccnttaacctcttttccttataaattaccc

SEQ ID NO: 23812 - DNA, 486 bp, Homo sapiens
  misc_feature (1)...(486): n = a,t,c or g
agtgnntntnnntttgaacnttntgaacgctatgactgattacgaatttaatacgactcactatagggaatttggccctcgaggccaagaattcggcacgagaagctaacgaatttcacgatgtgaactgtgaagttgtcgcagtctcagtggattcccactttagccatcttgcctggataaatacaccaagaaagaatggtggtttgggccacatgaacatcgcactcttgtcagacttaactaagcagatttcccgagactacggtgtgctgatagaaggatctggtcttgcactaagaggtctcttcataattgaccccaatggagtcatcaagcatttgagcgtcaacgatctcccagtgggccgaagcgtggaagaaaccctccgcttggtgaaggcgttccagtatgtagaaacacatggagaagtctgcccagcgaactggacaccggattctcctacgatcaagccaagtccagctg

SEQ ID NO: 23813 - DNA, 443 bp, Homo sapiens
gcatgttggccaggctggtctcaggctcctcacctcaggtgatccacctgccttggcctcccaaagtgctgggattacaggcatgagccactgtgcccagccttaagatattaattaggtaaaccaggagaggaaagatccattgcctggctcaccctgaattacctattagaaaattttggtgagctctgacacatgctcaaagtagggactaaaactatattgtgtcctcaatggacttgggggttatgaggaagtaatatttacatgaaacctcggaattttccatggctccagatttctctcctggggtcattgtaactggcctgtgagtagatgatcactactggccccttcaagttccaaaattctgaaattctcattatcaaaactgggtgagtccacttccagcaatatttaatgttcatcttgaaaaacccctt

SEQ ID NO: 23814 - DNA, 421 bp, Homo sapiens
gaactcatttgtgtttggtaagaattcactggtgcctacatatccagccattttactaattttacatacgtcatatttagatggtgtttacagtaactgctgttgctttaatttaggtcttgtactgcataggtgccatcattggaacatcaattatttagtgttaatatgcttagatgctagtaccagttgtgtaccgagtgtataactggctgatagaaaagtgagatgtggaagtgtcataaatatatggtgttcagcttattttggaattaggacaatggtttttttgttttgttttgtatttttcatgtatacttcctagatcaactctcagatctttaatttgtgcatagggcttcctgaggatgttgctcttactagaggtaattgatcagttttcattgatggctccctcata

SEQ ID NO: 23815 - DNA, 433 bp, Homo sapiens
ctcgtagtccatcaccatttcttggcattggaattctactggaaaaaaatacaaaaagcaaaacaaaaccctcagcactgttacaagaggccatttaagtatcttgtgcttcttcacttacccattagccaggttctcattaggttttgcttgggcctccctggcactgaaccttaggctttgtatgacagtgaagcagcactgtgagtggttcaagcacactggaatataaaacagtcatggcctgagatgcaggtgatgccattacagaaccaaatcgtggcacgtattgctgtgtctcctctcagagtgacagtcataaatactgtcaaacaataaagggagaatggtgctgtttaaagtcacatccctgtaaattgcagaattcaaaagtgattatctctttgatctacttgcctcatttccctatctt

SEQ ID NO: 23816 - DNA, 519 bp, Homo sapiens
ggaatggcgcaaaaggcaagattgatgcaaaggtgcacagcccctctggagccgtggaggagtgccacgtgtctgagctggagccagataagtatgctgttcgcttcatccctcatgagaatggtgtccacaccatcgatgtcaagttcaatgggagccacgtggttggaagccccttcaaagtgcgcgttggggagcctggacaagcggggaaccctgccctggtgtccgcctatggcacgggactcgaagggggcaccacaggtatccagtcggaattctttattaacaccacccgagcaggtccagggacattatccgtcaccatcgaaggcccatccaaggttaaaatggattgccaggaaacacctgaagggtaccaaagtcatgtacacccccatggctcctggtaactacctgatcagtgtcaaatacggtgggcccaaccacatcgtgggcagtcccttcaaggccaaggtgacaggccagcgtctagttagccctggctaaccaacgaga

SEQ ID NO: 23817 - DNA, 968 bp, Homo sapiens
gaagatggcggctgctgtaggacggttgctccgagcgtcggttgcccgacatgtgagtgccattccttggggcatttctgccactgcagccctcaggcctgctgcatgtggaagaacgagcttgacaaatttattgtgttctggttccagtcaagcaaaattattcagcaccagttcctcatgccatgcacctgctgtcacccagcatgcaccctattttaagggtacagccgttgtcaatggagagttcaaagacctaagccttgatgactttaaggggaaatatttggtgcttttcttctatcctttggatttcacctttgtgtgtcctacagaaattgttgcttttagtgacaaagctaacgaatttcacgatgtgaactgtgaagttgtcgcagtctcagtggattcccactttagccatcttgcctggataaatacaccaagaaagaatggtggtttgggccacatgaacatcgcactcttgtcagacttaactaagcagatttcccgagactacggtgtgctgttagaaggttctggtcttgcactaagaggtctcttcataattgaccccaatggagtcatcaagcatttgagcgtcaacgatctcccagtgggccgaagcgtggaagaaaccctccgcttggtgaaggcgttccagtatgtagaaacacatggagaagtctgcccagcgaactggacaccggattctcctacgatcaagccaagtccagctgcttccaaagagtactttcagaaggtaaatcagtagatcacccatgtgtatctgcaccttctcaactgagagaagaaccacagttgaaacctgcttttatcattttcaagatggttatttgtagaaggcaaggaaccaattatgcttgtattcataagtattactctaaatgttttgtttttgtaattctggctaagaccttttaaacatggttagttgctagtacaag

SEQ ID NO: 23818 - DNA, 423 bp, Homo sapiens
ggcgtggtaacggaacttatagtgctggcaacgctgggctccggggagctgctcggccaggaagatgacagcatcatggtggatgcccaggagtctcgccccactcattccactaaaggagagatgtctgagtcgggcatgccctcgggcctcttgcactttctcgatcagagttctccacgccccctccaagctctctgcctcaacgctgaacccatcctcactgctgatctcgaagcgcagatgtgggccagtccgttttggggcctggttctctttatcatctggggatggaggctcttcctcagagctcgaagcctcacctggtcccaagaagcaggttggagtgaagatcacccttcccggactcaaaagcccctgagccccgctgtgctcccagcagacaccactttttcaccccta

SEQ ID NO: 23819 - DNA, 558 bp, Homo sapiens
ggagcggagatcgcaccactgcactccagcctgggcgacagaatgagactccgtctcagaaaaaaaaacaaaaaacaactctgatcctcaagttttcaggaagactgatttgagtagtaataaaactctggtctcgcacaaaaaaagaaaaaatgtataacatgacttccagaaggagtctggcagtattatacagcatgaggggaggggaggcaagaaaactatcaagaaagctgttgcagtaattcaggcaaatggctagttcctgtacgagagcagcatgaggacagggattatgtattttactttggtatccaattagcatgtagttggcactcagtaaatgcttagtgaatgaacaggaatagaagaatattgattactgtactagaaataatactagttaagaaagggaactctgtcagaaaccatatgaagagtttgactttggatatatgaaacaacggggcattattcaagtagaaacagtttgaaaggcattaaaagaaaacatagggccggcatggtggccctgcctgtatccaacactttgggagg

SEQ ID NO: 23820 - DNA, 659 bp, Homo sapiens
ctttgcagaaattcagggggtcattgatgcttgcattaaactatctggaatgcctgatctctccctttctttcatgaaccctaggcttctggatgatgtcagctttcacccctgcatccggttcaagcgttgggaatctgaaagagttttgtcatttattcctccagatggaaatttccgactcatatcataccgtgtcagctcacaaaatctagtggcaataccagtgtatgtgaaacatagtatcagctttaaggagaacagttcttgcggcagatttgatataacaattggaccaaagcagaatatggggaaaactattgaaggaattcagtgacagttcacatgccaaaagttgtgctgaacatgaacctgacacccacacaaggcagctatacatttgatccagtcaccaaggtactaacatgggatgtgggaaaaattactccacaaaagctcccaagtcttaaaggactggtaaatttacagtctggagcccccaaaccagaagagaatccgagcctcaacatacagtttaagatccagcagcttgctatttcaggcttaaaagtaaaccgtttggacatgtatggggagaaatataaagccatttaaaggagtcaaataccgtcacgaaagctggaaagttccaagtgagg

SEQ ID NO: 23821 - DNA, 362 bp, Homo sapiens
  misc_feature (1)...(362): n = a,t,c or g
agtaaatatagctcttcataattttgttctgaagtttaaaaatatatatatttttgaatggataactttctttttctaaatgcttacagtagagcccacgatggttgttaaaagcccccaggttcagccttctttaattgggtggtcagcctgccatcaacccgaggggatgaacgaanctttcccttatgcttggtttgtcccttgttatanntggtggntaagatatgaagatgcnattttganntgtaagtactttgttctantancaggnttgtgngaaatacatatanaaatgttatantgccctaaaaggccnattttcctgtgnttttttttaaattcnggtttntcctgttatt

SEQ ID NO: 23822 - DNA, 459 bp, Homo sapiens
  misc_feature (1)...(459): n = a,t,c or g
ttganatcngctatgacatgattacgaatttaatacgactcactatagggaatttggccctcgaggccaagaattcggcacgagtcaagctggttaatgcaaatggggaggcagtttattgcaaattccattataagactgaccagggcatcaaaaacctttctgttgaagatgcggcgagactttcccaggaagatcctgactatggcatccgggatctttttaacgccattgccacaggaaagtacccctcctggactttttacatccaggtcatgacatttaatcaggcagaaacttttccatttaatccattcgatctcaccaaggtttggcctcacaaggactaccctctcatcccagttggtaaactggtcttaaaccggaatccagttaattactttgctgaggttgaacagatanccttngacccaagcaacatgcccctgcattgaggcc

SEQ ID NO: 23823 - DNA, 426 bp, Homo sapiens
tttgacatgattacgaatttaatacgactcactatagggaatttggccctcgaggccaagaattcggcacgagaatccccagggttcctgagaccccaggcctaaacctgagacttcctctgcagttgatgtggtcctggatccagacaccgctcatcccgatctcttcctgtcagaggaccggagaagtgtgagaaggtgccccttcaggcacctaggggagagcgtgcctgacaacccagagagattccacagtcagccttgtgtcctaggccgggagagcttcgcttcagggaaacattactgggaggtggaggtggaaaacgtgattgagtggactgtgggggtctgtagagacagtgttgagaggaaaggggaggtcctgctgattcctcagaatggcttctggaccttggagatgcataa

SEQ ID NO: 23824 - DNA, 356 bp, Homo sapiens
gagatctttaatacaactaaacaagctttatttagataaactactgtagaagccctaagcaacactggagaactggtgctcagcagactgtcaggattacattcctccctgctctgctccaagctaagctctccctaggaggcaggcagcaggtgggtgcttggccagagaatagcagaacccaggcaatggaggagagtttaggtcttgactgaaccctacagagccctgcctgcctcttcaatatctgtttaagtgaataacctctgagaaaacaaccaagaacagacaggctctagccaagagtctagtcaaatatacttacagacattaagcccccaacaaggtcattggca

SEQ ID NO: 23825 - DNA, 454 bp, Homo sapiens
gatcaccacgaagaagagaaaactggggaagaacccagacgttgacacaagcttcttgcctgatcgagaccgtgaggaggaggagaatcggcttcgggaagagctgcggcaggagtgggaagccaagcaggagaagatcaagagtgaggagatcgagatcaccttcagctactgggatggctctgggcaccggcggacagtcaagatgagaaagggcaacaccatgcagcagttcctgcagaaggcgctcgagatccttcggaaagacttcagtgagctgaggtccgcaggggtggagcagctcatgtacatcaaggaggacttgatcatccctcaccatcacagcttctacgacttcatcgtcaccaaggcacgggggaagagtggaccactcttcaactttgatggtcatgacgatgtgcggttgctcagtgaccccactgtggagaaagat

SEQ ID NO: 23826 - DNA, 464 bp, Homo sapiens
gagaacgatttacaaatcaggcagcctaccgaaccagagtaggctcagagactccagcgcagtcacatggtagaagatttatggacagaaaaaggaaaagtaaaacacagaaattggaagtttggtacagaaacagccagattggttacagctcagcgtttgctttattggaacatggtttgaacggttggttgcctttgattggctgaaactcagtgattgacacaggagtaggttgcagtctgtttgagtccaattaggttacagttcactatgtacggggaaaacctttaggccaaacttaaaatatgtaaggaggcagctttgggctaacctcaatttaacagaaggtaggtagacatgtatatgtagatatacaggtatgtagatgaatggataaatggatggatggatagatagataatattcctatttttacagctgaggaactgaggcacagaggt

SEQ ID NO: 23827 - DNA, 463 bp, Homo sapiens
  misc_feature (1)...(463): n = a,t,c or g
ggnnnattgaacccttgacangattacgaatttaatacgactactatagggaatttggccctcgaggccaagaattcggcacgagcgttggccaggctggtgtccagattggcaatgcctgctgggagctctactgcctggaacacggcatccagcccgatggccagatgccaagtgacaagaccattgggggaggagatgactccttcaacaccttcttcagtgagacgggcgctggcaagcacgtgccccgggctgtgtttgtagacttggaacccacagtcattgatgaagttcgcactggcncctaccgccagctcttccaccctgagcagctcatcacaggcaaggaagatgctgccnataactatgcccnagggcactacaccattgcaaggagatcattgaccttgngntggccgaattcnnangctggtgaccantgcccggcttnangcttttg

SEQ ID NO: 23828 - DNA, 488 bp, Homo sapiens
  misc_feature (1)...(488): n = a,t,c or g
nttttganaaccctatgacatgattacgaatttaatacgactcactatagggaatttggccctcgaggccaagaattcggcacgagagttaattactttgctgaggttgaacagatagccttcgacccaagcaacatgccacctggcattgaggccagtcctgacaaaatgcttcagggccgcctttttgcctatcctgacactcaccgccatcgcctgggacccaattatcttcatatacctgtgaactgtccctaccgtgctcgagtggccaactaccagcgtgacggcccgatgtgcatgcaggacaatcagggtggtgctccaaattactaccccaacagctttggtgctccggaacaacagccttctgccttggagcacagcatccaatattctggagaagtgcggagattcaacactgccaatgatgataacgttactcaggtgcgggcattctatgtgaacgtgctgaatgaggaacagaa

SEQ ID NO: 23829 - DNA, 303 bp, Homo sapiens
ctcctatccacagacggacgtcttcctcatctgcttctccctcgtcagcccagcctcttatgagaacgtccgcgccaagtggttcccagaagtgcggcaccactgccccagcacacccatcatcctggtgggcaccaagctggacctgcgggacgacaaggacaccatcgagaaactgaaggagaagaagctggctcccatcacctacccgcagggcctggcactggccaaggagattgactcggtgaaatacctggagtgctcagctctcacccagagaggcctgaaaaccgtgttcgacga

SEQ ID NO: 23830 - DNA, 481 bp, Homo sapiens
aaactgcccaaggatctctctcactaaaggcatacagactgactcctaaactgatggaagtttgtaaagaaaaggatttttcccctgaagcattgaaaaaagcaaatatcacctttgagtacatgtttgaagaagtgccgattgtaattaaaaattcacatctgatcaatgtcctaatgtgggaacttgaaaagaagtcagctgttgcagataaacatgaattgctcagccttgccagcagcaatcatttggggaagaatctacagttgctgatggacagagtggatgaaatgagccaagatatagttaaatacaacacatacatgaggaatactagtaaacaacagcagcagaaacatcagtatcagcagcgtcgccagcaggagaatatgcagcgccagagccgaggagaacccccgctccctgaggaggacctgtccaaactcttcaaaccaccacagccgcctgccaggatggactc

SEQ ID NO: 23831 - DNA, 622 bp, Homo sapiens
  misc_feature (1)...(622): n = a,t,c or g
acgagagtcctggccctgctggctggtctgctggcgtcctcgagggccggctccagcccccttttggacatcgttggcggccggaaggcgaggccccgccagttcccgttcctggcctccattcagaatcaaggcaggcacttctgcgggggtgccctgatccatgcccgcttcgtgatgaccgcggccagctgcttccaaagccagaaccccggggttagcaccgtggtgctgggtgcctatgacctgaggcggcgggagaggcagtcccgccagacgttttccatcagcagcatgagcgagaatggctacgacccccagcagaacctgaacgacctgatgctgcttcagctggaccgtgaggccaacctcaccagcagcgtgacgatactgccactgcctctgcagaacgccacggtggaagccggcaccagatgccaggtggccggctgggggagccagcgcagtgggggggtcctcccgtttccagttcgtcaactgctgtgacccccgaggacagttcgcccacaagtgtcaccggtgtctcacccgccgcgtggacngatgggacggggacccctngttgnaggctgccanggnngccctttcctgggcntngcag

SEQ ID NO: 23832 - DNA, 139 bp, Homo sapiens
ggattttatagacgaaaaacttagagtgattccttttactttgcaaattcatcactttcatttcacaaaagttaagacgttaagtccagtgaaatccctctgttatgcgtatttgaggactgattatagcctaatcaga

SEQ ID NO: 23833 - DNA, 475 bp, Homo sapiens
tatgacatgattacgaatttaatacgactcactatagggaatttggccctcgaggccaagaattcggcacgaggccacttgtgagaagaagacagatacacccaagaagctcctgttctttctcattaacccatattaaaacccactttcgggaaaggattctccattctaaattattaataactgataatgcttcaaagtcaaagtatgactccttcaagaaagttttcagctttcaggatttgttcagcaaatactgagccccttctgatgcaaatagacatggcagtgtatgctaggaggagagtgtagccaagttttcccatcaaactcggtatttcagtgcctaattttggccattcagataagtttcaacttctagtaatggccaagtaaattatatctaactaaaccttctgccaaagacagtggtaaattctggacccaaaacacaatgataacaacaaaacctgtt

SEQ ID NO: 23834 - DNA, 555 bp, Homo sapiens
  misc_feature (1)...(555): n = a,t,c or g
tttnnnaacagctatgacatgattacgaatttaatacgactcactatagggaatttggccctcgaggccaagaattcggcacgaggtgaaattttacacagaagatggtaactgggatctcgttggaaataacacccccattttcttcatcagggatcccatattgtttccatcttttatccacagccaaaagagaaatcctcagacacatctgaaggatccggacatggtctgggacttctggagcctacgtcctgagtctctgcatcaggtttctttcttgttcagtgatcgggggattccagatggacatcgccacatgaatggatatggatcacatactttcaagctggttaatgcaaatggggagcagtttattgcaaattccattataagactgaccagggcatcaaaaacccttctgntgaagatgcggcgagactttcccaggaagatcctgactatggcatccgggatctttttaacgccattgccacaggaaagtacccctcctggactttttacatncaggcatgacatttaatcaggcagaaa

SEQ ID NO: 23835 - DNA, 362 bp, Homo sapiens
gggatttgaacttaggcttgcctggtctgggctctttctctcgctaccagactgcccctgcctgggaagccatctgccaggggctgatgaccccatggggaagaggaatagctggcttgggtggttactcctgctcctaaaaaggtatgtgagctcagagtgcatgttggcagacaccccatcccccgccccccagaagaggaggaaataggatggtcacttatcagtggaaattgagttagaactcagtgattaatggaaagaggacaggcgagtgggagacggttgtgcttggacatgaaggcaggcactgggtgacctggcctttctctatctggggttggggctccaaaaagctctgc

SEQ ID NO: 23836 - DNA, 406 bp, Homo sapiens
cccacgcgtccgaatatcttatttcttttatgattggtgcaaattggctaaagtgcatttttaaatttcctctacttaatttgtttttcagagataaggaaaaatattttgcacagatttactccactatggaaaagggatgctgtaggttgaaccattatagcctcagattcgatcttttcctaactaaaaatattaaagcctcatgtgtgaaataaatttttaaaaagatttatctggatttagagaattttagatcaacagatacctctcagtgtgtttgctaattaataaaaatcagtttcttacaaataaagtttgtaagaaaatgttcattttaagtgatagatagtggagaaaatttatcacctaaaatatacccatcagtataaggcaagcaaaagtc

SEQ ID NO: 23837 - DNA, 336 bp, Homo sapiens
aaactgtgcaccaagcaggaaatgaaaatgtcttgtgttacctgaaaacactgtgcacatctgtgtcttgtttggaatattgtccattgtccaatcctatgtttttgttcaaagccagcgtcctcctctgtgaccaatgtcttgatgcatgcactgttccccctgtgcagccgctgagcgaggagatgctccttgggccctttgagtgcagtcctgatcagagccgtggtcctttggggtgaactaccttggttcccccactgatcacaaaaacatggtgggtccatgggcagagcccaagggaattcggtgtgcaccagggttgaccccagagga

SEQ ID NO: 23838 - DNA, 442 bp, Homo sapiens
  misc_feature (1)...(442): n = a,t,c or g
gagagtgggtacagagccccgcttaggtctctgtctcagggagctccctccctcctgttcataaggggggacccagaagaaaccaggagccagggagtcaggctgatgaggtggttgctgcccttagggccccactttagaaggagcagctggaatctaggatcctttatcttttccctaacatttgtccatccttgctggtgaggccaggcattcataagcagggtggcagcatggccctgctctgaggcattggcgtgggcaaggagaacctggcagacaccggccctggaagaagcctgtctggctatgggggtgctgggcttggaaagggagggggcagttgagaggattgcccgaacgtcaaaggtgtttccatggcgtttggattcttggcgcctggcctgatctgggntgaagggccttggctttggcctattta

SEQ ID NO: 23839 - DNA, 768 bp, Homo sapiens
  misc_feature (1)...(768): n = a,t,c or g
gccagggtcctggaggcctgctggattacatcgacaaagagattattccagatttcctgagtggggagtgcatgtgcgaagtgccagagggtggactggtccccaaatctctgtaccggactgcagaggagctggagaacgaagacctgaagctctggactgagaccatctaccagtctgcaagcgtcttcaaaggagccccacatgagattctcattcagattgtggatgcctcgtcagtcatcacttgggatttcgacgtgtgcaaaggggacattgtgtttaacatctatcactccaagaggtcgccacaaccacccaaaaaggactccctgggagcccacagcatcacctctccgggtgggaacaatgtgcagctcatagacaaagtctggcagctgggccgcgactacagcatggtggagtcgcctctgatctgcaaagaaggagaaagcgtgcagggttcccatgtgaccaggtggccgggcttctacatcctgcagtggaaattccacagcatgcctgcgtgcgccgccagcagccttccccgggtggacgacgtgcttgcgtccctgcaggtctcttcgcacaagtgtaaagtgatgtactacaccgaggtgatcggctcggaggatttcagaggttccatgacgagcctggagtccaaccacagcggcttctcccagctgaatgccgccaacaactcctccagccantcccactccanctccatgatctccangtantgcgcgctgcctgnactaatgt

SEQ ID NO: 23840 - DNA, 424 bp, Homo sapiens
gctggagatgtacttcagaacaaatttccagtttcctctttatcccttcttgctgcgtctagtgagggatgatgaaatgactaattcttgagaggactgagaaacactgccaaggactgtggtagaatagtatctatgttacatattatctatttttaaactgatctgtaggtttaaaatatatcaagaaaatcaaggctgaaaagatagaagtagccctattttaagtcactgacagaataaattgtatccaatacagacaagtatatctagacccaatactttggttcaatcagtgatctgattatttggtatgctgtgaagagatggtgcccctgaaaggtactagattttcagtttattctaccaggtaaactgaaagatttttgctagaagtaaatagggcttcaagtcagcaccatac

SEQ ID NO: 23841 - DNA, 359 bp, Homo sapiens
gggcggctggccggctgccccgctccaaggacgccattctcctcgcagatctggtggacagctgcaagccaggagacgagatagagctgactggcatctatcacaacaactatgatggctccctcaacactgccaatggcttccctgtctttgccactgtcatcctagccaaccacgtggccaagaaggacaacaaggttgctgtaggggaactgaccgatgaagatgtgaagatgatcactagcctctccaaggatcagcagatcggagagaagatctttgccagcattgctccttccatctatggtcatgaagacatcaagagaggcctggctctggccctgttcggaggggagcct

SEQ ID NO: 23842 - DNA, 1377 bp, Homo sapiens
  misc_feature (1)...(1377): n = a,t,c or g
cgctatgacatgattacgaatttaatacgactcactatagggaatttggccctcgaggccaagaattcggcacgagcggcacgagtcctgagagagttgtgcatgctaaaggagcaggggcctttggctactttgaggtcacacatgacattaccaaatactccaaggcaaaggtatttgagcatattggaaagaagactcccatcgcagttcggttctccactgttgctggagaatcgggttcagctgacacagttcgggaccctcgtgggtttgcagtgaaattttacacagaagatggtaactgggatctcgttggaaataacacccccattttcttcatcagggatcccatattgtttccatcttttatccacagccaaaagagaaatcctcagacacatctgaaggatccggacatggtctgggacttctggagcctacntcctgagtctctgcatcaggtttctttcttgttcagtgatcgggggattccagatggacatcgccacatgaatggatatggatcacatactttcaagctggttaatggcaaatggggaggcagtttattgcaaattccattataagactgaccagggcatcaaaaacctttctgttgaagatgcggcgagactttcccaggaagatcctgactatggcatccgggatctttttaacgccattgccacaggaaagtacccctcctggactttttacatccaggtcatgacatttaatcaggcagaaacttttccatttaatccattcgatctcaccaaggtttggcctcacaaggactaccctctcatcccagttggtaaactggtcttaaaccggaatccagttaattactttgctgaggttgaacagatagccttcgacccaagcaacatgccacctggcattgaggccagtcctgacaaaatgcttcagggccgcctttttgcctatcctgacactcaccgccatcgcctgggacccaattatcttcatatacctgtgaactgtccctaccgtgctcgagtggccaactaccagcgtgacggcccgatgtgcatgcaggacaatcagggtggtgctccaaattactaccccaacagctttggtgctccggaacaacagccttctgccctggagcacagcatccaatattctggagaagtgcggagattcaacactgccaatgatgataacgttactcaggtgcgggcattctatgtgaacgtgctgaatgaggaacagaggaaacgtctgtgtgagaacattgccggccacctgaaggatgcacaaattttcatccagaagaaagcggtcaagaacttcactgaggtccaccctgactacgggagccacatccaggctcttctggacaag

SEQ ID NO: 23843 - DNA, 329 bp, Homo sapiens
gcccaagaagaagaagaaattctctttcaagaagcctttcaaattgagcggcctgtccttcaagagaaatcggaaggagggtgggggtgattcttctgcctcctcacccacagaggaagagcaggagcagggggagatcggtgcctgcagcgacgagggcactgctcaggaagggaaggccgcagccacccctgagagccaggaaccccaggccaagggggcagaggctagtgcagcctcagaagaagaggcagggccccaggctacagagccatccactccctcggggccggagagtggccctacaccagccagcgctgagcagaatg

SEQ ID NO: 23844 - DNA, 342 bp, Homo sapiens
gccggcgtgatctaagagaaagacgagatctaagagacgacagggaccgaagaggacctccactcagatcagaacgtgaagaagtaagttcttggagacgtgctgatgacaggaaagatgaccgggtggaagagcgggaccctcctcgtcgagttcctcccccagctctttcaagagaccgagaaagagaccgagaccgagaaagagaaggtgaaaaagagaaggcctcatggagagctgagaaagatagggaatctctccgtcgtactaaaaatgagactgatgaagatggatggaccacagtacgacgttaagtctcaagataatggatttaaactggtg

SEQ ID NO: 23845 - DNA, 442 bp, Homo sapiens
  misc_feature (1)...(442): n = a,t,c or g
ggaagaggcaaggaagggtgcttccctacagccttcagagggagtgtggtggcgctgctgacaccttgatttcagaagtccagcctccagaactgtcagaagataaatttctgttgttctcagccatccagtttgtggtactttgtaacggcagccctaggaagctgatgcaggtgggattgattcccctgctccagagaaaggactgttttcacagaagaggcgatgcttgaactgaatctgaagggatcaatgtggcttcccttggcaaggcatggagtgaaggtggagtatatcccaagtggggaggacagcacgtgacatggcgcagggcttatgaaacaacatgccttcttctcttcaggtacttaagctacattagtaagaccagaacttaatggnganggttgaagctgctggacaggcagttangaatgagtca

SEQ ID NO: 23846 - DNA, 1031 bp, Homo sapiens
  misc_feature (1)...(1031): n = a,t,c or g
tcagagaagcagatattgatggagacggacaagtcaactatgaagaattcgtacagatgatgactgcaaaatgaagacctactttcaactcctttttcccccctctagaagaatcaaattgaatcttttacttacctcttgcaaaaaaaagaaaaaagaaaaaagttcatttattcattctgtttctatatagcaaaactgaatgtcaaaagtaccttctgtccacacacacaaaatctgcatgtattggttggtggtcctgtcccctaaagatcaagctacacatcagttttacaatataaatacttgtactaccttaatgataaggactccttaaagttccatttgctaatgattaatacactgtttgggctggccagtttttcatgcatgcagcttgacgattgagcacagtcaggcctttgtattaaaaatgaaaaatgaaaaaacaaattcaaaacctattcaaatgggttctagttcaatttgtttagtataaattgtcatagctgatncnntgaccgagagcgagagcgagaacgagatcgggaacgagagcgagagcgggaccgagagagagaagaggaaaagaagagacacagctactttgagaagccaaaagtagatgatgagcccatggacgttgacaaaggacctgggtctaccaaggagttgatcaagtccatcaatgaaaagtttgctgggtctgctggctgggaaggcacagaatcgctgaagaagccagaagacaaaaagcagctgggagatttctttggcatgtccaacagttatgcagagtgctacccagccacgatggatgacatggctgtggatagtgatgaggaggtggattatagcanaatggaccagggtaacaagaaggggcccttaggccgttgggactttgatacccaggaagaatacagcgagtatatgaacaacaaagaagcttttgcccaaggctgcattccagtatggtatcaaaatgtctgaagggcggaaaaccaggcgcttcaaggaaaccaatgaca

SEQ ID NO: 23847 - DNA, 454 bp, Homo sapiens
aattatatttgctgtcagcatgatagaataagaagcagaaaccccccagcagtggggtaagattgcgcgcttcatcccctcaaaatgcagttcagccccactccctctccatgcccatcaaacaactgcacaatcacttgttactgaatttcccattcagcgttttgtttctttctgtccatacttaaagaccaaatcatttgtttgctttgaagaaaaagcaaaaacaagaacaaaaacaccaaatcatttgaaatcactgtccattaaaaaaaatcaccagtggaactaaacagttgagtggtttgggatgtgttcgccatttctgtgtttgacctacatggcctctaattctttggaccattgtaactgtgaaactatggcttaatactgttaaagaccccaaggctccactctgtagccaggtgcacctcaggctgcacaaataccccac

SEQ ID NO: 23848 - DNA, 450 bp, Homo sapiens
  misc_feature (1)...(450): n = a,t,c or g
gaatggctcatccctgtaatcccagcactttgggaggccaaggtgggcagatcaccagcctggccaccatggtgaaaccccatctctactaaaaatacaaaaaaaattagccaggtgtggtggcacatatgtgcaatcccagctactcgggaggctgaggtgggatcacttgaatccgggaggcggaggttgcagtgagccaagatcccaccattgcactcccagtttgggtggaagagtaagacaccgtctcaaaaaataaaaataaagttaggggcaatgaagagaggctcagccctctccctggaagaattgttctgataatgtcaaattaacctggactttgacataagtaatatgaagttacttttaatcattcatatgtgtttgagttggtcaagtgtgggcttttttctcattancaaaatgncngctttcgttaaaaaaaaa

SEQ ID NO: 23849 - DNA, 350 bp, Homo sapiens
gcccaaccgacagactatgggggctccggcaaccaggcgctgcgtggagtggctgctgggcctctacttcctcagccacatccccatcaccctgttcatggacctgcaggcggtgctgccgcgcgagctctacccagtcgagtttagaaacctgctgaagtggtatgctaaggagttcaaagacccactgctacaggagcccccagcctggtttaagtcctttctgttttgcgagcttgtgtttcagctgcctttctttcccattgcaacgtatgccttcctcaaaggaagctgcaagtggattcgaactcctgcaatcatctactctgttcacaccatgacaaccttaa

SEQ ID NO: 23850 - DNA, 414 bp, Homo sapiens
ggaaccaaggtgccaggctgactcaccaagggctaagattgctttacttagtagcctcaagcccaaggaactgattgtgaaaaccacctgaataaacaggagggaggaagaggtaatactgttcatctataaatcatataagcctctgttagggtctgcgcaatctatcaaccccagccctgccttcccataggaaattcctttattttcaattgccacatacatagatattccacggtttaatatacaagcaaatgtgtatattttttcaaggaacagaaaaaaacagtccatcttggctggtccctatggcccccagcccccactccttcttcaacaaagtccctgattttctcaaaagttcgaaccaaaagctggaagcgctaattatagtacgcaaaaccaaatggaaat

SEQ ID NO: 23851 - DNA, 344 bp, Homo sapiens
gcggcacgagaactggaagatatgaagatggaaccctctccctcacctccacctctgatctgcaaagtggcatcattaaaaatactgcttccctaaagtatgagaactacgagctgactttaaaatctgacaccaatgggaagtataagaactttgccacttctaacaagatggatatgaccttctctaagcaaaatgcactgctgcgttctgaatatcaggctgattacgagtcattgaggttcttcagcctgctttctggatcactaaattcccatggtcttgagttaaatgctgacatcttaggcactgacaaaattaatagtggtgctcacaaggcgaca

SEQ ID NO: 23852 - DNA, 450 bp, Homo sapiens
cttgacatgattacgaatttaatacgactcactatagggaatttggccctcgaggccaagaattcggcacgagtgggatcccgtatcgaaccgtctctgagtggctcgagtccatacgcatgaaacgctacatcctgcacttccactcggctgggctggacaccatggagtgtgtgctggagctgaccgctgaggacctgacgcagatgggaatcacactgcccgggcaccagaagcgcattctttgcagtattcagggattcaaggactgatccctcctctcaccccatgcccaatcagggtgcaaggagcaaggacggggccaaggaactgattttctgcctccatcccacccatgagggctgcaggcactacaaaagagctgactactgagaattctggaaaacaagagcacgtgaccgtccagggggaagcagccattgtcatctg

SEQ ID NO: 23853 - DNA, 453 bp, Homo sapiens
  misc_feature (1)...(453): n = a,t,c or g
gcccaccatctccctgtccgacggtgaagagccacctccttaccaggggccctgcaccctgcagctccgggaccctgaacagcagatggaactcaaccgagagtccgtgagggccccacccaaccgaaccatatttgacagtgatttaatagacattgctatgtatagcgggggtccatgcccacccagcagcaactcgggcatcagtgcaagcacctgcagcagtaacgggaggatggaggggccaccccccacatacagcgaggtgatgggccaccacccaggcgcctctttcctccatcaccagcgcagcaacgcacacaggggcagcagactgcagtttcagcagaacaatgcagagagcacaatagtacccatcaaaggcaaaagataggaagcctgggaacctggncttgattccttccaacgtgcacttagctggagaaagaaacc

SEQ ID NO: 23854 - DNA, 527 bp, Homo sapiens
ttacgaatttaatacgactcactatagggaatttggccctcgaggccaagaattcggcacgagctcggccgcagaagcgagatgacgaagggaacgtcatcgtttggaaagcgtcgcaataagacgcacacgttgtgccgccgctgtggctctaaggcctaccaccttcagaagtcgacctgtggcaaatgtggctaccctgccaagcgcaagagaaagtataactggagtgccaaggctaaaagacgaaataccaccggaactggtcgaatgaggcacctaaaaattgtataccgcaggtcgacgcggccgcgaattccagatctatgaatcgtagatactgaaaaaccccgcaagttcacttcaactgtgcatcgtgcaccatctcaatttctttcatttatacatcgttttgccttcttttatgtaactatactcctctaagtttcaatcttggccatgtaacctctgatctatagaattttttaaatgactagaattaatgcccatcttttttttggacctaa

SEQ ID NO: 23855 - DNA, 396 bp, Homo sapiens
  misc_feature (1)...(396): n = a,t,c or g
gggaaaaccatataggccatgaggggatgaagtgacattttcaaagtgctcaaagaaaaaaaaaacttgcattcaagaatactgtacccagaaaaactatccttcacatatgaaggagatataaaatctttaccagacaagtaaaaactgaatcattcaccaccaccgggcttatcttacaagaaataaagggagctttcccatttgaaagaagaaagcactaatgggttaaaaaaaaaaagttttcaagatataaaacccacttgtaaaattaagtatacggataaacccaaaatactctgttactgtcatgtancaatagctacagcagcctgttaagagatagataatgaaaantatataaaatcagacaactgaaagtcaaaagggggaggc

SEQ ID NO: 23856 - DNA, 439 bp, Homo sapiens
gctagccaaatgctgtatcttgcgtaagagtttatgctttgccatgtaacccttaagtagcgctgctgaagatgatctcttttagggaaaatgggtaagtctgggatttagggtgggagctaggggaatgggggaataacacccaaagtatgtactgttttataacctttcagtacagtagattaatatttgtttctatcttttttattttattttttatttatttttctatctagagtatcattgcctatcttttttattttagaaatatgactgggcatagtggcttacacctgtaatcccagtactttgggaagtcaaggtgggagaattgcttgagcccaggagttcgacaccagcttgggcaacatagtaagacccccatctctaattaattaattaagccggccgcaagcttattccctttagtgaggggtaa

SEQ ID NO: 23857 - DNA, 300 bp, Homo sapiens
  misc_feature (1)...(300): n = a,t,c or g
gctcggcgtggcaacacaaatccaaaccatatcactgagtaaagtgcagatggcaggatagtttcacaatagaatgttcattctctggtttctattgaattggataggagaaaaaaanaaatnnggtntaaanaaaaantaagnngtngnaancnncnnnggnaatcagtnaancntanttccatatactccanaaggcacnnacaancaaaaantttaaantttntggannnnttnagcattggnccnntcctnancngntttnnnccaaaannggtnctnngncaangngnaactatt

SEQ ID NO: 23858 - DNA, 331 bp, Homo sapiens
  misc_feature (1)...(331): n = a,t,c or g
tgaataatggctcccaaatcccaaatctgatcaaaaatattaatcaatatgtgcaagaccaacaaatgccagaaaggataaactggcaggctgaggtgagcagattacttgagcccaagagttcaagaccagcctgggcaacatggcaaaaccctgtctataccaaaaaaaaccaaaanttacntggccntgggggcntacncntatagncccagttantngnaaggccgatgtggaaggatcgtttgaccccggaaggngnaggacncagtganctgcaatngngccantgcantccaaagnttttttttgancaaaagggaaaangatc

SEQ ID NO: 23859 - DNA, 320 bp, Homo sapiens
gacttcaaagaacttatcctttagttggagagccaagacaatcataacaataacaaatggccgggcatggtggctcacgcctgtaatcccagcactttgggaggccaaggcaggtggatcatttgaggtcaggagttcaagaccagcctgaccaagatggtgaaatgctgtctctattaaaaatacaaaattagccgggcatggtggctcatgcctgtaatgccagctactcgggaggctgagacaggagaatcacttgaacccaggaggcagaggttgcagggagccgagatcgtgtactgcactccagcctgggcaac

SEQ ID NO: 23860 - DNA, 334 bp, Homo sapiens
ttttactttgggagagtaacattacaagatgtataataagaattacccttattattaagcattttctaaactcctattgtttcacccatattttaccagcatcgaagaataattattataccactgccacaattcacaaaatcctttcacctccgttttttcatgtgcttttcctaacagtcatgagataagcaagcttcatgataataactgcaacttctacaaccccaaccccattgtaagtgaaatacccactaagaatcaggcactatacaaggtatcacatatttacctcattcacagtggaataattacaaaaatctatgaagtagtt

SEQ ID NO: 23861 - DNA, 530 bp, Homo sapiens
agctatgacatgattacgaatttaatacgactcactatagggaatttggccctcgaggccaagaattcggcacgagcaacaaatcctccaagttagtatcagccaatcgcctttttggagacaaatcccttaccttcaatgagacctaccaggacatcagtgagttggtatatggagccaagctccagcccctggacttcaaggaaaatgcagagcaatccagagcggccatcaacaaatgggtgtccaataagaccgaaggccgaatcaccgatgtcattccctcggaagccatcaatgagctcactgttctggtgctggttaacaccatttacttcaagggcctgtggaagtcaaagttcagccctgagaacacaaggaaggaactgttctacaaggctgatggagagtcgtgttcagcatctatgatgtaccaggaaggaaagttccgttatcggcgcgtggctgaaggcacccaggtgcttgagttgccttcaaaggtgatgacatcaccatggtcctcatcttgc

SEQ ID NO: 23862 - DNA, 431 bp, Homo sapiens
acctttatgacatgattacgaatttaatacgactcactatagggaatttggccctcgaggccaagaattcggcacgagcggcacgaggccatcatctggttcccgctgctcttcatgtcgctggtgcgctccgtggttggggttgtcaaccagcccatcgatgtcaccgtcaccctcaagctgggcggctatgagccgctgttcaccatgagcgcccagcagccgtccatcatccccttcacggcccaggcctatgaggagctgtcccggcagtttgacccccagccgctggccatgcagttcatcagccagtacagccctgaggacatcgtcacggcgcagattgagggcagctccggggcgctgtggcgcatcagtccccccagccgtgcccagatgaagcgggagctctacaacggcacggccgacat

SEQ ID NO: 23863 - DNA, 436 bp, Homo sapiens
  misc_feature (1)...(436): n = a,t,c or g
ggcaaagccttctttgaatccattggaacgtagcagtttatgaaatatcactttcacccctttaaaccggatccttgtttgtttgatgagcaattagtgtctcagccccctactgaaaccaattttctaggtttattgttgaccccactttgatgacattgagtgcttttcacagtcataaatgtgcacattctcaatgcagaacactggggcacacagccaagtacgaaagaggagcagcacccacaactctgctacccagagagaagcactggtaacattttggtagctatcttgttaggcttcctctagtaatatgtaggtttacaaaaatgaggtcattgacacatgctgtttcatggccttcttttaaaactatcagtaggcatgagccaccgtgccccgggcaatgcagtgtnagtgaaaaaaagcaatt

SEQ ID NO: 23864 - DNA, 387 bp, Homo sapiens
ggacattaatattaatgcatattaaccagtactccaaattgacttatggataggatgatccttcagagacttaagaggaattgagtaccatcacttgtgattaacttttgctcttttcttgtggagaaaactaagtctagatacgtgaaaagtcattttctcttgattaggatttgattggttgcaaggaatagacagactcaggccaacttatggaggaggaggtctgttttgagaatacaacagtgaatctcaagaaatctaaggtcagtgattgtagctggctgggacttaaatacaactgatgtcagttacctggaaaatcatagggaatcatcttttccctcaagtcagtgtatacctctcttatgatatctggcatctctg

SEQ ID NO: 23865 - DNA, 82 bp, Homo sapiens
ggaaaggagcctgggaagaactcagccatcctttcacttccttctttcagacccgtgtccctcaaagagtcaggaagagccc

SEQ ID NO: 23866 - DNA, 482 bp, Homo sapiens
cagctatgacatgattacgaatttaatacgactcactatagggaatttggccctcgaggccaagaattcggcaacgaggcgtggttttgtaatttatttgaacatatgactatctcccagagtgaactgtgagtttcataggggtgtgggtggatttgggactaagtcttatgcatttttgtgttgatacattttcatgtgggttggtgcataaaagacactaagaatcgatgaaaggaggaagaaaggaaaacaggaagaaaaagagggaaagaagaaagaaaaggaaagaaaaaagcaaggaaagaaggaaatgaaagaaagaatgaatccatgaattaattataatgtgatttccagatccattacctcttcgcctatggacatgcctttgtcaataccattcttaaaatttgggacttgaaaccatggtctgaacatggaataggactggtagttctcctgcctggacactggatggt

SEQ ID NO: 23867 - DNA, 446 bp, Homo sapiens
  misc_feature (1)...(446): n = a,t,c or g
gganaccgntatgacatgattacgaatttaatacgactcactatagggaatttggccctcgaggccaagaattcggcacgagctccacggcttttgctatgaccaagctgggtgcctgtaatgacaccctccagcaactgatggagggatttaagtttgacaccatatctgacaaaacatctgatcacatccacttcttctttgccaaactgaactgccgactctatcgaaaagccaacaaatcctccaagttagaatcagccaatcgcctttttggagacaaatcccttaccttcaatgagacctaccaggacatcagtgagattctatatggagccaagctccagcccctggacttcaaggaaaatgcagagcaatccagagcggccatcaacaaatgggtgccaataagaccgaaggccgaatcaccgatgtcnntcctcgga

SEQ ID NO: 23868 - DNA, 397 bp, Homo sapiens
gaagcctagcaattgcatctgagaatcattgaaggggtctaaatatggaaaccgagacactgctgtgagtgagactacaaagaccatgctatcagattggctcgctagagaggcgtccagcagtcttccgactctgcccagcccatcctctccttattcccgtagcactgtaacatgcagatacctacactgcattgctctcacatgctgatagtttctcatgcagaggcctggtgggggaggggctggagggtgttaaaataagttgatgaggtatggcagtaaaggaaagaacctgtgacttaaataagggaaataccagaaatctatattttaggtgaatacaaagcatccaatttagattgagtttccatttaaacaaaggcaactcttaaga

SEQ ID NO: 23869 - DNA, 366 bp, Homo sapiens
  misc_feature (1)...(366): n = a,t,c or g
ggctcaaaagctaaaaatgaacttcttttatttatttcttcatcttggttatgatctttctttgggaggggtggggctgtgaagggagtagtagaagacaaatgtggtttgggaagaggtgggagttgggaactgtaatgggaaaatatagagggattttctttcttttatttttttttttttatgtctagcatgcctgtaagttcagtatgcatatgatcatgngactcccctatatttnatngggttccttgcttcnactctttctttggctaaaactattgancatatattgaagggcttgaaagtcaatccattcaggattcctcagggtaaatagttttctctttatagggctttcacttt

SEQ ID NO: 23870 - DNA, 370 bp, Homo sapiens
ggaaaaccaggatttaaacagaatttctcaacctaagagaactatgaaggaagatttattatctttggctataaaaagtgaccccataccatcagaactaggtagtctaaaaaagagtgctgacagtttaggtaaattagagttacagcatatttcttccataaatgtggaagaagtttcagctactgaagccgctcccgaggaagcaaagctatttacaagtcaagaaagtgagacctcacttcaaagtatacgacttttggaagcccttctggccatttgtcttcatggtgccagaactagtcaacagaagatggaattggagttacctaatcagaacttgtctgtggaaagtatattatttgaaatg

SEQ ID NO: 23871 - DNA, 500 bp, Homo sapiens
  misc_feature (1)...(500): n = a,t,c or g
gggcaaaatgagtcttaatatttctgtcctttaagttaaaaatggtcaaaatatgctttcagaattacttctctatattcattagtaatttttagtataatttagcctgggcttgccttaccatattctgatggtgtagtttgagtattaagaaaatagaatttatttattgatttatatttatttatttttgagaccctggccctgcaaaaatatttaaaaagtagccaggtgtgttggtctttgcctgtagtcccagttacttgagaggatgaggtggcaggatcgcttgagcctgagaggtagaggctgcagtgagctgttctgtgcacagcacttcagcctgggcaacagagtgagatcctatctcaaaaaaaaaaaggccctganatattccctaaaacataaggaaancagatattgacttttccanggcaanatnaantaccnantaatttaattaaccggccgaagcttatccctttgngagggtaatttac

SEQ ID NO: 23872 - DNA, 844 bp, Homo sapiens
gttatgacatgattacgaatttaatacgactcactatagggaatttggccctcgaggccaagaattcggcacgagggaagattagcggccatgtattccaatgtgataggaactgtaacctctggaaaaaggaaggtttatcttttgtccttgctgctcattggcttctgggactgcgtgacctgtcacgggagccctgtggacatctgcacagccaagccgcgggacattcccatgaatcccatgtgcatttaccgctccccggagaagaaggcaactgaggatgagggctcagaacagaagatcccggaggccaccaaccggcgtgtctgggaactgtccaaggccaattcccgctttgctaccactttctatcagcacctggcagattccaagaatgacaatgataacattttcctgtcacccctgagtatctccacggcttttgctatgaccaagctgggtgcctgtaatgacaccctccagcaactgatggaggtatttaagtttgacaccatatctgagaaaacatctgatcagatccacttcttctttgccaaactgaactgccgactctatcgaaaagccaacaaatcctccaagttagtatcagccaatcgcctttttggagacaaatcccttaccttcaatgagacctaccaggacatcagtgagttggtatatggagccaagctccagcccctggacttcaaggaaaatgcagagcaatccagagcggccatcaacaaatgggtgtccaataagaccgaaggccgaatcaccgatgtcattccctcggaagccatcaatgagctcactggttcctggtgctgggttaacacca

SEQ ID NO: 23873 - DNA, 383 bp, Homo sapiens
gacagagctagtgtttaaatccaggaatagactctagatcccatgtgctaaactacattactctgctgtttcagataattgtttgacagtatccccaggtatgtgtgataaatttcaaaagcctttagagcttcacggaaaccctgtaagccccaagaacaagagcagagggtcagtgtctgcagccatgcacaggtcagagagatatggagactatctcatctctcaggaatggagtggatgtctcagcagagacattactgttctgaagacaacggggcattaagctggagttgttcctcagtggaggtgacaggttgttcacttataatcccctgtcctgtggcacaaactactggctcaaggtagggattcatttttgg

SEQ ID NO: 23874 - DNA, 416 bp, Homo sapiens
  misc_feature (1)...(416): n = a,t,c or g
tgctatgacatgattacnaatttaatacgactcactatagggaatttggccctcgaggccaagaattcggcacgagcttgtgtgaagctcactgcctcaaggtggccgtggatggtcagcacctgtttgaatactaccatcgcctgaggaacctgcccaccatcaacagactggaagtggggggcgacatccagctgacccatgtgcagacataggcggcttcctggccctggggccgggggctggggtgtggggcagtctgggtcctctcatcattcccacttcccaggcccagcctttccaaccctgcctgggatctgggctttaatgcagaggccatgtccttgtctggtcctgcttctggctacagccaccctggaacggagaaggcagctgacggggattgccttcctcaa

SEQ ID NO: 23875 - DNA, 451 bp, Homo sapiens
  misc_feature (1)...(451): n = a,t,c or g
ntttgnananngctatgacatgattacgaatttaatacgactcactatagggaatttggccctcgaggccaagaattcggcacgagcatcaacctgtgctctgggaaccacatcgccttccacctgaacccccgttttgatgagaatgctgtggtccgcaacacccagatcgacaactcctgggggtctgaggagcgaagtctgccccgaaaaatgcccttcgtccgtggccagagcttctcagtgtggatcttgtgtgaagctcactgcctcaaggtggccgtggatggtcagcacctgtttgaatactaccatcgcctgaggaacctgcccaccatcaacagactggaagtggggggcgacatccagctgacccatgtgcagacataggcggcttcctggccctggggccgggggctggggtgtggggcagtctgggtcctctcatcat

SEQ ID NO: 23876 - DNA, 401 bp, Homo sapiens
  misc_feature (1)...(401): n = a,t,c or g
tcactatagggaatttggccctcgaggccaagaattcggcacgagccgcgataaccaccattctgactctcctcacccctccagcctcccggcgtgtggcctgccaacccggctcccattacccagacagtcatccacacagtgcagagcgcccctggacagatgttctctactcccgccatcccacctatgatgtacccccaccccgcctatccgatgcctttcatcaccaccattctgggagggctgtacccatccaagtccatcctcctgtcaggcactgtcctgcccagtgctcagaggttccacatcaacctgtgctctgggaaccacatcgccttccacctgaacccccgttttgatganaatgctgtggtccgnacacccagatcgacaactcc

SEQ ID NO: 23877 - DNA, 801 bp, Homo sapiens
gcggcacgagcgggccggcagagcagggggccgaggacaccaggtctgttctcagagcgatgggccgcggagactgatctgccgccatgattggaggcttattcatctataatcacaagggggaggtgctcatctcccgagtctaccgagatgacatcgggaggaacgcagtggatgcctttcgggtcaatgttatccatgcccggcagcaggtgcgcagccccgtcaccaacattgctcgcaccagcttcttccacgttaagcggtccaacatttggctggcagcagtcaccaagcagaatgtcaacgctgccatggtcttcgaattcctctataagatgtgtgacgtgatggctgcctactttggcaagatcagcgaggaaaacatcaagaacaattttgtgctcatatatgagctgctggatgagattctagactttggctacccacagaattccgagacaggcgcgctgaaaaccttcatcacgcagcagggcatcaagagtcagcatcagacaaaagaagagcagtcacagatcaccagccaggtaactgggcagattggctggcggcgagagggtatcaagtatcgtcggaatgagctcttcctggatgtgctggagagtgtgaacctgctcatgtccccacaagggcaggtgctgagtgcccatgtgtcgggccgggtggtgatgaagagctacctgagtggcatgcctgaatgcaagtttgggatgaatgacaagattgttattgaaaagcagggcaaaggccagctgatgaaaccaagcaagagcgggaagc

SEQ ID NO: 23878 - DNA, 522 bp, Homo sapiens
  misc_feature (1)...(522): n = a,t,c or g
gccacacaaaatttatgtctgtgccctgtcttcttgggtctattttttaaccagaaattaataagacattgatttgcctttgttagagtgatttcagtgtttcgagttattaagacaggaagtgtgagtccctgttggaattctgggtcagcagattatttacctcttctacaattgcaatggaaattgaaatctatttgtcctgtgacatacaattaatgagtattcttttttgctttttctcttctgagccaagagctttcttttcataatttatgttggaggtgttccagactatgttatgtgactactgcaagaaggtccttgccacagaaagttagactctcatttcttttgacaatatcaaatattcagccttttcctctgtcttaagaatacatataatatgccttaagttagatgcataccatagtggttcccttgtgtaanaaaatggantggangggctgaactggagcttcatgcctaccgttgggctagaaacactccatcaacccagca

SEQ ID NO: 23879 - DNA, 429 bp, Homo sapiens
tttaaaagtgcagccggagaccagcctacagccgcctgcatctgtatccagcgccaggtcccgccagtcccagctgcgcgcgccccccagtcccgcacccgttcggcccaggctaagttagccctcaccatgccggtcaaaggaggcaccaagtgcatcaaatacctgctgttcggatttaacttcatcttctggcttgccgggattgctgtccttgccattggactatggctccgattcgactctcagaccaagagcatcttcgagcaagaaactaataataataattccagcttctacacaggagtctatattctgatcggagccggcgccctcatgatgctggtgggcttcctgggctgctgcggggctgtgcaggagtcccagtgcatgctgggactgttcttcggcttcctcttggtgatattt

SEQ ID NO: 23880 - DNA, 416 bp, Homo sapiens
ggcccagcagaacctaattgtatcaaacacagaagctcctggagatgacaaagtgtattctgcgaatggcttcacaacccaaactgtgggcgcttctgctcagggagtttgtggcaccgtgggatcaggaatcaaaaacggaggtcaggagaccatcgaaatggtgaaaggaggacaccagacctcggaatcctgccggggggctggccaccatcacaccctggactcctgcaggggaggacacacggaggtggacaactgcagatacacttactcggagtggcacagttttactcagccccgtcttggtgaaaaagtgtatctgtgtaatcaagatgaaaatcacaagcatgcccaagactatgtcctgacatataactatgaaggaagaagatcggtggctgggttttaagttg

SEQ ID NO: 23881 - DNA, 739 bp, Homo sapiens
  misc_feature (1)...(739): n = a,t,c or g
attggccacaccattacnaatttaatacgactcactaaatggaatttggccctcnaggccatcgaattcgncacnangacttancgnnnccatgattttaacaaaaacantactgtngctcaaatcnattcagacaaacatcaggttttataatttttttattacggnggnnggttatttttataccagcctnacntcgcntgtncnnacaacncatgacttcacnctgaatngttccatgccngagggtantaacnaatcnctgtncacatactttccttcttcacccaaccantctgnntggctcnacctntntccganagacanaccaatctatcnattanctannttccttccaacnnagnaggtancnatagccatnctttctgctnggctnnctctacncaatcgntnnggcacgatcnannntnntttgctcctacctntccctnccaaccaatcantnaaatcattctttccntaacnnaaattngttgnaatnactgaatnnaagnaagggnaagganaggncagtcctggccggctnnatccactctnccntgannggngggntanctcttncaaaaaaggnnnggctgnnnngagcattncaacnccccnncaanaantgaancccaccccnngttnnttnnttnaannnatnattaannttngntngggnggctnaannaancnctanntttttatagnacaaatnanaatannatannnttntttt

SEQ ID NO: 23882 - DNA, 505 bp, Homo sapiens
gctatgacatgattacgaatttaatacgactcactatagggaatttggccctcgaggccaagaattcggcacgaggcctaaaaagtcttttaaagaaactatgtagaaaggaggcaggactgtaatgggttaaaatttcccagtacacaggcataattcttaattttccaatgaattttgtaggaactgtaaagaaataacaataatgtctcagaaatatgtagctcaattgaaatcataactttctataaaatagcttaattatgcatatataattagatcctatttgaaatagttattttggaataatctgtggttgcatttcagtggttttactgtgagtaaaaactacctcctggggctcaggggtctctggaacacctaaaagattggaaatgcttttattgggccaggggagcttggatggggataagtcgttaagtgcaggcaaagcctttctgagagtgtaaaggggcttccagtaagaccagggccagttctgaaa

SEQ ID NO: 23883 - DNA, 423 bp, Homo sapiens
gtagggctcggcgtggacagactgtcactgtctcatattcaaggtgatagctaggtttttacgataaaatatcctgattttaaaacattagcaacataaaattcgcttgcaaatgctttactagccatgaagctacatttgtgggcccacctgcctgaggaccagctgtttgcaacctctatatccaccttattgttctgccttacaataaccctgcaaagttgggcatcgctgttctcatttgatcaatgagggaactaaagcacagagaggggaatagatttgtccaaagtcacatggctaggaagaagcatggctgagattcggtctgcatttgtctaggatccaaggcttcctccataaccgcagcctgacttttaaacaggcaagtcctggcctggaaacagccagaaggagagcaag

SEQ ID NO: 23884 - DNA, 416 bp, Homo sapiens
gggaagacctcagtgagtagttcttactgccctctaccttactacctttccacctttcccatttccatttgtttgttgatccatttaatctcaaacttacagaaaagttacaaggaactgggctgagcacggtggctcacgcttgtaatcccagcactttgggaggccaagatgggtggaaaacaaggtcagaagatcaagaccatcctggctaacacagtgaaaccccgtctctactaaaaatacaaaaaacttagccaggtgtggtggtgggtgcctatagtcccagctacttgggaggctgaggcaggagaatggtgtgaacccgggaggcggagcttgcggtgagccaagatcctgccactgcactccagcctgagcgacagggcgagattctgtctcaaaaaaaaaaaaaa

SEQ ID NO: 23885 - DNA, 386 bp, Homo sapiens
gcggcacgaggtttgttatgacaatttatttgatccagagagcatagttgcaattaaaattgctttatagattaagtgaaaaaacacatcagaggttgtatagcttggcagtaaagagcccaggagctgctttcagactaacttggattgaggaggtcctcactttgcttctcgtagagttccgtgaggatgcactgagaggggcagtaaaacctcacgctcacgggcatggagcaagcactctcagtcacttatctctatgaagacttggagggttttggtgaagttgatcattgataaatacatagctagagaggtttgttataccaatgacttttacaggcaagaatgtatttggctgcgactaacaggaaacctgacacaga

SEQ ID NO: 23886 - DNA, 443 bp, Homo sapiens
  misc_feature (1)...(443): n = a,t,c or g
gacaggctctgtatccgtggcagcggccgtggcaggctggctgggtaccggctgtcgctgacccaggagaagctgcctgtctacatcagcctgggctgcggcgcgctgccgccgcggggccggcagctgaactatgtgctcttcagggcgggcaccgtgttgcattcatctttgtacccccagcatctagcagtgttggcatgtagtaggcactcaagaaatgtgtgttgaatgaacgatgcctgtgacaagcaagcggactttattctttcctgacccttgctcctatgacacacctcctcctgactgccactgtcactccttcagagcagaactcctctagggaacctggatgggaaacagccatggccaaggacatcctgggtgaagcagggctacactttgatgaactgaacaagctgagggtgttggacccanaggtt

SEQ ID NO: 23887 - DNA, 352 bp, Homo sapiens
gacccccttctggatggcacctgaggtcatcaagcagtcggcctacgacttcaaggctgacatctggtccctggggatcacagccatcgagctggccaagttcccaagaacagcccacccacactggagggccagcacagcaagcccttcaaggagttcgtggaggcctgcctcaacaaagacccccgattccggcccacggccaaggagctcctgaagcacaagttcatcacacgctacaccaagaagacctccttcctcacggagctcatcgaccgctataagcgctggaagtcagaggggcatggcgaggagtccagctctgaggactctgacattgatggcgaggcgg

SEQ ID NO: 23888 - DNA, 475 bp, Homo sapiens
  misc_feature (1)...(475): n = a,t,c or g
agaaccttatgacatgattacgaatttaatacgactcactatagggaatttggccctcgaggccaagaattcggcacgaggagatgactccttcaacaccttcttcagtgagacgggcgctggcaagcacgtgccccgggctgtgtttgtagacttggaacccacagtcattgatgaagttcgcactggcacctaccgccagctcttccaccctgagcagctcatcacaggcaaggaagatgctgccaataactatgcccgagggcactacaccattggcaaggagatcattgaccttgtgttggaccgaattcgcaagctggctgaccagtgcaccggtcttcagggcttcttggttttccacagctttggtgggggaactggttctgggttcacctccctgctcatggaacgtctctcanttgattatggcnagaagtccaagctggagttctccatttacccggcaccccag

SEQ ID NO: 23889 - DNA, 1097 bp, Homo sapiens
gggaactttttgactgatcacgaatttaatacgactcactatagggaatttggccctcgaggccaagaattcggcacgagcaggagcacaggcagctggatgagacttccaaacctgacagatgtcagccgagccgggcctggggctcctttctccagccagcaatgatgtccagaagaatattcaggacttaacggctccaggattttaacaaaagcaagactgttgctcaaatctattcagacaagcaacaggttttataatttttttattactgattttgttatttttatatcagcctgagtctcctgtgcccacatcccaggcttcaccctgaatggttccatgcctgagggtggagactaagccctgtcgagacacttgccttcttcacccagctaatctgtagggctggacctatgtcctaaggacacactaatcgaactatgaactacaaagcttctatcccaggaggtggctatggccacccgttctgctggcctggatctccccactctaggggtcaggctccattaggatttgccccttcccatctcttcctacccaaccactcaaattaatctttctttacctgagaccagttgggagcactggagtgcagggaggagaggggaagggccagtctgggctgccgggttctagtctcctttgcactgagggccacactattaccatgagaagagggcctgtgggagcctgcaaactcactgctcaagaagacatggagactcctgccctgttgtgtatagatgcaagatatttatatatatttttggttgtcaatattaaatacagacactaagttatagtatatctggacaagccaacttgtaaatacaccacctcactcctgttacttacctaaacagatataaatggctggtttttagaaacatggttttgaaatgcttgtggattgagggtaggaggtttggatgggagtgagacagaagtaagtggggttgcaaccactgcaacggcttagacttcgactcaggatccagtcccttacacgtacctctcatcagtgtcctcttgctcaaaaatctgtttgatccctgttacccagagaatat

SEQ ID NO: 23890 - DNA, 333 bp, Homo sapiens
gggaaaagggttaatgaagtagtccagggagagcaataaagaaaaaaagaatttcctggtctgggctggttaatctggttggttgtgcaagaaacagtctttgatgtgggcagagccttcggggcagatgccaggtgcttgtcacgagttagaaccgtacctaccctttttatggccacagagtcctccagtgaggactgatagttgaagactgtgcttgtttatctacttatctggttggatgcagtctttatcaagcaaaacatcttgtctctgttgtgacaaaatggtgtaaaaaaaaagtcataaaaaatgtacagttttaggaatttg

SEQ ID NO: 23891 - DNA, 371 bp, Homo sapiens
  misc_feature (1)...(371): n = a,t,c or g
gtttaacatcaagagaaagaggataggaaaaggggttaatgaaccagtctaggaagacagatatagacaaaaagaatgtcctggtctggaccagctggtttgtcaattttgcaaggaaaagtctcatgtgggcagagcctttggtggcagatgctgggtgcttatcacgagtgaaagcaagacggtgtcagttaagacagccatttggagctgctgaagtcctgctccttttatggccacagagtcctctggtgaggactgatagtggaaaagtatgcctatgtccttatctggttggttgcagtctttatttattaagcaaaacatcttgaccctcttaaaaaagtgccctatgaaatgtaanatggagt

SEQ ID NO: 23892 - DNA, 410 bp, Homo sapiens
gggaattaatagttttcctcaacttactataggaccatgttctgctctaaaaactttgaagttaaagcctagtctgtgatagcttagtacagtggtgggcaatctacagcctgtcctctctatctttgtaaataaggttttactggtatacagccatgttcatttgtttacattctgttgtctgtagctgctttcacacaactgtggcagagttgagtgatggtcacagagaacatataacttcaaaacctaaagtattgggctgggtatggtggctcatactgcaatccaagcactttcggaggattgtctgagtcccagaggttgaggctgatcatgccactgcactccagcctgggtgaaacagcaagaccctgtctcagaaaaaaacaaaacccaaaacctgaaga

SEQ ID NO: 23893 - DNA, 367 bp, Homo sapiens
gcggcacgagaactggatgtggtggcgcgtgcctgcctgtagttccagttacttgggaggctgaggcagggggatggcttgagcctgggaattcgaggatgcagtgggccaggatggcaccaccacagcccagcctgggcaacagagaaagaccctgtctcaaaaacaaacaaacaaaacataaaacaccaagaaaaagccctctgtccagagatgaaaaaattctcagggagaaaagggaagaggaaaagatattagcttatcactacctagaaaaatctgctatttatagtattaagttttttttttttaactaaacatatactgaatactccagtatgctggttctcatcaaaacatataatct

SEQ ID NO: 23894 - DNA, 328 bp, Homo sapiens
gccactggacatttctctaaggccagcttgatgaaaaaaaaaaagcaatcaagtcctggaaacactttcaacctagagtagttgtaggaaaaagtcacaacttctttgaggatccttatctttctcaaaacacagccattataacatctgtggaagcctgtcctggttcaggacagttgactgcagaaaagatctacagtcggctgggcacagtgtctcatgcctgtaatgccagcactttgggaggccaaggcaggcagatcacttgaggtcaggagttctagatcagcttggccaacatgacgaaaccctgtctctactaaaaata

SEQ ID NO: 23895 - DNA, 459 bp, Homo sapiens
tccctaatttaatacgactcactatagggaatttggccctcgaggccaagaattcggcacgagcggcacgagaaaaatagaagtttggtgtggtgctttttctatagtaaatttagaatttatatctactcaagtctgatttcaggagataagaatatatataaacaaaaataatcatgaaaacaaattgagattggtatgacaaattcatccacagtttagtgtttgctacatttctaggaaacttcttcagagaatggtagtgtttttgtgtgtgtgtgatctttattgatgtgaaaacatgaatctcgtataggcatgcgtgtgaacatttgggctcttattctacgaagtttctgatagtcaaagctctaaccctaaagatactcactttgaaaatactcattttctcaataagtaaaggggattgttagaaattgttggaatttatcttctaaa

SEQ ID NO: 23896 - DNA, 448 bp, Homo sapiens
gttcaacactatcggaatgtgactgtcgggcctccagaaaacattgaggtgaccccaggagaaggctccctcatcatcaggttctcctctccctttgacatcgctgatacctccacggcctttttttgttattatgtccattactgggaaaaaggaggaatccaacaggtcaaaggccctttcagaagcaactccatttcattggataacttaaaaccctccagagtgtactgtttacaagtccaggcacaactgctttggaacaaaagtaacatctttagagtcgggcatttaagcaacatatcttgctacgaaacaatggcagatgcctccactgagcttcagcaagtcatcctgatctccgtgggaacattttcgttgctgtcggtgctggcaggagcctgtttcttcctggtcctgaaatatagaggcctgattaaatactggt

SEQ ID NO: 23897 - DNA, 376 bp, Homo sapiens
cggacgcgtgggatcaaaaacagggacccagatggaaggatgctcttagatatttttgatgaaaatcttcaccctctttcgaaatccgaagtgccaccagattatgacaaacacaacccagagcagaagcagatttaccggttcgttcggacactgttcagtgctgctcagctgacggctgaatgtgccatcgtcaccctggtgtaccttgaaagacttttaacatacgcagagatagatatctgtccggccaactggaagcggattgttttaggggcgatcctgctggcctccaaggtgtgggatgaccaggctgtatggaatgtggattactgccagatcctgaaagacatcacggtggaggacatgaacgagc

SEQ ID NO: 23898 - DNA, 403 bp, Homo sapiens
ggcaattctcctgcctcaggctccctcctgggattacagtcacacaccaccacaccgagccaatttttgtatttttggtagagatggggtttcaccatgttggccaggctggtcttgaacttctggcttcaaatgatccacccacttcggcctcccaaagtgctgggattacagatgtgagccccaacgcctgacttaggttttctgttttatttaaactacttttccctacagtgccctttattttgttggccattttgttgtggcctccataataccttgacttactcccttcagaagatactaatgtctggatctcatcagtttctaaacattgatcattctctaaacaacttttacatgatcttttcccacactgaaactcagtggactctcttcaacg

SEQ ID NO: 23899 - DNA, 908 bp, Homo sapiens
cttgacatgattacgaatttaatacgactcactatagggaatttggccctcgaggccaagaattcggcacgagtgcgcttccgccatctttccagcctcagtcggacgggcgcggagacgcttctggaaggaacgccgcgatggctgcgcagggagagccccaggtccagttcaaacttgtattggttggtgatggtggtactggaaaaacgaccttcgtgaaacgtcatttgactggtgaatttgagaagaagtatgtagccaccttgggtgttgaggttcatcccctagtgttccacaccaacagaggacctattaagttcaatgtatgggacacagccggccaggagaaattcggtggactgagagatggctattatatccaagcccagtgtgccatcataatgtttgatgtaacatcgagagttacttacaagaatgtgcctaactggcatagagatctggtacgagtgtgtgaaaacatccccattgtgttgtgtggcaacaaagtggatattaaggacaggaaagtgaaggcgaaatccattgtcttccaccgaaagaagaatcttcagtactacgacatttctgccaaaagtaactacaactttgaaaagcccttcctctggcttgctaggaagctcattggagaccctaacttggaatttgttgccatgcctgctctcgccccaccagaagttgtcatggacccagctttggcagcacagtatgagcacgacttagaggttgctcagacaactgctctcccggatgaggatgatgacctgtgagaatgaagctggagcccagcgtcagaagtctagttttataggcagctgtcctgtgatgtcagcggtgcagcgtgtgtgccacctcattattttctagctaagcggaacatgtgcttc

SEQ ID NO: 23900 - DNA, 328 bp, Homo sapiens
gtctttttttctcttatttgtgtctcatttcagatgactgtttaggttgaaacataaaattagacatcggtcatcgcaaatgtacctgatgtttaacatcatgcaccgtcaggacactcattagtgatacctgaactgatcacgtttcatgaaatccaaacctttcacactgtctttcaaaacggtcatctcccaatcctaaggccagggccctgaggcacccccgccccggctggggacactccgtacctggactctctctgttgctgttggccacagctgccggcacaggactttcttgaggacgtcgggaaggaggctgatggtc

SEQ ID NO: 23901 - DNA, 346 bp, Homo sapiens
ggaatgccaagaagaattggcaacgcattcaggagcatttcttttttgcaacatttcacccactcaaggattattgtctagaggcagtgtctggcttgtaaacaatggaagggaatatttaactctaaacagaaatctgttctgacattaaaaggaaatgagtgagaacatttgtgcagaccatattttacatccttccacgcctttcaggccttattgaagatgaatggatcaccattgataaatttaccagattcactgatgttcctttagctgcgggatttcagtggtacctttctcaaactcaacttagtaaactaaaaccaggtgactggtctcagcaaga

SEQ ID NO: 23902 - DNA, 382 bp, Homo sapiens
gcaaattggtccctgtttgagaattggagtaagcactcaccttaaccaccagactccatccccaatgtctgtggctgctttcaaaagagtctgcatcagctctgaagacaatttccaaagaggagcctccgcactgccctggccattgtcagcaggagggaccttagaggcagcattcctgtgcacaaatcccgacaggcttgctaagaacttccagtcctccgtgtgtagacagcagctcccctgtgcctggccacttgctggttaagagctcagttgaatctccagcacggggttacattgcactgagtcatgccctcttcctgcagccctcttagtaaccgacatcaacccgagttgatgggatcaagcctgctcagta

SEQ ID NO: 23903 - DNA, 397 bp, Homo sapiens
gctgaaagcaggttttaacaaaaggatgaggccagaactcttccagaaccatcacctttgggaacctgctgtgagagtgctgaggtaccagaagtgtgagaacgagggggccgtgctgggatctttctctctgactatacttagtttgaaatggtgcaggcttagtcttaagcctccaaaggcctggatttgagcagctttagaaatgcaggttctagggcttctcccagccttcagaagccaactaactctgcagatggggctaggactgtgggcttttagcagcccacaggtgatcctaacatatcaggccatggactcaggacctgcccggtgatgctgttgatttctcaaaggtcttccaaaactcaacagagccagaagtagccgcccgctc

SEQ ID NO: 23904 - DNA, 470 bp, Homo sapiens
  misc_feature (1)...(470): n = a,t,c or g
gggaatctaagtgtcgaggtaatgtttgatgttcatatataacaatttctgtgtgagagtttgaaaacggaaggatttcaagttttgtaatttttttctaccttctttagcatatctaatagttacttactgagtgctcttctaggtgcttgaaagcaaacagaacagtataaaaaattttgaagtttgtacttaccttctaatggccactccttccacatgaccactttgatgccacagtggctaagtgtctgcatgggtcatataccacacattaattaggcagctactatgtacaaagtactgttaggtgtttcttatgtaaattttatcctaatagatttttcatattaaaaatatagcaatctttgctttgcatagtantgccaggaactataaccatgaatngtgcaanctgaaacccatgccaaaccaatctttattaatccagntggggaaaattatgaatg

SEQ ID NO: 23905 - DNA, 386 bp, Homo sapiens
gaactggacaggagaaataagttcaagggacctattgtataatatggcaactgtggttaatacaaatgtattttgtattatgacacaatgacaattgctgagtagatattaagtgttctcatcacaaaaaatggtaaaaatggaggtaatgcatatgctaactagcttgatttagccaattcacaatgtatacatatttcaaaaccataaatatatacaatttttgtcaattaaaaaagtagaaataataaaaggcagagtggaaatatcaatagcataccgacggaaattagagaaaaatttattatataggcaaaacaaattattttaaactgattaaaaagtaaagctccacaatgagggatatgtactttatgaacttttat

SEQ ID NO: 23906 - DNA, 400 bp, Homo sapiens
gctcaaatcctttgcccattttctaattgggttgtttacttattattgagttgtttgagttccttatattaatatattttaggtgttaaccccttatcagatacatagtttgcaaatattttctcccatttcacaggtgttttcttcactttgttgactgtttccttggctgtgcagaagctttttagtttgatgtaaacccatttgtctgttcaatatattttttaatgataaattttaaaagttttcttcatggctgggcttggtggctcatgcctgtaatcccaggactttgggaggccaagaccagtggatcacgaggtcaggagatcgagaccaccctgaccaacatgatgaaaccccatctctactaaaatacaaaaaattagccaagtgtggt

SEQ ID NO: 23907 - DNA, 431 bp, Homo sapiens
ggctatagcacactctccgatttgggccatttatgcaccccgcaacctgggatctcaaggagctttaaagtcttaatgggaacttggcattttcctgatgatctttaaaatgtggtcactaaactcaggattggcgtgtgcttttagaacactggagtagcccttgttttagaggctgtgcattgagtatcgaccgtattttgtaaaaggcaagatatcctcccttccaggctggtaacgggtttcaaggggactcttgaggaagtgccccctaaaatagaacacagcaataactgggcttcctgtccccacccccaccccagcagtgctctctggcactgggaactctgctagggagtggtggaagtaggaaggatttgtgtgcaaaggaaaatcgtggttgagtttcactgcagcaggctgacgttgcc

SEQ ID NO: 23908 - DNA, 570 bp, Homo sapiens
  misc_feature (1)...(570): n = a,t,c or g
ggaaaggtggttaacttaaaaaacaaatagcagatacagacctgctaggtaatagtgtgataccgtctctttcagatgaaggttcccaggagaatataatcctagcagaagctctgatatatgtagcttcagtttctccaagagtttaaaagttcctagagaagtcacctagcatgaatgaatcatgggaaatagaggactcaccacacttggtgtctggctgaggtagtgtgagccagatactggatttccagcaagaatatagtcagaaggagtgagctgttctgtgttttctcctaagaccaccagggtttacctccagccttcaggaatangacnnagccanatacntctaatgtactcatacgaggcangcttgcaggattgaaggggagagaccaggacttcatcnntatagggtcacagatannaatctgggctcatctggatattttgcctttagaannaggagacaccatgntnngncnngcgctgtggttacgcctatannccaacnctttaggagctnagcnagcnantnnnttgnggncagnnntnagacnncctgcc

SEQ ID NO: 23909 - DNA, 766 bp, Homo sapiens
cataaaagaaggcaaaacgatgtataaatgaaagaaattgagatggtgcacgatgcacagttaaagtgaacttgcggggtttttcagtatctacgattcatagatctggaattcgcggccgcgtcgaccgccgcttgtgctgcagccatgtctctagtgatccctgaaaagttccagcatattttgcgagtactcaacaccaacatcgatgggcggcggaaaatagcctttgccatcactgccattaagggtgtgggccgaagatatgctcatgtggtgttgaggaaagcagacattgacctcaccaagagggcgggagaactcactgaggatgaggtggaacgtgtgatcaccattatgcagaatccacgccagtacaagatcccagactggttcttgaacagacagaaggatgtaaaggatggaaaatacagccaggtcctagccaatggtctggacaacaagctccgtgaagacctggagcgactgaagaagattcgggcccatagagggctgcgtcacttctggggccttcgtgtccgaggccagcacaccaagaccactggccgccgtggccgcaccgtgggtgtgtccaagaagaaataagtctgtaggccttgtctggtcgacgcggccgcgaattccagatctatgaatcgtagatactgaaaaaccccgcaagttcacttcaactgtgcatcgtgcaccatctcaatttctttcatttatacatcgttttgccttcttttatgtaactatactcctt

SEQ ID NO: 23910 - DNA, 397 bp, Homo sapiens
gagaaacagagagggagatgaaaacccctcttcagggttttcattaaccccaaattaaaaaactacaaaaaccttgtgaaggaaccatgatctgagcttagagataaagacaagcagagtgccaacttcactgtatgcctcctattagcctgcaatggttctccattgcccatggcatgcagtttgttgctcagatactaaaatgttactctccagtggctttagttctcaactgtgagaattagattaatcttgaaagaaggccagacacatttccctgtggtttatctaagaggcacatcataatccacacaggttgtttgctaggtacacagtgcataccaggaagactgcaagtactgaatttcttcatttcttcattcaggaaatgttaatt

SEQ ID NO: 23911 - DNA, 803 bp, Homo sapiens
ggaaaatcaacaaggctcattctcaagtcagggggggagctctttcagtgtaccaattttttattcctcaaggagaagtgaaaatatcaaccataattctgccttcaaacaagccattcaagcctctcacaaaaaggattctagttttattaggatccataaagtgatgaaagtcttaaacttcacaacgaaagctaaagatctgcacctttctgatgtctttttgaaagcacttaaccatctgcctctagaatacaactctgctttgtacagccgaatatttcgatgagtttgggactcagtacttcacctctggctccctgggaggcgtgtatgaccttctctatcagtttagcagtgaggaactaaagaactcaggtttaaccgaggaagaagccaaacactgtgtcaggattgaaacaaagaaacgcgttttatttgctaagaaaacaaaagtggaacataggtgcaccaccaacaagctgtcagagaaacatgaaggttcatttatacagggagcagagaaatccatatccctgattcgaggtggaaggagtgaatatggagcagctttggcatgggagaaagggagctctggtctggaggagaagacattttctgagtggttagaatcagtgaaggaaaatcctgctgtgattgactttgagcttgcccccatcgtggacttggtaagaaacatcccctgtgcagtgacaaaacggaacaacctcaggaaagctttgcaagagtatgcagccaagttcgatccttgccatgtgctccatgccctaataatggcccga

SEQ ID NO: 23912 - DNA, 374 bp, Homo sapiens
ccacgcctagcccttcttacttttcttaatgagtgatacacgaatttcctatatcacttttaccagttataagaattcaaatttggtcacaatactggtaccaggtaacttagaagattcaattttccaaaattaattatttgatattctaatttttagggatttggtaatagatagtaagtttaatggtataagtttaaaaattttatttttatagcaacaatgtgttatgatagtgttaatttggtatgattgttgtaattaacacctatccgacttcaggtgttaatggctaaaagacttcccttttctcatttgtatattttctagtatttctctgaaatctattaatttactatttgtggactttcttg

SEQ ID NO: 23913 - DNA, 511 bp, Homo sapiens
  misc_feature (1)...(511): n = a,t,c or g
gccttgtctgtaaaaatggtaaagaaggttttgactaagtgatccctgagcctttgtaactgcgaatttgctaagtttagagattattaggacttctaccagagggacagtaacaggggtggggttaagtgaaacatcaatgtgaagtgcctggcgtagaagatcctcagagtcaagtgaagcttggggagcttcatcactggagtgtgggctggacttggtgacttgcattcagagagaaggatgtggaaataggaaaaatagtaacattaccacagagaaacctggcaggacatcaccttcaccagtcaatgaaggtcagcattcccagtgatgagtcgtgtgaataccaggtacccccaagatatgatggggtgagcanggcacctcatctcctgtggtcttcttcccccanacccataactccagtgtaatcatgagaaaacatcaananaaacccanaccgnngacttctaacaaaatacctggcaaatacccctcaaaactacca

SEQ ID NO: 23914 - DNA, 442 bp, Homo sapiens
  misc_feature (1)...(442): n = a,t,c or g
gctcatacttttcccctcaactcctcctgttcatctttcagactatatcttaaagattgttccttcagaaaactactacctaatcaagcttcaagacgcaccttaaataacttctatgatgacttcattgactaaaggccattgttattttacctttaaaaaaaagtgctgggattacaggcatgagccactgcgcccggcccagcttctgtaacttttcttactgagacacatttgtaaatttacattttggtcttgaaagtgtacctaggatagagtaatggaaaatggatacaggattgaagctgtgatctgaagaggttagctagngcttcacaaactttagcgtgtgttaagaatcacctgaattactggctctacctgagaaatctgattnannangngnnnnctggnacctanaanttgnatnnacangcnctga

SEQ ID NO: 23915 - DNA, 634 bp, Homo sapiens
  misc_feature (1)...(634): n = a,t,c or g
acctttatgacatgattacgaatttaatacgactcactatagggaatttggccctcgaggccaagaattcggcacgagacgaagactgagcggttgtggccgcgttgccgacctccagcagcagtcggcttctctacgcagaacccgggagtaggagactcagaatcgaatctcttctccctccccttcttgtgagatttttttgatcttcagctacattttcggctttgtgagaaaccttaccatcaaacacgatggccagcaacgttaccaacaagacagatcctcgctccatgaactcccgtgtattcattgggaatctcaacactcttgtggtcaagaaatctgatgtggaggcaatcttttcgaagtatggcaaaattgtgggctgctctgttcataagggctttgccttcgttcagtatgttaatgagagaaatgcccgggctgctgtagcaggagaggatggcagaatgattgctggccaggttttagatattaacctggctgcagagccaaaagtgaaccgaggaaaagcaggtgtgaaacgatctgcagcggagatgtacggctcctcttttgacttggactatgactttcaacgggactattacgatangangtacagttaccc

SEQ ID NO: 23916 - DNA, 365 bp, Homo sapiens
  misc_feature (1)...(365): n = a,t,c or g
gggacttcataaccggaagacttaaccggtggcctcatcaccagagcatcgccaggatttctaatgcactcagtttccctacatagcagggattcttagctaggtgtccccatgaaccccgtaaagttctacacaaagtcttgcatacaggagcctttacaagatgattatacagggtggcagattgggtgactgaccagacttgttggggtcctgggatgagttgccccgggctgcaaattaagagtacagctaagtgcgggggtggcggtggagggaacgaaaattgaacctgtctggctgtgctgtgtcgtgtggctttatcagcccgaggaagggcaggtgtattctaatttgcncaaggt

SEQ ID NO: 23917 - DNA, 631 bp, Homo sapiens
acctgcaaaccagaatatgcctacggttcagcaggcagtcctccaaagattccccccaatgccacgcttgtatttgaggtggagttgtttgagtttaagggagaagatctgacggaagaggaagatggcggaatcattcgcagaatacagactcgcggtgaaggctatgctaagcccaatgagggtgctatcgtggaggttgcactggaagggtactacaaggacaagctctttgaccagcgggagctccgctttgagattggcgagggggagaacctggatctgccttatggtctggagagggccattcagcgcatggagaaaggagaacattccatcgtgtacctcaagcccagctatgcttttggcagtgttgggaaggaaaagttccaaatcccaccaaatgctgagctgaaatatgaattacacctcaagagttttgaaaaggccaaggagtcttgggagatgaattcagaagagaagctggaacagagcaccatagtgaaagagcggggcactgtgtacttcaaggaaggtaaatacaagcaagctttactacagtataagaagatcgtgtcttggctggaatatgagtctagtttttccaatgaggaagcacagaaagcacagg

SEQ ID NO: 23918 - DNA, 331 bp, Homo sapiens
gggctccgtccccaagatcaaccgctccatgcagaactggcaccagctagaaaacctgtccaacttcatcaaggccatggtcagctacggcatgaaccctgtggacctgttcgaggccaacgacctgtttgagagtgggaacatgacgcaggtgcaggtgtctcttctcgccctggcttggaagggccaagactaaggggttgaaaaacggggtggacattggcgtcaagtactcggagaagcaggagcggaatttcgacgatgccaccatgaaggctggccagtgcgtcatcgggctgcagatgggcaccaacaaatgcgccagccagtc

SEQ ID NO: 23919 - DNA, 347 bp, Homo sapiens
gaaaacctagagcctggttaacgccaacaccatcccggggcctttcggctctctttatttattgctctggaatatccctgtgacctcttccaacagttttcactcttggcagggaaacttccttaaatttactcgcaacacaactaagaggaacttcagatgaccacttgggagagagtacacttttgaacagctttgaatctagaatgcgtttccctgttacacatacacatgtaccagacacctcccacccgctcctaatggcgctcgtgactctcatttgcctacttgctgagccccctataccagccctgtcctccttctctagcctttgattgcccagccct

SEQ ID NO: 23920 - DNA, 498 bp, Homo sapiens
caacttttgagatttcccttgccctgtggacgcccagctcctgtcatccttccttaggtcctgcagtacagtcttcccctgaatgccaccggggacccagggggactccacccccctaagcaagcacacacatactcacagttgatgagttgctggtctttgagtcccagctctcttaccctccctttactccaccagcccgacgacccatgactgaggaggggatttctacagtctcaggatttagaaagtctgtaagccatccatgctccagaaagcaccgatctgttgtagttgcaaaaacaactctgtaatttgttgaggttctcaaactgacagccagcgagactgggtgggaggccctggatctgttctccctgactgcgggaggagcagccactaggactttagcaggaagcccacatggaggctccgccaggctgtggcccagctggtgatggccttttgctcctggcagcctgaggcacaagctgcctg

SEQ ID NO: 23921 - DNA, 358 bp, Homo sapiens
gtcccccaaaagactgaatgggccgggcgcggtggctcacgcctgtaatcccagcactttgggaggccgaggcaggcggatcacgaggtcaggagatcgagaccatcctggccaacacggtgaaaccccgtctctactaaaaatacaaaaaattagccgggcgtggtggtgggcgcctgcaatcccagctatagtcaaagacaaaactgacaaggaaatttgttacctctgtggcacataataatttaacataacagttataattattaccgataatgtacattaagtcatatcagaattataggagtttccagggccagtggcagtggctcgtacctgtaatcccagtaccctgggg

SEQ ID NO: 23922 - DNA, 458 bp, Homo sapiens
  misc_feature (1)...(458): n = a,t,c or g
ntttnannancagttatgacatgattacgaatttaatacgactcactatagggaatttggccctcgaggccaagaattcggcacgagcgattaccacaagcaaccatggcaggccaagatctcagtcattcgcccttcaaagggacacgagagctgtatgggggctgtggtgtctgagtactttgtgctgacagcagcacattgtttcactgtggatgacaaggaacactcaatcaaggtcagcgtaggaggggagaagcgggacctggagatagaagtagtcctatttcaccccaactacaacattaatgggaaaaaagaagcaggaattcctgaattttatgactatgacgttgccctgatcaagctcaagaataagctgaaatatggccagactatcaggcccatttgtctcccctgcaccgagggaacaactcgagctttgaggcttcctccaa

SEQ ID NO: 23923 - DNA, 313 bp, Homo sapiens
ggcaatggcgcggtacgtctgcaggatgatggggccggtgatgtctgtcgcggtactcttgccatctttgggcatcaagtatgtctctggcttttttgtctggttgtccgtggggagcttgaggtcatcagggcgcaccttgaagaagtcaaggaggtggggacagcgggagatcttggtgggcaggctcatgagcgtgccgcagtactcggtaagtgtgccctggtggttctcggcggcccgctggcccgtcaaaccacttgggagctgggaggtgggggatgatcctgttctctggattgatcgcccctgc

SEQ ID NO: 23924 - DNA, 425 bp, Homo sapiens
gagaaatctagatgaaaggagtatgaggatagggaaataaagttagggttgaaagtaaaaacaaggaagttcctgttaagttgccaaaggaagaatgatttgggactctcagtctcccagtgaccaaagcagaaaggagaatataaacagttacaagagccccagtcgcatgaaaaaaaagtccagaatgctctgctcagaggagacccaattttctgaatactgagccctgaggaatttcaccactgggtttcccataaatgagaccccctgtgacctggtgggccccatccctcggaagtgtaccctggcatttccataggactgcttccttctgggcctcttagtgcaagccagcagtgcaatgccacatccaagtttggtaaatcaattctaagtgagataaattaatgccttttttgggg

SEQ ID NO: 23925 - DNA, 346 bp, Homo sapiens
ataggatactatataatacttttggtacagagatagaattaaataacataaaaatcaaaaatttattaggctaaaattttggtcgacgcggccgcgaattccagatctatgaatcgtagatactgaaaaaccccgcaagttcacttcaactgtgcatcgtgcaccatctcaatttctttcatttatacatcgttttgccttcttttatgtaactatactcctctaagtttcaatcttggccatgtaacctctgatctatagaattttttaaatgactagaattaatgcccatcttttttttggacctaaattcttcatgaaaatatattacgagggcttatataaa

SEQ ID NO: 23926 - DNA, 341 bp, Homo sapiens
gtttctttttatataactagtgagactagatttgtcttgggttcatttgaacctttccctgcttcttaaatgggaattttaatttctgtccttattcccgctggcttcttcaactctccccctaaactcctccattgacctcctcctctccctactgctgatggattttctttccttagttcagatctgatcacccctcttccctctttgaaaactccccaggacccccattaatggtcacatgataaagctcactatctgccaactggtatgctaaccctcggccagctgggctcactctgcgctgatgacccctcctcattctccctccaccctcccta

SEQ ID NO: 23927 - DNA, 473 bp, Homo sapiens
cagctcaagcttgaaggacccggggagcaggagaccaagttggacctcattagcaaaggagaggagccaagagcaggcaaagaggaatctggagtttcagtctccaactctcagcccaccaatgaaagccactctatcaaagccatcctgaaaaatatctcagtcctggctttctctgtctgcttcatcttcactatcaccattgggatgtttccagccgtgactgttgaggtcaagtccagcatcgcaggcagcagcacctgggaacgttacttcattcctgtgtcctgtttcttgactttcaatatctttgactggttgggccggagcctcacagctgtattcatgtggcctgggaaggacagccgctggctgccaagcctggtgctggcccggctggtgtttgtgccactgctgctgctgtgcaacattaagccccgccgctacctgactgtggtcttcgagccgatgct

SEQ ID NO: 23928 - DNA, 430 bp, Homo sapiens
gcttcaataccctggttggctggaactaatacagcacagtcttaccataaaaatttactgaagggagatggttaagagacattcttctggtagataaaactcacttacattgtataatacatatatcctatactgaatgttaataaattaatagtaatggctcaaatgaaactccagtgcagtcagaatgctgtaaaacagtgagatctaaaaacactatcttaacttaggtacactactaaggaaataatgaagaaaaaacctaacagattaagaaaataaagttctagctgggcgtgtaagcggacacctgtaatcccagctactggggaggctgaagcaggaaaatcgcttgaacccaggagacggaggtttcagtgagccaagcatgtgccactgcactccagcccgggcaacaagagtgaactcc

SEQ ID NO: 23929 - DNA, 1145 bp, Homo sapiens
ggttgaagtcagggactaacaccaagaaggccctccaggcagtgtacagcatgatgagctggccagatgacgtccctcctgaaggctggaaccgcacccgccatgtcatcatcctcatgactgatggattgcacaacatgggcggggacccaattactgtcattgatgagatccgggacttgctatacattggcaaggatcgcaaaaacccaagggaggattatctggatgtctatgtgtttggggtcgggcctttggtgaaccaagtgaacatcaatgctttggcttccaagaaagacaatgagcaacatgtgttcaaagtcaaggatatggaaaacctggaagatgttttctaccaaatgatcgatgaaagccagtctctgagtctctgtggcatggtttgggaacacaggaagggtaccgattaccacaagcaaccatggcaggccaagatctcagtcattcgcccttcaaagggacacgagagctgtatgggggctgtggtgtctgagtactttgtgctgacagcagcacattgtttcactgtggatgacaaggaacactcaatcaaggtcagcgtaggaggggagaagcgggacctggagatagaagtagtcctatttcaccccaactacaacattaatgggaaaaaagaagcaggaattcctgaattttatgactatgacgttgccctgatcaagctcaagaataagctgaaatatggccagactatcaggcccatttgtctcccctgcaccgagggaacaactcgagctttgaggcttcctccaactaccacttgccagcaacaaaaggaagagctgctccctgcacaggatatcaaagctctgtttgtgtctgaggaggagaaaaagctgactcggaaggaggtctacatcaagaatggggataagaaaggcagctgtgagagagatgctcaatatgccccaggctatgacaaagtcaaggacatctcagaggtggtcacccctcggttcctttgtactggaggagtgagtccctatgctgaccccaatacttgcagagaagttggtgttaatcagctgggggagtaagtggatgtctgccaaaaaccagaaaccggcaaaagccaggttcctgctccacgcccgaagactttcccc

SEQ ID NO: 23930 - DNA, 440 bp, Homo sapiens
gagtaacgccattaccgccggagccgcagagagccttagccgacggaaactggacactggaccggcagcgccatgagactcctcccccgcttgctgctgcttctcttactcgtgttccctgccactgtcttgttccgaggcggccccagaggctcgttagcagtggcacaagatcttacagaggatgaagaaacagtagaagattccataattgaggatgaagatgatgaagccgaggtagaagaagatgaacccacagatttggtagaagataaagaggaagaagatgtgtctggtgaacctgaagcttcaccgagtgcagatacaactatactgtttgtaaaaggagaagattttccagcaaataacattgtgaagttcctggtaggctttaccaacaagggtacagaagattttattgttgaatccttagatgcctc

SEQ ID NO: 23931 - DNA, 336 bp, Homo sapiens
cttccttactggaccactggagaacatagctagtaaatggtagattttgggtttgaatacaggtagtcggattgtaaacctcaccctcagaaattatcctcagtgataagggaggatgaaagattagttagctgtgttctccgtcgacgcggccgcgaattccagatctatgaatcgtagatactgaaaaaccccgcaagttcacttcaactgtgcatcgtgcaccatctcaatttctttcatttatacatcgttttgccttcttttatgtaactatactcctctaagtttcaatcttggccatgtaacctctgatctatagaattttttaaatgg

SEQ ID NO: 23932 - DNA, 498 bp, Homo sapiens
atcagctatgacatgattacgaatttaatacgactcactatagggaatttggccctcgaggccaagaattcggcacgagcggcacgagcagaggtccaatacttgaatataagcagctccaaaaagattgattaggaatgtggaaaggagggaattctcaacaaaataattcgataaaatttcccagaactgaaggacttgaactgcaggattataagggcttaccaagtacccagcatagtgattgagaaatagacccatttaactatgtgtccttatagtgaaatattctggcactgttaaaaatgtaaagatttatgaatggcactaatatgaaattattgtatgtggtttttggcatacatgtatatatctgttagatatgttatctgggagtagaattcctagatcatagagcatgcatacataatgtcatagttttccaaaatggttggtatctggcaaaatacagtgcactggttaccagtctcaagaaag

SEQ ID NO: 23933 - DNA, 370 bp, Homo sapiens
aaattacttctccctcgaactcctgacctcaagtgatccgcctgcctcagcctcccaaagtgctgggattacaggcgtgagccactgcacctggtctgaaatgcataatcttttaaaactgaaagccatttctaatagtgttcttaatttgtcaagaatcgtatgagaagtgccagtgccctttgcctgtctagctataagtggattatcatgcccaccctttggagccagcagttttggttcagtcctttggtctctgactactcacagtctgcaggaaagagcaggttgtgacacttgactagtttatgagagcagaagctgttacgtgacacttagcacatactgctctcagaggccccagatggat

SEQ ID NO: 23934 - DNA, 343 bp, Homo sapiens
gcaagaatgtgaagctcactgtgagcaatgtgctgaaagagataaaaattcttaacatctttggagttattaaaggctttgtagaaccagatcactatgttgtagttggggcccagagagatgcatggggccctggagctgcaaaatccggtgtaggcacagctctcctattgaaacttgcccagatgttctcagatatggtcttaaaagatgggtttcagcccagcagaagcattatctttgccagttggagtgctggagactttggatcggttggtgccactgaatggctagaggtattctttatcatccattcccatattggacacgagcttgtgggctt

SEQ ID NO: 23935 - DNA, 409 bp, Homo sapiens
  misc_feature (1)...(409): n = a,t,c or g
gcttttcttggtatcatagatgatataaaatgtgaaaaagaagttgccggagctccaagatggggaaaaaaatgccagaggaaaatgctctctgcttgagatttatccttgcttttaaccagtttagaatggaatgtccttttcaaattcagagaagctttcccccccgcctcccttggcttgtttgcttaggattccctccaacttattgtttcttaatcagctatgtccacctcagctcctctctcttctcctacttggttgccttttgatccctaaaagtcttattgttttaggacattctaagcccaagtgcggtgaatctgtctcagatgtgagtgttgtacatggaaatcttccaggagggcanttcttttggctcaaaaggcttggcnncttttggggccaa

SEQ ID NO: 23936 - DNA, 519 bp, Homo sapiens
  misc_feature (1)...(519): n = a,t,c or g
tnnnnnnttgncttgatnccanagctatgacatgattacgaatttaatacgactcactatagggaatttggccctcgaggccaagaattcggcacgaggcaaccctgtaaaaccagccttagactatttttcaaacaggctggtgaattaccagatctccgtcaagtgcagtaaccagttcaagttggaagtgtgtcttttgaatgcagaaaacaaagtcgtggacaaccaggctgggacccagggccagctgaaggtgctgggtgccaacctctggtggccgtacctgatgcacgaacaccccgcctacctgtactcgtgggaggatggtgattgctcacaccaaagccttggacccctcccagcctgtgacctttgtgaccaactccacctacgcagcagacaagggggctctgtatgtggatgtgatccgtgtgaacagctactactcttggtatcgcaactacgggcacctggagttgattcagctgcagctgccgccagtttgagaattggtga

SEQ ID NO: 23937 - DNA, 448 bp, Homo sapiens
  misc_feature (1)...(448): n = a,t,c or g
agagtgtgggaccctggccaagtgcaggaatgggccatgccgtctcacccacagtatcacacgtggaaccgcagacagggcccagaagctttagaggtatgaggctgcagaaccggagagattttcctctgtgcagtgctctctggctaaagtcacggtcaaacctaaacaccgagcctcattaacccaagtgaaccaaccaaagtcaccagttcagaagtgctaagctaataggagtctgacccgagggcctgctgcttcctggttaagtatcttttgagattctagaacacatgggagctttttattttcggggaaaaaccgtatttttttcttgtccaattatttctaaagacacactacatagaaagaggccctataaactcaaaaagtcattgggaaacttaaagtctattctactttgcaagaggagaaanggggttttatg

SEQ ID NO: 23938 - DNA, 412 bp, Homo sapiens
gaactggaacctttttaaactaattttattaaaagaaacatatttaaaagtatatttgcttttctattaataaaatatagaagatattttcatataagaaaataaactattaagaaccacaccatcaaataatcagtatcacccaaaacaaaggcctaaacgttgctaatacaaaattaattcagggtaggagacagatttttgctcaattttaaacacttatttcaccacacttttgagaacaggcaagtaagttatactgtttaagtagaagatgatcaatgacttggtagattctttttaatagcctgccttggttccctatagaactagtagatgggctgggtgcagtggctcacacctgtaatcccagcactttagaaggccaaggcaggcagatgacaaggtcagg

SEQ ID NO: 23939 - DNA, 410 bp, Homo sapiens
ctgacagactcagtcactgaagagggaaaaggagtgagaagacaaagccgtcaaagccccaacagctttgtatttctccagcccggcgcagaccccggagctcccgaggcactccctccatctttggaacacgccagtaattgattgataacaggaagctatgagggaccctgtgagtagccagtacagttcctttcttttctggaggatgcccatcccagaactggatctgtcggagctggaaggcctgggtctgtcagatacagccacctacaaggtcaaagacagcagcgttggcaaaatgatcgggcaagcaactgcagcagaccaggagaaaaaccctgaaggtgatggcctccttgagtacagcaccttcaacttctggagagctcccattgccagcatccact

SEQ ID NO: 23940 - DNA, 474 bp, Homo sapiens
ggctagcaccatgagctatcttcagtgacgggtgacggctcagggagatggcaggcagattgggctctaagtcattattctctcagttactccattggtgaaatggccctttccctctttgcagttcagtctaagtctcgtatttgctttgctgtctgtgtgctgaagctcgtcccgtgtgagttgctgtctgccccttgtcaggctgtgaggtgctcgtgtagacctggagcatgcaggctgcctccgtttttgggtactgtgttgtgttttgctctgtctaaaaacatctgcatagttttcaactggaaaaagaaaaaacttaaaaatgggatgtcctaaaatgaaagctgctcaaagtcacagaacaaccgagggacaaaggagattggatgactgggaagcgctggcccggaacagcccctgcaactgtggggcctgcacacagcccttccacagttggcactgcaggtg

SEQ ID NO: 23941 - DNA, 362 bp, Homo sapiens
  misc_feature (1)...(362): n = a,t,c or g
ggagagagctaccatgagcttcaataccctggcaaaacagtgtctgcctgtggcatgttcatgcccacagctcaacaacacactagctgcaaggggccttcagataccagccagccccctttggagtacctctggcctgccccgggctcctgacctgccttctccttgatctcacccatcagcacctatccccacgggctccatactcactcagtctgtaggtttgctattgttgtcctcccaaaactatacgggtctttgtctgcagagaagcacagatacttagttccagggtcatgtggggaagcaggagggggcgtaaccaatcanccttggtttgtggagctctggggaggaggaag

SEQ ID NO: 23942 - DNA, 480 bp, Homo sapiens
cagctatgacatgattacgaatttaatacgactcactatagggaatttggccctcgaggccaagaattcggcacgagggcagttgcacggttgctcagctaattgatggcaatgaggactggaactcaattcttctgatcctgggcccagatttctcattttcctccaccagcaattgaatatgaggggccgtattctacaaaaggggcatcagctactgcaaacaggtgaaagctgggtcctgggctggtggctgatggctgagccatggcttcttgtgtacctggtccttgagcagctgctcagcctccattccccaccccagccccaaacatgacaccccaagaagggtaggggtccagaagcttgtcccatcttttgaaaggctgctgaactgctagctaagcactgttttaaaggccactagtatacctaagacaaggtaaaggtgagaggcatgatggttcatgcctgtaatcc

SEQ ID NO: 23943 - DNA, 678 bp, Homo sapiens
  misc_feature (1)...(678): n = a,t,c or g
atgactgattacgaatttaatacgactcactatagggaatttggccctcgaggccaagaattcggcacgagaaagtgctgggattacagatgcaagccaccatgcctgtccaagagccatatttatttggttacaacttatttagttgcttttgtttctgcatatttttccataccatagagctgaattttcaccaatgcaaaatttagataatttggcgggggggctgttactgtcattaggaagtactcgacatccagtgatgtcgcttgctgctaggtcttgcaccacctagtggcctgatttctaaatggcataaaagccttcggacggtgagtgttgtggtgacctgtctgaggcctttgctaatgcgagtatttcccatttttccttctgaaataaatgttaatagtgaaacgtcgcatatgcaagaattccattaaagcactgccgataatactggaatctgttaaaagcaaaagtgtgaagttaagatgttccanttattcatagagattcccactgagttaaaaaattatagataatgnatgagaataattatactaaagagcctaataagaaaaattaagaaattcactagtgaagccctaatttagagggaganctttngntttctgataaaaaaaaaggngccccntntaaggntttangtataaa

SEQ ID NO: 23944 - DNA, 1023 bp, Homo sapiens
acatctatgacatgattacgaatttaatacgactcactatagggaatttggccctcgaggccaagaattcggcacgagtcagcatgctgtgtctagctcaagattttctccatccccttattttgggccagtggctgtcattacatatgagatgagtctcttgaagactacagatgagagcagtcatgatggcctgcactccacacaatgcaacagagtgaaagagcaggttctgcttctttggtgtagtcctgaagcttcctaagaaacttcacatcaggtgatggataggagcaaccctgtaaaaccagccttagactatttttcaaacaggctggtgaattaccagatctccgtcaagtgcagtaaccagttcaagttggaagtgtgtcttttgaatgcagaaaacaaagtcgtggacaaccaggctgggacccagggccagctgaaggtgctgggtgccaacctctggtggccgtacctgatgcacgaacaccccgcctacctgtactcgtgggaggatggtgattgctcacaccaaagccttggacccctcccagcctgtgacctttgtgaccaactccacctacgcagcagacaagggagatccacctctgatgttcagtgaagactaccagaaaagtctgctagagcagtaccatctgggtctggatcaaaaacgcagaaaatacgtggttggagagctcatttggaattttgccgatttcatgactgaacagtcaccgacgagagtgctggggaataaaaaggggatcttcactcggcagagacaaccaaaaagtgcagcgttccttttgcgagagagatactggaagattgccaatgaaaccaggtatccccactcagtagccaagtcacaatgtttggaaaacagcctgtttacttgagcaagactgataccacctgcgtgtcccttcctccccgagtcagggcgacttccacagcagcagaacaagtgcctcctggactgttcacggcagaccagaacgtttctggcctggg

SEQ ID NO: 23945 - DNA, 345 bp, Homo sapiens
gagacagagacctgccctcaagagcaaagtagatcatgcatagagtgtgatgtatgtgtaataaatatgtttcacacaaacaaggcctgtcagctaaagaagtttgaacatttgggttactatttcttgtggttataacttaatgaaaacaatgcagtacaggacatatattttttaaaataagtctgatttaattgggcactatttatttacaaatgttttgctcaatagattgctcaaatcaggttttcttttaagaatcaatcatgtcagtctgcttagaaataacagaagaaaatagaattgacattgaaatctaggaaaattattctataatttccattt

SEQ ID NO: 23946 - DNA, 500 bp, Homo sapiens
  misc_feature (1)...(500): n = a,t,c or g
gtaacgatcttcgttcagggcatcatctgggacatcaacagctttgaccagtggggagtggagctgggaaagcagctggctaagaaaatagagcctgagcttgatggctgtgctcaagtgacctctcacgacgcttctaccaatgggctcatcaacttcatcaagcagcagcgctnaggccagagtccaataaactcgtgctcatctgcagcctcctctgtgactcccctttctcttctcgtccctcctccccggagccggcactgcatgttcctggacaccacccagagcaccctctggttgtgggcttggaccacgagcccttagcagggaaggctggtctcccccagcctaacccccagcccctccatgtctatgctccctctgtgttagaattggctgaagtgtttttgtgcagctgacttttctgacccatgttcacgttgttcacatcccatgtagaaaaataaagatgccacggaggagaaaaaaaaaaaaaa

SEQ ID NO: 23947 - DNA, 358 bp, Homo sapiens
gaactaaacccactaaatcaacttcctctctcccttctcaaacatttataaagcgccaccacgcggcaggcacagtgctgggtgctgccattcacaccccacatggtcttttcccacagctggtggaggttgtggcgtagcctgtgctcagtcttggatctgtctcttgaggaccagtttctctttgggctcttgtttccaagagccatggagaatgagcagagcagcatctaacaaaggacggggtcccctctcagcttctctgtcttcacaagtgaatgtcacacattttaaactagaactctttctacttatttagcacctaacagatgctacgagaattctggttactttttct

SEQ ID NO: 23948 - DNA, 369 bp, Homo sapiens
  misc_feature (1)...(369): n = a,t,c or g
ggctgattgccgctcggaaacacatggacaaggtggtgcagatcgtggagatcatgcagcaaggttctcagcttccttgcttccatggctccagcaccattcgaaacctcaaagagaggttccacatgagcatgactgaggagcagctgcagctgctggtggagcagatggtggatggcagtatgcggtctatcaccaccaaactctatgacggcttccagtacctcaccaacggcatcatgtgacacgctcctcagcccaggagtggtggggggtccagggcaccctccctanaagggcccttgtctgagaaaccccaaaccaggaaaccccacctacccaaccatccacccaagggaaatggaaggg

SEQ ID NO: 23949 - DNA, 414 bp, Homo sapiens
  misc_feature (1)...(414): n = a,t,c or g
gtttttgcttcccatgtaacttctccagtgttctggcatgaattagattttactgcttgtcattttgttattttcttaccaagtgcattgatatgtgaagtagaatgaattgcagaggaaagttttatgaatatggtgatgagttagtaaaagtggccactattgggcttattctctgctctatagttgtgaaatgaagagtgaaaacaaatttgtttgactattttaaaattatattagaccttaagctgttttagcaagcattaaagcaaatgtatggctgccttttgaaatatttgatgtgttgcctggcaggatactgcaaagaacatggnttattttaaaatttataaacaagtcacttaaatgccagttgtctgaaaaatcttataaggttttacccttgatacggaa

SEQ ID NO: 23950 - DNA, 519 bp, Homo sapiens
  misc_feature (1)...(519): n = a,t,c or g
ggctaccatgagttcaatacctgatcctaccagctccaaactgcagattaggtcatatttgccatgctcagctcctggacctgggctctgaatgctgctggaaaggacaatgaaactaaggggcctggtgccctacagacatgtggttctcaatattatctattaacaactctgctcagtaacctgagaaacccattcttcataaacccccttactttttcttcctagttgtttttgcaaattttcacagctttccaaacaccgtataacaacctaccctttcactctcatcaaaatgctttctttccacattaagagagattatcatatggttactccctcaaggcattccctttattctgtctcccaccaaccacctacaagctcatactcctctccttgtaccaaggnngaaggattatctgtccttgtaatcaaagattatccatctacttgctgcacagnactcataaaccanactcaatttgggcttggttcaataattaatctaacaattca

SEQ ID NO: 23951 - DNA, 795 bp, Homo sapiens
gctatgacatgattacgaatttaatacgactcactatagggaatttggccctcgaggccaagaattcggcacgagctttcctgcagaataccatttgatcctattaagaattgtccaaatgttggagcatttgattgaaaaatccttcttagccattttaaagatagctttccaatgattagacgaattgattctttctgtgactcatcagttcatttcctgtaaaattcatgtcttgctgttgatttgtgaataagaaccagagcttgtagaaaccactttaatcatatccaggagtttgcaagaaacaggtgcttaacactaattcacctcctgaacaagaaaaatgggctgtgaccggaactgtgggctcatcgctggggctgtcattggtgctgtcctggctgtgtttggaggtattctaatgccagttggagacctgcttatccttttaaaaattgggttaaaacaggcacagaagtttacagacagttttggatctttgatgtgcaaaatccacaggaagtgatgatgaacagcagcaacattcaagttaagcaaagaggtccttatacgtacagagttcgttttctagccaaggaaaatgtaacccaggacgctgaggacaacacagtctctttcctgcagcccaatggtgccatcttcgaaccttcactatcagttggaacagaggctgacaacttcacagttctcaatctggctgtggcagtgagtagacaaacaacaaagttatctattttaaaatactctagaactcatgtaattaatcctatc

SEQ ID NO: 23952 - DNA, 347 bp, Homo sapiens
gagctcttccaccacttaatcaatcaagggctaatcccatgtgcctgccatccccgttcctggggcttcttgtggtctgtcaatattgtcacaaacctactatgatggctgcctgctgccatccagactggggggtcttaaagtacataacagtgcaggagaagaggtggtccctttggtgaagaagggtggattgcctctgtacattcagatggacgtgacaggcattctaacccaggagttagcagtagggtcccgcaaggggacacaaactcatccacatgtgctgaaaagtggtgcatctgggaaagccacaggaaaatgagttttgaacacaggccctttca

SEQ ID NO: 23953 - DNA, 386 bp, Homo sapiens
gcctgaattttcaaaaatgaaaatgctactgtgagttactgatgtccttcacataaacttttttatgttccatttttcttctttaaaactcactctttacttaaagggtctccaattttatgtttcgtgctattcccagcactttgttaaaaataaaaaaggatttgttacaggctcactcctgtaattctggcactttgggaagctgaggcgggtggatcacttgaggtcaggagttcaagaccagcctggccaacatgctgaaaccccgtctctactaaaaatacaaaaaattagctgagcatggtgctgcgcacctgtaatcccagctactctggaggctgagtcaggagaatcgcttgaacctgagaggcagaggttgcagt

SEQ ID NO: 23954 - DNA, 401 bp, Homo sapiens
gttggaatgactgaaagaagaacagctgttcctgtgttcttcgtatatacacacaaaaaggagcgggcagggccgctcgatgcctttgctgtttagcttcctccagaggaggggacttgtaggaatctgccttccagcccagacccccagtgtattttgtccaagttcacagtagagtagggtagaaggaaagcatgtctctgcttccatggcttcctgagaaagcccacctgggctgggcgcggtggctcacgcctgtaatcccagcactttgggaggccaaggtgggcggatcacaaggtcaggagttcgagaccaacctagccaacatggtgaaaccccgtctctactaaaaataagaaattagccgggtgtggtggcacgcacctgtagtcccagct

SEQ ID NO: 23955 - DNA, 339 bp, Homo sapiens
gcacttaagactgtgtattctagttttgtcaaactgtagaaatgatgatgtggaagaacttaggcatctgtgggcatggtcaaaggctcaaacctttattttagaattgatatacacggatgacttaactgcatttttagaccatttatctgggattatggttttgtgatgtttgtcctgaacacttttgttgtaaaaaaataataataatgtttaatattgagaaagaaactaatattttatgtgagagaaagtgtgagcaaactaacttgacttttaaggctaaaacttaacattcatagaggggtggagttttaactgtaaggtgctacaatgccc

SEQ ID NO: 23956 - DNA, 446 bp, Homo sapiens
  misc_feature (1)...(446): n = a,t,c or g
gtcctgcctcagcctcctgagtagctgagattacaggcacctgccaccacacccggctaatttttgtatttttggtagagatggggtttcaccatgttggccaggctggtcttgaactcctgacctcaagttatgcacccgccttggcctcccaaagtgctgggattacaggcatgagccactgcgcccagccaggaggcagttttgagagagatactgttgatttaaactaaacagtggtcatgtatttctatcattgaaatatatttgggatggttacatttttatcgtggatatttaaaaagacatacctcaaaacaaaacaaaacagaaactgggaatggcatagaagcanaacctttgctgcttgaaatagctccttcancataaaacacatgtaggagcctgaggtttgcatttctctctgccgctgggatgctgaatgg

SEQ ID NO: 23957 - DNA, 531 bp, Homo sapiens
  misc_feature (1)...(531): n = a,t,c or g
tttgnanaccctttatgacctgattacgaatttaatacgactcactatagggaatttggccctcgaggccaagaattcggcacgagcaaactcctgacctcaggtgatctgcccgccttggcctccaaggtgctgggattacaggctgagacacctcacccagcccagaatacttactaactttttaacgtatcaatatttaaggactttgacataactccttttgcaaattttagaattattttttcccacctaaaccaatatacatttacatttgggttgtacatgcatataaaaacatgcacattttactgggctttataccactgtttgagatggcaggtagtgagtgacacggaggggctgggggctgggggacctcttgccagcaccttgaacccacagttgcacctcaactctctccagctctgccaccttgagccagtcactggacctcaatttcctcctctataaaaggaggtattagtgctctccctcacagtgtaacgttgaatcaaagatgttaagaag

SEQ ID NO: 23958 - DNA, 217 bp, Homo sapiens
gcaaggctatcttagcagctcgttctccggtttttagtgccatgtttgaacatgaaatggaggagagcaaaaagaatcgagttgaaatcaatgatgtggagcctgaagtttttaaggaaatgatgtgcttcatttacacggggaaggctccaaacctcgacaaaatggctgatgatttgctggcagctgctgacaagtatgccctggagcgcttaag

SEQ ID NO: 23959 - DNA, 426 bp, Homo sapiens
gtgttaaaatcaaagttcttggcgagaaaggaaagccaatctagagtaaaaacttaggccgggcgcagtggctcacacctgtaatcccaacactgggaggccgaggcaggtggatcatctaaggtcaggagttcaagaccagcttaaccaacatggtgaaaccccatctctacaaaaatacaaaaattagccgggcatgatgatgtgcgcacctgtaatgccagccactcaggaaggtgaggcaggagaatcgcttgaacctgggaggtggaggttgcagtgagccaagatcgtgccattccactccagcctaggcgacagagcgagactccatctcaaaataataataaacagttagttaccagccataaaaataatctggtttctgctatgttgaatattgctctttttcaagagcttaagggg

SEQ ID NO: 23960 - DNA, 460 bp, Homo sapiens
  misc_feature (1)...(460): n = a,t,c or g
tttgccccctttgaacncctatgacatgattacgaatttaatacgactcactatagggaatttggccctcgaggccaagaattcggcacgagagacaatgaggccatctatgacatctgtcgtagaaacctcgatatcgagcgcccaacctacactaaccttaaccgccttattagccagattgtgtcctccatcactgcttccctgagatttgatggagccctgaatgttgacctgacagaattccagaccaacctggtgccctacccccgcatccacttccctctggccacatatgcccctgtcatctctgctgagaaagcctaccatgaacagctttctgtagcagagatcaccaatgcttgctttgagccagccaaccagatggtgaaatgtgaccctcgccatggtaaatacatggcttgctgcctgatgtacccgtggtgacgagatcccaaag

SEQ ID NO: 23961 - DNA, 551 bp, Homo sapiens
  misc_feature (1)...(551): n = a,t,c or g
gagnnattgaatcctttgactgattacgaatttaatacgactcactatagggaatttggccctcgaggccaagaattcggcacgagggtttactgtggagtttgggctctgcaaacaaggagactccataaaggcatatggtgctgggctcctgtcatcctttggtgaattacagtactgcttatcagagaagccaaagcttctccccctggagctggagaagacagccatccaaaattacactgtcacggagttccagcccctgtattacgtggcagagagttttaatgatgccaaggagaaagtaaggaactttgctgccacaatacctcggcccttctcagttcgctacgacccatacacccaaaggattgaggtcttggacaatacccagcagcttaagattttggctgattccattaacagtgaaattggaatcctttgcagtgccctccagaaaataaagtaaagccatggacagaatgtggctgcagctgngaatctgtgatggagatccactatttctttcatcagaaaaaagnccaaaagca

SEQ ID NO: 23962 - DNA, 347 bp, Homo sapiens
  misc_feature (1)...(347): n = a,t,c or g
gagctctggctgccagtggagaatggtttagagggacatgtgcagaatgcaagcagagagagcagtcagaggccctagacattgtccaggtgagagataaggtgctgagacccaggtgagtcagcgaggatgagagagaatgtatttgcagtctattctggggcagtgctgacaggtcgtgctaatggtttggaaatgaaagataagggaaaaccagggatgcctgagatttctggtctacagttgggcgggtggtgaggctgttaggtgttggggcccactggtgggggagcagtttgagagcatagtgttgttgccaaatntggatgatctgtgtggggccccgg

SEQ ID NO: 23963 - DNA, 361 bp, Homo sapiens
ggctgtataacaaaaatgtaagaggtaaaatatagacctttggttaaagatggcagatcgaacactactacctttcagtgtgcaactaaattgacgataaaagaattgggcatgaactcataaggacaaacgtacagctctgtattacaaagaataaaacttcaatgagaaatgaaaaatttcagtcgaggggatgttgcctacatttgacacacctctcctgtgtgctcaaagcttctagtcctcttttcggttgtttccctcttcaatataaacaggcaaccaaggctccccagatatttaggaaaaacttataacatgagagaaagagaaacccccaaattgggagaggacagccctt

SEQ ID NO: 23964 - DNA, 377 bp, Homo sapiens
  misc_feature (1)...(377): n = a,t,c or g
gcagacgttcaacctggagggatcccagatctatgaagactccatcgtcttacagtcagtgtttaagagtgcccggcagaaaattgccaaagaggaagagagtgaggatgaaagcaatgaagaggaggaagaggaagatgaagaagagtcagagtccgaggcaaaatcagtcaaggtgaaaattaagctcattaaaaaagaggaaaagccaaacctgtagtgagcgattttgacagcgatgaggagcaggatgaacgtgaacagtcagaaggaagtgggacggatgatgagtgatcagtatggacctttttccttggtagaactgaattccttcctnccctgtctcatttctacccagtgagttcatttgcatataa

SEQ ID NO: 23965 - DNA, 421 bp, Homo sapiens
cccacgcgtccgcacggcccggaaaggtccagaataactgtgcttgaagaagaaaattcccaacatggacaaaccacgcaaagaaaatgaagaagagccgcagagcgcgcccaagaccgatgaggagaggcctccggtggagcactctcccgaaaagcagtcccccgaggagcagtcttcggaggagcagtcctcggaggaggagttctttcctgaggagctcttgcctgagctcctgcctgagatgctcctctcggaggagcgccctccgcaggagggtctttccaggaaggacctgtttgaggggcgccctcccatggagcagcctccttgtggagtaggaaaacataagcttgaagaaggaagctttaaagaaaggttggctcgttctcgcccgcaatttagaggggacatacatggc

SEQ ID NO: 23966 - DNA, 359 bp, Homo sapiens
gattgatctgttttaagtatgagaggcttatagtgccctccattgtaaatccatagtcatctttttaagcttattgtgtttaagaaagtagctatgtgttaaacagaggtgatggcagcccttccctagcacactggtggaagagaccccttaagaacctgaccccagtgaatgaagctgatgcacagggagcaccaaaggaccttcgttaagtgataattgtcctggcctctcagccatgaccgttatgaggaaatatcccccattcgaacttaacagatgcctcctctccaaagagaattaaaatcgtagcttgtacagatcaagagaatatactgggcagaatgaagtatgtttgt

SEQ ID NO: 23967 - DNA, 343 bp, Homo sapiens
cgcggccgcgtcgacgttcacagtcagcctggcttcctgccaggagagggtgaagtgaggggagcgcagggcggcaggtgagcatctccaggccacctgcccatcctgggagctgaaggttgctcctggcagcagcatttcccaaacacccaccaggcatctcagagctttcaggatgggcaggtggcctggtcgacgcggccgcgaattccagatctatgaatcgtagatactgaaaaaccccgcaagttcacttcaactgtgcatcgtgcaccatctcaatttctttcatttatacatcgttttgccttcttttatgtaactatactcctctaagtttcaa

SEQ ID NO: 23968 - DNA, 845 bp, Homo sapiens
  misc_feature (1)...(845): n = a,t,c or g
gatgcttgctatgagtacaatcacatttttccacttcttgaaaagtactgtggcttccatgaagataacattccccagctggaagacgtttctcagttcctgcagacttgcactggtttccgcctccgacctgtggctggcctgctttcctctcgggatttcttgggtggcctggccttccgagtcttccactgcacacagtacatcagacatggatccaagcccatgtatacccccgaacctgacatctgccatgagctgttgggacatgtgcccttgttttcagatcgcagctttgcccagttttcccaggaaattggccttgcctctctgggtgcacctgatgaatacattgaaaagctcgccacaatttactggtttactgtggagtttgggctctgcaaacaaggagactccataaaggcatatggtgctgggctcctgtcatcctttggtgaattacagtactgcttatcagagaagccaaagcttctccccctggagctggagaagacagccatccaaaattacactgtcacggagttccagcccctgtattacgtggcagagagttttaatgatgccaaggagaaagtaaggaactttgctgccacaatacctcggcccttctcagttcgctacgacccatacacccaaaggattgaggtcttggacaatacccagcagcttaagattttggctgattccattaacagtgaaattggaatcctttgcagtgccctccagaaaataaagtaaagccatggacagaatgtggtctgtcagctgtgaatctgttgatggagatccnactatttctttcatcagaaaaagtccgaaaagca

SEQ ID NO: 23969 - DNA, 445 bp, Homo sapiens
gatttaatcaatgaagagtacacagtatacacatatggctttattacttttgggaaatgctagtccttattccttgaatttatttttgtagtgtttcaactttggtaaaatgctgttaagtctcatttgctattcatagcaacagtgtgttaggcaggtagtagttatccccaattttgcaagtaaagaaacttaagctcataaaggaaaagtgacttgctaaaggagatacggcttttaagtggtaaaattgggactcaaacctaggtcatctgacttttactgtattcttatcactagggtagactccataaaccaaatgtttaataaatgttagtgacaacataaactaagtttcaaggccctcattaaaactgttttattggctggccgggcgcaatggctcggctcacaaagtgctgggattacaggcgggcagatcaca

SEQ ID NO: 23970 - DNA, 490 bp, Homo sapiens
  misc_feature (1)...(490): n = a,t,c or g
gccgtcgcattgttgtcctggctgccatgaacgatcaccaccactggcagggacagggtcttgacttgaaaaaccagctcatttccaccaacactgaattgggattcaaacaggattgtaaatttttcttctgtcaccgactctgccccacgacggtctgacctcttaattcgtttcagggacatattcctgaagtgggcactaagggtgcctgtggcttggtggtactccatgacgcagcagttgttcaagatctcgccactgtaatcactgcgggtgttctcgttcttgagcagagacttggcctgctgctcactgatgatggtggccttcacctggggggggttcatgtgcacgttcagcttcccgcccaccagcaggcgcacagtggcctcgtgccgaattcttggcctcgagggccaaattccctatagtgagtcgtattaaattcgtaatcatgtcatagctgttaagggnttcaannttcaaa

SEQ ID NO: 23971 - DNA, 460 bp, Homo sapiens
  misc_feature (1)...(460): n = a,t,c or g
gtgcaatatcaaaaccaggagattgacactagtacaatgtgtgtgtgtagttctttgtcattttactacatgtgcagatgtgtgtaactaccactacatccacaatacagtgctgggctggtctcacgcctgtaatcccagcactttgggaggccgaggcaggaggatcacttgagcctggaagttcaagaccggcctgggcaacataccaagaccttatttctaaaaaaataaaaataaataaataaaaattagccaggcatggtggcacgcacctgtagtcccagctactcagcaggctgaggtgggaggatcacttgaaccagggaggtcaaggctccagtgagccatgatcatgccgttgcactccaacctggggagcagaatgagaccctatatcaaaaaaaaaaaaggggctacanaantgttttgnncccananatcatccctttggggtgcc

SEQ ID NO: 23972 - DNA, 324 bp, Homo sapiens
caacgatgcttgggtttgcaccaatgacatgttcaggctcgccctgcacaactttggctgacctcctctcagctaggcactcacgctgtttcctcctccctcctcttcccaatactattcccactcctccagatgctccaaatatcatgcacaaatgagcagggccgcggtgggagtgggcgcagtgcgctgctgccactgaggtgttgtgcatgatgtttggatgctagactagttgcatctgacgggagaagtttgtgttgtaccagcgcatgccttggaaagacttaagtaatgcaaaaggttgtcctttttttttttttt

SEQ ID NO: 23973 - DNA, 460 bp, Homo sapiens
tatgacatgattacgaatttaatacgactcactatagggaatttggccctcgaggccaagaattcggcacgaggtttcagaacctattgatggattaaacccaaatgaagaagaacataggacatacttggatattgaacctataactggattcactttacaatttgcaaaacggctgcaggtcaacctattggtcaagccatcagaaaaaattcaagtattaaagaatctgaagaggaactatattgtgcctattctttggcttaatgagactgggaccattggtgatgagaaggcaaacatgttcagaagtcaagtaactggaaaaataaacctccttggcctgatagaaatgatcttactcagtgttggtgtggtgatgtttgttgcttttatgatttcatattgtgcatgcagatcgaaaacaataaaataaacctggctcaagcacaaaccaatt

SEQ ID NO: 23974 - DNA, 99 bp, Homo sapiens
cagcgcgcatcccctgcttcctggcaggggacacccgttccagtgagatgcccgagctcacctccatgcacaccctcttacttcgggagcacaaccggc

SEQ ID NO: 23975 - DNA, 377 bp, Homo sapiens
  misc_feature (1)...(377): n = a,t,c or g
gggtcatcctgctgcgggcaggctggaatgagctgctcatcgcctccttctcccaccgctccatcgccgtgaaggacgggatcctcctggccaccgggctgcacgtccaccggaacagcgcccacagcgcaggggtgggcgccatctttgacagggtgctgacggagcttgtgtccaagatgcgggacatgcagatggacaagacggagctgggctgcctgcgcgccatcgtcctctttaatcctgactccaaggggctctcgaacccggccgatgtggaggcgctgagggagaaggtctatgcgtccttggaggcctactgtaagcacangnacccatagcanncgggaangttanctaagctcttgctccgcctg

SEQ ID NO: 23976 - DNA, 1235 bp, Homo sapiens
gcctgcagcccaatggtgccatccttcgaaccttcactatcagttggaacagaggctgacaacttcacagttctcagcggtggctgtggcagctgcatcccatatctatcaaaatcatttgttcaaatgatcctcaattcacttattaacaagtcaaaatcttctatgttccaagtcagaactttgagagaactgttatggggctatagggatccatttttgagtttggttccgtaccctgttactaccacagttggtctgttttatccttacaacaatactgcagatggagtttataaagttttcaatggaaaagataacataagtaaagttgccataatcgacacatataaaggtaaaaggaatctgtcctattgggaaagtcactgcgacatgattaatggtacagatgcagcctcatttccaccttttgttgagaaaagccaggtattgcagttcttttcttctgatatttgcaggtcaatctatgctgtatttgaatccgacgttaatctgaaaggaatccctgtgtatagatttgttcttccatccaaggcctttgcctctccagttgaaaacccagacaactattgtttctgcacagaaaaaattatctcaaaaaattgtacatcatatggtgtgctagacatcagcaaatgcaaagaagggagacctgtgtacatttcacttcctcattttctgtatgcaagtcctgatgtttcagaacctattgatggattaaacccaaatgaagaagaacataggacatacttggatattgaacctataactggattcactttacaatttgcaaaacggctgcaggtcaacctattggtcaagccatcagaaaaaattcaagtattaaagaatctgaagaggaactatattgtgcctattctttggcttaatgagactgggaccattggtgatgagaaggcaaacatgttcagaagtcaagtaactggaaaaataaacctccttggcctgatagaaatgatcttactcagtgttggtgtggtgatgtttgttgcttttatgatttcatattgtgcatgcagatcgaaaacaataaaataaacctggctcaagcacaaaccaatttgtgttgttctgattcaataattggtttctgggtggccaattcagaagaagagtgtacatgctcaacaaatcctaggccctgcattcctgtcatcctcatccgggggaaacaccatcatccagtactgccc

SEQ ID NO: 23977 - DNA, 655 bp, Homo sapiens
gaaatatctacctccctggaggtgtgaagactaggtttttcttcttccttccaattagattttccttaattatagtgatgtcttccttattcatttttctctccctgcctctcactgccataagaatatcagcctgggggcagtccagacgcagccctttgtcatcctttctgtttgcctagtctcagcagactgtgatcacaaggcattgtctgtgggatttttcctttccctttcttgatctctcttgtggttctaggttgtttggttgttcattgttatggtggctttttattttaacgccccttgagccccatgatggctggtgtcaccctgttcttttacactgttgggccaggtgctgcttgtccttcttagggcatcatcaattgcaaatatttccttttgctccctttatgaagatgttcttatacccttgctttcccatatttttctggccaagcatgccatctcctttactctgggaacttacatcctgaatcccaagagggggtcacagtttggaaaaagtcatcagggattctggaactaagtctgataaaagattccagtgaagccctgtctgagaacgagcagactgcaggggaggccatgggattccccaggccagtgtctgtgctgatccttcaagggt

SEQ ID NO: 23978 - DNA, 346 bp, Homo sapiens
ggattacatgtgtgaaccaccacacctggccaagtggcttgttcttgatgggatttccaactcatccaaaaaagaaaaaaacggcagcagctgttcaagcgccacttcttcccggccccactgttcagacattgattggaggaggggctctgccagtaggcactgggctctgtggcatgcccagtttccctgtggtgttggtcccttctgccatccatcctcttgctctcatgtcagggtgctctggctttaacaaaatgttcactcaaaatctaaacgaaggcacgatgagatgttttgcctcaagcaaggactttctacccagagaactccccgcgttcctaaa

SEQ ID NO: 23979 - DNA, 358 bp, Homo sapiens
gagatgttggtgtggttgtggagaaaaggcagtgcttacgcactgctgacgggaatgttcaacctctgtggaaaactatggagatttctcaaagaactaaaaatagaactaccttttgatccagtaaacacactactgggggtatctgcccaaaataaaatgaatcactatatacaaaagacacctggacaggtgcggtgggtcatgcctgtaattccagcagtttgggaggccaaggcagcggatcacctgaggtcaggagtcaagaccagcctggccaacatcgtgaaaccttgtctctactaaaaatagaaaaatcactcagacaaggtggtgcacacctgtaatcccagctaat

SEQ ID NO: 23980 - DNA, 522 bp, Homo sapiens
gtttgttttttgagatggagtctcactcttgttgcccaggctggagtgcaatggcatgatctgggctcactgcgacctccgcctcccgggttcaagcgattctcctgcctcagcctcctgagtagctgggatgcatgtgccaccgcgcccagccctgttactcttgagtttttatctccacatacttgaattaaactgtgtagttctttttcccatctgatatttacaatctcttcactgggtctgtactccatagctattttaccactttctgaaataaagttagcaaggatgaattcagaatctttttcattccaaaacttcctgcatataatggtagcaacccacaatgagacattcttttagtttctaaaagcaggaaataagcattttcctgaaagtttcctcatctcttcatcatacacttcgatttttgtttttcttttttcttttagacagggtctcactctgtcacccaggctggagtacagtggcactatcatagctcactgtagcctggaa

SEQ ID NO: 23981 - DNA, 339 bp, Homo sapiens
gattctggggaaactataacttgtggagataaactaccttttgtgttttgggcctgatacttggatttggacctttctatggagcaattctgtgaaaatgcaggtctcaaagtcccaggctgtgggagtttggggagacaaggagtgtaactgctgtcaatgaaacagcaaggtcagtgctggcaaataggatatgtcaaaaaaaaaatgcctttaagttattggactttatgtgttccaacatatttcctagtggcatgtgccagtgaattttcagttgggaggattctatatgtgccactttgagcttgtgacttcctgtttttcctcacgtatccc

SEQ ID NO: 23982 - DNA, 375 bp, Homo sapiens
gagcagaaaacaaccatggtcatagagtaggtgtctgaatttacagtttctaagctgaagcacttgcaggtgatttcagggttcagggagtgaccgtagaaatagacagctaaaatagaagttggcatagttaatttagtgaaccttatcaaggatctgagagatggaccactcttattttataagtgtagaaaaagtgttcacctgagattggtgataaattaattattgtttcctgttgtctaaagaaggaattggagaattaagaaacaaatgtaatttctaaatcagtggtttataacctttcattgaatgcagcagagcttttacagttatctcaagagatttacaacattctcaaatcaacattaattt

SEQ ID NO: 23983 - DNA, 357 bp, Homo sapiens
cgagcatagtgcgtaatccacatagggtaatgtctgcagatttgagtatgtgttccctaattctttatctagcatgtagagtataaataacacaatactggatgcttttatggatgaacaaggaataatacctagcacctttcttctagaagtttatagtatgaagagagaagataagatgcatctgagaaactagattaaacttgacattgtttgatcaagagccacgtgagcaataccaacatggttggagacagaggagaaatccatcgtggtgaatctagagcagggtttctcaactttggcactaacattttgggccaaacaattctttgttttggggggctgtgtgttgta

SEQ ID NO: 23984 - DNA, 395 bp, Homo sapiens
gattacgaatttaatacgactcactatagggaatttggccctcgaggccaagaattcggcacgagctttcttccatgtaatgctttataatgtcgttttctgcttttggtaacatgttaatgctgacctcacaatgaattgagaagtatttcttcctcttctgttttctgcagtagtgtctgtagaattgttgttatttcttccttaatgtttgatgacatttaccagtgaagctacatgggcctagagtttttttttggtggaaaattttaaactacaaattcaatcttatcggtagatacgtgactacttggtatctgtttcttcttggataagctttagcaagttgtatctttctagggatttgttcattttactatattgtcagagttcat

SEQ ID NO: 23985 - DNA, 337 bp, Homo sapiens
ttgaaaaattctaggtgcttcataattgaccttttgatacaaaatgacctattaaatttgcaatttgtaatccttggtgttgaggtccataggacaagctaggaagtcttcaaaccttgagttgaattccataaggggttatttggcttttgaatcggtttttccttgtctaagaggtagcagcagcaacagcgcccaccttctgggcagcttctttcttggcatgatgagcctgtagaactgctacagcttcatccaccttggagcggagagactcgggggactctaacatgtgcagcagctcagagttgtctatctccagcagcattcccgtgat

SEQ ID NO: 23986 - DNA, 433 bp, Homo sapiens
gatcacctttgtatagagctgaagaataagactgctctcgaagtttatcaggatgttcacatgacaaaactggacccaggctactttagttttgttgggatattgtaagctaaatttttctgtaaccttagaaggccaagagactgaagccctccattttttcacagaacaggtagaacatggacagcagcaattcaacttttccccacactgccctgccaatgtgcctcgaccttgacctggggggcccacctctggggtgagagggtggctcattcattcagtccttggccattcttctgaaactgccaacaagggtggaagtttggggaagtggactccagttcactaagaatggaactgagcatacttaatgaaatctcaaacagaaatgttcatactgaaagagtaaatcatagtgagtatttgaaaa

SEQ ID NO: 23987 - DNA, 528 bp, Homo sapiens
ggattgaataggctcaaaggagagttcagaattcccatttacatattactagtttggtttgtaagttttagttccttgtattattgagattcagagcttcattttatgttggtcattaggtgaatattactcattttccctcaagagaagctcataagtgtgtgtgggtgtgagagcacgatggtgcctgtgttctgtgaatgtgtccatatgtgtctgtaagagagacagagaccaagaacttgcccaattttagaaatacactaatgtgcagttgttgccttttgtctgtattgaaggcccattgaatgactaatccaggctggaagcattcccatgtgggtgtctgagtccatgagccaagcctgaggggacagtgagtctccaggtctgccacactggtgcaccttgctggcacggtgcctcaggaaggtggcgactcaggtgggccttgagttatattttaactcagctgctcagttcccagggcacatttctggatcagaacccatgggaaacaggaggtac

SEQ ID NO: 23988 - DNA, 562 bp, Homo sapiens
  misc_feature (1)...(562): n = a,t,c or g
gaccttgggtggagatcacacaatcacatatcccatattgcaagcgatggcaaaaaagcatggcccagtggggctgctgcacgtggatgcgcacacggacacgactgacaaggccctaggagagaagctctaccacggggcgcccttccgccggtgtgtggatgagggtctcctggactgtaagcgtgtggtgcagattggcatccggggctcttccacgaccttggatccctacagatacaaccggagccagggcttccgggtagtcctggctgaagactgctggatgaagtcactggttcctctgatgggggaagtcaggcagcagatgggaggcaaacccatttatatcagctttgatattgacgctctggatcctgcctatgcgccagggacagggacaccctgaaattgctggtctcaattcctagtcangcntntggaaaaannttncnggggttgtaaagggccctgaaccnnaanngggctgggaaaannnttttncnaatttnnccacccggnntnaaacttttctngggaacacaagncctttnttgggggg

SEQ ID NO: 23989 - DNA, 1254 bp, Homo sapiens
  misc_feature (1)...(1254): n = a,t,c or g
gaactttttgactgacacgaatttaatacgactcactatagggaatttggccctcgaggccaagaattcggcacgagcggcacgaggatacaattcctacagcgtctccaatagcgagaaggacatcatggccgagatctacaaaaacggccccgtggagggagctttctctgtgtattcggacttcctgctctacaagtcaggagtgtaccaacacgtcaccggagagatgatgggtggccatgccatccgcatcctgggctggggagtggagaatggcacaccctactggctggttgccaactcctggaacactgactggggtgacaatggcttctttaaaatactcagaggacaggatcactgtggaatcgaatcagaagtggtggctggaattccacgcaccgatcagtactgggaaaagatctaatctgccgtgggcctgtcgtgccagtcctgggggcgagatcggggtagaaatgcattttattctttaagttcacgtaagatacaagtttcagacagggtctgaaggactggattggccaaacatcagacctgtcttccaaggagaccaagtcctggctacatcccagcctgtggttacagtgcagacaggccatgtgagccaccgctgccagcacagagcgtccttccccctgtagactagtgccgtagggagtacctgttgccccagctgactgtgggccccctccgtgatccatccatctccagggagcaagacagagacccaggaatggaaagcggagttcctaacaggatgaaagttcccccatcagttcccccagtacctccaagcaagtagctttccacatttgtcacagaaatcagaggagagacggtgttgggagccctttggagaacgccagtctcccaggccccctgcatctatcgagtttgcaatgtcacaacctctctgatcttgtgctcagcatgattctttaatagaagttttattttttcgtgcactctgctaatcatgtgggtgagccagtggaacagcgggagacctgtgctagttttacagattgcctccttatgacgcggctcaaaaggaaaccaagtggtcaggaattggttctgacccactgatctctactaccaccaggggaatagtttaagagaaaccaacttttactggtttgaaaaattacngnttnaccctggcaaggtaacnagggatgcctgggcccatnaaaagtttcttccacttggaggctaaaaaaaaaaaaa

SEQ ID NO: 23990 - DNA, 443 bp, Homo sapiens
  misc_feature (1)...(443): n = a,t,c or g
ggtgccgctcagctcctgcccgtgtcattgtggtctcctcagagtcccatcgatttacagatattaacgactccttgggaaaactggacttcagtcgcctctctccaacaaaaaacgactattgggcgatgctggcttataacaggtccaagctctgcaacatcctcttctccaacgagctgcaccgtcgcctctccccacgcggggtcacgtcgaacgcagtgcatcctggaaatatgatgtactccaacattcatcgcagctggtgggtgtacacactgctgtttaccttggcgaggcctttcaccaagtccatgcaacagggagctgccaccaccgtgtactgtgctgctgtcccagaactggagggtctgggagggatgtacttcaacaactgctgccgctgcatgccctnaccagaagctcagagcgaagagacggcc

SEQ ID NO: 23991 - DNA, 339 bp, Homo sapiens
gggataaattgcatatccttttagtctcaggcaagaagtttttattccagccagagagcaagagcctaaggactctccgccatggtattcttaacgagttactgtaaggattttagttcattgcatatgctttgtggaatttgccatcttttttattttttttaacctattttaaatcatacaaagtgtatatcaggttttgttgttacttcaaacaaacccccctcttaatactttcttgttcttgccacttcacactttcatgtatactgttttatttaatccttccatcacacctgagttaggtggtatcattcccattttaaagatgaaagaggc

SEQ ID NO: 23992 - DNA, 636 bp, Homo sapiens
agctatgacatgattacgaatttaatacgactcactatagggaatttggccctcgaggccaagaattcggcacgagcggcacgaggacaaggcccctgccgaaaacaactccaggggcctgggactctgggtcccctactgcagacactttcctgtgagccagaagtgtataaagtgctggtgtgtgaccatcctttggggaaggtcaaagggggcaagatccccaggggccctgaggaagggcagggcataggccgtggctcccagagcgctgggagggagggcccgtgccaccacctcggggctagaaaacaatgcagtcctgggcaggagggaactgaaaatgggagccttcagcatggagccctcaggaggctggggttgtagggggataatttctgtacccctgtgaagggagggggcatgtaggaaaggccttggggatctcagagaatgggacagcccctccgacgcttgttcttgcggacctggaggccagcccgagtggccatctcaaacacctcccgcactccctccttggtcttggctgagcactcaaggtagccaaaggcactgatccggttcgccatgtcccggccttcctcagaccgaacgggctcctgcttcatcttggcc

SEQ ID NO: 23993 - DNA, 428 bp, Homo sapiens
gagtaggtagggttcgtaggtagggttagtaggtagggctagtaggtagggttcgtaggtagggttcgtaggtagggctagtaggtagggttagtaggtagggctagtaggtagggctagtaggtagggttagtaggtagggttcgtaggtagggttagtagcgcgtctgtgctgcttccacctggtgcttcctgttcccaaatcacaagggcctgaaggtggtccctgctttctctttctctttctctgtgtctcaaatggcgattttgctgacagctgccaagaaaatgcttcactcaacagtcctcatgtgcccagagatgtttatagaactgtttgaattgcagccatcccctgccccctcccaggctgaagatctgttctttttaagttgattcgggagtggcattcttttataccccaagac

SEQ ID NO: 23994 - DNA, 367 bp, Homo sapiens
gggtgcctgtaatcccagctactcgggaggttgaggcagaaaaatcactagaacgcgggaggcagaggttgtagtgaggcgagatcgcgctattgccctccagcctgggcagcaagagcgaaactccgtctcaaaaaaacaaaaataaaaacaaaaaccatatgatgatcatggtggtaacgatggataacagctgccacaactacactataactattactacattaccaccaccatcaccaccacctttattgagtccaggtgctgctctcagtcacttaatatgtactaagtaatttaatattcccagtaaccctatgatgtagcactatttttagtactcttttacaggggagaaaaagcaaaa

SEQ ID NO: 23995 - DNA, 366 bp, Homo sapiens
gctggagaataaagcttagagtctaaaattaaatacagactcaacctccactacgaaagctttctggaggaactcttgcttacatgagccatatatacattatatacttcatgttgctcttcaagcaatccttgttcaactacaggaggctgaagcctggtctgtctgctgtcaagttttgccctcatgctcttctttcttaaaatcagtttgggcctgatgtggtggctcatgcctgtaatcccagcactttgggaggccggggcaggcagatcacttgaggtcaggagtttttgagaccagcctggccaacatggcgaaaccccatctctactaagaatgcaaaaaaattagctgggcgtggtg

SEQ ID NO: 23996 - DNA, 443 bp, Homo sapiens
  misc_feature (1)...(443): n = a,t,c or g
gcaaaggaagatccttggagaagtcatcaatgcgttgaaacaaacttggcatgtttcctgttttgtgtgtgtagcctgtggaaagcccattcggaacaatgtttttcacttggaggatggtgaaccctactgtgagactgattattatgccctctttggtactatatgccatggatgtgaatttcccatagaagctggtgacatgttcctggaagctctgggctacacctggcatgacacttgctttgtatgctcagtgtgttgtgaaagtttggaaggtcagacctttttctccaagaaggacaagcccctgtgtaagaaacatgctcattctgtgaatttttgaaagtcagcagttcaggagaaganaaggaatttnaaganaaaaaggaaaattaaaattctaattaatttttagattcantatntatatggagttttga

SEQ ID NO: 23997 - DNA, 481 bp, Homo sapiens
gcctcatcccactcaatgtgctttttgtagaagatggcaaaatggagcgccaggtcttccttgcaacatggaagaatattcccaatgaaaatgaacttcagtttcagattaaggaatgtcatttaaatgctgacactgtttccagcaagttgcaaaacaacaatgtttatactattgccaagaggaatgtggaagggcaggacatgctgtaccaatccctgaagctcactaatggcatttggattttggccgaactacgtatccagccaggaaaccccaattacacgaaatacagtgagctcttcctgtaagtgacctgagatgatctctgctcagttggcctagaaaacccccaaaatcatacaaagcaagagattcaaatcttcatgtttactttaagaacacccgtggaagtgcccaggccatcaaagctgtcactgaagtgtagagctcctgaagtctctcaatacatctatcaggt

SEQ ID NO: 23998 - DNA, 550 bp, Homo sapiens
  misc_feature (1)...(550): n = a,t,c or g
tatgacatgattacgaatttaatacgactcactatagggaatttggccctcgaggccaagaattcggcacgagcccccttcctctgggtgtccttgtctcctgctatcagggcacagtcctcaggatgtttcggggagaataggagccagaacctgagcccctaagccattcccctcaccaatgatggggtccccagtgagtcatctgctggccggcttctgtgtgtgggtcgtcttgggctgggtagggggctcagtccccaacctgggccctgctgagcaggagcagaaccattacctggcccagctgtttggcctgtacggcgagaatgggacgctgactgcagggggcttggcgcggcttctccacagcctggggctaggccgagttcaggggcttcgcctgggacagcatgggcctctgactggacgggctgcatccccagctgcagacaattccacacacaggccacagaaccctgagctgagtgtggatgtctgggcagggatgcctctgggtccctcanggtggggtgacctggaaaagtag

SEQ ID NO: 23999 - DNA, 358 bp, Homo sapiens
gactttccttttgttgtcattcttgtgatcctgggtgggtttctgtggcactcttttagaacatgtagcatcatcttagaggtctatttttaaaaaatgggttgaagaggaaaaaaccattctcacgatggggcttaagtcattgtccaggaataagattggcgtggtgcccatgacatcaccgtcactctgcctaaaagcactctagagctacttgagcacgtggagaggaaggatattttgcgaagcaacagccgcaggtggagagccctgttcacctgatagggtctagctgtgacagtaaatataataccgctgtttccttgggtacagatttgagtgttcatgtgatgagact

SEQ ID NO: 24000 - DNA, 279 bp, Homo sapiens
  misc_feature (1)...(279): n = a,t,c or g
gattgggtgggaggacgctactcgctgtggtcggccatcggactctccattgccctgcacgtgggttttgacaacttcgagcagctgctctcgggggctcactggatggaccagcacttccgcacgacgcccctggagaagaacgcccccgtcttgctggccctgctgggtatctggtacatcaactgctttgggtgtgagacacacgccatgctgccagtaccttgcaccgcttttgctgcgtacttccacaagggcgacatggannccatngggaaa

SEQ ID NO: 24001 - DNA, 400 bp, Homo sapiens
  misc_feature (1)...(400): n = a,t,c or g
ggngnntttgaaccncttgacatgattacgaatttaatacgactcctatagggaatttggccctcgaggccaagaattcggcacgagcagtgcttaggctttggaagtggtcatttcagatgtgattcatctagatggtgccatgacaatggtgtgaactacaagattggagagaagtgggaccgtcagggagaaaatggccagatgatgagctgcacatgtcttgggaacggaaaaggagaattcaagtgtgaccctcatgaggcaacgtgttacgatgatgggaagacataccacgtaggagaacagtggcagaaggaatatctcggtgccatttgctcctgcacatgctttggaggccacggggctggcgctgtgacaactgccgcanacctggggg

SEQ ID NO: 24002 - DNA, 367 bp, Homo sapiens
gtttttctaagttgagcttaatatagttttttctaagccattaagattcctgaaaattattagtgaccatagataaataaaaatatacttggcttgagttttgtacttatcgcgtattttattgcaataattcgacatcagtcaatatttctacacagagtcttactaaaaccacacattaccctttaaaggagaactttaaaccaaattaaatgatatttgttgaattaagaggtaaatatgttgtgccttctcagaaagtgaggaaaatttgtatgtgggtgtggtggaaacatatgcatgaatgactgtcttgccccactgattagagatagtccttgatttgtagttgctaaaaagagtcctg

SEQ ID NO: 24003 - DNA, 423 bp, Homo sapiens
caagaaggcaggcgagatctggaagggaatgtccaaagagaagaaagaggagtgggatcgcaaggctgaggatgccaggagggactatgaaaaagccatgaaagaatatgaagggggccgaggcgagtcttctaagagggacaagtcaaagaagaagaagaaagtaaaggtaaagatggaaaagaaatccacgccctctaggggctcatcatccaagtcgtcctcaaggcagctaagcgagagcttcaagagcaaagagtttgtgtctagtgatgagagctcttcgggagagaacaagagcaaaaagaagaggaggaggagcgaggactctgaagaagaagaactagccagtactccccccagctcagaggactcagccgtcaggatccgatgagtagaaacggaggaaggttctctttgcgc

SEQ ID NO: 24004 - DNA, 368 bp, Homo sapiens
gaccgcctccatctccagattccaaaaagaaatccagaggtatcatgaaactctttggaaagtaagtaaagcagtaaacaagtggaatgggccctgtcttacatgttgcttaaaagtggctggacatgggtatggactttgtaaggcctttgtattcctcttatggaaggaagtttggattgtgatgtgggatttattaactcattgggtcttagttaaagtttaaatttaaatgtctatgttaacaacacaaagaggattagttccagtaggtgcactagttaaaaatgttctgattaacaagtctaaggcctcctcaggtctaatactggccatgtgtgttgtcttctttagacttaggagaagtc

SEQ ID NO: 24005 - DNA, 340 bp, Homo sapiens
  misc_feature (1)...(340): n = a,t,c or g
ccttgctcataagactgaagaaatgtgaaagacccgtggagaattgtctcccaaaacacacattatttgtaagagaaaatcatatcttacacagattatattaatggcaaagtagcatgggagagggtcacagaagtgggttggacgattccgttaaaagcagggaacattctagttaaggcacttggataggcattgggtgagagttttcatgtcttttctgctagattgttcctggtttttttctctatgtgcacctgattttatgcttcttttcatctagcacattatctttaatatatgtgacattgaacatttgctttgtaaacctccanaaagt

SEQ ID NO: 24006 - DNA, 519 bp, Homo sapiens
  misc_feature (1)...(519): n = a,t,c or g
tgttttaaccnccngaanctngtctcnatacgattacgaatttaatacgactcactatagggaatttggccctcgaggccaagaattcggcacgagcctgattggaaggaaaaagacagacgagcttccccaactggtaacccttccacaccccaatcttcatggaccagagatcttggatgttccttccacagttcaaaagacccctttcgtcacccaccctgggtatgacactggaaatggtattcagcttcctggcacttctggtcagcaacccagtgttgggcaacaaatgatctttgaggaacatggttttaggcggaccacaccgcccacaacggccacccccataaggcataggccaagaccatacccgccgaatgtaggacaagaagctctctctcagacaaccatctcatgggccccattccaggacacttctgagtacatcatttcatgtcatcctgttggcactgatgaagaacccttacagttcaagggtnctggaacttntaccag

SEQ ID NO: 24007 - DNA, 359 bp, Homo sapiens
taatctctgaaaatgcactgctgcataccatagacctctgccgcagagctacatcacagtggaatacacagcacacattccattagctgtcagagtgatgaagtaggcacacatcatgtagtctctggaaaattccactgacactcagagactgagagagaaaatggcaggaattgtctgaggtccacaatgagcaggaaataagcagtcagaggtgaagacacaagttatgaggatgatcccaactctagcaggaaacaggcttcttgtctgtttttttcctaattaaatcactttgtttgccttgagttataggcatttctgaaaagcctaaaaatcttaaggatagatgtttattt

SEQ ID NO: 24008 - DNA, 332 bp, Homo sapiens
gcactgggaaagatgaggatttccctctttccacttgtgttccattacatacacacacagttacagcataattttgtcaagattaatagcattggcatcattataaatatttaaattggaagtcatataatttatatgtcatagcttgacccacatagaattctgttttctttttccttccttgctcagttttaaaaatcttccctggagttattaattgtcatttcatttgctttttatttttgttcttatcactaatttatctaaataatatcttccaagtgtgttcagacacattggaattcaatcagtatcatcttgcagaggcagaa

SEQ ID NO: 24009 - DNA, 500 bp, Homo sapiens
gtcaccttgacctcacatgcacccccaatatttcttcccataaacaaactgttgcccctttttttcctccttaaaacaacaaatgttctgaaagaactattgacactggtctctacttcctcactgccacccctgcttcctggcttttgcactgcccagccgcagcctcacagagacttctggctacccatcatcttcctggcccaccctgctgcctctgttcctgccaggggcacctccgagagggggttggccctgcgatcctcagttttcctctttgggcatggcttctcctcaggaatgtgcccttccacctcattttccccagcacacatgcctcagtttcctcctgggacctgatggctcccagatcactatcttgggcccagactttctggagctgaatctccagttgcctcggagcctcctcagaccagtgtggccagaatggtggcctggcttcccctcgggctgccttctgcctccttctgaaccgctgc

SEQ ID NO: 24010 - DNA, 490 bp, Homo sapiens
gcaaagtctttgagcttctgtttgccttctcctctcttctgactagtaggcctgaggatcagtttagacctctggagcccttgctgtcctggagtgggcatcagagaaggcctcaaaaccagtaggagtcagtcaactcaatgttgaggaaaggtacagtattccaggggaaggaaatagcatttgctataatccagaggcagaaaagacacatttcaggaaccaaaaagcatttaccgtaactggagcctgggagtagggagagagggagtgcgtctgttagggtgtcttcagctgttatcacagagaacccccactcagctagcaggtgttggctgtataacaagtgaggcgctcaagcagcagagcaaggccactgaggagccaggtgatgtatgtcttcgtgtcctccccttcttggtgtgtcaacttgtctttcaagttcctgcccttatgggtgccaaattggtgctacagtctgggtgtcaaa

SEQ ID NO: 24011 - DNA, 597 bp, Homo sapiens
ggttgaggagtggaaggagttcgtgtggaacccgaggacgcaccagtttatgggccgcaccgggaccagctgggcctttatcctcctcttctaccgtcgttttttatgggttcctcaccgccatgttcaccctcaccatgtgggtgatgctgcagactgtctccgaccatacccccaagtaccaggaccgactggccacaccgggcttgatgattcgccccaagactgagaaccttgatgtcattgtcaatgtcagtgacactgaaagctgggaccagcatgttcagaagctcaacaagttcttggagccttacaacgactctatccaagcccaaaagaatgatgtctgccgccctgggcgctattacgaacagccagataatggagtcctcaactaccccaaacgtgcctgccaattcaaccggacccagctgggcaactgctccggcattggggactccacccactatggttacagcactgggcagccctgtgtcttcatcaagatgaaccgggtcatcaacttctatgcaggagcaaaccagagcatgaatgttacctgtgctgggaagcgagatgaagatgctgagaatctcg

SEQ ID NO: 24012 - DNA, 396 bp, Homo sapiens
gctggaatgaacggttaaatctctccacatcatcaaacatagaacacagtggaagttcaataaatatttgaattgaggctggacacggtggctcatgcctgtaatcccaacacatggggaggctgaggcaggaggactgcttgagcccagaagcaatgaggctgcagtaagccatgattttgaggctgcagtgagccatgattgtgccactgcactccagcctgggcaacacagcaagaccctgtctctaaaataaataaataaatatgtgaactgatttataatcatcctttcaatattccctcttgactttcaaagtaccactttattaacatctgaattcctacttcaggaatggagtaagcaaaaagatgtgcgggtagtttacttccacct

SEQ ID NO: 24013 - DNA, 439 bp, Homo sapiens
  misc_feature (1)...(439): n = a,t,c or g
gaagtcttttaaatatcactgatgtgtaaaaaggtcattatatccattctgtttttaaaatttaaaatatattgactttttgcccttcataggacaaagtaatatatgtgttggaattttaaaattgtgttgtcattggtaaatctgtcactgacttaagcgaggtataaaagtacgcagttttcatgtccttgccttaaagagctctctagtctaacggtcttgtagttagagatctaaatgacattttatcatgttttcctgcagcaggtgcatagtcaaatccagaaatatcacagctgtgccagtaataaggatgctaacaattaattttatcaaacctaactgtgacagctgtgatttgacacgttttaattgctcaggttaaatgaaataggtttccgnggcttcaaaaccaaatgcactgataaaccaaacc

SEQ ID NO: 24014 - DNA, 416 bp, Homo sapiens
gcaggaggtgggggttgcagtgagctgagatcgggccactgcactccaatctgggtgacagattttttgaaacaaattcccaaggcaagcctggttagagaacggcatagtctcccatcaagtccaacacggccatttcttccttcagccttggaagtctgtttcttctccgattatgagaagtcatcactggcttaaaatccagggtatacgggttgagaaacccatgcttcctctgagtacctgtagttcagttgtgacgctaccatgcgggacccagtcactgaatcactgcactgaggttcctgtgctttcactgacatctttgcgtgaagccaacttagaaataacttgccaacctcatctttttgcggaggctccaactgggggaatcctgggctgtacaagtcaaggtt

SEQ ID NO: 24015 - DNA, 380 bp, Homo sapiens
gcattgctaacagtgttaacccagcacacagctctgaaaagtgctaagggtggtgcaggcttcaacatgagggataagacactcctgggctccacaccctggagcctctcattctcctgaggttggttggggtggctctccagttgccttgtggcctcagctcagagcacctcagaaagcagcacctcccttccctgtccctcctgaaaaactgaaagtcatggccccacctgggagaatttacagtccagttatgaggttccatgcccacttggacagtgaagaacaagagcagaggagtggaaggactggctagagaaagacctgcttgtgggggataggagggcatttgggaatggttcttgtggtagatgaagata

SEQ ID NO: 24016 - DNA, 504 bp, Homo sapiens
gctggttttcatcaaattctaagtagttttaaagtatataatgcatctcagttttgtatactttaaaccacttaataaattatatactagctttatttcaaatagctacctattcaaaacataggtagttttttccaaaagacccccttgaaacatgagactgagctgctgcaccgccagtgtcctgcggatattttctagcgtagcatttgcttcctggtggagtgggagcaaacaaaaaaatacataaataaaaagaaaacacttgcacgtcgtattgaaataattcatgggtctctctttccaaccagattaaattcaatgacaggtatagaatatactcatgattgtcttcctagtggcacttaaaaaggcataaagtggacgggaaagtggctcatgcctgtaatcccagcactctgggaggctgaggcgcgagccacagcgccccgcaagcctttgctttttacttctcctactaaaacattttgatcagggctttaa

SEQ ID NO: 24017 - DNA, 528 bp, Homo sapiens
  misc_feature (1)...(528): n = a,t,c or g
ttgannccctaacagctatgacatgattacgaatttaatacgactcactatagggaatttggccctcgaggccaagaattcggcacgagctggtgccctacccccgcatccacttccctctggccacatatgcccctgtcatctctgctgagaaagcctaccatgaacagctttctgtagcagagatcaccaatgcttgctttgagccagccaaccagatggtgaaatgtgaccctcgccatggtaaatacatggcttgctgcctgttgtaccgtggtgacgtggttcccaaagatgtcaatgctgccattgccaccatcaaaaccaagcgcagcatccagtttgtggattggtgccccactggcttcaaggttggcatcaactaccagcctcccactgtggtgcctggtggagacctggccaaggtacagaaagctgtgtgcatgctgagcaacaccacagccattgctgaggcctgggctcgctggaccacaagtttgacctgatgtatgccaagcgtgctttgtt

SEQ ID NO: 24018 - DNA, 473 bp, Homo sapiens
  misc_feature (1)...(473): n = a,t,c or g
tnnntttggnnnctcnngnaaacccttatgacatgactacgaatttaatacgactcactatagggaatttggccctcgaggccaagaattcggcacgaggcagttacagaaatgaacggtagaattgtggccacaaagccattgtatgtagctttagctcagcgcaaagaagagcgccaggctcacctcactaaccagtatatgcagagaatggcaagtgtacgagctgttcccaaccctgtaatcaacccctaccagccagcacctccttcaggttacttcatggcagctatcccacagactcagaaccgtgctgcatactatcctcctagccaaattgctcaactaagaccaagtcctcgctggactgctcagggtgccagacctcatccattccaaaatatgcccggtgctatccgcccagctgctcctagaccaccatttagtactatgagaccagcttcttcacaggg

SEQ ID NO: 24019 - DNA, 361 bp, Homo sapiens
ggcttataatcgtaaccatgtattacttgaataaaataatgaacagaatttgaggggattgagaaaacaaggtaaatggaaaataaatgaaaaatgtattctacttgagattagtctttttctgaaccaaggccactatgttttttttgagacagggtctcactctgccaccaaggctagagtgcagtggtgcaatttcggctcactgcatcctcgacctcctgaagtcaagcaatcctctcacctcagcctctcaagtagctgggaatacaggtgcgtgtcaccacgcccagctaatttttgtgttttttgtagggatggggtttcaccatgttgcccaggtggtcttgaactccagagc

SEQ ID NO: 24020 - DNA, 350 bp, Homo sapiens
gggaagtggtaataatatgaatatcttttgaaactggagctcctaggatgaacactacatgggtagtgacattttaaaatactagaaggtaggctgggcatggtggctcattcctgtagtcccagcactttgggaagctgaggcaggtggatcacttgaagccagaagtttgagaccagcctggcgaacatggtgaaacctcgtctctactaaaaatacaaaaattagccagacgtggtggcatgtgcctgtaatcccagctactcgggaggctaagacagaatcacttgaacctgggaggcagaggttgcagtgaagcccgagattgtatcacaacactccagcctagg

SEQ ID NO: 24021 - DNA, 421 bp, Homo sapiens
gagcgtggagcctatgttccggcatctcaagaacacctactcagggctgcagctcattattgtcatcctgccagggaagacgccggtgtatgctgaggtgaaacgtgtcggagatacactcttgggaatggctacgcagtgtgtgcaggtgaagaacgtggtcaagacctcacctcagactctgtccaacctctgcctcaagatcaatgtcaaacttggtggcattaacaacatcctagtcccacaccagcgctctgccgtttttcaacagccagtgatattcctgggagcagatgttactcaccccccagcaggggatgggaaaaaaccttctatcacagcagtggtaggcagtatggatgcccaccccaatccgatacttgggcttacttgtgccgggtacagcgaaccacggcaagaa

SEQ ID NO: 24022 - DNA, 540 bp, Homo sapiens
  misc_feature (1)...(540): n = a,t,c or g
ggttactggaatcacggtctctcgcaatggatcttcagtattcacaacggtcccaagattccaccttgaagatgttttctaaagaatcaaaaatgctacaaagaagtatatcattttcaaatatggctttatcgtcttgtttacttttaccaggagatgccactgtcataacttcttcatgggataataatggctatttttattccatagcatttggaagacgccaggacacgttaatgggacatgatgatgctgttagtaagatctgttggcatgacaacaggctatattctgcatcgtgggactctacagtgaaggtgtggtctggtgttcctgcagagatgccaggcaccaaaagacaccactttgacttgctggccgagctggaacatgatgncagtgnanatncaatcagnttaaatgctgcnngcacactgttagtttccggcaccnnngaangcacagngaatatttgggacctcacaacggcnccttaatgcnccanattccntgccnttcnnggantggnngnnncnctgc

SEQ ID NO: 24023 - DNA, 477 bp, Homo sapiens
  misc_feature (1)...(477): n = a,t,c or g
gaataatagaacagattaggggacccagaaatagacccatataaatatagtcaactcatcttctgagaagattcaaaggcaccacaatgcagaaaatggtcccacaatggtgctgggacaactagatgtccgcatgtgcaaaagaaatcaaacagaccctacaccctaaacagaaattaatgaaaaggagctgggcgcggtggctcatgcctgtaatcccagcactttgggaggccaaggcgggtggatcacttgaggtcaggagttcgagaccagcctggccaacatggtgaaaccctgtctctactaaaaatacaaaattagctgggcatgatggcgagcacctgtggtcccagctgctcgggaggctgaggcgggagattgcttgaacctgggaggcggaggtgagacaagatcacgccactgcactccancctggggtgacagggtgagaatctgtctcaaaaaaaaaaaaaa

SEQ ID NO: 24024 - DNA, 426 bp, Homo sapiens
cacctatgacatgattacgaatttaatacgactcactatagggaatttggccctcgaggccaagaattcggcacgagaagggagcaggggacctggaattcagagactggaatggaagcagtagcttgacttctccctttatttgccacagtgccctaagtaaggaaaggcacacaactctcagactaggttttctcatctgaaaactgggataatagtcactgtgttcacaccacagggtcactgtgagaatgctacaataaacgatatatataatagaaacagatttggaaatacggtggtatttaaatataaggcatcaccttgtaaactgctttagtagcccccctaaaatggctttaggctattcccctacttggaatctgaaaggggaaaaggccaattaaattgaagaagactaaatgg

SEQ ID NO: 24025 - DNA, 451 bp, Homo sapiens
  misc_feature (1)...(451): n = a,t,c or g
ttgganaaccgctatgacatgattacgaatttaatacgactcactatagggaatttggccctcgaggccaagaattcggcacgagtatgatggagggtggtcgcagcaaagggtttggttttgtatgtttctcctccccagaagaagccactaaagcagttacagaaatgaacggtagaattgtggccacaaagccattgtatgtagctttagctcagcgcaaagaagagcgccaggctcacctcactaaccagtatatgcagagaatggcaagtgtacgagctgttcccaaccctgtaatcaacccctaccagccagcacctccttcaggttacttcatggcagctatcccacagactcagaaccgtgctgcatactatcctcctagccaaattgctcaactaagaccaagtcctcgctggactgctcagggtgccagacctcatccatt

SEQ ID NO: 24026 - DNA, 739 bp, Homo sapiens
  misc_feature (1)...(739): n = a,t,c or g
ttgactacagcttgactgattacgaatttaatacgactcactatagggaatttggccctcgaggccaagaattcggcacgagctccacttcagtgcatgtcttagttgctgntccctnagctcccagctccacctctggggttcagcttctgtctctgctgtcccagttttgaggtttggtttcttgtttctgtctcttgctttcgggctcctccctcccaccactccccaacttcccctagcagttgcagggaagataggacgagaagcttctgacatgtgtgcctcagatctgttccaccccactcacangaggttctgtntgctccagactggggctagggcctaatctttgaagtttggactttggtattgatgtgggtcagaaggagcctcatcctaatctcactcaggcctccagggatccatgggggagtgaaaccaattctcagagaacaacccaccagagacttttaaagagaggccaggctttgggaatgggttgggagaggcatctgttcattggagcatgagtggatgccagaactgtaggttataaggcagtcactttttctctctactcccacccacacctgcctccctcttacccctgctcccccacactgcaggaggatttgtctctaagaggtgctgccccaaagctccccaagcatcaatactcctagggctcaggacaagtggctcccctggccaggagagccacagccatgatacaggg

SEQ ID NO: 24027 - DNA, 383 bp, Homo sapiens
gaagattcttgactgacaatcattttgtttaaagaggctaaagataggacttcaatcccttctggcttataaggcttctgctgaggaatctgtatggctatttcccaccaaccttgagcaggcacttgccccctattgtttgtttttgagcttcttgccattgccccaaacatgacattttctgccacttttgaagactccattatcaagccgtttccaataatccaaaaataaggggctgagtgcgatctcaaaagcaccaatgttctttctgagaggactagcttggtgagtcctggctgatcttctgagtgtgtttgcctctcgtcaggacagggaggaattggtgggtggctaaatcctgtctatttaatacagtttag

SEQ ID NO: 24028 - DNA, 303 bp, Homo sapiens
gcacaaatgcagtgaagcttgatgacacttacataaaagcctacttgagaagagctcagtgttacatggacacagaacagtatgaagaagcagtacgagactatgaaaaagtataccagacagagaaaacaaaagaacacaaacagctcctaaaaaatgcgcagctggaactgaagaagagtaagaggaaagattactacaagattctaggagtggacaagaatgcctctgaggacgagatcaagaaagcttatcggaaacgggccttgatgcaccatccagatcggcatagtggagccagtg

SEQ ID NO: 24029 - DNA, 386 bp, Homo sapiens
gctaggctgtttagagaggaaattaatccgtgaatggaaatttgagggcaagggaagctggacaggagaggagacctgtggagtcgaggtccttcagggagtcagtgtagcggtggttagagctaagatcagaggggcttagttaccggtaatgccacttggaggacagagctgaaggaactggtagctaaggtggagttgagggacagccaggatggtagaatgacagtcaactgtgtgctacagatgtcaccaaaaattatcaccagagtgtgttggactctcaggagctaaaatcttgaattaaggggcagtgactgaacccgggagaggtaatggatgcgcaagcccagtgcatgagattgaaagccagggattttagcgga

SEQ ID NO: 24030 - DNA, 440 bp, Homo sapiens
gaactgggaaatgttagaaaagaactgaccatgtttcctcgatttgggtgatttggaggatttcctttttgggtttccttaaattggaaaagggtagagaaaagagtagcaatgactaccagcagcagacccctgccactttgagagccttgaaggaacatccaaggacaaagggtaggcagctaaggagcatgtcttgggggaagcctgaggtggcctgtgcactgtggctcaggacagtcaccaaaacatgagtagtttcttcccccttcctcaccccgcctacccagagagcaaacactctttcccgttctcactctcactgagaaataactcgcctagtcatgtagacaacaaaagccaagtccaggacaaaggaaactgtctgctgtgtcacctcttcccctgtccacccgcctcagcactctccagccttactg

SEQ ID NO: 24031 - DNA, 974 bp, Homo sapiens
gggatctctttggcaagtttgggcctgccttaagtgtgaaagtaatgactgatgaaagtggaaaatccaaaggatttggatttgtaagctttgaaaggcatgaagatgcacagaaagctgtggatgagatgaacggaaaggagctcaatggaaaacaaatttatgttggtcgagctcagaaaaaggtggaacggcagacggaacttaagcgcaaatttgaacagatgaaacaagataggatcaccagataccagggtgttaatctttatgtgaaaaatcttgatgatggtattgatgatgaacgtctccggaaagagttttctccatttggtacaatcactagtgcaaaggttatgatggagggtggtcgcagcaaagggtttggttttgtatgtttctcctccccagaagaagccactaaagcagttacagaaatgaacggtagaattgtggccacaaagccattgtatgtagctttagctcagcgcaaagaagagcgccaggctcacctcactaaccagtatatgcagagaatggcaagtgtacgagctgttcccaaccctgtaatcaacccctaccagccagcacctccttcaggttacttcatggcagctatcccacagactcagaaccgtgctgcatactatcctcctagccaaattgctcaactaagaccaagtcctcgctggactgctcagggtgccagacctcatccattccaaaatatgcccggtgctatccgcccagctgctcctagaccaccatttagtactatgagaccagcttcttcacaggttccacgagtcatgtcaacacagcgtgttgctaacacatcaacacagacaatgggtccacgtcctgcagctgcagccgctgcagctactcctgctgtccgcaccgttccacagtataaatatgctgcaggagttcgcaatcctcagcaacatcttaatgcacagccacaagttacaatg

SEQ ID NO: 24032 - DNA, 317 bp, Homo sapiens
gctctccaagagaaagaaattgaagtagaaaatgcatgctttaagactgatgtgcaggctgggcacggtggctcatatctgtaatcccagaactttaggaggatcacttgagcccaggagttggagaccagcctggacaacataatgagaccctcgactccatgcatggtgatgtgtggcagtagtccagactactaggaagctgaggcaggagcttcccttgagcccaggagggaatgctacagagagcaatgaacatgtggctgcgctccagtctgggcaacagagtgagaccctgtctccaaaaaaaaaaaaaa

SEQ ID NO: 24033 - DNA, 412 bp, Homo sapiens
gagcaagcatagaaagtagaactaactttaattcatccttacagcaaggcctacaagaaagttcccattcttttttctatctcacataaataggctccatagttggtatctgttccttttctctgcctcgttaccccactcctggtaccaatttctctgttagtgtgagtgagctttttggacccagagagatgaatgtcccgaggttccaaagctaggaagtggcacagccaggatttgactccagctacaagagatgttgtcagaggagcgagatctccctctttccctattcaccagcaccagcaccattcacatggtgagccaatagggtccaccttcatctgtgtcccctcctcccagcaccacgctcatttctaaattgaaatgaaaaattgggttttctgcctgc

SEQ ID NO: 24034 - DNA, 368 bp, Homo sapiens
ggaaaaatcgctcaacttgaagagtaactatgacctttccaaaaggtcagtgaggcattagcaactgtaagataagcttcacaccttgttaaagtgggtatgaatttccctcttggcagtaaagcctggggaacaaacttaaagcaacatcccctgatagctagagcaaagggaaagacaatggcaagcagtgatgggaccatcagagcaaacctctactttaaaatactacagcccaaaatgaagaacaaccatatcagatcatgtcgggcagtccttcacagttctgatctattggtaagaaaacctcttgccttgtgtaaggagaaagaggattgacaacagaaaccatgagactgggagggaga

SEQ ID NO: 24035 - DNA, 441 bp, Homo sapiens
  misc_feature (1)...(441): n = a,t,c or g
gcactgggagaagatgcctgggggtccaggagtcctccaagctctgcctgccaccatcttcctcctcttcctgctgtctgctgtctacctgggggaaagacgcccacttccaatgcccgcacaatagcagcaacaacgccaacgtcacctggtggcgcgtcctccatggcaactacacgtggccccctgagttcttgggcccgggcgaggaccccaatggtacgctgatcatccagaatgtgaacaagagccatgggggcatatacgtgtgccgggtccaggagggcaacgagtcataccancagtcctgcggcacctacctccgcgtgcgccaagccgccccccagggccttcctggacatgggggagggcaccaaganccgaatcatcacagccgacgggatcatcctcctgttctgcncggtggtgcctgggacgctg

SEQ ID NO: 24036 - DNA, 354 bp, Homo sapiens
ggattaatctagcataacagtgaaaggggaaaagcataggttaaaaaatgatctggtttttcaagttggaaatgttcaaattaagaaatgtgtcttatttatttatttgtttatttttgtttgctttttgagacggagtctcactctgtcacccaggctggagtgcagtgacacaatcttggctcactgcaaccttcgcctcccaggttcaagccattctccagcctcatcctcctgagtagttgggattacaggcgtgcgccaccacacctggctaatttttgtatttttagtagagacagggtttcaccatgttggccaaactggtctcagactcctgacctcaagtgatcg

SEQ ID NO: 24037 - DNA, 179 bp, Homo sapiens
ggttgggtgcgctgaggtgaaatgatgtgacatactgagggggaaccaagttattctgccaaacagccactgtcctcttcggacccctgcagtgaatgacaccctggcccctccctgtgcactcaaccctgtgggaccctcagactcctgagggtccagctgcctggctctgccagtgg

SEQ ID NO: 24038 - DNA, 390 bp, Homo sapiens
ggctacccgcgggaggtgcagcaaggagaagagtttgagcgacggattggacagcccacactgctgctgtatgtggacgcaggccctgagaccatgacccagcggctcttgaaacgtggagagaccagcgggcgtgtggacgacaatgaggagaccatcaaaaagcggctggagacctattacaaggccacagaacccgtcatcgccttctatgagaaacgtggcattgtgcgcaaggtcaacgctgagggctccgtggacagtgtcttctcccaggtctgcacccacctggacgccctaaagtagcaacgctggagccgcttccccagctcagagccccgccccaccccgtcctgattagaggtcctcctggcctgagcgcagcgcctc

SEQ ID NO: 24039 - DNA, 439 bp, Homo sapiens
gccacaagacttagctgggccaaaccaaccatgaccacaccatggcattgctgtttgctgttagggctaaggagaggccttgcccaggttagaagcaggtgactcactcccagcagtgtaggaagcacctgcgcctcttcattatggaagaaagagctcagggccccttgggccacctcagtgagtgagatttagccagggcctgagcaggccacctaccctaggaggatccagagacctcagcacaccttttttctctctaaaccccatcagccatagaacctggcctctctgctttccaaggctgtgagtgagtgggctgctgtgttctgcagggggtgcttaacatctaagcataaccacctgtttatgagtagacatctgtgtgtgcttgcatccaggaaactcttcatagcaaaagcatagggtggaaggagca

SEQ ID NO: 24040 - DNA, 476 bp, Homo sapiens
  misc_feature (1)...(476): n = a,t,c or g
ggcacggtttacagaaattcggtccctgggtcgtgtcaggaaactggaaaaaaggtcataagcatgaagcgcagttcagtttccagcggtggtgctggccgcctctccatgcaggagttaagatcccaggatgtaaataaacaaggcctctatacccctcaaaccaaagagaaaccaacctttggaaagttgagtataaacaaaccgacatctgaaagaaaagtctcgctatttggcaaaagaactagtggacatggatcccggaatagtcaacttggtatattttccagttctgagaaaatcaaggacccgagaccacttaatgacaaagcattcattcagcagtgtattcgacaactctgtgagtttcttacagaaaatggttatgcacaataatgtgtccatgaaatctctacaagctccctctggtaaagacttcctgaagatcttccatttctttatggntttctgngccc

SEQ ID NO: 24041 - DNA, 405 bp, Homo sapiens
gggctgccagcctccttttgtttcacttttgcccccttcttgggaacatttgaccaaaaataatcctcatttcatcttgtgtacagtcctttgtgtaccccgcccaggttgagaggtgaatcagcgtaattctccgaagctctgctgggcagctcagccatgttacattgtctatgcagaataagcaggcctggtgtctgcaaatgtaccagtccttctcccgcatctcctgggtgcccccttggctttgcctctcctgtgtcctgtctttctgcgttttagaagtgagagcctctccttcaccttttgagcaactgagtcatctcaagtcctgagctctgctctgccgcctgctggtgccttgtaaaggtatactcgttacaggccctagaggttctaatggtc

SEQ ID NO: 24042 - DNA, 428 bp, Homo sapiens
  misc_feature (1)...(428): n = a,t,c or g
gactggacacaaactccaaatgggtccacactcaaatttcaaacttaatttatgcttcaaaagatgtcagattttaaagattgttatctagtacataaactttaatctaaaggctgtaaaagccatctctccttttgttgggtggggcagggaatagactataaatatttaaatgacaagataacatctaatgatctgatcctttttctgctctctaaaagatagagggcagttgtttctgtagtttcattaaaataggaaatcattaaaaccatccaatgataaaagtaatcacaaaactaagatatccggtttgattcatgttatcaccccatctggctgaaccactttgngcttggtcagtcaataagctgggtctatcagaataacagcangtaagnaaataaaccaaaaatttccccagccct

SEQ ID NO: 24043 - DNA, 359 bp, Homo sapiens
tgaaaaggcacctcagaatggctgctgtgggcagagtctgtgacatgactttccccgccctgcccctctgttcagagcagctggaaagatgggatcagtaagattaaaaaacttttgttcggccaggcgtggtggctcacacctgtaatcccagcactttgggaggctgaggcggacggatcatgaggtcaggagttcaagaccagcctggccaatatggtgaaaccccgtctctactaaaaatacaaaaattagccgggtgttgtggctcaccctctattcccagctactcgggaggcagagacaggagaatcgcctgaacccaggaggcagaggttgcagtgagctgagatcgtgcc

SEQ ID NO: 24044 - DNA, 322 bp, Homo sapiens
gtaaggattaaatgtgttagtatatgtaaagtacttagtgtgcctgacatatagtaaatgctctagatcttgtcaagaattattgtcatcattactgagtgcacatatcaaaaattacttaagtatgtcctatttggggacttttaggttgcttccacttcttgtccttttaaaaccttgttatgagtaacaaagtgtaccttttaagatattcttcagaattatttttcataggctattctactctacagttttttaaacttttaaattggcttgtgctccacttgaaggtatttgtaccgcatctacaccttttgtattg

SEQ ID NO: 24045 - DNA, 483 bp, Homo sapiens
ttcctactcaggcctagcagaggaaagcagggaccatcaggtgagtacctcttctttcccatatttcatctcattgaaacctcacaacaaccgatgcaggaggcattatccccattctggaaggtgagaaaatgaaaactcagataatttcaaataatttttgtgagtttgcaaagttaacagatgtcataactgggatttgaaaccaaatgggtttaattccaccaaatgggtttaattccaaagcccatgatttttccatgctagcacaatgcaggttttcctgggtgggggtaaaggatcaccttttccacaccccttccagaatctgcatactcatttcttaagtaacgccctggacacatctgagagcttttgcgtcgacgcggccgcgaattcagatctatgaatcgtagatactgaaaaacccccgaagttcacttcactgtgcatcgtgcccatctcaattctttatttatacct

SEQ ID NO: 24046 - DNA, 1179 bp, Homo sapiens
tgaaatcctttgactgattacgaatttaatacgactcactatagggaatttggccctcgaggccaagaattcggcacgaggtaactgaacaccacctgttccccaataacctatggagataaaaagattaaaaacagaaacaaaaaccgaacagtgtgaacagtgcaccctgaggtctccctggggtcccttgtacccctcaggagcctgtggatgaccctgtgcaaacagttgggtggaagactgtgtcttcctgtgtgtttggatgagtaccagaactttctgcgtctgtttttcaccctacccaatgcagtgcttacctaaaaaatgcgttgaatagagcttcttgcttttacctcgttgcactgctgagagcaagatgggtcaccagcagctgtactggagccacccgcgaaaattcggccagggttctcgctcttgtcgtgtctgttcaaaccggcacggtctgatccggaaatatggcctcaatatgtgccgccagtgtttccgtcagtacgcgaaggatatcggtttcattaagaaagacctgagctgtcttccttggcactgcctatggaggtgacacccatctcctcagcaccaagttcactgggaaccagtcagactgatatgtcaaaattaagggtaactggtggaaacacagaggcattgacaacagggttcgtagaagattcaagggccagatcttgatgcccaacattggttatggaagcaacaaaaaaacaaagcacatgctgcccagtggcttccggaagttcctggtccacaacgtcaaggagctggaagtgctgctgatgtgcaacaaatcttactgtgccgagatcgctcacaatgtttcctccaagaaccgcaaagccatcgtggaaagagctgcccaactggccatcagagtcaccaaccccaatgccaggctgcgcagtgaagaaaatgagtaggcagctcatgtgcacgttttctgtttaaataaatgtaaaaactgcaaaaaaagtcgacgcggccgcgaattccagatctatgaatcgtagatactgaaaaaccccgcaagttcacttcaactgtgcatcgtgcaccatctcaatttctttcatttatacatcgttttgccttcttttatgtaactatactcctctaagtttcaatcttggccatgtaacctct

SEQ ID NO: 24047 - DNA, 507 bp, Homo sapiens
atcccacagctggtaccaataggaaagaagactccagctaatgaaaaagtagagattcaaaaacatgccacaggaaagaagtctccagcaaagagtcctaatcccagcacacctcgtgggaagaaaagaaaggctttgccagcatctgagaccccaaaagctgcagagtctgagaccccagggaaaagcccagagaagaagccaaaaatcaaagaagaggcagtgaaggaaaaaagtccttcgctggggaaaaaagatgcgagacagactccaaaaaagccagaggccaagtttttcaccactcctagtaaatctgtgagaaaagcttcccacacccccaaaaaaatggcccaaaaaacccaaagtaccccagtcgacctaaagtcagtgattcaactggaaggaaacctcaatgctgcctccagagctttttggaaatactcagatcctggccgcctttgtaaccttctctaaacgtcagggctggacttaaacatttttaaaacc

SEQ ID NO: 24048 - DNA, 367 bp, Homo sapiens
gagtatgtacataatctggtagctcccagtccttttgtggaagcttcctcttaagctgttccccccaggtcaccactctccaggcacaactcttgactgcttcatgatgttcactcttgcttctctgcctggaacattactcttctagaaccacctttcttagctggagattctcatctgaaccacagagcacagaaagtgatatgaatagctatccatttcttttcaaagatggttcataatgaatataattttagatgtataggagagaagttaattcattacatagtgagtggtttgttggtaaatgctggtttatcaacccgttcttcaggaaaaacactgatttgtagtgtttgctggattt

SEQ ID NO: 24049 - DNA, 468 bp, Homo sapiens
aacagctatgacatgattacgaatttaatacgactcactatagggaatttggccctcgaggccaagaattcggcacgaggggctcggcgtgggcaggactcatccccaggactgtcatcttctgacctgggttctgctcccaactgtttatgatctgctttgaccactggaaatcccagcactccctttgggacatcactgacagagacctgggctgagaggacagcttccatttcacaaacagtttttgcagactcacagctactgatgaatgcgtcctctttgccttttttcagtgtgtcggaactccccaaagaattttgtttctttgattgggtggcaacataagtatctgcaatattttgtaacctgtcgatactacaacccaaacttccagtcagtttttgtgattgcgttagtagtgaagaagtagggaatgctggtaggcttctagaacgcagcatatgg

SEQ ID NO: 24050 - DNA, 531 bp, Homo sapiens
  misc_feature (1)...(531): n = a,t,c or g
gcatgcaccaccatgcccaactaatttttgtatttttagtagagacagggtttcaccatgttggccaggctggtctcgaactcctggcctcaagtgatctgcccgccttggcctccgaaagttctgggattacaggtgtgagctactgcgcccggcctttgtttgttcttgtttctctagttacttgaggtgtgacattaggttgtcaatttgtgctctttcagactttttgatatagacatttagcactgtaaactttcctcttagcactgcttttgccatataacagaggttttgataacgtgtgtcactagtaccattcttttcaaataagttttaaatttccatcttagtttcattgttaacccaaaaatcattcaaaaccagactaatttccatgtatttgcatagctttgagggttccttttgcagttgatttccagctcgtgccgaattcttggcctcgagggccaaattccctataggagtcgtattaaattcgtaatnagtcaaaggttcagatnannacac

SEQ ID NO: 24051 - DNA, 483 bp, Homo sapiens
tttggaaaccccttgacatgattacgaatttaatacgactcactatagggaatttggccctcgaggccaagaattcggcacgaggacaccatcatctcccctcactatctactcaggcagtgaagcctctggacacacagagatcccccagcccagtgctctgccaggaatagacgtcggctcatctgtaatgtccccacaggattcttttaaggaaattcatgtaaatattgaagcgactttcaaaccatcaagtgaggaataccttcacataactgagcctccctctttatctcctgacacaaaattagaaccttcagaagatgatggtaaacctgagttattagaagaaatggaagcttctcccacagaacttattgctgtggaaggaactgagattctccaagatttccaaaacaaaacctatggtcaagtttctggagaagcaatcaagatgtttcccaccattaaaacacctgaggg

SEQ ID NO: 24052 - DNA, 332 bp, Homo sapiens
ggaggggaaggcggctaccagtgtaaagccagagctgaggttcttgatagtccacaatgggtgaaccacagcaagtgagtgcacttccaccacctccaatgcaatatatcaaggaatatacggatgaaaatattcaagaaggcttagctcccaagcctccccctccaataaaagacagttacatgatgtttggcaatcagttccaatgtgatgatcttatcatccgccctttggaaagtcagggcatcgaacggcttcatcctatgcagtttgatcacaagaaagaactgagaaaacttaatatgtctatccttattaatttcttggacctt

SEQ ID NO: 24053 - DNA, 328 bp, Homo sapiens
  misc_feature (1)...(328): n = a,t,c or g
gtcagttcctactgactgtcacgtggcagagtccagtccaaaagcttgttgatgaaagagtggttcaaaactcagaatgtggccgggcgcattggctcacacctgtaatcccagcattttaggaggccgaggcagggggatcacttgagcctgggagttcaagaccagcctgggcagcagagcaagaccctgtctcatttgaaaaataaataaataaagaaaaaaaaaaagaattcagattatctttcataattgaaaaacaatttggcaaatgaaaattatgttctcaagtttgccagctaaagtataattancaaagaaattgaag

SEQ ID NO: 24054 - DNA, 441 bp, Homo sapiens
  misc_feature (1)...(441): n = a,t,c or g
gggaggctccataggaggccggggatccagctctgggggtgtcaagtcctctggtggcagttccagcgtgaagtttgtttctaccacttattccggagtaaccagataaagagatgccctctgtttcattagctctagttctcccccagcatcactaacaaatatgcttggcaagaccgaggtcgatttgtcccagccttaccggagaaaagagctatggttagttacactagctcatcctattcccccagctctttcttttctgctgtttcccaatgaagttttcagatcagtggcaatctcagtcccctggctatgaccctgctttgttctttccctgagaaacagttcagcagtgaccaccacccacatgacatttcaaagcacctccttaaccagccagagtaggaccagttagaccanggngtggacagntcctta

SEQ ID NO: 24055 - DNA, 128 bp, Homo sapiens
agtttggattatgatcgctgtatcaatgacccttacctggaagttttggagaccatggataataaggtgggtcttacaattcttcatctctggggatcaaatcagtcttaacatggcattttttttct

SEQ ID NO: 24056 - DNA, 430 bp, Homo sapiens
  misc_feature (1)...(430): n = a,t,c or g
gggccgagcaggaggcgccatcatgggagtggacatccgccataacaaggaccgaaaggttcggcgcaaggagcccaagagccaggatatctacctgaggctgctggtcaagttatacaggtttctggccataagaaccaactccacattcaaccaggttgtgttgaagaggttgattatgantcgcaccnaccggncgnctctgncctttccnggatgatccggaatatgaagcttnctggccgggaaaacaagacggtcgtggctgtggngaccataactgatgatgtgcgggttcaggaggtcccanactganngtattgtgcactgcactgtaccagncgaggctactnaaactnaccctggatcctactntnttattattaaagatttttggtgactannntcntcttgtgnntggttctttaat

SEQ ID NO: 24057 - DNA, 455 bp, Homo sapiens
aacagctatgacatgattacgaatttaatacgactcactatagggaatttggccctcgaggccaagaattcggcacgagccacatatcagaattttaagagctcatgaagtacttataaatccacgttgctcaggcctcttctattagaaatcctaaatcagtgggtctgggttggggcccagcgaatgactcagatgtcctgccaggattagaaaccactgatctagactggtcccaacacagtctctagggtgctgagtgacctttgggaagtcacttcacttccctggacggtggcttcctcacctcttaaataagaacttggactggatgtatttaaacctggctgcaagtcagcaatttccagggagcttcagaaatacagatttcccagacccaggaacctgtatttttaggaaagtctccaagagattctgatgcagccaagtcacca

SEQ ID NO: 24058 - DNA, 342 bp, Homo sapiens
gccaagttataccttctcaacaccaccaagcttagtgaagaactgttctaccagatactcatttatgattttgccaattttggtgttctcaggttatcggagccagcaccgctctttgaccttgccatgcttgccttagatagtccagagagtggctggacagaggaagatggtcccaaagaaggacttgctgaatacattgttgagtttctgaagaagaaggctgagatgcttgcagactatttctctttggaaattgatgaggaagggaacctgattggattaccccttctgattgacaactatgtgccccctttggagggactgcctatcttcattctt

SEQ ID NO: 24059 - DNA, 471 bp, Homo sapiens
  misc_feature (1)...(471): n = a,t,c or g
acgaatttaatacgactcactatagggaatttggccctcgaggccaagaattcggcacgagcaataagcaagcattatttatacaattagaaagagtgaatacatatttttttttggagacggagtctcgctctgtcacccaggctggagtgcagtggcgcgatcttggctcactgcaacctctgcctcccaggagaattgcttgaacccaaggggcggaggttgtggtgagccgagattgcacctttgtactccagcctgggcaacgagcaaaaaaactctgtctcaaagaaaaaaaaaaangaangaaaaagaaaaanggnttccaggacanagcatgctnatttgctggcggacagttccaaaancanaccntgttagnccttctacttacctgctggatttttcangcnctaaatttataactttttgaaacaaaataatggggaattttccatttgggggcaaact

SEQ ID NO: 24060 - DNA, 282 bp, Homo sapiens
ctggttccagttaaatgtgttaacagtgtatgtggttggtgcttaataaaaacatgttcagtgcagtaataattaacttcagttaaacccttaaacatatagggagtaaacagaaatgttgagtggttactcagcatggggtaagggacacatcaagtcattggtcagtattgggtatcatcatgttcttaccatcttttttctggagttttaatagttgttttttaaaaaaatctctgttttaataagccattttgatgtttgaaactaccttggataagc

SEQ ID NO: 24061 - DNA, 357 bp, Homo sapiens
gcggcacgaggtgggccctgacattttcattagcaatggttcccttgatttcccttcagacgaatccttcctgaacccaggtgccctttatcctgcacattagcccctagtcagctcttacaagccataatgtgccgtgaagttctccagatttttccctggttggccactctgagtgtttttcactgctcaccacctctaatcaaatcagcttggtttccctgtgtctccttccctctgttttgctcctggaaactgtgataaccagatgcattaacatttccgagagtccaccacatgccaggctctgtcccatgtacattacagtgcacttgaggctcatttagcctccctttc

SEQ ID NO: 24062 - DNA, 341 bp, Homo sapiens
gcaggggctgccctttttctttctcagtccccttcattttacacatgaggaaactgaggcacagagaagttgtgatagtttaaaaatggctgcaaattctttccagcacctcccattgagaggtggagtacaagttccccttgcctgggtctgcagtgtcttatgacttctttgatcacgagaatgtggcataatcaatgctgcgcaacaagttgggcatggtggcatatgcctgtagtccagttaattgggaggctgacccggaaggactgcttgaggccagttggaggtcgcactatgattgcacctgtgaatagccaccacactccagcctcagcaac

SEQ ID NO: 24063 - DNA, 642 bp, Homo sapiens
ggccgagcaggaggcgccatcatgggagtggacatccgccataacaaggaccgaaaggttcggcgcaaggagcccaagagccaggatatctacctgaggctgttggtcaagttatacaggtttctggccagaagaaccaactccacattcaaccaggttgtgttgaagaggttgtttatgagtcgcaccaaccggccgcctctgtccctttcccggatgatccggaagatgaagcttcctggccgggaaaacaagacggccgtggttgtggggaccataactgatgatgtgcgggttcaggaggtacccaaactgaaggtatgtgcactgcgcgtgaccagccgggcccgcagccgcatcctcagggcagggggcaagatcctcactttcgaccagctggccctggactcccctaagggctgtggcactgtcctgctctccggtcctcgcaagggccgagaggtgtaccggcatttcggcaaggccccaggaaccccgcacagccacaccaaaccctacgtccgctccaagggccggaagttcgagcgtgccagaggccgacgggccagccgaggctacaaaaactaaccctggatcctactctcttattaaaaagatttttgctgacaaaaaaaaaaaaaa

SEQ ID NO: 24064 - DNA, 270 bp, Homo sapiens
gaagcatcatggctggcagcctcacaggattgcttctacttcaggcagtgtcgtgggcatcaggtgcccgcccctgcatccctaaaagcttcggctacagctcggtggtgtgtgtctgcaatgccacatactgtgactcctttgaccccccgacctttcctgcccttggtaccttcagccgctatgagagtacacgcagtgggcgacggatggagctgagtatggggcccatccagggttaatcacacgggcacaggcctgctactgaca

SEQ ID NO: 24065 - DNA, 352 bp, Homo sapiens
atttttacagaccagtctgaagcttctgactgtattcacattgctcttttgaagcagccctgctcctctcaaaattgatcagaatctgagcttcaacctacaggcagtgagatcaacagcccgtctggactctgcttttgaacggttttcaggaagtgtgatttctgaatgggtactgcacttcacagatttgtttgaattgcccatgcagctctatgtttgttaaagtgcattcttctttaaaaaataagaggaataatctttactctttaaccaaggtacttaaaaaaatgaactttttggtctctcagcagatattcccaaattgatcctatcactacaaattttagtg

SEQ ID NO: 24066 - DNA, 348 bp, Homo sapiens
gcggcacgagcaggcacctgccaccatgcccggctgattttgtatttgtagtagagacggggtttcaccatgttggtcagtcaggctggtctcaaactcctgacctcaggtgatccgcctgcctcggcctcccaaagcgctgggattacaggcgtgagcaaccgcactcggctaagactttttagatgtgtccctacaaatcagtatatttaagaaactgtgcctggctctttctttctatttcacattgttcctaatacaatttggggggtgggaggaaaggaatttttgtcctcaagcctaattttccacttgaggaagctacctctctttagatgactccatcaa

SEQ ID NO: 24067 - DNA, 631 bp, Homo sapiens
ggcgcgggggtggcgcgtcagttgcttcagcgtcccggtgtggctgtgccgttggtcctgtgcggtcacttagccaagatgcctgaggaaacccagacccaagaccaaccgatggaggaggaggaggttgagacgttcgcctttcaggcagaaattgcccagttgatgtcattgatcatcaatactttctactcgaacaaagagatctttctgagagagctcatttcaaattcatcagatgcattggacaaaatccggtatgaaagcttgacagatcccagtaaattagactctgggaaagagctgcatattaaccttataccgaacaaacaagatcgaactctcactattgtggatactggaattggaatgaccaaggctgacttgatcaataaccttggtactatcgccaagtctgggaccaaagcgttcatggaagctttgcaggctggtgcagacatctccatgattgggcagtttggtgttggcttttattctgcctacttggtggcagagaaagtggttgtgatcacaaagcacaacgatgatgaaccagtatgcttgggagtcttctgctggaggttccttcactgtgcgtgctgaccatggtgagcccattggcaggggtacc

SEQ ID NO: 24068 - DNA, 509 bp, Homo sapiens
atttggaaatccgttatgactgattacgaatttaatacgactcactatagggaatttggccctcgaggccaagaattcggcacgagcagagatggaacctccaatgagcctagtcatgaaggacagaaaaagcagaggactataccatggagatcaaagtcacctgagattctgtcttctacaaaggcaggctgtacaggagaggaacagtggaggggcaggccatggaaaacagaaccacctggctagaccctaggaagccaggagaggatcaggttccaaaggggaatgctatgaaagggcagtgagacaagacctcatcctacctccctgaccagctctggcttctgctcctgcccctggccattggtgactagtggggccaagagaagctggagcagagagctggcatgagtatagggaaggaggaaggacacattttcaatcctctgcctgtagctcaatccaaatttgtggataaggggccgggtgcagtggctcacacctgt

SEQ ID NO: 24069 - DNA, 632 bp, Homo sapiens
aattgaaatttaaaatcatttcatgttagtcttaccgaataaggtaccaagatcacaaatagtgttgatcagatcttacaagtttatgtggcacacaatcctataaatgtgatttttttatataagttaaagagacaaatagtaggctaaaaacattttaaaatcaacttttgaaatttaaaaatctttcagaatacaattcagttttagtttcaaaatgttaacaacttgaattacaaccggttatcagttggacagtaagattttatccctttctcttctgactggtatacctatttcattagtagctaggtgcacatctacatctagcacagctgtgaggacagacagaaggcaaagtttccatgtggccttgagcaagtcccatctcacctctaggcctcagtgtcctcatctataaaatgagggacttccctagaagtcttcatggtctcttccagcccagacatcctgtgatgtcatgaaagcacctgccctctgtttcccctcagaacaccctgtaccatccatggagcacgaggccttcagaaaagacacttcaatgggagtgaacatttctaactaaggacaggatggctgtgtgtggtggtcaccaggtcctgtgagcaaag

SEQ ID NO: 24070 - DNA, 431 bp, Homo sapiens
gaaagatggacatttgggtcttcagtcggtgttgaaactacacatagtaagtctgagaagtcctcatttgccacactctgaggcccttcctgagatgtggttgttctttggctgcatctcttttcaagagttgggcaatgatagtagctggtgcttactgagccctggggacttgcccagccctgtgttaagtgttttctccacccgacatcttctaagggttgtcctagtgcattcattaaactactgaggtcaaggaaagcgttaactagacaaggcttctttctgccctatgatattggtagaaatggtagggcatgcctaatctccttatgttattatcctcttgagaaacaaacatttgtcagagtcctttcatgtgttttattttcacagtgcatagacttgggttggcagcaggatatggtgga

SEQ ID NO: 24071 - DNA, 1679 bp, Homo sapiens
cccacgcgtccgcccacgcgtccgctcgactcttagcttgtcggggacggtaaccgggacccggtgtctgctcctgtcgccttcgcctcctaatccctagccactatgcgtgagtgcatctccatccacgttggccaggctggtgtccagattgggcaatgcctgctgggagctctactgcctggaacacggcatccagcccgatggccagatgccaagtgacaagaccattgggggaggagatgactccttcaacaccttcttcagtgagacgggcgctgggcaagcacgtgccccgggctgtgtttgtagacttggaacccacagtcattgatgaagttcgcactggcacctaccgccagctcttccaccctgagcagctcatcacaggcaaggaagatgctgccaataactatgcccgagggcactacaccattggcaaggagatcattgaccttgtgttggaccgaattcgcaagctggctgaccagtgcaccggtcttcagggcttcttggttttccacagctttggtgggggaactggttctgggttcacctccctgctcatggaacgtctctcagttgattatggcaagaaatccaagctggagttctccatttacccggcaccccaggtttccacagctgtagttgagccctacaactccatcctcaccacccacaccaccctggagcactctgattgtgccttcatggtagacaatgaggccatctatgacatctgtcgtagaaacctcgatatcgagcgcccaacctacactaaccttaaccgccttattagccagattgtgtcctccatcactgcttccctgagatttgatggagccctgaatgttgacctgacagaattccagaccaacctggtgccctacccccgcatccacttccctctggccacatatgcccctgtcatctctgctgagaaagcctaccatgaacagctttctgtagcagagatcaccaatgcttgctttgagccagccaaccagatggtgaaatgtgaccctcgccatggtaaatacatggcttgctgcctgttgtaccgtggtgacgtggttcccaaagatgtcaatgctgccattgccaccatcaaaaccaagcgcagcatccagtttgtggattggtgccccactggcttcaaggttggcatcaactaccagcctcccactgtggtgcctggtggagacctggccaaggtacagagagctgtgtgcatgctgagcaacaccacagccattgctgaggcctgggctcgcctggaccacaagtttgacctgatgtatgccaagccgtgcctttgttcactggtacgtgggtgaggggatggaggaaggcgagttttcagaggcccgtgaagatatggctgcccttgagaaggattatgaggaggttggtgtggattctgttgaaggagagggtgaggaagaaggagaggaatactaaagttaaaacgtcacaaaggtgctgcttttacagggaagcttattctgttttaaacattgaaaagttgtggtctgatcagttaatttgtatgtagcagtgtatgctctcatatacaattactgacctatgctctaaaacatgaatgctttgttacagacccaagctgtccatttctgtgatgggttttgaataaagtattccctgtcttaaaaaaa

SEQ ID NO: 24072 - DNA, 471 bp, Homo sapiens
  misc_feature (1)...(471): n = a,t,c or g
nccacagctatgacatgattacgaatttaatacgactcactatagggaatttggccctcgaggccaagaattcggcacgagcgccaacaacctggtgtatgacacctcggacagcgatgactatcacctcctaaaggacctagaggaaggcatccaaacgctgatggggaggctggaagacggcagccgccggactgggcagatcctcaagcagacctacagcaagtttgacacaaactcgcacaaccatgacgcactgctcaagaactacgggctgctctactgcttcaggaaggacatggacaaggtcgagacattcctgcgcatggtgcagtgccgctctgtggagggcagctgtggcttctaggtgcccgagtagcatcctgtgacccctccccagtgcctctcctggcctgaaggtgccactccagtgcccaccaccttgcctaataanattaagntggatcatta

SEQ ID NO: 24073 - DNA, 380 bp, Homo sapiens
gctggaagttactggcacatgatcaacatggaatgacacatgggtttgttataattttatctttttcccctgtagtgggccctatagtgccacctcaaaattcatatccactcagagcctgggaatgtgaccttattcagaaatatggtctttgcaggtcgggcgcgatggcttatgcctataatcccagcactttgggaagctgaggcgggcggatcacctgaggtcaggagttcaagaacagcctggccaacatggcaaaaccccgtctctactaaaaatacaaaaattagcttggtgtgttggcacacgcctgacatcccagctacttgggaggctgaggcaggacaatcgcttgaacccaggagacagaggttgca

SEQ ID NO: 24074 - DNA, 449 bp, Homo sapiens
  misc_feature (1)...(449): n = a,t,c or g
ggtgctcagaacgcttgcattagcctgcaggtgggcaaaattatctaacacacagcccacttcatagtgaagttttgactcatgtaatctattgagtctgtactgaaagtggaaaacagaatggttgtatgggcgctcgaagcagttccttctgaatgcatgttgcttttgcactgttgtaaagtcgaaaaatcgtcaactccagccatcttcagtcagggaccatctgtacttactatttttaagctggttgcctgtagcattcctcagccacggattctgatttgaaccccagggcacagagaatcatttgagtgatggttttctcaatttccctgaagaaaatgtgattagagacacaggaggagtcaagttcttcatcgtagaagagcttctgtaggacgctaggactttgcgccctctatgagccccccatttaaganaacaac

SEQ ID NO: 24075 - DNA, 350 bp, Homo sapiens
caaatattttttccctgtttggtggattttcttttcacatccttgatgttggcaaactcagattttcattttcacttttctgggttttgaaagtactccagatgggcatagcctattgaattcagcaaactgctgaatactgccatgcatgaacctggaacatatgctgtcctttgaatactgattccagatttttaatacatctttaataggctctaacttattattacttctgaaacttatacttacattataaaaaaaatgcttttgagtattttgtccccttataattttgttgaaggaagagtggccatcttttttgccccataattgcaaaacatttttatttt

SEQ ID NO: 24076 - DNA, 430 bp, Homo sapiens
  misc_feature (1)...(430): n = a,t,c or g
gtttgnaaggggatgatgtatataactatctattcgatgatgaagataccccaccaaacccaaaaaaagagatctctcgaggatccgaattccagatctatgaatcgtagatactgaaaaaccccgcaagttcacttcaactgtgcatcgtgcaccatctgaatttctttcatttatacatcgttttgccttattttatgtaactatactcctctaagtttcaatcttggccatgtaacctctgatctatagaattttttaaatgactagaattaatgcccatcttttttttggacctaaattcttcatgaaaatatattacgagggcttattcagaagctttggacttnttngccnnnggntgnttagacaangacagagtccannaccaggcacaggacaggccctgaatgaagagattacttccctt

SEQ ID NO: 24077 - DNA, 421 bp, Homo sapiens
  misc_feature (1)...(421): n = a,t,c or g
ttganaacngttatgacacngattacgaatttaataccgactcactatagggaatttggccctcgaggccaagaattcggcacgagactggaagacggcagccgccggactgggcagatcctcaagcagacctacagcaagtttgacacaaactcacacaaccatgacgcactgctcaagaactacgggctgctctactgcttcaggaaggacatggacaaggtcgagacattcctgcgcatggtgcagtgccgctctgtagagggtagctgtggcttctaggtgcccgcgtggcatcctgtgaccgacccctccccagtgcctctcctggcctggaaggtgccactccagtgcccatcaaccttgcctaataaaattaagttgnatcatttaaaaaaaaanaanaantnnnnnnaaaaat

SEQ ID NO: 24078 - DNA, 515 bp, Homo sapiens
  misc_feature (1)...(515): n = a,t,c or g
accagctatgacatgattacgaatttaatacgactcactatagggaatttggccctcgaggccaagaattcggcacgagacaggttcagaggaggagagaccaaaggggtaatgaagcttgtcttgttttgttttctgttcagaaacaagttgcagagagcactcttctgggcataaggcatgaggcgacctggactccaggcctagttgttaaaatcctttaaacaaaagaaagttcctggccaaaggcctccttccaggccctgctctttggatagccctatgccttcttggtagccaggctggagtgcagtggtgcagtctcagctcactgcaacctcctcctcccgggttgaagcaattctcctgcctcagccgccctagtagctgggattgcaggcatgtgccaccacacctggctaatttttgtatttttaagtagagatggggtttcgccatgttgggcaggctgatctcaaactcctgactcaggtgatccacccacctnggccacc

SEQ ID NO: 24079 - DNA, 282 bp, Homo sapiens
gtgcccgcctcggcctcccaaagtgctgggattacaggcgtgagccaccacgcctggccaataactcaataaccacatggccgtaagtgttcatagaggtagctggagatggctggaggcctggcaggagcaaagtaataagggcttgggcattatgctaaaaagtttgaattttgttttgaaggctcttgagagacactggaagattttagggatggggtgatataacctgtgacagctgactttttgtttcttttctctttcctcatctttttttttttt

SEQ ID NO: 24080 - DNA, 350 bp, Homo sapiens
gtacaggcatgagccaccacgcctggctgagtcagggggctctatgaaatagactgagtaagagatgatggcaaggacctggaattaaaaggaaaggtttgaactgaataagtatttgaaatgtaatatttggaagggaagtgattagtgacgttgactcaaggataagagaggctccaagatggagtggactccatctaggccatgttgcctggaaaagctggaagaggcccctgtagagtgagcagtgattgagaggcaggccatggggactgagcaggggcggggccagagtgtttgggaagcatgtctgtcagcagagggttcttagggagaattggactggggag

SEQ ID NO: 24081 - DNA, 443 bp, Homo sapiens
gctgcccaggatccaggcgggggaccctgtggcgcgctactttgggataaagcgtgggcaggtggtgaagatcatccggcccagtgagacggctggcaggtacatcacctaccggctggtgcagtagctaccgcctgacagcccctagaggcggacacacagcgacccccatccctgcaggacaaacgcccctgccctgccagaatccggcccccacagctctcacggctgctgctcctctggactccccaaggcaggtggcctccacccacgttctcccgtcctggggtgaggcttcctgtggcccagcccgcgtggatttgtgcgagatgcagcctcagaaggaacaaggcccccagagggaggtcacctgggggcaactggtgccgggtcttacccagaccacgctgggtcccctctgttggggggttggggtccgggtc

SEQ ID NO: 24082 - DNA, 410 bp, Homo sapiens
ggagagcaccatgagcttcaataccctgtctctactaaaaatataaaaagttagccaggcgtggtggcgggagcctgtaatcccagctacttggcaggctgaggcaggagaatcacttgaacccgggaggtggaggttgcagtgagccgagatcacgtcattgcaccccagcctgggtgacagaatgggactccctctcaaaaaataaataaataaataaataaataaataaataaataaataaataaaattaatttaaatattctcatactactggaatgttcaaagtggtagtgtatgaacattctctgtttccttaatcttaacagaaattacagatcttaaagtccttcaacactgaccacaacagttcattacctctacactcttctctgacccataaaatatgc

SEQ ID NO: 24083 - DNA, 323 bp, Homo sapiens
agaaaatgcagttttcaaaaacagactcagcattcagcctccaatgaataagacatcttccaagcatataaacaattgctttggtttccttttgaaaaagcatctacttgcttcagttgggaaggtgcccattccactctgcctttgtcacagagcagggtgctattgtgaggccatctctgagcagtggactcaaaagcattttcaggcatgtcagagaagggaggactcactagaattagcaaacaaaaccaccctgacatcctccttcaggaacacggggagcagaggccaaagcactaaggggagggcgcatacccgag

SEQ ID NO: 24084 - DNA, 356 bp, Homo sapiens
gatgagagacagttgaggggttctagggaagatgatcccggaaaaggactgcaggcccatggaaacgcagtgtgcttctccaatatttggagggctgatcagtgaaagaaggatcagaccctttttcttatgcagcagagaacagaactaggactaataagtgaaaggtaaagggaggctgctttcaagtcacagcaagaaagaattttgtccacaaatgaggatgcacaaatatagcataggctcccccaggaatcactgagtttcctctgtgtaggtgaacagtttgagtagaatcggagtatcggagaggaaattaaagggtctggtaagagtttgaggccgggcgcggtggt

SEQ ID NO: 24085 - DNA, 521 bp, Homo sapiens
cctaaagctttgacatgattacgaatttaatacgactcactatagggaatttggccctcgaggccaagaattcggcacgagcagcacaaggaatgcggtaggagagcagggtgataataaggagaaggtcagcaaaaaaacatgtgagcaaaggaatctatgtcataattaagttcaaagggaggtactatgcctggatgtgcacgtaggccagatttatgtttccctccgcccaaacatctgtggagtaaagaataacaaggcagcattgctgccaacatgtctcgcctcccgccatagggtggtttttctcctatctcagaattgaacaaatgtacaatcgggcccttcctctatctcaactgcaaagaggctttcctcttttactaatccacctcagcacagaccctttatgggtgtcgggctggggcacagtcaggtctttctcatcccacgaggccatatttcagactatcacatggggagaaaccttggacaataccccactttcaagggcagag

SEQ ID NO: 24086 - DNA, 355 bp, Homo sapiens
ggagactgtacagcaattggcgggtgaggaagatcctgtaatttttcctagggagcccccttagccatcccataataaccctgtttctcggcgcccttttttctctttcggtcaggaattcccgggttctgtgcctcacccttttcgttgctcccgaatcattcaccggaggcggccacgaacgctgccccttaacagggaatcccccgcattcaccctgtcctgcggccatcaccatcttccccgcgtgccagccttggtcatgcatagcagcacctctcgcagtctcttcccgccctagaagaggcaacatccttccctcctactccgtggtcacgtcttgctgcctcccctg

SEQ ID NO: 24087 - DNA, 591 bp, Homo sapiens
  misc_feature (1)...(591): n = a,t,c or g
caacatgatctatcacagggaacccggtttctgaggttaagaacctggtatgagttcgggtctaatagctttttagttccggtcctttaaaacgtcgggaccacagccgcgagttattgagttctatttagcgcgcagcgcccgaaaccaaccgctttaaggttaaatagtcagcaaacgacagagttagaacccgaatccaggtcgccctagaatttagctctcaaaccctccaaaaggttaccccctctctagttctaccctcgtacgccgaaacatcccgtaccccgaagcccaccccagggagacccgacccctcctttcaccttaccacgcaacaaccactccgggcaggataccatccctcggagcttctgacccctctacccccaagacgggaacatagcccagagctccccccccacccccagaaaaaccgatccacccccaaacggataaaccacgcccacggcgaacaatcccggcacacgcgcataccacggaacggtcaaactacgtcaaccaaccaagtgggtgtaagtccacctttcccacgagggncaaccccantccggnatcgggtgttgccca

SEQ ID NO: 24088 - DNA, 540 bp, Homo sapiens
  misc_feature (1)...(540): n = a,t,c or g
ttgacaacccttgacatgattacgaatttaatacgactcactatagggaatttggccctcgaggccaagaattcggcacgagatttagatctagagtttttgctaggggaaaatataacatgaaaaaatgatcacaataatcttaactaataacatacaaaatacaaatatataattatacacagcatagctataaaaagtttatcaaaatgttaacagaggttattttgtgagattgagtaatttttattggctttataatatctcccatccaagtactaaccagaccctgctagcttccgagatcagacgagatggggcgcgttcagggtggtatggccatagacagctttataatatctatactttntccattttctaatttagcactgattttatataacatgggacttttanacatgtacccatagtagcttaatttgcttataatcctnttacttgtgaaatcctggaagaaaannctgnaaaaattcagaaccacagatttttngggacnngtngtnntgangtttttccaag

SEQ ID NO: 24089 - DNA, 344 bp, Homo sapiens
gtgctcctggcagagtaatattccacagctgggatagagcacagtttgtttattcattcctctctcgatggagacttgggttgttcccacctttggcctcggtgaatggtgatgctgtgatcatgggtgtgcctgtgtttgtctgaacacctgctttcagttgtttggggcgttacccaggagaggggttgctaggtcctgtggcacctctgtaacttgctggggaacttccccactgatgcttgaaagtcatttggtatcaccaggtctctggggtgtttcatttgtccccagaagctctgcctaagctgcactgggagtgggctgatctgtgtgaccctacc

SEQ ID NO: 24090 - DNA, 502 bp, Homo sapiens
gggacgaagcagctggcaacctcaagaaggccctgctcatccagggctccaatgacgtggagatccgggcagagggcaatagcaggttcacgtacactgccctgaaggatggctgcacgaaacataccggtaagtggggcaagactgttatcgagtaccggtcacagaagacctcacgcctccccatcattgacattgcacccatggacataggagggcccgagcaggaattcggtgtggacatagggccggtctgcttcttgtaaaaacctgaacccagaaacaacacaatccgttgcaaacccaaaggacccaagtactttccaatctcagtcactctaggactctgcactgaatggctgacctgacctgatgtccattcatcccaccctctcacagttcggacttttctcccctctctttctaagagacctgaactgggcagactgcaaaataaaatctccggtgttccaattatttagtgtcctcctggtaagacctt

SEQ ID NO: 24091 - DNA, 284 bp, Homo sapiens
aacaattgccttttcctttgatttattctttccaatatgaaaatagagaataaggataattatgtctataaaaatctttgtatatttattactggatttgtagtatgtgatgcagaaaaattgagggtgcacatcaaggcacattattattatacaaatcctatgaagtagatttgttgtatgttttatttaatcccatttattgtgggtcaagtagtgaccagtagcaatgtagaacgagaaatatttagaataacctctacattgcacttcagtgaaataat

SEQ ID NO: 24092 - DNA, 469 bp, Homo sapiens
  misc_feature (1)...(469): n = a,t,c or g
tnnntttgtnncncncnnnatactcttntgacatgacacgaatttaatacgactcactatagggaatttggccctcgaggccaagaattcggcacgaggtgatgcacctgctccagaatgctgaccccctgaaggtgtacccgccactgaaggggagcttcccggagaacctgagacaccttaagaacaccatggagaccatagactggaaggtctttgagagctggatgcaccattggctcctgtttgaaatgagcaggcactccttggagcaaaagcccactgacgctccaccgaaagagtcactggaactggaggacccgtcttctgggctgggtgtgaccaagcaggatctgggcccagtccccatgtgagagcagcagaggcggtcttcaacatcctgccagccccacacagctacagctttcttgctcccttcagtccccagcccctcccccatctcccaccc

SEQ ID NO: 24093 - DNA, 665 bp, Homo sapiens
taaaaagcaaaaggagcatttataattatctcatttgttaaggctgagaaggttgtttttataataggtaattatattgaatgcattttcactgaatatggtatgtatgctaaattatatgaacctttccccaagaagggccctagaaattgatgtggctttcctcttaaatattaattattagtcctgaaagaaagataacatatgtgatttttgtggttaggagagttgctgtcatgattgttttttcttcagcctcctctgacttttcttttggggcttcagattttatgattacatcttgccccctagaacatcccccttcctcccatactgcttttaaacagatgcccaagaaggcaagcaggaatgcctcttgtgggggagggcagggagaaataactagttcaaaccaactatctatctatgctttgcaaagactaaggcgtattataggaagagggctagaaacctaactgattcttctcagttttctcattttaaaacagcccagtattcctttgtatcctcaagggtccttgagaatacttctgttattgagaccctgtgggctacttgtactgtacctcctctcaagccaagaagggctgtgggataatttaccatgaatccttagtagcaatgacagcagagttaaaaaataa

SEQ ID NO: 24094 - DNA, 432 bp, Homo sapiens
ggcttgggaaaggtggtgtttctgtaagaaacctactgcccaggcactgcaaaccgccacctccctatactgcttggagctgagcaaatcaccacaaactgtaatacaatgatcctgtattcagacagatgaggctttccatgggaccacaactattttcagatgtgaaccattaaccagatctagtcaatcaagtctgtttactgcaaggttcaacttattaacaattaggcagactctttatgcttgcaaaaactacaaccaatggaatgtgatgttcatgggtatagttcatgtctgctatcattattcgtagatattggacaaagaaccttctctatggggcatcctctttttccaacttggctgcaggaatctttaaaagatgcttttaacagagtctgaacctatttcttaaacacttgcacctac

SEQ ID NO: 24095 - DNA, 381 bp, Homo sapiens
gctttgggaagctgaggcaggcagatcacttgaggtcaggagttcgagaccagcctggccaacatggtgaaaccccatctctactaaaaatacaaaaattagctgggcttgatggtgcacacctataatcccagctacatgggaggctgaggcaggagaatcacttgaacctgggaggtggaggttgcagtgagccaagatgcattgctgtactccagcctgggtgacagagcaagactccatctcaataaataaataaataataaataacacactgagacattaatgttagttgaaaaatcctagtaaatactatatgacccagcattccactcctaagtgtatatccaaaagaattaaaaacaagaacctgaagatact

SEQ ID NO: 24096 - DNA, 450 bp, Homo sapiens
  misc_feature (1)...(450): n = a,t,c or g
anaccgntatgacatgattacgaatttaatacgactcactatagggaatttggccctcgaggccaagaattcggcacgaggaaggggagcttcccggagaacctgagacaccttaagaacaccatggagaccatagactggaaggtctttgagagctggatgcaccattggctcctgtttgaaatgagcaggcactccttggagcaaaagcccactgacgctccaccgaaagagtcactggaactggaggacccgtcttctgggctgggtgtgaccaagcaggatctgggcccagtccccatgtgagagcagcagaggcggtcttcaacatcctgccagccccacacagctacagctttcttgctcccttcagcccccagcccctcccccatctcccaccctgtacctcatcccatgagaccctggtgcctggctctttcgtcacccttg

SEQ ID NO: 24097 - DNA, 430 bp, Homo sapiens
ggcgaccgtgtgggatgaggccgagcaagatggaattggggaggaggtgctcaagatgtccacggaggagatcatccagcgcacacggctgctggacagtgagatcaagatcatgaagagtgaagtgttgagagtcacccatgagctccaagccatgaaggacaagataaaagagaacagtgagaaaatcaaagtgaacaagaccctgccgtaccttgtctccaacgtcatcgagctcctggatgttgatcctaatgaccaagaggaggatggtgccaatattgacctggactcccagaggaagggcaagtgtgctgtgatcaaaacctctacacgacagacgtacttccttcctgtgattgggttggtggatgctgaaaagctaaagccaggagacctgggtgggtgtgaacaaagactcctatctgat

SEQ ID NO: 24098 - DNA, 80 bp, Homo sapiens
gcaagactgaatgagtggtcctctgcatggacaccactcactcctgaggctgctggcagcatgtaccctcatcctgcctc

SEQ ID NO: 24099 - DNA, 356 bp, Homo sapiens
gaaaaaggcaaccaagcactatgagatgcttgctaatcgaacagctgcaaatggtcactgcattgatatttatgcttgtgcccttgatcaaactggacttttggagatgaagtgttgtgcaaatcttactggaggctacatggtaatgggagattctttcaacacttctctcttcaagcagacattccaaagaatctttactaaagattttaatggagatttccgaatggcatttggtgctactttggacgtaaagacctctcgggaactgaagattgcaggagcccattggtccatgcgtatctctgaatgtgaaaggaccgtgtgtgtcagaaaatgaagcttggtgttggtgc

SEQ ID NO: 24100 - DNA, 410 bp, Homo sapiens
gctattacatgattacgaatttaataccgactcactatagggaatttggccctcgaggccaagaattcggcacgaggagagctggatgcaccattggctcctgtttgaaatgagcaggcactccttggagcaaaagcccactgacgctccaccgaaagagtcactggaactggaggacccgtcttctgggctgggtgtgaccaagcaggatctgggcccagtccccatgtgagagcagcagaggcggtcttcaacatcctgccagccccacacagctacagctttcttgctcccttcagcccccagcccctcccccatctcccaccctgtacctcatcccatgagaccctggtgcctggctctttcgtcacccttggacaagacaaaccaagtcggaacaagcagataca

SEQ ID NO: 24101 - DNA, 393 bp, Homo sapiens
ggaagaggatgaggatgacgaggacgaggatgaagaagaggaagatgatgagaatggggactcctctgaagatggcggcgactcctctgagtccagcagcgaggacgagagcgaggatggggatgagaatgaagaggatgacgaggacgaagacgacgacgaggatgacgatgaggatgaagataatgagtccgagggcagcagctccagctcctcctcctcaggggactcctcagactctgactccaactgaggctcagccccaccccagggcagccagggagagcccaggagctcccctccccaactgaccacctttgtttctcccccatgttctgtcccttgcccccctggcctcccccactttctttctttctttaaaaaaaaaaaaaa

SEQ ID NO: 24102 - DNA, 341 bp, Homo sapiens
ggagcttcaatccctgtttcttacacccccaactgcattatatgtcagcaggttttactgatttaacctcctaagtatctcttgaaactgaaactcttcttccatcaccaacctccttgaccaagctattgtcaagactaaacaacaatgctccaacggagaccacttttatctccctctcctccaccccctacctctaaataaaacccttggatggcttcttattgcttttatattaataatattactcagcatggtctggaagccccctgtatggtcaagtccaaccttcttttccatcttgtactacgatccctcttcttttatgctctaagccaagc

SEQ ID NO: 24103 - DNA, 430 bp, Homo sapiens
  misc_feature (1)...(430): n = a,t,c or g
ggggatgatgtatataactatctattcgatgatgaagataccccaccaaacccaaaaaaagagatctctcgaggatccgaattccagatctatgaatcgtagatactgaaaaaccccgcaagttcacttcaactgtgcatcgtgcaccatctcaatttctttcatttatacatcgttttgccttcttttatgtaactatactcctctaagtttcaatcttggccatgtaacctctgatctatagaattttttaaatgactagaattaatgcccatcttttttttggacctaaattcttcatgaaaatatattacgagggcttattcagaagctttggacttcttcgccagaggtttgnntncatgcnttgtacagnttgagnggnnttcttagnantnattcctatttttattcactgngctntggatcc

SEQ ID NO: 24104 - DNA, 752 bp, Homo sapiens
aacagctatgacatgattacgaatttaatacgactcactatagggaatttggccctcgaggccaagaattcggcacgaggctcatgcctataatcccagcactttgggaggccaaggcaggcagatcacctgaggtcaggagttggagaccagactggccaacatgacgaaatgctctcgctactaaaaatagaaaaattagccaggcgtggtggcacacccctgtagtcctagctactcgggaggctgagacaggaaaattgcatgaacctgggaggcagaggttgcagtgagcagagattacaccactgcaacgagactcgggcccagacgagatctgcctgggcgacacagtgagactctgtctcaaaataaataaataagtaaatagaacctcctgagctaccctggcttataaggattcagattactttaggaaattaggcattagcactaggaggggggaagatggctggcaaaacttctagctagcaacctatgtctagcacatgggtaactaaccatagcgagatcctgaacacatatcctctaggtgcaggtggagggaacgatgtccaatacctgaagcagaatctcacatggacggaacgtctgtatttccctctcctgcacgaatcactcatcattcttggagggcttctctgcattcctccttttcttctctcccctcccctgccttttgtcttttctaaagagtctgaactccgatttccatgctctcctgctacatt

SEQ ID NO: 24105 - DNA, 474 bp, Homo sapiens
ggccctcgaggccaagaattcggcacgagcctttccacgctggcagaggaatcagctctagccctgatgcctgcactgttgccaaagggctccatctctgttcagtcttgagcatcagcctaacttaccagttaccaagccctgaaaagagggaatggatgtgcatcccacctcaaggaggaggtgagaggaagaaaacagactattctgccacttgagtatatacattctgtagaaaagtcagaggggcactttctaagactggaccacacatccatggaccttgttgagtctgcgaaaatgatacaccaagataaaggttgcagaagaaaagttttctctgaccttcccctgcctccaatctctggctgctcattctcccccaggatagtcacagaaactagaatccctcttccccaaggcaggtcatagaaaccagaaccccttttcccaaagcaagccataaagcctaaa

SEQ ID NO: 24106 - DNA, 352 bp, Homo sapiens
gaaaacgagaagaagaagaagtgttagaccaggatttccacatggaagaggcactggattggcctggagtatacttgttaccaggccaggtttctggggtggctctagaccctaagaataacctggtgattttccacagaggtgaccatgtctgggatggaaactcgtttgacagcaagtttgtttaccagcaaataggactcggaccaattgaagaagacactattcttgtcatagatccaaataatgctgcagtactccagtccagtggaaaaaatctgttttacttgccacatggcttgagtatagataaagatgggaattattgggtcacagacgtggctctccatca

SEQ ID NO: 24107 - DNA, 777 bp, Homo sapiens
acatcattacgaatttaatacgactcactatagggaatttggccctcgaggccaagaattcggcacgagctgcagctggagaacctgcgcatgaagcttcccaagcctcccaagcctgtgagcaagatgcgcatggccaccccgctgctgatgcaggcgctgcccatgggagccctgccccaggggcccatgcagaatgccaccaagtatggcaacatgacagaggaccatgtgatgcacctgctccagaatgctgaccccctgaaggtgtacccgccactgaaggggagcttcccggagaacctgagacaccttaagaacaccatggagaccatagactggaaggtctttgagagctggatgcaccattggctcctgtttgaaatgagcaggcactccttggagcaaaagcccactgacgctccaccgaaagagtcactggaactggaggacccgtcttctgggctgggtgtgaccaagcaggatctgggcccagtccccatgtgagagcagcagaggcggtcttcaacatcctgccagccccacacagctacagctttcttgctcccttcagcccccagcccctcccccatctcccaccctgtacctcatcccatgagaccctggtgcctggctctttcgtcacccttggacaagacaaaccaagtcggaacagcagataacaatgcagcaaggccctgctgcccaatctccatctgtcaacaggggcgtgaggtcccaggaagtggccaaaagctagacagatccccgttcctg

SEQ ID NO: 24108 - DNA, 441 bp, Homo sapiens
  misc_feature (1)...(441): n = a,t,c or g
gagatggagtctcgctccattgcccaggctggagtgcagtggcatgatctcggctcactgcaacctccgcctcccaggttccagcgattctcctgcctcagtccctggagtagctgagactacaggcatgcgccatcaggctcggctaatttttgtattttcagtagagatggggtttcgccatgttggccaggctggtctcaaactcctgacctcaggtgatccatccacctcagcctcccaaagtgctgggattactggaatgagccacaacgcctggcccacgaagttatttctaataataacatgccatcaccatgctgagggatataatctcatttgaacaacaccactaggtgacaaggtatacacacaaattgctccactgcagatgaagaaataggaaggtgacacctggatcnggaaggttccagaacccct

SEQ ID NO: 24109 - DNA, 330 bp, Homo sapiens
  misc_feature (1)...(330): n = a,t,c or g
ggtggtcagagagaggaaggggcactcagagatccagcaggtgctgcaccatgagtgtctctgtcctgagccccagcagacgcctgggtggagtctccgggatcctccaagtgacctccctgctcattctgcttctgctgctgatcaaggcagctcagctctacctgcataggcagtggctgctcaaagccctccagcagttcccgtgccctccctcccactggctcttcgggcacatccaggagttccaacacgaccaggagctacaacggattcaggaacgggtgaagacattcccaagtgcctgtccttattggatatntgnggggg

SEQ ID NO: 24110 - DNA, 325 bp, Homo sapiens
gtgcagttttccaggaataggcatttgcctaattcctggcatgacactctagtgacttcctggtgaggcccagcctgtcctggtacagcagggtcttgctgtaactcagacattccaagggtatgggaagccatattcacacctcacgctctggacatgatttagggaagcagggacaccccctgccccccacctttgggatcagcctccgccattccaagtcaacactcttcttgagcagaccgtgatttggaagagaggcacctgctggaaaccacacttcttgaaacagcctgggtgacggtcctttaggcagcctgccgcc

SEQ ID NO: 24111 - DNA, 767 bp, Homo sapiens
accgtttgactgattacgaatttaatacgactcactatagggaatttggccctcgaggccaagaattcggcacgagctaatgaagaaaatagctcgttaaccagctagtataaaaagagccaccaaaacaaatcaatcacccgccttaaatcagccgagtactcccatcttgagcggagaagcccattctgaatcacattcaagacattgatggaaaaacagctctctctgggtatcaaaaccacgctcaccccaaatcctcctccccagagttctcctcattgctcacccactgaacccagaacaaaccagaagtgcttgaaatgaggacgggtagctccatgtaccaatcggaatttaaaactgtcaattcctgctgtagaaatgaggcttctccccaggaccagcattccacgcaggcaactcttttctagatggagaaaacagaacctgaagacacccgtttccctaaactgctcttgctcatgtgtaagtgcaaatgaaaaatgctgaggctgattctgttggcattgctttttaattacaaccatcaataaatcattttatccctgaacaagacttgagaatgacccgaaggcagaggcacaactccttaggaattaggccaacagagaatgggctatctctcttcccaccccttctcttactctgctgtcagaaacagaaaccttctctgtgagtagctgggagcaggaggccgcacttgaattccatctgggggttctgttgacacagttttaccccag

SEQ ID NO: 24112 - DNA, 366 bp, Homo sapiens
gctttgtaataaaattgtttttctggtgagttttgttggaaatcgtggcacgttcacccgtgggtacccgagcagtcatcctggatatggcctttctctatcacgtggcgtatgtcctggtttgcatgctgggcctttttgtccatgaattcttctatagcttcctgctttttgatttggtgtacagggaagagactttgctgaatgtcataaaaagtgtcacacgaaatggccgctctattattctaactgcagtcctggctctcatcctcgtctacctgttttccattattgggttcctttttttgaaggatgacttcactatggaagttgataggctgaaaaaccgaactcctgttacaggca

SEQ ID NO: 24113 - DNA, 356 bp, Homo sapiens
ctcagggtccacggccaccatggcgtattaggggcagcagtgcctgcggcagcattggcctttgcagcggcggcagcagcaccaggctctgcagcggcaacccccagcggcttaagccatggcgctctaaaagagagggcggattccctggccaaggagatccagtacctgaaagatttgatagaagaggtccgcaaggcaagggggaagaaaagggtcccctagttgaggatagtcaggagcgtcaatgtgcttgtacatagagtgctgtagctgtgtgtccctacaaaataatttgtcgacgcggccgcgaattccagatctatgaatcgtagatactgaaaaaccccgcaagt

SEQ ID NO: 24114 - DNA, 538 bp, Homo sapiens
  misc_feature (1)...(538): n = a,t,c or g
gattgaatgcacacagatttatttatttatttatttttgagacggagtctcgctgtgtcaccaggctggagtgcagtggtgccaactcagctcactgcaacctccgcctcccaggttcaagtgattctcctgccccagcctcctgagtagctgggaccacaggcgcatgccaacactcctggctaacttttgtatttttggtagagacgggtttcaccatgttggccaggttggtatcgatcttttgacctcgtgaccctcctgcctcggcctcccagagtgctgggattacaggtgtgagccaccgtgcctggcgtacaaatttatttttgtcaaggcttactgcagaatggatttgagatggctgacgtgcacatagaaggtgattaataatggtggaactaagagntaactgggcaagggcttaaaaatacagtcaatgagcagtccttgtaaaattaatttagatataaatgtcacattcaacatcatgtantttanaactaaatgacttgaaataccagcttaaccccaatgg

SEQ ID NO: 24115 - DNA, 515 bp, Homo sapiens
  misc_feature (1)...(515): n = a,t,c or g
gcttgatctctccccacagggtgtggccactgtaagaaaatgaagccggagtttgagaaggcagcagaagccctccatggagaagcagatctgtcgatgccactgtcaacaaggccctggcagaaagattccacatctcagagtttcctacgttgaagtattttaagaatggagagaaatacgcagtgcctgtgctcaggacaaagaagaagtttctcgagtggatgcaaaaccctgaggcccccccgcccccagagcccacgtgggaagagcagcagacangcgtgttgcacctggtgggggacaacttccgggagaccctgancaanaacaaacacaccttggtcatgttctacncnccttggtgcccacactgtaanaangtcattccnnactttactgctactgctgatgccttcaaagntgaccntnagattgcctgttgcngctgttgaatgcctcanagncaannnccaaggacngngcaagaggngggggtcaaggggcgancccag

SEQ ID NO: 24116 - DNA, 627 bp, Homo sapiens
gcggttcttgttccagtatgacaactatgggtccacagctgaggacattgtggagtggctgaagaatccgcagccgccacagccccaggtccctgagactccctgggcagatgagggcggctccgtttatcacctgaccgatgaagactttgaccagtttgtgaaggaacactcctctgtcctcgtcatgttccacgccccatggtgtggccactgtaagaaaatgaagccggagtttgagaaggcagcagaagccctccatggagaagcggatagctctggtgtccttgcagctgtcgatgccactgtcaacaaggccctggcagaaagattccacatctcagagtttcctacgttgaagtattttaagaatggagagaaatacgcagtgcctgtgctcaggacaaagaagaagtttctcgagtggatgcaaaaccctgaggcccccccgcccccagagcccacgtgggaagagcagcagacaagcgtgttgcacctggtgggggacaacttccgggagaccctgaagaagaagaaacacaccttggtcatgttctacgccccttggtgcccacactggaagaaggtcattccgcactttactgctactgctgatgccttcaaaga

SEQ ID NO: 24117 - DNA, 521 bp, Homo sapiens
  misc_feature (1)...(521): n = a,t,c or g
aatatttgaanaccatttatgaccngattacgaatttaatacgactcactatagggaatttggccctcgaggccaagaattcggcacgaggtcattactatcatttggcaggtagggaaactggcgaacaaatgtctcagagatacctcaaacttaacatgtctaggccaacctcagtaccttcccataaaatgtgcttattctcctggattcctgatttgtataaagcagctccatttatcactcatccaagttcaaatctcacttcatccttctttctattccacatgtccagtcagtcaccaagtccctgtggattctctctctttctccctctcctctctgagatgcctgcagccaagaaagcctcattcttcatttaggtttgtatcagagctttctgtctgctcccttgacttcaagttgccatcaggtccttcagattaccactaggctgcttcctcaaacccagatcttgcaggcattcctattttaaattggcantgacttcccacagggcg

SEQ ID NO: 24118 - DNA, 285 bp, Homo sapiens
  misc_feature (1)...(285): n = a,t,c or g
gggcacacatgtgcctaggaaacaaacctgcacattctgcagatgtatccgccccccttttttttttagaagaaataaagaatattttttaaaaaaagaaaaatacatttgtagctattaaaaaaaaaattggctgggattacaggcgtgagccaccgggcccggcccaccagttcttaattaccagattaagggttcttataaaanatgatggggntctnggatnttncgctntgggnaaactncngnannganccnctttnttccttganccattttagagag

SEQ ID NO: 24119 - DNA, 373 bp, Homo sapiens
  misc_feature (1)...(373): n = a,t,c or g
gctggttttcttctcctttgagtctttgattattatgtggctggagtgaagtggcacgctcttggctcactgcaacctctgcctgccccgggttcagatgattctcctgcctcagcctccggagtagctgggattacaggtaattttaaccaatcagatgacaacaaagattgatagaaatcaggccttgcttgttcctgcattaggggaaagttggggacatgctgctacaatacggctaatctttcattgggaccgaaagcaaagcaggttggcaacattgtacaagtcacccagccagaaggaatgcacagtactgtttcaaatcaaacctcagggatttagagatactgntgttacttctgcatgttca

SEQ ID NO: 24120 - DNA, 855 bp, Homo sapiens
ggtcaaagggtagagtgaacaggaaagggtcacgtggtcccatgttgcaacagccccaacatcacgcatgtcattcactgccttgccactccatctccctccgtgctccagccacccctgagctgaggctcccattgtctccatcagagcctgcatgtgtatgccgtcctcccctggtccggtgtttgtgttccccacccctcacagactgcctgagctcttctgtaagctggggtagggtgatggcagtgctccgggaactgggcctgcagccttcctcttctgggactgctgtgaggcagaggaatgatggagaatctagtgtaacagcctccaggcaggattcagcacaacactggggagtcacccttccctcgggcctctgcctaccaacaactgggcttatcactgggaaaacacaaaaaattacacaacccagcaacaacaaaagaactagtcctcttagaatttcttgcgctttgatttttttagggcttgtgccctgtttcacttatagggtctagaatgcttgtgttgagtaaaaaggagatgcccaatattcaaagctgctaaatgttctctttgccataaagactccgtgtaactgtgtgaacacttgggatttttctcctctgtcccgaggtcgtcgtctgctttcttttttgggtttctttctagaagattgagaagtgcatatgacaggctgagagcacctccccaaacacacaagctctcagccacaggcagcttctccacagccccagcttcgcacaggctcctggagggctgcctgggggaggcagacatgggagtgccaaggtggccagatggttccaggactacaatgtctttatt

SEQ ID NO: 24121 - DNA, 681 bp, Homo sapiens
cgcccacagatgtagttttctctgcgcgtgtgcgttttccctcctccccgccctcagggtccacggccaccatggcgtattaggggcagcagtgcctgcggcagcattggcctttgcagcggcggcagcagcaccaggctctgcagcggcaacccccagcggcttaagccatggcgcttctcacggcattcagcagcagcgttgctgtaaccgacaaagacaccttcgaattaagcacattcctcgattccagcaaagcaccgcaacatgaccgaaatgagcttcctgagcagcgaggtgttggtgggggacttgatgtcccccttcgaccagtcgggtttgggggctgaagaaagcctaggtctcttagatgattacctggaggtggccaagcacttcaaacctcatgggttctccagcgacaaggctaaggcgggctcctccgaatggctggctgtggatgggttggtcagtccctccaacaacagcaaggaggatgccttctccgggacagattggatgttggagaaaatggatttgaaggagttcgacttggatgccctgttgggtatagatgacctggaaaccatgccagatgaccttctgaccacgttggatgacacttgtgatctctttgcccccctagtccaggagactaataagcagcccccccagacggtg

SEQ ID NO: 24122 - DNA, 476 bp, Homo sapiens
catgattacgaatttaatacgactcactatagggaatttggccctcgaggccaagaattcggcacgagctggagtttcataatcatagcttttacatctatgatcattttctagttaattatgatatatgatatgtgaggaagggatccgacttcactcttcgcatgtctcagcatcatttgttgaaaagtctattatttcctattgaattgtcttggtatatctgttgaaaatcaattgacaataaatataagggtttatttctggacttgtgattctactccattgatgatatgtctaatttatcccagtaccacactgtcttgattcagactgtagctctgtagtaagttttgaaatcacaaagtgtgagtcctccaactttggtcttctttttcaagattgttttggctattctgggtcttggaatttccatataaattttagaatcacttgtcaaagaagcatgggatccc

SEQ ID NO: 24123 - DNA, 721 bp, Homo sapiens
ggcctgatgaagaactggaagacaaccccaaccagagtgacctgattgagcaggcagccgagatgctttatggattgatccacgcccgctacatccttaccaaccgtggcatcgcccagatgttggaaaagtaccagcaaggagactttggttactgtcctcgtgtgtactgtgagaaccagccaatgcttcccattggtgagtgttgaagaagggaaaggaaagcaccgtgtggcagtcttatgggaaggagttggggctcaacacattggagcctgagtcctgaggggaggttaggtacgaatagggggatacctggcctgctgaatctggctgtctcccaagcctttcagacatcccaggtgaagccatggtgaagctctactgccccaagtgcatggatgtgtacacacccaagtcatcaagacaccatcacacggatggcgcctacttcggcactggtttccctcacatgctcttcatggtgcatcccgagtaccggcccaagagacctgccaaccagtttgtgcccaggctctacggtttcaagatccatccgatggcctaccagctgcagctccaagccgccagcaacttcaagagcccagtcaagacgattcgctgattccctcccccacctgtcctgcagtctttgtcttttcctttcttttttgccaccctttcaggaaccctgtatggtttttagtttaaattaaaggag

SEQ ID NO: 24124 - DNA, 566 bp, Homo sapiens
gaggcaactcaattacaaaataaatgtttacgtattgtcagaagttgtggtgataaactgcatttttgttgttggattatgataatgcactaaataatatttcctaaaattatgtaccctacaagatttcactcatacagagaagaaagagaatattttaagaacatatctctgcccatctatttatcagaatccttttgagatgtagtttaaatcaaacaaaatgttaataaaaataacaagtatcattcatcaaagacttcatatgtgccaagcagtgtgtgctttgtgtagattatgtcatatagttctcataatccaccttccgagacagatactatttattttttgagacagagttttactcttgttgcccaggctggagtgcaatggtgccatctcggctcaccacaaccttcgcctcccaggttcaagcgattctcctgcctcagcctcctgggattacaggcatgcaccaccatgcctggctaattttgtatttttagtagagatggggtttcaccatgttggtcagactggtctcaaactcctgacctctggtgata

SEQ ID NO: 24125 - DNA, 721 bp, Homo sapiens
  misc_feature (1)...(721): n = a,t,c or g
tgacatgattacgaatttaatacgactcactatagggaatttggccctcgaggccaagaattcggcacgagctggaaattaacagtgatgattttgagctaaaaaatcagtgacacattttattaaaacaaaaggaacaaaggaactttaaccagaccatacatgtaaaggctgtttagcatagcaatttcatggattcaaaatatatctttaatgacaaacaaaccaataaccaggagaaatgaagactgtccttccctttataatgtgatattaaagtgtggcctatggacaatttataaagtaaagagtttgaagtttaatttttattttacaaaaattgacactattaaaaccaacatgattatctttcactcatccaataactgagctaacagtattataaaaatatgtaaaaaaattctagattcataattaccagatatgctaatatccatatagctagtataaatctgatgattaaaaaaatagttttgtttccttaaaaacacttggttcatgggccaggcgtggtggctcacacctgtaatcccagcactttgggaggccgagacgggtggttcacaaggtcaggagattgagaccatcctggctcacatggtgaaacctcgtgccgaattcttggcctcgagggccaaattccctatagtgagtcgtattaaattcgtaatcatgtcatagcggttttccaaggnnntcc

SEQ ID NO: 24126 - DNA, 394 bp, Homo sapiens
tcactatagggaatttggccctcgaggccaagaattcggcacgagcttgaaaggagataaagatcctggagaagagagtgaggctgtggatggcaagctctcgatatttatccacaagcgggaagaccagtcatcccatgaagtcctccagccattgctaagtagttcagaaggacggcccttccgacttggtactggcgccaacatggagaaagttgtgaagatggatcgagacatgaccaagggtggctgttgcgaagtgattacagaagaggctgcagccgccctgcggaaagccaccaagtgggcacagtcaggcctcatcgtcagcattgggccacctgtagagtctatcaacccagagactgtgagtggactatccacaggcgacaaa

SEQ ID NO: 24127 - DNA, 1494 bp, Homo sapiens
  misc_feature (1)...(1494): n = a,t,c or g
ggaccaagttccggccagttcgacctcgaggatccagaggtggagacggtactacctcccagctctgttttccatccccttcaggtccttcctcgggaggcggcgaaggcggtccaccctgcgcgtgatcctttatgcccggcccctgcccctccctccgggtggaacttccccctcaccgccagacttaagctgaggatcgttggatctctggcggggtgcagaactgagcccaggccacagtaccctattcacgctctgtgcttgtgccaagggggcaatggcggcttcctgtgttctactgcacactgggcagaagatgcctctgattggtctgggtacctggaagagtgagcctggtcaggtaaaagcagctgttaagtatgcccttagcgtaggctaccgccacattgattgtgctgctatctacggcaatgagcctgagattggggaggccctgaaggaggacgtgggaccaggcaaggcggtgcctcgggaggagctgtttgtgacatccaagctgtggaacaccaagcaccaccccgaggatgtggagcctgccctccggaagactctggctgacctccagctggagtatctggacctgtacctgatgcactggccttatgcctttgagcggggagacaaccccttccccaagaatgctgatgggactatatgctacgactccacccactacaaggagacttggaaggctctggaggcactggtggctaaggggctggtgcaggcgctgggcctgtccaacttcaacagtcggcagattgatgacatactcagtgtggcctccgtgcgtccagctgtcttgcaggtggaatgccacccatacttggctcaaaatgagctaattgcccactgccaagcacgtggcctggaggtaactgcttatagccctttgggctcctctgatcgtgcatggcgtgatcctgatgagcctgtcctgctggaggaaccaagtantcctggnattggctgaaaagtatggccgatctccanctcagatcttgctcaggtggcaggtccagcggaaagtgatctgcatccccaaaagtatcactccttctcgaatccttcataacatcaaggtgtttgacttcacatttagctgcttcatctcttctgggctaaaggccctgagcaaaaattggagatatattgtgcctatgcttacggtggatgggaagagagtcccaagggatgcagggcatgctctgtacccctttaatgacccgtactgagaccacagcttcttggcctcccttccagctctgcagctaatgaggtcctgccacaacggaaagagggagttaataaagccattggagcatcaaaanaaaaaaaaataannangaaaggaanaangnaancaanacnaannntnanaananagnggacnngaagaggntggncataananctnngnctannganctantaaggcggtngnncnattnataantngcnnnagtgggc

SEQ ID NO: 24128 - DNA, 334 bp, Homo sapiens
gcataggacagaaaccatctcttattagagctgtacataatccataacaaggcatctcatgaagtttacttccaaaaagaaatcttttacttacagcagtggaggagaaaaactcaggaatccaaagagttagcttcagatcctcagttgtaatttgacaaaaaaccattggcctattagcgtcttagccatgcccttgataagctggaaaacttaattgacttgattggggatgtattaaaaagtacagacaatccttggaaatcggcaagtgtacatccaaagactttagagaattctcagatttacaaatacaaaattgtacagatttctg

SEQ ID NO: 24129 - DNA, 346 bp, Homo sapiens
gattaattactgctgattatccttagtgttgaatgcagtgcctggcatttaataggtactcagtgtttttgattgattggttcgttgttcatcaaatgccttaatttaaaatttccagatttactttgaaaggagcagtctctgttgccaagcaaggaattaaacttttcttagaaaaatgtctccatataagaaagggtaccatgatttatttcaaagaacagaattaggagcagaagctgaacatcctaggaaaggtaattttatctcagttttaagagctgtttaatgtaatcccagctacttaggaggctgaggcatgagaatcacttgaactcgggaggcg

SEQ ID NO: 24130 - DNA, 420 bp, Homo sapiens
ggtttgatcttgccacatgtgaagggctcagtggccacgtgtggctcgtggctgctgtactggagaccatggcttgagagccttctaggggcataggctttcatcccactgtgcgtttgcaagtctgcagggggatccggggatgtctgtgtcccacggtggttggggtggggaagcaatggtgaatagcctaaccagccacagttgtcctggctttgctctgtggctgccagggcaggtgcggcctgggagaggcagagggtgggctttgggtcagcaggcccacccccgtgtggtaaggggcaaaaccagaggcctacggaggccaaggcagctggcaaaggcccagccacatcatgggactagctgtgtggtcttgggcaagttgcacccccgagggctccttccagaccattctga

SEQ ID NO: 24131 - DNA, 307 bp, Homo sapiens
ctcagtcacaccagtcacattttaagcgcttggtagtcacatgtggctgatgggtactgtactggacattgtagatacaggacatttacatcgttgcagaaagttattggatattgctgttctggaagtcaagctgagataaatatttcctggctttagagataactcagtgatagcagagagatattaattttcaaatcaaaagaagagggagttccaccaagcaagtgcttaggtttctttgtgtctaaaagctcatattgaataatggtatattgagtagactgttgatccaggagatagtgtt

SEQ ID NO: 24132 - DNA, 350 bp, Homo sapiens
gcttacggcctttgaggacttcttagtttgagtatattttagctgtgtgcataaatgtctttacagtgtacttaaggagttggatttttagaaacttgccatatttagaaatctattggattgaacatagtttgaaaagcaaagtataagttaattcctttactatatacttgtactattcttttcatggactttctgatgcttgctgtttgtgcacataggctttgctttttgtatttatttatattgtatgaatctaagaataaaagagagtgtgaacaattcagaagactacagatatatcttgttaggttgctttccaaaaggttcccagttgtagtcataccagc

SEQ ID NO: 24133 - DNA, 429 bp, Homo sapiens
agagaaatccctctcctgaccacttgtcagaatcagaaagtgaggaagaagaaaatattagttacctaaatgagagttctggggaagagtgggattcctctgaagaagaggactctatggtgcccaacttatcgcctcttgagagtcttgcctggcaggttaagtgccttttaaaatattccacaacttggaaacctttaaatcctaattcctggttgtatcatgctaaactgttggatccaagcacaccagtccatatacttcgagagataggtctaagactctcccattgttcccattgtgtccccaaactggaaccaattcctgaatggccccctctggcctcttgtggagtcccaccttttcaaaagcctcttacaagtcccagccggctctctagagatcatgccactctaaatggagcactgc

SEQ ID NO: 24134 - DNA, 418 bp, Homo sapiens
aggggatgatgtatataactatctattcgatgatgaagataccccaccaaacccaaaaaaagagatctctcgaggatccgaattgcggccgcgtcgacaattgctgaaggtggataatgagaacaatggggtttattattctattctatttttgtctgcttgaaattttccatattaaaaagtgaaaataagggtgaagcctccatttagcagatcaaaatatcacaaatgaagtcactttaattctcattccaattcaaggatcctaatgcatgtaaactatcctttctatctacagttctcgcaaaccctggctaatgcgttattctacctactgtatccattcaaatcatgagtgagaaatcagacaagggcaaacagtcagaaatatccaaaattttcagctcaagtttaaaaa

SEQ ID NO: 24135 - DNA, 433 bp, Homo sapiens
  misc_feature (1)...(433): n = a,t,c or g
gcggcacgaggcatattttatagttaacactacagaaatgcttatttaatttcgttttataatttcagaataagggtgacagctgctagaaattccacaatactcaagggccaaatttagtctttttgcctcaaatagaaagaaagcatgcaggaaagcaatatatacttcctatctatctgtttcaagacatcttggtgtctgtttttactggcaacgggacatctttactactgtaattctcaaacactttggcaatacactgaacactgttatgacagtttgttctttaacacatttgtattatctttcagttaaaagtatgtctttatgcctacatatttcaaagtaatatgagagagaacattaaactgtgntggattgcgataaaantcttggaatcttancatcataataccccanggtatttggg

SEQ ID NO: 24136 - DNA, 515 bp, Homo sapiens
  misc_feature (1)...(515): n = a,t,c or g
ggtatataaaataagttttaaatatccctgaggggtgggggcgggagggccaggatctgcttcttgtcacatcccacgtggctgagctgggaggctccttcacttgcaatgaagaatccatgccctgtccacccccagcttggtgttcatgctggtgcctggttttagatattgccatcagcccctcaaaggacacagaattcaccaggattttgatggataagaatcagttctccgccattcacatggaagtcatccagggaggtattgtcagtggtcacattcaagtagactttgtctttgtaagtcagagaggccaccatcaaggagttgacagacctgaccttcttcagttggaagaggggctcctcatccttctggtaatgaaggctaatgttgacttcctgggagaagtagcccttcagggagatgagataaaacccatcacagttgatgatgactgagttgttctgcaccttcatgatttcatcctncntttgggaatgaagatgaaa

SEQ ID NO: 24137 - DNA, 384 bp, Homo sapiens
gtggaagaagatgggtgttcatttattaaacaatcatgaaattccttttacatgccaggtactgtgctagtctctgggagattcggtgatacataacacatgatacctatcctaaagagctcactgtctagtaagattgacaagtatgtaaacaaataatttcagtattttggaataagtataatatagaaataagaggtaggtgtggtagggtgggtgaaggtggcagtggttaataaactctggtgggcccaaagaaggcttcacagagtaggcaatgcttgagctgctaggctatctcaaagattgtgatatatctttgaacagtgttaaccagggaaaatgatcaaaatctatgttctaggaagctcaccctgatgtcat

SEQ ID NO: 24138 - DNA, 378 bp, Homo sapiens
tttggccctcgaggccaagaattcggcacgaggcaatttggacatctccaacaagtatgggcgaacgcctctgcaccttgcggccaacaacggaatcctagacgtggtccggtatctctgtctgatgggagccagcgttgaggcgctgaccacggacggaaagacggcagaagatcttgctagatcggaacagcacgagcacgtagcaggtctccttgcaagacttcgaaaggatacgcaccgaggactcttcatccagcagctccgacccacacagaacctgcagccaagaattaagctcaagctgtttggccactcgggatccgggaaaaccacccttgtagaatctctcaagtgtgggctgctgaggagcttttt

SEQ ID NO: 24139 - DNA, 1342 bp, Homo sapiens
cccacgcgtccgcttggagctgatacctctgttgatcttgaagaaactgggcgtgtcttaagtattggtgatggtattgcccgcgtacatgggctgaggaatgttcaagcagaagaaatggtagagttttcttcaggcttaaagggtatgtccttgaacttggaacctgacaatgttggtgttgtcgtgtttggaaatgataaactaattaaggaaggagatatagtgaagaggacaggagccattgtggacgttccagttggtgaggagctgttgggtcgtgtagttgatgcccttggtaatgctattgatggaaagggtccaattggttccaagacgcgtaggcgagttggtctgaaagcccccggtatcattcctcgaatttcagtgcgggaaccaatgcagactggcattaaggctgtggatagcttggtgccaattggtcgtggtcagcgtgaactgattattggtgaccgacagactgggaaaacctcaattgctattgacacaatcattaaccagaaacgtttcaatgatggatctgatgaaaagaagaagctgtactgtatttatgttgctattggtcaaaagagatccactgttgcccagttggtgaagagacttacagatgcagatgccatgaagtacaccattgtggtgtcggctacggcctcggatgctgccccacttcagtacctggctccttactctggctgttccatgggagagtattttagagacaatggcaaacatgctttgatcatctatgacgacttatccaaacaggctgttgcttaccgtcagatgtctctgttgctccgccgaccccctggtcgtgaggcctatcctggtgatgtgttctacctacactcccggttgctggagagagcagccaaaatgaacgatgcttttggtggtggctccttgactgctttgccagtcatagaaacacaggctggtgatgtgtctgcttacattccaacaaatgtcatttccatcactgacggacagatcttcttggaaacagaattgttctacaaaggtatccgccctgcaattaacgttggtctgtctgtatctcgtgtcggatccgctgcccaaaccagggctatgaagcaggtagcacgtaccatgaagctggaattggctcagtatcgtgaggttgctgctttcgcccagttcggttctgacctcgatgctgcccactcaacaactttttggagtccttggcgtggcgtcttaactgaatttgctgaaagcaaggaccagtattctccccatggctaattggaagaaccaagttggctgttaatctaatcgccgggttgttaagggggaaaat

SEQ ID NO: 24140 - DNA, 423 bp, Homo sapiens
gtctttatagacaaggattgagtggctattcattttctgccactcaatccttaacattttgccaaaagttacatttcatcaaagcctattctcagaagccccatagatcatttgtggtgtgaacttggccctgtagctccctggaatgggttctcaccagcctggctcggcgccactgcctcctcaggggcccattgattcctccagtgaaagggttggcatttgagaaagtgctttgtgaaccgctcaacaccgcgtagaccctgttgcgctttaatactttgatccagccatattttgccagtgtcttctgtgggccaggcagccattttggcaagagggctgcagaaaggacacaggtgagtcaaggtgcgtgcaggactggggtaccagcttctagcaaatgtgtattcaacccctgtg

SEQ ID NO: 24141 - DNA, 424 bp, Homo sapiens
gggctgtcctctatatcgctcatcacaacaagcggaaggtaagtcgacagcggccttccggaggggagtggggttcccagcaccctggaagcttgggtgtgggtgggtatcccgtcactagatgcccgtgagcactggggactttaaaacaaacttcagttttttcctcaggccctattaggcctctttactcttgttttgttaatcgtgttttcatcctgtcacctgtttactctgagtgtcctctgctactgcattaggagccaagttaggacattattaggatctgacctgacttggaatctcctcccataactttgcacttaggtccttcacagcctcagaggacctgagtacttgacagttaaagcacgtaccttccatcctatttcccttcttgagacgatatgtcatttctagcttc

SEQ ID NO: 24142 - DNA, 433 bp, Homo sapiens
gattgcccaggctgttcttcaactcctgggctcaagcagtcctcccaccttggcctcccagaatgctgggtttacagatgtgagccagcacaccgggccaagtgaagaatctaatgaatgtgcaacctaattgtagcatctaatgaatgttccaccattgctggaaaaattgagatggaaaacaaaccatctctagttggccagcgtcttgctctgttcacagtctctggaaaagctggggtagttggtgagcagagcgggactctgtccaacaagccccacagcccctcaaagacttttttttgtttgttttgagcagacaggctaaaatgtgaacgtggggtgagggatcactgccaaaatggtacagcttctggagcagaactttccagggatccagggacacttttttttaaagctcataaactgccaa

SEQ ID NO: 24143 - DNA, 383 bp, Homo sapiens
aaaaacagaaatggacacataatatgcatattccatagtctttgggaggctggaatgtgcctgggatttgggtctaagtgtatgcgtaattcttacctcactaaagaatttgccttgtttttttccttttggtgagtgactaaaacgtctgggcttccctgtgtgcgtgctacagtaagcaagcagaggctgtgcaaaggtgtgagcaggatcacgtggaatctggaggatacatcttggcttgcaaactgcctctgtctcctgggtgggactgttctgtccttgcactgctgttctgtgttacctcttggggtgtaaggttttgcttacaggagacaaactttgggcgtagaatggaagccactgccagcctctgtgctgag

SEQ ID NO: 24144 - DNA, 508 bp, Homo sapiens
  misc_feature (1)...(508): n = a,t,c or g
tatcacatgattacgaatgattacgaatttaatacgactcactatagggaatttggccctcgaggccaagaattcggcacgaggtattgttttctctctatttgcaagtgagctggttagcaaccttaattccatctgcagttttaattcctctttgccatgtagcaacatattcataggctcatgcattaggacgtggacctctttattccactgtggaccaatactctgccttccacacctagcctctcttctgagttttccaagggccccccatcctcaggcatcctcaggcatagacagccggctgggccagaccacagtcaggatgttcccgccactatcagagaggtcctttctacccaagtcccctcccacctgcctgctcctctttcagctcggtctgtcctggattcctcttccttcatcctctgtcccagtcttaggtagagaagagctgagcaggaagtgccagggggtgtggagatggaggaggngangnctgcac

SEQ ID NO: 24145 - DNA, 336 bp, Homo sapiens
aggatcttgttcactgctgtgcaaaatcgaattgacagtgactgcatcctaaatgctgttcacagcgatatggttcccacagtgttagaagagcctcctaggagaggccctgtagcgttgtgagagacaaagatggcaaggcaggaaagaacttggcgtggttagaatggaaggaagcacgagggaggccagagaacatcaggagagttatgatatctgtgtgcctattggtttggcctctgattgtgttgcatttttggatgagttgtgtttggacctggtgatggcgaggctcccagagagtagtgaaaattgcaaagagtagcaggataccag

SEQ ID NO: 24146 - DNA, 370 bp, Homo sapiens
gataaactgattctgcatcttgaaggcctataaaagcatccagagacagaaatagaatcctgactgcaaaatctaggcttctcaaatgctttcacaaaatatttgccagaaggtagcacaaagtttacaccagaaaatcggaatattttgaatttatgatccagatgcaaaatatgaagaaaagaacttctataatcaagtatatttgggaaagttttttaaacaaaatagagatatttactgggggaattgtcagaggctttaataaaccaaaaggcaccgtgtgtctttaggaaagactagaagaggagaagtcaagtaagaaacctctagttggtcacatggctaatggagcacacatgccctgcat

SEQ ID NO: 24147 - DNA, 343 bp, Homo sapiens
gcactcagtgacagaagcaacaataattgtgaaaaatacttcagcagttatggactcatctgtcattcaaaggaaaaaagtagctgtcattggtggtggcttggttggctcattacaagcatgctttcttgcaaagaggaatttccagattgatgtatatgaagctagggaagatactcgagtggctaccttcacacgtggaagaagcattaacttagccctttctcatagaggacgacaagccttgaaagctgttggcctggaagatcagattgtatcccaaggtattcccatgagagcaagaatgatccactctctttcaggaaaaaagtctgcaattccc

SEQ ID NO: 24148 - DNA, 342 bp, Homo sapiens
gaaggcgaatagccattgaagatccattttcagtcaagaggaatgttgcacggagcttaaacagccagctggtttacgaatatgttgtggagagatttagggtagcttatcggtattttgcctgtcctcagacgaagggtggaaataagtctacagtggatttcaagaaaagagagaaggggaaaataagcaataagaaaccagtcaagtcgaacaatatggcaaccaatggttgtattctgcttggggaaaccacagaaaaaataaatgcagaaagagagcaacctgttcaatgtgatgaaatggactgtacatcacagagatgtattattgacaacaaca

SEQ ID NO: 24149 - DNA, 605 bp, Homo sapiens
  misc_feature (1)...(605): n = a,t,c or g
gccattatatatttccataaaaatgcatgaaccatcccttagctaagtaaggattttgtaatgttctctcaataatgttgcttggcaaagttaatattttttgtatgctgatgaaatttagaaaagtccaatattgagcttgattgcaaacttagaaaaactcaagacttctccttttatgttcaaattgttgtatcagtatggtattttgcacctttaccttaaacaatattttctcctttaattattgattttgcaacattttgggaaagttggaattttaaataaatgaataattttctaaaccagaataccagttcaacagccaaataattctgtctttccatgctgtaattttaaagcatttaattttccaactttttgttcatactcaagtgtgtgaacttcctggctgggcacagtggctcatgcctgtaatcccagcactttgggaggctgaggacctcaagtggagacctcaagtggatcacttgaggtcaggagttgaagaccaacatgttcatggccaacatggcaaaaccctgtcttaaattagccgggcatggttgtgcctgcctgnaatcccagtactcaggaggctgagg

SEQ ID NO: 24150 - DNA, 417 bp, Homo sapiens
gaggagctctcagaggctaagaaggtggagaccggagaagctgtgaggttctttagcgtcacctccctcactgggcagcatgggggagaagtcagagaactgtggggttccagaggatctgttaaatggtttgaaggttacagatactcaggaagccgagtgtgctggccctccagttcctgatcccaaaaatcagcattcccagagtaagctgctcagggatgatgaggcccatctccaggaggaccagggagaagaggagtgttttcatgactgcagtgcctcatttgaggaggagccaggagcggacaaggttgagaacaaatctaatgaagatgtgaattcctctgaactagatgaagaatacctaatagaactggaaaaaaacatgtcggatgaagagaaacagaaaagaaa

SEQ ID NO: 24151 - DNA, 379 bp, Homo sapiens
gaatgaaataaagactgaatctgatgaataaataaaactagtagataacagcttctaagtgtgactttgaagtaacatgaatggtttttatcatatgatacatagaaatgacttcttagtggtaatatatggcaggatttggcaaactagcctgcagtccaaatatggctaaaagctgtttttgtacaaccagtgagccaacaatagtttttacatttgtgaatcgctgaggcaaaatccaaaggaaaatattttgaggccgggtatggtggttcacgtatataatcccagcattttgagaggttgaggtgggaggatggcttgggcccaggacttggagaccagcctaggcaacatagtgagatcctgctctaaaaat

SEQ ID NO: 24152 - DNA, 363 bp, Homo sapiens
  misc_feature (1)...(363): n = a,t,c or g
ggggctcggcgtggtgttggttttgtccttagcatcgcattttgtatttcactacaggaagcatctcaagcctccagaagtcttgcctctcctccccacttcatcgtgcaagcaggtatgtgtggtattccaaatgcccttaaaatagtaaacctttaagagagagtttcaaagacctcttctctaccagttaaaaaagacattaactttaatgaaaaaaaaaaaaagggntaagggcnncctttgaanttaaaantngcngttnaaanccntaaactactcntngggctnaatnanaattnccnngnaaagctgnaaaanctgttncnggagtgnagggnaggcttgnatnttgaaaatgga

SEQ ID NO: 24153 - DNA, 422 bp, Homo sapiens
gcatttgacttactgcacagtatattgatcattttaatgggaaactttagctttctactttttatttttgttttttcactttctatgccattatttttgtattctttttcttagtgtgagctctaaaatcaatgttcttgaaaaagaaattattttgcagaagttggggaatcatgtttgttgaatatgtataaaatagaaacataggctgggcgcggtggctcacacctgtaatccctacactttgggaggctgaggcaggtggatcacctgaggtccagagtttgagaccagtctggccaacatgatgaaaccccatctctactaaaaatacaaaacattgcccgggagtggtggctcatgcctgtaatcccagcactttgggatgctgaggcgggtggatcacctgaggtcaggagttt

SEQ ID NO: 24154 - DNA, 605 bp, Homo sapiens
gattctaagtgtgagatgccacatttcatagcatgtcagttgcaacatatctttgagtgattgctgtgggtctggtatatttaatgctccaattatagtatgttaaagattattgggttaccctctttcagttagcattaacagtgtttcctaaaggaaaaaatcaggtttcatttaatatggccaagttaagtttttaaaacaaacgtatttgtattcacttacaagttatttctttggcatcccttgtaagccgttagacacagccttcttgcctaatttacagcttttaatttgggtgcagtttttctcttaaacatcaaaaaattactcattaactgcttgagtagcagactgccctttgagctggtttgtttccattttacagaaggggaaactgagactcagagtgcttaggtaactagctcaagattcccatcttctgagtgacagagccacataaatccaggtctatgggacttaaaaacctttttttaccatatgtctcagttaagcactgtgctggttggtcactgagagtgatagaaagatgagaatgctgtaagcaaaccctggagcaactctttggatagtgtatgaaagag

SEQ ID NO: 24155 - DNA, 367 bp, Homo sapiens
gaggctgaacgtgaggagcggaaacgactcgagtcccagcgcgaagctgagtggaagaaggaggaggagcggcttcgcctggaggaggagcagaaggaggaggaggagaggaaggcccgcgaggagcaggcccagcgggagcatgaggagtacctgaaactgaaggaggcctttgtggtggaggaggaaggcgtaggagagaccatgactgaggaacagtcccagagcttcctgacagagttcatcaactacatcaagcagtccaaggttgtgctcttggaagacctggcttcccaggtgggcctacgcactcaggtaagccctggaacgtggcctgctgtgtgcagtgtggccaggggtctgtggc

SEQ ID NO: 24156 - DNA, 371 bp, Homo sapiens
ccgctgcctgcctggtgaatttgtgagtgaggccctgctggtgcctgaaggctgccggttcttgcaccaggagcgcatggaccaatgtgagagttcaacccggaggcatcaggaggcacaggaggcctgcagctcccagggcctcatcctgcacggctcgggcatgctcttaccctgtggctcggatcggttccgtggtgtggagtatgtgtgctgtccccctccagggacccccgacccatctgggacagcagttggtgacccctccacccggtcctggcccccggggagcagagtagagggggctgaggacgaggaagaggaggaatccttccacagccagtagatgattacttcgtggaacctccgca

SEQ ID NO: 24157 - DNA, 55 bp, Homo sapiens
gagaaatatacagacagaagaagatctagtagttgtaatatttttcatttgccag

SEQ ID NO: 24158 - DNA, 423 bp, Homo sapiens
gggaacgcagctgacgaaggtgatgcttgaggctcacttttggggccccacagctggagccggtataatgactgggacaacatcaagggttggatgaggggcctctcctcccgcaacactgccttcccatgctgttcccctgccagctccttaacactgccgaccaaggccagccctggcattcagggaaattggagggcagcacccgtagggtggccagcctcaggccccaccccagctgtgtcctctagtctctggggacccctggggggaaggagtctaccctgcttgtgagtcccgtctcagtgtggaggaacgggctgcacatgggacctgaaggtgccctctgtgtttatgttgggggtgggggggaatgctggctgcctctgtcctgtgtgtgaccctaccctcgaagggtcctgt

SEQ ID NO: 24159 - DNA, 428 bp, Homo sapiens
  misc_feature (1)...(428): n = a,t,c or g
gcagataattacagaacttacatacaaagagtgtgtaagaggggaagggagagtgagaaactcaggcttcacagaggtgacacttgaattggggttaagttgaagaacagacaaacttagacacaaagctatgcaaaaattgtgatgaacaaggaaaaagtaagtttggaaaggaaagcacaggtcagattatatttattctcaggattttggacttttttattagggaaatttaaacaaggggaatgatcttatatttgtattctagaaagattactctggcagcagcagtatgaaggatggcttgtaggagataagagaaatatcttatcaccagggtaaactctcctgtggtaggtaaaactgtggaggtgcattagaatgctcaaaatgagaaagangctaagtantgctcctgaaagcccatt

SEQ ID NO: 24160 - DNA, 258 bp, Homo sapiens
gatatgtctttaatttgaagtcaacgattatgttacaaaatagaaaatcgagtcgcttaaaaatcaaatgccaaggtcacacagcaggtggagaggtgagtggagaggctggttcaagagcccacatgctatacagtatagcacactcactgcctctccttctggaagaattaattaagcggccgcaagcttattccctttagtgagggttaattttagcttggcactggccgtcgttttacaacgtcgtgacaaaca

SEQ ID NO: 24161 - DNA, 457 bp, Homo sapiens
gcccgaatgaaactcctatgagacccacatgcacggatttattcaggtcagtctgatcactggctgaaacttgtgcatcccaaatgctataatttatgtttttttggagagaattattttggaaaagttctcatccagaagctgattatgaaatagctggccaggtgcagtggctcatgcctgtaatcccagcactttgggaggccgagccaggcagattacctgagatcgggagttcgagaccagtctggccaacatcgtgaaaccccatctctactaaaaatacaaaaaaattatccaggtgtggaggcgtgcacctgtaatcccagctactcggtaggctgaggcacgagagtcgcttgaacccaggaggccagaggttgcagtgagccgagctcatgcctctgtactctagcctgggcaacagagcaagactcagtctcaaaaaaaaaaaaaa

SEQ ID NO: 24162 - DNA, 495 bp, Homo sapiens
  misc_feature (1)...(495): n = a,t,c or g
ggcctcggaatacctggccatcacctctgaaagcaaagagaactgcacgggcgtccaggtggccgaatagccctggccctgggccccgcctcaaggaagagccagccgtaatggggactctccaggcaccgcctgcccccagcgtgggggtggccactcctgggccccacaaagcctcanagtcctgccgacggagccactggggtgggagggggcagggggcttggctcgcacccccactttcgcctcctccagctcctgccccgccggccgcgcaccgccatgcatgatgggtaaagcaatactgccgctgcccccaccctgcttctgctgcctgtttggggaggggggcggtgaggtgggggcagcggcagttnngcttcctcnttgcngatttgcacacattgggcggttnngacncgctnttntgnggcnaacagtcntgcntnttccctgcntgggggntngggnccattggantnngntggacaagtt

SEQ ID NO: 24163 - DNA, 415 bp, Homo sapiens
  misc_feature (1)...(415): n = a,t,c or g
ttttgaaaccctttgacatgattacgaatttaatacgactcactatagggaatttggccctcgaggccaagaattcggcacgagatggaagaaaccaccaaggtccaaagcgagcaagagaatcccaggacagaaagatcttcagggggctagaaatctgttgctatgggcccttcaccaacatgcccacagatcaactggaatggatggtacagctgtgtggtgcttctgtggtgaaggagctttcatcattcacccttggcacaggtgtccacccaattgtggttgtgcagccagatgcctggacagaggacaatggcttccatgcaattgggcagatgtgtgaggcacctgtggtgacccgagagtgggtgttggacagtgtagcactntaccagtgccaggagctggacat

SEQ ID NO: 24164 - DNA, 352 bp, Homo sapiens
gtgggtagttagctatttctgggtgacccagtctattaaagaaagaaaaatgctgaatgagcatgattttgaagtcagaggagatgtggtcaatggaagaaaccaccaaggtccaaagcgagcaagagaatcccaggacagaaagatcttcagggggctagaaatctgttgctatgggcccttcaccaacatgcccacagatcaactggaatggatggtacagctgtgtggtgcttctgtggtgaaggagctttcatcattcacccttggcacaggtgtccacccaattgtggttgtgcagccagatgcctggacagaggacaatggcttcatgcaattgggcaagatgtgt

SEQ ID NO: 24165 - DNA, 363 bp, Homo sapiens
gcggcacgagaccctgcttctgtagttttatttcttgttctttttcctttatctgaatagcatgtttggcctgagcaatgggtgtctcccacatacaatcagagagaagggaaaataagcgctcaacaatctgggccatttgatcatcttctacaccagattcacaagctggcagcacagcttcaaggacatgaagtgcaaggagccttgttcttaagttaccaaccagagggatacctgaagaacatttctgagatgctatatttagaagcacttcggtccactttggggaagccatttttgattgaattgcttttgaagatacaactctgcgaagaaaaactaaaaaatcccctagatggg

SEQ ID NO: 24166 - DNA, 419 bp, Homo sapiens
ggaccaaacaaggtttactctagcaatgcaaggatagcataacatgaggtattgtgtcggctggagaaacttctagctcagggattagagcatggtttgccccagtcctgccatttactaattctctgacgttagccaaattagttaatctccctgagcttcagtctcctcatctataaaattggcaggacaattacagtactgctgtatagggttgatggaaggacgaaatggggtatctgtgaaatgattagacctgggtttggtgcataataagtgctcagttaatgttatacatcacaattcactgtatcacattaaaaagaaaacccatgtggttatgttagcatatttaaaaggcatgtaatacaattctgccgctaatcttaatgaaaatctaaaacagtcatagaatctac

SEQ ID NO: 24167 - DNA, 448 bp, Homo sapiens
  misc_feature (1)...(448): n = a,t,c or g
gtttcttcttggatacatatgacctttgaagtataatagtcgtagtgtttggtaaggtacacggaataaatgaataaggagataattttctttctttaattttaggaaaattgaggtttaaaaagggttgattggttagcagagaagattgactgtttcttaattcctggtctgatgttctactagtttttatgctttctgagagcagcatacaaattgtttcacaaaaactctatttacttttcttcaccaccttaaatattaatccccctatgacttaatgtatattattatctattataagaattagaaagtggtctttttaatggctctttgggaatatttttttatatgctttgttcatttttttaaataaatctcttaacttttgagnatgtctgcttttgagctttctcatcatatgacatctttttctacagaattatgg

SEQ ID NO: 24168 - DNA, 550 bp, Homo sapiens
  misc_feature (1)...(550): n = a,t,c or g
gggcgtggggtgccctgggcgtgctcgtccgtcacgaaggcgaagaccacttcgtggacgcccagcagagggatgagggtcagcgtggacttggccagccggaacttgtagtctgtgtggtgcatctgccgtgcccgcagcttggccacgagcagctgaacgatgcggacgaagatgaagaagttgatcaggatggccaggaagacggggaaccgcaggatccaccagaagcccatgttgtcattgctggtccagcactggacgttctcgaacagacacttgaccactgcccaggggacnacgaacagcatgggggcaccccagccgatgcccaggtagaggctgaagaagctcctctcggggagggtggccaggcccagcaggttgtgcaggtacaggcccttcaccagcagcagnagtagttggcacgatgccatattgcatgancaccggggcncacgggagcagccnccgcttgnacaggtcattgtnncccggtacttggcacttgcttgnttgccaccaancacttgttgggcccnanggggtt

SEQ ID NO: 24169 - DNA, 425 bp, Homo sapiens
  misc_feature (1)...(425): n = a,t,c or g
gattttaaattgtgttagatggcttccacattgccatccaaagaggaggtaccaattcatagtcctcgcagggtctgctgctttacgctttgccagcaccttgcgccatctaactttttgatctttcctcacctgtaaaatgcacgtggtgtcttactttgagtttgtggttctttgcatgaggttgagcagttgtttatgtatgtaaaggccatttgaaaacacgatgaaaacccagagtgaagtaaggtcaaagggagcaaaggtttatcacacaaagggctgatggcagagcagcagaaatgaagaggctaagggcacacagtcatgaatgtggaaattggagtctaccttggtttactaacaggaaaaggacttgcagcaaagtgtatctnaagtggattgggcnaagggaaataaacacc

SEQ ID NO: 24170 - DNA, 326 bp, Homo sapiens
ttaatacgactcactatagggaatttggccctcgaggccaagaattcggcacgagtttacccatgaccgagcctttgaagagctctttggaatctgcatccagctgttgaacaagacctggaaggagatgagggcaacagcagaggacttcaacaaggttatgcaagtcgtccgagagcaaatcactcgagctttgccctccaaacccaactctttggatcagttcaagagcaaattgcgtagcctgagttactctgagattctacgactgcgccagtctgagaggatgagtcaggatgacttccagtccccgccaatttgtggag

SEQ ID NO: 24171 - DNA, 351 bp, Homo sapiens
tcctgatgacccagtctccatcctccctgtctgcatctgtaggagacagagtcaccatctcttgccgggcaagtcagagcattggcaactttttaaattggtatcagcagaaacctgggaaagcccctaaactcctcatttatgctgcatccactttgcacagtggggtcccagggaggttcagtggcagtggatctgggacagattttactctgaccatcaacggtctgcagcctgaagattttgcgacttacttctgtcaacagacttacagtatgccgtacacttttggccagggggccgacctggacgtcaagcgaactgtggctgcaccatctgtcttcatcttcc

SEQ ID NO: 24172 - DNA, 426 bp, Homo sapiens
ggtaacattatgtcctttgaaagcttttgtagccattaacatggggcaagtcttagctggttacaagtgatttattaagttgcaggcatttctgcttcctcattttaagtttccagctcattccttaggtagcaagtggtgattatcctttgtggcttccgttttagcatttgtgtcctagatgggaggtccttacaggaagaggggcaggcatcttaggaaaacatttttatacaaaatgactcaaagataatgtgtagagtgggaaccgcttgggctttgagtagacacaggcctggactgcatattgcttgagtgtgctcagaagtctgcctgtcttgcacaggagtgattgactcttatagtggtgcataccctgtttccttctgcagattgtctttggctccattgcctcctgatgctttg

SEQ ID NO: 24173 - DNA, 391 bp, Homo sapiens
aattcggcacgagatataattgccagtggggctggctcattgccgcatcatgactgtttaccagagtgcctcacaccgtctaggaacaaaataaatacctgttcaatcagtgaattaataaacctgtacgaatttccttcagtatccattgtattggttccaggacccccatgggtaccaaaatcctcagttgcccaagtccctgtataaaatggcgtagtatttgcatgtaatctacgcatatcatcccatatactttaaatcatctctagataatttaatacctaatcgcaaggacctacacatcactttattcacatggattctttatagcaccagcacgtggcaaatttaagttttgctttttggaacttcgtgaaatttttttttt

SEQ ID NO: 24174 - DNA, 414 bp, Homo sapiens
tggccctcgaggccaagaattcggcacgagcagaaatgtgtgtcctgctctaaatctataaagtttatctccaaatacaatagataataggcatttattttaatcttttcctgaacatcccaagaatagctctatgatgtttctctttcggaaataaacaggatgtctgtgaatttgtctttcagtggagacgctgctaactccctccctgtgtcgtctagcagttgatctcactctgtaattcatacatctttagctcacttgaattttctgtttcctcttccctttttatgtcacagtgagagcctatacatttagttggaataaagtatttgtcagagtggcacacgtgggagtgctttctccatctgccactgacatttaatcactaggctgtggggttgaggagggtgg

SEQ ID NO: 24175 - DNA, 1029 bp, Homo sapiens
  misc_feature (1)...(1029): n = a,t,c or g
tccttctatgnctgntccctttttaaatacgactcactaggccgaatttggccctcgaggccnntaattcggcacgaggactttggacaggaaacaagctatattgaagacaactgcaatcaaaatggtgccatatcactgatcttctcactcaaagaagaagttggtgcattggccaaagtattgcgcttatttgaggagaatgatgtaaacctgacccacattgaatctagaccttctcgtttaaagaaagatgagtatgaatttttcacccatttggataaacgtagcctgcctgctctgacaaacatcntcaagatcttgaggcatgacattggtgccactgtccatgagctttcacgagatnagaagaaagacncagtgccctggttcccaagaaccattcnagagctggacngatttgccaatcagattctcagctntggagcggaactggatgctgaccaccctggttttaaagaatcctgtgtaccggtgcaagacggaancagtttgcttgacattgcctncaactaccgccatgggcacccatcccttcgaattggaattacatgggaggaagaaaagaaaacntggggcacagtgttcaagactctgaaagtccttgttttaaaaaccctgccttgctatgaantncnatcacatttttttcccactttccttggaaaaaagttactggtgggcttcccatggaaagattnaccatttcccccagcctgggaaagaaagttttcctcagttccctggcagaacttggcacttgggttttcngcctcccgaaccttgtnacctgggcctggcttttcctcntcgggatttccttngggttggccttggccttcccnantcttnccactggccccccgttncttcagaaatggattcccagcccctgtttaccccccnaaccnggactctncccntnancctgttngggacntttgcccttgttttnccnatccncactttgccccagtttttccccgaatttccnnggttnncnggtgg

SEQ ID NO: 24176 - DNA, 335 bp, Homo sapiens
gtatattttatggagactttattttattctgcaatagagagacgttgctttattagtctgtgtaattgttctgacaagagtggcctaggaatttgaaaataatgctctccatgctgtacccttccccatgttccatgctctaactcaggctcatattaaacattaagaagtcttacgggggccaggtgcagtggctcacgcctgtagtcccagcaatttgggaggccgaggtgggcagatcacctgaggtcaggagttcgaggcctggccaacatggtgaaaccccgtctctactaaaaatacaaaattagcccgggcatggtgtcaggcgcctg

SEQ ID NO: 24177 - DNA, 309 bp, Homo sapiens
  misc_feature (1)...(309): n = a,t,c or g
gatttgtgagtcctttctaacaaccaagtggtggtgatgaatagctaacaaggagcatttatcttatgaggaaaaaaagacagctgtggctttttattggcctgtgagaatctatagtagagaataaagaatttcaaactttttttaaaacagacttttgttcaaatatattctacaggaaagggactcagaaagataaaagttgggctgttttggttgaatgcatggagttgggagaagnaccctnaccccgcncncgcnntnctctnnncatctacnttgacctccncttccttttcannncncctg

SEQ ID NO: 24178 - DNA, 333 bp, Homo sapiens
gtgatcacagaggtaaattctggtagagtcttgaatgcctgttttctagtagacctgagggctctaagactaagaagcaggtgcctcctgtttcactcctaccctcaagtagaaccccacctgccttatttgtaaaggaaggtgctactttctgggcctggagacctgcctcaaagaaggagctgttcatactcttgtttctcctctggttattatggccttcccattccctggtgtttctcaaacttgcatcatcatcagaatcactggggttaggtgactgttacaatccagatttctgccccccatagacctactaaatcagaatcctgg

SEQ ID NO: 24179 - DNA, 355 bp, Homo sapiens
gccacactttcaaagagaaacccctccagaactcccaccctgacagcccaacaccaccttcctcctggcttccagggggcagcccagtggaatggaaagaatgtgggatttggagtcagacaagcctgagtccagttccccgtttagaactcattagctgtgtgactctgggtgagtcccttaacccctctgagcccgggtctcttcattagttgaaagggatagtaatacctacttgcaggtcgttgtcatctgagttgagcactggtcacattgaaggtgctgggtaagtggtagctcttgttgcttcccgttcagcgtcacatctgcagtggagcctgaaaaggctccacat

SEQ ID NO: 24180 - DNA, 496 bp, Homo sapiens
ttctgataattggaggtgttgcagcccgggatcagctctctgttttggaaaatggagtagatatagttgtaggtactccgggaagactagatgacttggtgtcaactggaaagctgaacttatctcaagttagattcctggtcctggatgaagctgatgggcttctttctcaaggttattctgattttataaataggatgcacaatcagattcctcaggttacctctgatggaaaaagacttcaggtgattgtttgctctgccactttgcattctttcgatgtaaagaaactgtccgagaagataatgcattttcctacatgggttgacttaaaaggagaagactctgttccagatactgtacaccatgttgttgtcccagtaaatcccaaaactgacagactctgggaaaggcttggaaagagccacattagaactgatgatgtcatgcaaaagataacacaagacctggtgctaatagtcaaagatgtggtctg

SEQ ID NO: 24181 - DNA, 507 bp, Homo sapiens
atccgaatttaatacgactcactatagggaatttggccctcgaggccaagaattcggcacgagccctcactcactgacagtgtctgtttcagctcctccgtcacctctgttgtggttgtgtgtggtgagatcatagctgatgtttattatttcctgatacattaatctctttctctcattgcttacactggagaatgtcagggtaagggtctgagctgagtgatatttgcaggcatcacctgttgtcttcctgcactcaccagccaaggagaagcctgccttccaccaggactgcagatttcctcagccacccacacagtgaatcatgtctgcatggcacgcccctctgctccttctcgctgaccttcctttcctacctgatggtctaccataagccacctaggcagaactacttatctccacttcccatgttaaacagtgtctggtgaaatcagaggcagcaatcctagtaacacagctgggtctgtaggcccaaacaactactct

SEQ ID NO: 24182 - DNA, 481 bp, Homo sapiens
  misc_feature (1)...(481): n = a,t,c or g
tttgaagnctnttgagtaccgttatgacatgattacgaatttaatacgactcactatagggaatttggccctcgaggccaagaattcggcacgaggagcttctaggttcccgaacctagtgctgggagagtggcacgcccagaggaagcctagaaggtctgcaggcacccccttgcctcccacccccgccataccttgccttatgcagctcttccatctggccattcctgagttgtatcctttatgataaactggtaaacataagtaaagtgtttcctttaattctgtgaggcattccagcaaattattaaacccaagaagggagtcatggaacccctgatttatagctggttggtcaaaagtactagatgcccaaacttgcaattggcatctgaagtaagtggaancagtgttgngcaactgagccctttacttgnggggtctgctgtcaactccaagtagacnagtatnaaaattgaac

SEQ ID NO: 24183 - DNA, 523 bp, Homo sapiens
  misc_feature (1)...(523): n = a,t,c or g
tttgannccctaacagctatgacatgattacgtttttancacgactcactatagggaatttggccctcgaggccaagaattcggcacgagatcaaaatggtgccatatcactgatcttctcactcaaagaagaagttggtgcattggccaaagtattgcgcttatttgaggagaatgatgtaaacctgacccacattgaatctagaccttctcgtttaaagaaagatgagtatgaatttttcacccatttggataaacgtagcctgcctgctctgacaaacatcatcaagatcttgaggcatgacattggtgccactgtccatgagctttcacgagataagaagaaagacacagtgccctggttcccaagaaccattcaagagctggacagatttgccaatcagattctcagctatggagcggaactggatgctgaccaccctggttttaaagatcctgtgtaccgtgcaagacggaagcagtttgctgcattgctacactaccgccatggcagccatnctcg

SEQ ID NO: 24184 - DNA, 530 bp, Homo sapiens
  misc_feature (1)...(530): n = a,t,c or g
tntgataccctttgtgacccgattacgaatttaatacgactcactatagggaatttggccctcgaggccaagaattcggcacgaggtgataaactatgaggacattgaggctctcattggcccgccgccccatgggccgaagaaaatgatcgcaccgcagaggtggatcgacgcccagagggagaaacaggacttgggcgaggaggagaccgaagagacccagcagcctccacttggaggcgaagagccgacttggcccaagtagttgggaggtgctggctgcaccgtgcgggtggtccggnnnnnnnnnggctcctcannnaacctgnnnngctnntnnnttgnggnnntcctttctttnncnancntgannnttncntnntcnggtnccttnnntatttnnttnaaatnnntntnttcttntttttaggntngttnctctattgcttntatttntttnttantnnanatngnatnanntgatttntcttgaatcnttnttnttnnntgntcgtnttcnnttcngaaag

SEQ ID NO: 24185 - DNA, 433 bp, Homo sapiens
atgctccccagagaccagcacctcttcaccaaggagcagctgtttgagcggatgtgcatggccctgggaggacgggcctcggaagcactgtccttcaacgaggtcacttctggggcacaggacgacctgaggaaggtcacccgcatcgcctactccatggtgaagcagtttggggaatgacctggcatcgggcccatctccttccctgaggcgcaggagggcctcatgggcatcgggcggcgccccttcagccaaggcctgcagcagatgatggaccatgaagcaagactgctggtggccaaggcctacagacacaccgagaaggtgctgcaggacaacctggacaagttgcaggcgctggcaaacgcccttctggaaaaggaagtgataaactatgaggacattgaggctctcattggcccgcgcccatggg

SEQ ID NO: 24186 - DNA, 386 bp, Homo sapiens
gccacatacaagtcagatcgtcagcgtgagaaaaagaaagaaaaggagcgtgaagaattgtggaaaaaattggaggatctggagttaaagagaggtcttagacgtgatggaataattccaacttaacaaaaacaatgacaacaacattactaacctgtggagtcacacgtttatgtagtagaagatggagcaacagttttctgtattgtgcaactttacagtagatttcacctttgtttcattattacagcagcactgtatatacctgtctctaagtaaaggaaaaaacaaaataaggacttcaatccaaagtttggacagtagatggacttctcagaactttgcaaacataatcattggtctcaccctcttttaaaaaaaaaaat

SEQ ID NO: 24187 - DNA, 611 bp, Homo sapiens
ctgccggtcagcactggaagtgtccgcgcctcgctcattccctgccagatctaccaaagagaacttgccatgcattctccctttagctcgaagaataatttggaagcacgcgtgggagcgggaggaattggagttggcaaatgtctgcccagaggttctgcaggcgctgcccatgtcgatcatcttgatgacatcatcagcagagttaaccagatgctcctgcagccccaccacttgcacctgttgcttgccgtcttccagcacgcgcagcttggccttcttgttgagcaggtcaaacagcttcccattgtagatctcgaagaatgtcacatagacttccaggcccaacttccggtagcagggttgattcttcaggaggaagacgtcccgggaggccatggcatagatccctttggatgcattatgggctttcccaaagaggtctccgcccatagtatgtgtcttgccacttcctgtctggccatatgcaaaacaagttgcttttccaccttcaaagattgtctgtaccagtggccttgctgtgaacctgtagacaacttcattcgaagctgtttcatcaaatgcaaagtcaaagcagaatgcttggttcc

SEQ ID NO: 24188 - DNA, 384 bp, Homo sapiens
ggagaaccgctacctggtgctgagccgctgtacctatgtggttctggatgaggcagataggatgattgacatgggctttgagccagatgtccagaagatcctggagcacatgcctgtcagcaaccagaagccagacacggatgaggctgaggaccctgagaagatgctggccaactttgagtcgggaaaacataagtaccgccaaacagtcatgttcacggccaccatgcccccagcggtggagcgtctggccaggagctatcttcggcgacctgctgtggtgtacattggctccgcaggcaagccccatgagcgtgtggaacagaaggtcttcctcatgtcagagtcagaaaagaggaaaaagctgctggcaatcttggagca

SEQ ID NO: 24189 - DNA, 391 bp, Homo sapiens
gcaaaaaagtcaggtttggaattcacccagttgcaggccgaatgcctggtcagcttaatgtgctgctggctgaggctggtgtgccatatgacattgtgttggaaatggatgagatcaaccatgattttccagatactgatttggtccttgtaattggagctaatgacactgttaattcagcagctcaagaagatcccaactctattattgcaggcatgccagtccttggaggtcttggaaatcaaagcaggtgattgttatgaagaggtctttgggtgttggctatgctgcagtggacaatccaatcttctacaaacctaacacggccatgcttctaggtgatgccaagaaaacatgtgacgcgctccaggcgaaagttagagaatcctat

SEQ ID NO: 24190 - DNA, 848 bp, Homo sapiens
tttaatacgactcactatagggaatttggccctcgaggccaagaattcggcacgagcggcacgagcccacgtgctgtttgcaaacctgcctgtacctgaggccctaaaaagccagagacctcactcccggggagccagcatgtccactgcggtcctggaaaacccaggcttgggcaggaaactctctgactttggacaggaaacaagctatattgaagacaactgcaatcaaaatggtgccatatcactgatcttctcactcaaagaagaagttggtgcattggccaaagtattgcgcttatttgaggagaatgatgtaaacctgacccacattgaatctagaccttctcgtttaaagaaagatgagtatgaatttttcacccatttggataaacgtagcctgcctgctctgacaaacatcatcaagatcttgaggcatgacattggtgccactgtccatgagctttcacgagataagaagaaagacacagtgccctggttcccaagaaccattcaagagctggacagatttgccaatcagattctcagctatggagcggaactggatgctgaccaccctggttttaaagatcctgtgtaccgtgcaagacggaagcagtttgctgacattgcctacaactaccgccatgggcagcccatccctcgagtggaatacatggaggaagaaaagaaaacatggggcacagtgttcaagactctgaagtccttgtataaaacccatgcttgctatgagtacaatcacatttttccacttcttgaaaagtactgtggcttcatgaagataacattccccagctggaagacgtttctcagttcctgcagacttg

SEQ ID NO: 24191 - DNA, 328 bp, Homo sapiens
gtgacctcagcccagggtggaacctaccgatgctacagcgcaatcaggtcctacccctacctgctgtccagccctagttacccccaggagctcgtggtctcaggaccctctggggatcccagcctctcacctacaggctccacccccacacctggccctgaggaccagcccctcacccccacggggttggatccccagagtggtctgggaaggcacctgggggttgtgactggggtctcagtggccttcgtcctgctgctgttcctcctcctcttcctcctccttcgacatcggcatcagagcaaacacaggacatcggccatttcta

SEQ ID NO: 24192 - DNA, 468 bp, Homo sapiens
gtgtgtttgatcgagatcccttagacgaaccaatacgactcactatagggaatttggccctcgaggccaagaattcggcacgagctggagagatctggatgatgagctcatgaaagaagctgtgctgtacgtggattcccaggaggctgccctgaaggagtctggagatgtcctgctgtcaggggccgagatctttgctgagctgggagaagtgattaagggagtgaaaccagcccactgtgagaagaccaccgtgttcaagtctttgggaatggcagtggaagacacagttgcagccaaactcatctatgattcctggtcatctggtaaataaaacaaaggaacttgatgttgaaatggatgcttgaggaatattgctgctggttctcataatttctagagtaaatgagggagtccagtccccagtgaactctccttttgtgcttatcatgttttaccttaaatgct

SEQ ID NO: 24193 - DNA, 490 bp, Homo sapiens
gtgctggaaagacaactgtcttatacaggctgcagttcaatgaatttgtaaataccgtacctaccaaaggatttaacactgagaaaattaaggtaaccttgggaaattctaaaacagtcacttttcacttctgggatgtaggtggtcaggagaaattaaggccactgtggaagtcatataccagatgcacagatggcattgtatttgttgtggactctgttgatgtcgaaaggatggaagaagccaaaactgaacttcacaaaataactaggatatcagaaaatcagggagtccctgtacttatagttgctaacaaacaagatttgaggaactcattgtcactttcagaaattgagaaattgttagcaatgggtgaactgagctcatcaactccttggcatttgcagcctacctgtgcaatcataggagatggcctaaaggaaggacttgagaaactacatgatatgatcattaaaagaagaaaaatggc

SEQ ID NO: 24194 - DNA, 403 bp, Homo sapiens
atcgaggagaatggagaccaaacctgtgataacctgtctcaaaaccctcctcatcatctactccttcgtcttctggatcactggggtgatcctgctggctgttggagtctggggcaaacttactctgggcacctatatctcccttattgccgagaactccacaaatgctccctatgtgctcatcggaactggcaccactattgttgtctttggcctgtttggatgctttgctacatgtcgtggtagcccatggatgctgaaactgtatgccatgtttctgtccctggtgttcctggctgagctcgtagctggcatttcagggtttgtgtttcgtcatgacttacacggacgctatgcagacttacaatggcaatgatgagaggagccgggcagtggaccatgt

SEQ ID NO: 24195 - DNA, 518 bp, Homo sapiens
  misc_feature (1)...(518): n = a,t,c or g
taacagctatgacatgattacgaatttaatacgactcactatagggaatttggccctcgaggccaagaattcggcacgagtcagcctgtcaactcagttaacaagttaaggaccgaagtgtttcaagtggatctcagtaaaggatctttggagccagatttgtcgtctcattattgtaggagagaatttgtgggttgtggcagtaatacatttcccatgtgtcctgatgctttcaggatacatcagttgttagtgtttaaattgagttatttttattttgtgcttttgagatggagtctcactctgtctcccaggctggagtgcagtagcgtgatctcagttcgttgcatcctccgctgccaggttcaagcagttctgcctcagccttccaagtagctgggattacaggcgtgtgccaccacactcagctaatttttgattctcagtanagatgggttttaccatgttggccangctggtctcgaactcctggcctcaagtgattcncctgcttggcc

SEQ ID NO: 24196 - DNA, 526 bp, Homo sapiens
gtaaagtatcatcttggcagtgtgccaaaggtgaaaatgatgctttctctaacagagaaattcttagtgactccagtcgtagaaaaacgtctttacaacctgaataagattgaagaattgtgaacataccatggcctattggatgaatcatttgccgtaggctaaatcagactgtagggtttgtgatggatttatggagtatgtgggtatagaaatcatgaatctagcatttgttttcagagattcaagcatagtcttaagggtagatcagaaatgacaaatgaattcaaaacctagcaggtgcattgtaaatgtgtgcccagttatgttttggaaatggcagttccttggggtcatgtttctactggcaaaatttgcaatagtgttctattgtatgtaattttaaaatttataagattatccacgttggccaagtaaactgtactgccaatagaattctggaattgtgagaaattgtatcattgaagttcagtaggatgtgtggcttaaaaatttatcaggaccc

SEQ ID NO: 24197 - DNA, 511 bp, Homo sapiens
  misc_feature (1)...(511): n = a,t,c or g
ggattctaacaaccagctctttgcacctggagggcgactgaactttttcaagggcagcagcggaggctcaggagccaagccctcagacgcagcatcagaagctgctcgcccagctactagtactttgaatcgcttctcagcccttcaacaagcggtacccacagaaagcacagataatagacgtgtggtgcagaggagtagcttgagccgagaacgaggcgagaaagctggagaccgaggagaccgcctagagcggagtgaacggggaggggaccgtggggaccggcttgatcgtgcgcggacacctgctaccaagcggagcttcagcaaggaagtggaggagcggagtagagaacggccctcccagcctgaggggctgcgcaaggcagctagcctcacggaggatcgggaccgtgggcgggatgccgtgaagcgagaagctgcctaccccagtgagcccccttgaaaggcggntctctntgaggaggagttagagaagaaatccaaggct

SEQ ID NO: 24198 - DNA, 353 bp, Homo sapiens
gaactggacatggaaaacaaaagggcaataaaggacattatagggacaactgttgaaactgcactatgaattagataacaacaccgtaccaattgttaaatttcttgactgctaattttactgtggttatgcaagagaataccctggctcttagaaatacatgttgaagtattcttaggacttatacaacttaaactcaaatgaatcacaaaaaatacattcacatatatgcataaaaagaaagggggaaagagtgataaagctaatgaggtaaaatacaaacaactggtgaatcttagtaaattatatgtagtaattctctatattctttgtgtattttttctgtaagttac

SEQ ID NO: 24199 - DNA, 319 bp, Homo sapiens
ggcttagtgttatatttgtctttacatcttttaactttgacagcacatgttctctgcatgttcccacgtgttccttggagacaagggaaacacatgaggtggagtaagcatcggccctgccctcaagaagctcagagtcttggagaaaagtcaggaaagaaaccagagaattacacttaatgcggaagtcgtggagtaggggctgggcgcgatgaatcaggcctgtaatcccagtactttgggaggccgaggcagcagatcacctgaggtcggagttcgagaccagcctggccaacatggcaaaactccatctctacta

SEQ ID NO: 24200 - DNA, 432 bp, Homo sapiens
ggcagcgctttcagggtcatggcataccaatatggtgttggtcctgccacaatggaagtgcccttttgaaaatgtcagcactgcccaaagaacaggatgacggcattttacaaatccaaaagagcttcttagatggaatttacaagaccatccacaggccaccctatgaaattgttaaaacggaagacctgtcaagcaacttcctgtccctgcaggaaatccagactgcatactctaaatttaaacagctatttctgatagataacagtactgaattttgggacacagatataaaatggttttctctgttggaaagtagcagctggcttgacataatcagacgttgcctgaaaaaagcaatagagattacagaatgtatggaagcacaaaacatgaatgtcctccttttaaaggagaatgcatccgacctct

SEQ ID NO: 24201 - DNA, 445 bp, Homo sapiens
ggttatgtctgtccagttagggatttcacatccacatgtaatcatgtctgctgctgttgctacccaaattttcatttctccacattttgggtacttaagctaaaacgtaatggccacagtctgtaatccattcacattcctcagtttcaccacctccctcttccagactgcactctctgtcatcagtcccctcctttctaacagaaatggggttatgattttgaaggctgtgggttcagggagtctttgccaatcctgttggccctaaactatcaaggaggctccatttcaccatttgattttttgcatttcaggaggcaactgattgtttcgatatgtacatattactcacgtataccccatttccttccagtcagcccaacattttccaccagtctgtccccatctctgaaatccttccttctctttccccctaagtcttttg

SEQ ID NO: 24202 - DNA, 368 bp, Homo sapiens
gcggcacgaggggagatcgggggctgcagtgagctgtgatcgcgccactacactccagcctgggcaacagagcaagactctgtctcaaaaacaaaaaaaccacatagtaaggtggtggtcataaatccaactatgtcaattatcataaaagaaaagggaccaaactttccagttaaacacagagactgtgagataagagaataagacatcaacgtccttgaagcaaagggaatcattactatattgaggtccatgtttctcctacccttagaacactcatcctacccttaaaacactcattcttcaggatgcaaccaaaaccacagtagccctagcagataccctttgtttgtaaacttgtctagctg

SEQ ID NO: 24203 - DNA, 513 bp, Homo sapiens
  misc_feature (1)...(513): n = a,t,c or g
ttggacnccatngctatnacatgattacgaatttaatacgactcactatagggaatttggccctcgaggccaagaattcggcacgagcgggctagtcatggcgtccccgtctcggagactgcagactaaaccagtcattacttgtttcaagagcgttctgctaatctacactttttttttctggatcactggcgttatccttcttgcagttggcatttggggcaaggtgagcctggagaattacttttctcttttaaatgagaaggccaccaatgtccccttcgtgctcattgctactggtaccgtcattattcttttgggcacctttggttgttttgctacctgccgagcttctgcatggatgctaaaactgtatgcaatgtttctgactctcgtttttttggtcgaactggtcgctgccatcgtaggatttgttttcagacatgagattaagaacagctttaagaataattatgagaaggctttgaagcagtataactctacaggagatta

SEQ ID NO: 24204 - DNA, 428 bp, Homo sapiens
gaaaaatgagggacagggaagtaggcagagacagaaagccctcagagggtaggaggccagttgggagtgagtcctgtcactgcagccagggaagagaatgatttcagagactgtcagtgtagcaggggccatagagcccgactgcctgagttagaggcccagctctgcttattagctctgggaactcaggcacatcacctaacttctgtgtgcttcatccctaaaatagaagtaataatcatatctcacttatgaggttgtagtgaggattagaaaagtgcctggcaggcacagttcacataacacattcacactaatgtaagaattcattgtaactatttagatgcagtagatgctatgttcattataacgtttgttataataactattagatgccatgaaagtcagcacacgaaaagactgagaaa

SEQ ID NO: 24205 - DNA, 412 bp, Homo sapiens
  misc_feature (1)...(412): n = a,t,c or g
gcaggaaaggccctcctccatgattcaattacctcccacctggtccctcccacaacacatgggaattgtgggaactacaattcaagatgagatttgggtggaaacacagccaaaccatatcaagcagtttcttaataaaggctttttcctaaaggttctgaccatttgctttttaaataaagaatggtatagtgttacgtggaggaatagtcatacaaaccacctccaatgttgatgctaataaatagcttgtggggtactcttttttcagctcatatataagatttccttcttatttcaactcttgaatgtgtagaactatgagacctttgtatgattagaacttttttcagtgactctgcagtatttgnaacaaaagctggaacaactttcagcagaacctgggttgaga

SEQ ID NO: 24206 - DNA, 111 bp, Homo sapiens
gaaacaacgcattgctattgctcgggccattgtacgagatcctaaaatcttgctactagatgaagccacttctgccttagacacagaaagtgaaaagacggtgcaggtggt

SEQ ID NO: 24207 - DNA, 789 bp, Homo sapiens
ctttgaaaaccttgacatgattacgaatttaatacgactcactatagggaatttggccctcgaggccaagaattcggcacgaggtggtgcagggtctcgggctagtcatggcgtccccgtctcggagactgcagactaaaccagtcattacttgtttcaagagcgttctgctaatctacacttttattttctggatcactggcgttatccttcttgcagttggcatttggggcaaggtgagcctggagaattacttttctcttttaaatgagaaggccaccaatgtccccttcgtgctcattgctactggtaccgtcattattcttttgggcacctttggttgttttgctacctgccgagcttctgcatggatgctaaaactgtatgcaatgtttctgactctcgtttttttggtcgaactggtcgctgccatcgtaggatttgttttcagacatgagattaagaacagctttaagaataattatgagaaggctttgaagcagtataactctacaggagattatagaagccatgcagtagacaagatccaaaatacgttgcattgttgtggtgtcaccgattatagagattggacagatactaattattactcagaaaaaggatttcctaagagttgctgtaaacttgaagattgtactccacagagagatgcagacaaagtaaacaatgaaggttgttttataaaggtgatgaccattatagagtcagaaatgggagtcgttgcaggaatttcctttggagttgcttgcttccaactgattggaatct

SEQ ID NO: 24208 - DNA, 462 bp, Homo sapiens
tgacatgattacgaatttaatacgactcactatagggaatttggccctcgaggccaagaattcggcacgagctgaatagctgggactacaggcgcgccaccacgctcagctaatttttgtatttttagtgaaatacgaaaattagttttagcgaaacggggtttcaccatgttggccaggatggtctcgatctcttgacctcgtgatccacccgtctcggcctcccaaggtgctgggattgcagacatgagccaccgcgcctggtgaaagttaaaaatcttaaagcaaccagtggattgagacacattatctttacacaagcaagaaaaaggctgggcgtgatggctcatacctgtggtcccggtactttgggaggctgaggcgggatgattccttgagcccaggagttttgagaccagcctggtaacatggtgagaccttgtctcagttttaaaaatttat

SEQ ID NO: 24209 - DNA, 427 bp, Homo sapiens
  misc_feature (1)...(427): n = a,t,c or g
ggtgcacttggaggaaagggggcaagaaccgcatttcctggggtggtaggttgggtggccactgccacgagtgcaaggagggcctgttatggtgctgccaaggtccaggtgggtcaggtgccagggtgggactcacatgtcccagctgcccacacctgcccaagtcagatgccccacatgcttagtggaaacatgactgccaacccatctgatgcttatgtttccagctccctgcattccattcctgtgggcctctagatggttttcaccttggataaaattcttttcttcctattgagagactgtcctgagataaaagtgagcattgtcagtgtgtgtgctggctcacatctgtaatcccaaaatgctgggattacaggcgtgagccactgngaccggcccaaaagatttggtttttttttttaaa

SEQ ID NO: 24210 - DNA, 418 bp, Homo sapiens
tgcatacctagttagtttcctatatattcatgccatcttgaaaagacagactatggtgtaaccatgattctattatgtattggtaccgtctgtagaccaagatataattttttaaaaataagtttatttctttcaaggtttacaaataacaaaggtgcaccttgtatttaaaattgccattatagatgagagcgtgcatgcacagtcatttttgtttaagagtaatatttttaatgtaatagattgtaagacgtggtgagggagggatctgacagagatgaatgtgccaagcaaaaccacaactgtgtatattttaaagcacatcatggctttaagtaccatgttgttaaggattctcatgaagtgccatagactgtacatcaaattagagtattatttcttcagtgttattgttttc

SEQ ID NO: 24211 - DNA, 269 bp, Homo sapiens
aaaaattgtgagaatgaaattccaccttagtttcttttctctgaaaagagccatattttatatatgtgccaaagctgataaaatcagtggaggctatttgtacaaatgtaggacagtgtcgtatagtggaaagaatgttagatctggagttaaaatatctggatttctgtctgcttgcatcattagctatctgtgattgtgagcaagtttcctagtgttttaagtaattcacccaagattatgcaagtagtgagttgcagaaccaggat

SEQ ID NO: 24212 - DNA, 336 bp, Homo sapiens
ggaatactttctttgttgtaaaacagcatatttatatacatttataaatgcattaagttctagaaggatacatgagtaaaaatatgaatttaaaaattaaagtcacagatttaggtgttgtcacctacctaccttatggttttttcctactacacttacatacctcttcataatctgctctatgtttcccatgtaacaccactattacaaaatagataaagcaggctgcctttgtagcagtaatttgagtttcatgtgtccccatgtcctgctcagtattacagcaactgtcaaaacacaacaggaaagtaatgattagaagtgcacttattacca

SEQ ID NO: 24213 - DNA, 365 bp, Homo sapiens
gtccagcggcctcttccccttcctggtgctgcttgccctgggaactctggcaccttgggctgtggaaggctctggaaagtccttcaaagctggagtctgtcctcctaagaaatctgcccagtgccttagatacaagaaacctgagtgccagagtgactggcagtgtccagggaagaagagatgttgtcctgacacttgtggcatcaaatgcctggatcctgttgacaccccaaacccaacaaggaggaagcctgggaagtgcccagtgacttatggccaatgtttgatgcttaacccccccaatttctgtgagatggatggccagtgcaaggtcgacgcggccgcgaattccagatctatgaatc

SEQ ID NO: 24214 - DNA, 333 bp, Homo sapiens
ggttgagaaaagccttgaaagttgtgaagcactgagcagatacaagtgtttgttaattttgtagaaattaactttcccatctggcctttatctccaaagttggtattgttgctccacgcagactgcagtccggtttcttattgtgactttgacaatgcaaagtgcaaaataggaagaggcctccccaccccactatcccaccctggtgaccaattcagtgtaaccattgcacgtactcagtcattggtgtctttggagtgacatctgcagccagttagtgccacctgagtacagcactcgtacttttacatgatgtgtgtgtgagtagctctt

SEQ ID NO: 24215 - DNA, 338 bp, Homo sapiens
gtagaggcatatagggataggcgaggggaaacttaaatcatcaacctggagcagccgtggcagctccatgcgtgaggctggtgccacacagtatcccggtgttggcattgtctccaggccttctctgttccgcacgcagttacaaaacaaaagaacagttgccagcagttggaagaggatgtggatccaaaccaaatgggggacagatactccctctatggactagatactcatggaagaagtcaagttagaagagcaactgaaggaggttgtggaagaagataagcttgcattgtcagatactgagggcttgcagcagagcagccaaaaattggtgg

SEQ ID NO: 24216 - DNA, 579 bp, Homo sapiens
gcccgaagacttccttgatatcatgggtcagccaatcaaccctcaatgtcgaatctacccagaggaaatgattcagactggcatttcggccatcgatgggatgaacagtattgctagggggcagaaaattcctatcttctctgctgctgggctaccacacaatgagattgcagctcagatctgtcgccaggctggtttggtaaagaaatccaaagatgtagtagactacagtgaggaaaattttgcaattgtatttgctgctatgggtgtaaacatggaaactgcccggttcttcaaatctgactttgaagaaaatggctcaatggacaatgtctgcctctttttgaacttggctaatgacccaaccattgagcgaattatcactcctcgcctggctctaaccacagctgaatttctggcgtaccaatgtgagaaacatgtattggttattctaacagacatgagttcttatgctgaagcacttcgagaggtttcagcagccagggaagaggtacctggtcgacgaggttttccaggttacatgtatacagatttagccacgatatatgaacgccctgg

SEQ ID NO: 24217 - DNA, 481 bp, Homo sapiens
  misc_feature (1)...(481): n = a,t,c or g
gtggtcattgaagttttttggttattatgaaaagtgctgctgtgtgtcttttgatgctgtatgtgtccctttagatgtatgtgtttgtttgtgtgtgtttaattttgtttggatatctattaaggattggaattgcctgattatagagtatatacatgttctgcgttaatgggtattgttaaacatttttccaaagtggttgtttcagtttatattctcaccagcagtgtttcagtgtttcagtttttttgcatccttatcaacacttggtattgttaaacttttaaggtttagcaatcctagtggatgtttagtggtatcatgataatggatttaatttacatttccctgatgactaatgaggtttcactttttttatttgattattggtaatttgnatttcctcttttatgaaatgctgattcaagtctttttcccattttttgactaggtttatggctactgatttgtangagtcttt

SEQ ID NO: 24218 - DNA, 378 bp, Homo sapiens
cccacgcgtccggctcttgcaacggcctgcagcattatgctgctctgggccgcgacagcgtgggcgccgcctccgtcaacctggagccctcggatgtgccgcaggacgtgtacagcggcgtggccgcgcaggtggaggtgttccgtaggcaggacgcccagcggggcatgcgggtggcacaggtgctggaaggtttcatcacccgcaaggtggtgaagcagacggtgatgacggtggtgtacggggtcacgcgctatggcgggcgcctgcagattgagaagcgcctccgggagctgagcgactttccccaggagttcgtgtgggaggcctctcactatctcgtacgccaggtcttcaagagtctacaggagatgttct

SEQ ID NO: 24219 - DNA, 447 bp, Homo sapiens
ggctctcacaaggcgacttgaagaggacgcaggcttccagaggacaaaccccaatacaggagaagcacaagacagagaagggccaatggggtcatcccctccctaacgagactctctgtgctgggggtgctaattacatggcaggaagaatggggcctctaaggggagtgtggggtctgtctctcccttttttccatctttttcctctctcgctttctttcttacacagaaacatacacataccgagaaacctatttctcagacccctttttctcctctgtctttctctctccctctcccacacctcacacacacatactcccacttgcaactattctgattctctcctgggctcccccactttcccttccccaccccacttgtatgctctggaatctgtggagacgccagccctgcccaatcagagatgccaaaaatggggcatga

SEQ ID NO: 24220 - DNA, 318 bp, Homo sapiens
gcaaaggaaatttcatactttgaatagattcatttgcacatagcagtttggttttaaaagatacagccttaaaatcattgatatttttaaacacagattatatacaagtgcattacatctcatttttcttatatcatcacctacaaagaaagaagaagaacatgaaatatttgatgagaagaataattgaatgaatgataattaagagccgggtttatatcatacgccagtttccatgttgcaagtactcccaataactgatttcaaactacccatgtgatgtcattgaaggcagagttgaaaaagattttcagtaga

SEQ ID NO: 24221 - DNA, 494 bp, Homo sapiens
  misc_feature (1)...(494): n = a,t,c or g
gggtagactaacggaacagaatagacaactcagaaataaagccacacacctacagccatctgaacttggacaaactcaacaatattaagtaatggggaaaggactccctattcaaaaagtagtgctgggataactggctatccatatacagaagaatgaaactagactgctacctatccccatatacaaaaattaaatcaagatggattaaagacttaaatgtaagatctcaaactaaaaaatcctagaagagccaggcgcggtggctcatgcctgtaatcccagcactctgggaggctgaggcggatggatcacctgaggataggagttcgaggccaggctggccaacatggtgaaaccctgtctctactaaaaatacaaaaattagctgggcatggtaatgtgtgcctgtatctcagctactccgggangctgagacaggagaatccttgagcctgggaggcacantgagcccagatcgcaccattacactc

SEQ ID NO: 24222 - DNA, 379 bp, Homo sapiens
cggacgcgtgggctgaagtttgtcgcattcctacccatctctttacttttatccagtttaagaaagatctgaaggaaagcatgaaatgtggcatgtggggtcgtgccctccggaaggctatagcggactggtacaatgagaaaggtggcatggcccttgctctggcagttacaaaatataaacagagaaatggctggtctcacaaagatctattaagattgtcacatcttaaaccttccagtgaaggacttgcaattgtgaccaaatatattacaaagggctggaaagaagttcatgaattgtataaagaaaaagcactctctgtggagactgaaaaattattaaagtatctggaggctgtagagaaagtgaagcgcac

SEQ ID NO: 24223 - DNA, 326 bp, Homo sapiens
ctgaagatcagcactaagagcgtgggccgagacgagcgggaggatatcacccacacctacaaatacccagaggggtcctcagaggagagggaggccttcacaagggcgaaccacctgaacaaactggccgagaaggaggagacagggatggccatgcggatccgtgtgggccagagcatgaacatgggcagtgactttgacgtctttgcccacatcaccaacaacaccgctgaggagtacgtctgccgcctcctgctctgtgcccgcaccgtcagctacaatgggatcttggggcccgagtgtggcaccaagtacctgctcaacct

SEQ ID NO: 24224 - DNA, 612 bp, Homo sapiens
  misc_feature (1)...(612): n = a,t,c or g
cccgatacgacatgaaccaacatgatctatcacagggaaccggtttctgaggttaagaacctggtatgagagcccacaaaaaccatatgacggctagaggtaaaaggaagagacggataaccccccattttctaacccaagacaaccacagggaagctacagaccccgctacaacgttaccctcgaaaacaatatccccagaagccacgaaggtagcatccacctaccaaataaaacaaggaaaacacagaaaaatacaaagaaaacggaaacaactcatagcctcttcaattaaagtgaggtaccgcaaatacacacagcataccttttctccctcaattctaagccgtcccgcgctcacggacgcgttacaacccccccaatcattttttccattttacgaatacccaggccgccctcttcgttgttttttgtaccccgtcaccacagataacaacctacagaatactcccctcactccccggtcgtaccctcagcacctcccaaangggggcaccccccctatccgaaattcaggngaataanacggggcccccccccccttcggaaaanaaccccccccccccnnntnaaaaaangggggggaacccc

SEQ ID NO: 24225 - DNA, 509 bp, Homo sapiens
acccctttgacatgcttacgaatttaatacgactcactatagggaatttggccctcgaggccaagaattcggcacgagtgcataagtactacattttctttatctactcatctgttgatgggcacttatgtggcttccaaatcttggctattgtgaacagtgctgcaataaacatgggagtgcagatatctctttgatatgctgatttcctttcttttgggtatataccgagtaatgggatggctgggtcatatggtatttctagttctagttttttgaggaatcgccacactgacttccacaagggttgaactggtttacagtcccaccaacagtgtaaaagtgttcctgtttctccacatcctctccagcacctgttgtttcctgactttttaatgatcgccattctaactggtgtgagatggtatctcattgtggttttgatttgcatttctctgatggccagtgatggtgagcatttttccatgtgtctgttggctgcataaatc

SEQ ID NO: 24226 - DNA, 425 bp, Homo sapiens
ggctgtatttccaagggagggttttatttttctcttttgactgactctaaggaatttagtggaagcagccttgggtttttactagtctttaaagtgaggtttgtatgtgaggagcagggcttggccactgtagagacgcactgctcaaaccctgccaaggggagcttagcagattgacagcctccagcactgacctttctatccaccctgcttcatggaagtgtttcctactggtgatgggcacaacaggggtctgaaagcagagccatttctgcagatatgggactcctctaatggcagcctactaggcgactctgctgggctgaccaagactttcccagaactagagaaagtctggaggctctgctcacttcctttatcctttatagacatctccttaaatctcttggacatctaaccctaac

SEQ ID NO: 24227 - DNA, 610 bp, Homo sapiens
ggaaagcacccagctccctacccctgagaggggatgcccagatctcagtgacgctggttaatcacagtgagcaggagaaggcagtgcagctggcaattggggtccaggctgtacactacaacggtgtccttgctgccaagctctggaggaagaagctgcacctcacgctcagtgccaacctggaaaagataataaccatcggcctgttcttctccaattttgagcgaaacccacccgagaacaccttccttagactcaccgccatggcaacacactctgaatccaaccttagctgctttgctcaggaagacattgccatttgtagaccacaccttgccatcaagatgccagagaaagcagagcagtatcaacccctcacagcctcagtcagcctccagaactccctagatgcccccatggaggactgtgtgatctccatcctgggaagggggctcattcacagagagaggagctacagattccgttcagtgtggcctgaaaacaccatgtgtgccaagttccagttcacgccaacacatgtggggctccagagactcactgtggaagtggactgcaacatgttccagaacctaaccaactataaaagcgt

SEQ ID NO: 24228 - DNA, 231 bp, Homo sapiens
gatgtatttgaagtaataaattgtcaaagtgattactgggtactattaaaatgataggtggatataaatggaagtaaacattatgtagtgataatatagaacctcacatagtaatcaagtataaaatttggcatgggtggagaaacaaagaatagggaagctgcaaaagatgaatttagagaagttttcatctatacaatcaattatttttacagactttttttttttttt

SEQ ID NO: 24229 - DNA, 550 bp, Homo sapiens
aggccaagaattcggcacgaggtttacaagagcttttccccttttggggtgtctggataactcagagcctgcaaatggtctctttgtaaatattacacttacaaaatgcagtactgggaaaggacagagaagaggctttgtcttccatatgcagccagaaaggagctcactgcctgatttttcagctatttaatctcaacctttacatttatatttccaaccccctttgctatggggtagtaggacgagagtggatggaggtgctttggaggggatgctgctgtcttaatatacctctgctccgcagactgtcatagagtggtcccaggtgcacttcctcagggagatcatcgaggccatgttgaaagcctatcagcagaagctctttgtgactcacacagttgacgaattgctctggggctacaaagatgaaatcttgtcccttatccatgttttcaggcccgatatctctccctattttggctattctatgagaaaaatgggactaatgatggagactatgttttctaactggagaagacagttcctt

SEQ ID NO: 24230 - DNA, 368 bp, Homo sapiens
gctgtgttctaattctgaagtgagaaattattgactaagacaaggtcctttgccttcaaaaacacacctgcagacacgaccgaggtaaaatcaaagatttggcaacagcacataggagaaagaagaactggtagaaagcaaaataagttatttgaggaacagttttggatgtgctgtttggatacataaagggaaaaatccctaaagcaattgacaaatagtttagaactacggaaatagatttggtctctctccctacataaatttgctagaaaggaagagaatcaaagatggaactctgaggaagcagcacttaagggatgagcagaggtgtgtttaggagagatcaagaggaaactttcagagag

SEQ ID NO: 24231 - DNA, 335 bp, Homo sapiens
gaggagaaagagggcccgaacaggtgatgcttgagttgagtcctgaaggaacaagacacgaggaagtttccggcaaaggatatagcatccacaaaagtgtcaaggccagagaaggtgtgtatgtacaggaaatgtgtggggaaggaagggaaattgagatcaggagttgtcaggatctgtttggggggcagtgaatgttcaggttacatgtaggatatatataggactttatgtatgatatatataggacttttagcgatttcctgaattcaggagtaccgaatatagttttctccattaaatacatcatgggcagagaggtttcaagctgccag

SEQ ID NO: 24232 - DNA, 397 bp, Homo sapiens
  misc_feature (1)...(397): n = a,t,c or g
ggaccataattaaagccacacttgttgactaggtcttctaacttttattttgtcctgtgacttcttgcttgaataactattaatattcaaactttatcttgaagcctagaggaggagttttttaaacaaaattttaatttaattttagatttgggggtacatatgcacgtaattaacatggatatattgcataatggtgaggtttgggcttctagtgaacctctcacccaaataatatacctttgtacgtgatagtgtaacattgtacttgataggtaatttttcagcccttctctcctccttctggagcccccagtgtctgnttatttccatctttatgtctgtgggtacttattgtacccatttatctttatgcctctgtgtacccattgtaccc

SEQ ID NO: 24233 - DNA, 418 bp, Homo sapiens
gcacgtccattgctcagctcaaagtggtacagaccaagtatgtggaagccaaggactgtctgaacgtgctgaacaagagcaacgagggtatggggtaggcgggtgagggtaacctaaagtggcgaacctgcttctctcgtcccacctcctaacccagtttttcttacctgaaacgagaaaatccattacatatcgtataccgcttcatgaaccctttgcatgttgcctgcctagaattgaaaagtacaggacattcctctgctcctattgcccctgtttccgttcttttcacactgtctgtgggtgctgtgccctgttggaactctctttaacgtcttacgttggagccgctaaccttccccaggtgtttgtcttcattgctttcacagggaaagaattactcgtcccactgacgagt

SEQ ID NO: 24234 - DNA, 432 bp, Homo sapiens
gggcagtgttcatatacgtaagttcagctgttacgtgtttacaactcaaatccaatggctaccagttttcccactggacctctctggatttagcaatctctaaaattgtattcacttgattcttaaaaaaataaaaaagcttaaatgcagataggatgtcaccctgtttaaaatttctagtggctgctctggtcatcagtttaataaaaattccttagcatgaccaagaaggctcttcactacttaaaaataaaggctgggcacgtggctcatgcctgtaatcccagcactctgggaggccaaggcagtaggatcacttgagcccaggaattcgaaaccagcctggactacgtagtgagactccatttctactaaaaaaattaatggctcatcataatctattcaaaactactgagttttaaccataagaag

SEQ ID NO: 24235 - DNA, 530 bp, Homo sapiens
  misc_feature (1)...(530): n = a,t,c or g
tnnnnnttggaaatntgaataccnttatgactgattacgaatttaatacgactcactatagggaatttggccctcgaggccaagaattcggcacgaggatgctaccaccctggatgacaatggaaccatgctgttttttaaaggggagtttgtgtggaagagtcacaaatgggaccgggagttaatctcagagagatggaagaatttccccagccctgtggatgctgcattccgtcaaggtcacaacagtgtctttctgatcaagggggacaaagtctgggtataccctcctgaaaagaaggagaaaggatacccaaagttgctccaagatgaatttcctggaatcccatccccactggatgcagctgtggaatgtcaccgtggagaatgtcaagctgaaggcgtcctcttcttccaaggtgaccgcgagtggttctgggacttggctacgggaaccatgaaggagcgttcctggccagctgttgggaactgctcctctgcctgagatggctggcccgtactactgcttc

SEQ ID NO: 24236 - DNA, 422 bp, Homo sapiens
gaaatgctgttttaaagctgattgaaaaggaaaggaatggtgaaaccatcaatacaagattgattagtggagttgtacagtcttacgtggaattggggctgaatgaagatgatgcatttgcaaagggccctacgttaacagtgtataaagaatcctttgaatctcaatttttggctgacacagagagattttataccagagagagtactgaattcttgcagcagaacccagttactgaatatatgaaaaaggcagaggctcgtctgcttgaggaacaacgaagagttcaggtttaccttcatgaaagcacacaagatgaattagcaaggaaatgtgaacaagtcctcattgaaaaacacttggaaattttccacacagaatttcagaatttattggatgctgaccaaaatgaagattttggg

SEQ ID NO: 24237 - DNA, 514 bp, Homo sapiens
ggagggtctagcctgggtgagtatggagggtctagcctgggtgtgtacggagggtctagcctgggtgagtatggagggtctagcctgggtgagtacggagggtctagcctgggtgagtatggagggtctagcctgggtgtgtacggagggtctagtctgagtgcgtgtggggacctcagaacactgtgaccttagcccagcaagccaggcccttcatgaaggccaagaaggctgccaccattccctgccagcccaagaactccagcttccccactgcctctgtgtgcccctttgcgtcctgtgaaggccattgagaaatgcccagtgtgccccctgggaaagggcacggcctgtgctcctgacacgggctgtgcttggccacagaaccacccagcgtctcccctgctgctgtccacgtcagttcatgaggcaacgtcgcgtggtctcagacgtggagcagccagcggcagctcaaacagggcactgtgtccggcggaccaagtccactctgggg

SEQ ID NO: 24238 - DNA, 412 bp, Homo sapiens
gccattagccatgtttattgctttctctaagactataaccaagttattacaattttttaaatgttcagttgattttataggtggaaaataagccctgtcgttctccacatgagtaaagcaggatgcagagagcttaggagatgtgccaagatcccagggctggcaggaggcaggcccagggctggaagccaggcctccttgttcccaggaagggaaagctgcgtatgccttttgagttaatgacacgaaagcacagacaactggacatggttcttttgaacatcgtaacatcaattcattgggatcaaatcaacactgagcatcagtattcagtgtttaatgcacattttaatttcactgcagagaggatcgcacctcattactagcggttattgagtcactactcagtaaa

SEQ ID NO: 24239 - DNA, 339 bp, Homo sapiens
gaataaccttttcccatctttccctagtagatgcctcagcactgggaggtaaagtcaagccctttgagccagtcttccagggactcagtagacaggtcgaaacaaacaactgcagttctttgccgatgaggcccattctgctccctctgggaccagtgcatgcaccggagtggcagcctcttgtcttctaggccactgcggcagccaggatgggaccagagaaagttaaaatgccatggaacctcgcggttcttgctgagattcacctggtttttcttgattaagcattcttctgattgctgcaagtttttaattagttttccaaagttttaaaatagt

SEQ ID NO: 24240 - DNA, 327 bp, Homo sapiens
ctctggaccagctatttccagaataaataatgccgcctttgaggctgttgtcgtcacaaacacaattccgcaagaggacaaaatgaaacactgcaccaagattcaggtcattgacatttccatgatcttggccgaagcaatccgaaggacacacaatggggaatccgtgtcctacctgttcagccatgtcccgctataaatccagaatgggaagtgtccagcaagcctactctgacttctgacttgtttttgttttctggatttttagctgtaggtattcagcaatgataggttaatcaacttgggcaaaaaaggcatcagatcttt

SEQ ID NO: 24241 - DNA, 335 bp, Homo sapiens
ggagagctagcaccatgagcttaataccctgggtgtcagattcaaaacaaaccaaaacctggtgacacgcagatcaccaggttgtctgggttgtctgtttatacaaaagacattctgtcaacaaaacaaattcaactcttccctgcagctcaacaatcctggtctgctgtgagacagggctttcctcagtccgtgtttgggtatcagttaatgttagtcctacaaaaacaaaattacgtccctcaagttcagcagccaaaagcagatggtggccgggtgtgtggttcacgcctgtaatcccagcactttgggaggctgaggctgatggatcgctt

SEQ ID NO: 24242 - DNA, 1070 bp, Homo sapiens
aattcggcacgagagcatggctagggtactgggagcacccgttgcactggggttgtggagcctatgctggtctctggccattgccacccctcttcctccgactagtgcccatgggaatgttgctgaaggcgagaccaagccagacccagacgtgactgaacgctgctcagatggctggagctttgatgctaccaccctggatgacaatggaaccatgctgttttttaaaggggagtttgtgtggaagagtcacaaatgggaccgggagttaatctcagagagatggaagaatttccccagccctgtggatgctgcattccgtcaaggtcacaacagtgtctttctgatcaagggggacaaagtctgggtataccctcctgaaaagaaggagaaaggatacccaaagttgctccaagatgaatttcctggaatcccatccccactggatgcagctgtggaatgtcaccgtggagaatgtcaagctgaaggcgtcctcttcttccaaggtgaccgcgagtggttctgggacttggctacgggaaccatgaaggagcgttcctggccagctgttgggaactgctcctctgccctgagatggctgggccgctactactgcttccagggtaaccaattcctgcgcttcgaccctgtcaggggagaggtgcctcccaggtacccgcgggatgtccgagactacttcatgccctgccctggcagaggccatggacacaggaatgggactggccatgggaacagtacccaccatggccctgagtatatgcgctgtagcccacatctagtcttgtctgcactgacgtctgacaaccatggtgccacctatgccttcagtgggacccactactggcgtctggacaccagccgggatggctggcatagctggcccattgctcatcagtggccccagggtccttcagcagtggatgctgccttttcctgggaagaaaaactctatctggtccagggcacccaggtatatgtcttcctgacaaagggaggctataccctagtaagcggttatccgaagcggctggagaaggaagtcgggaccc

SEQ ID NO: 24243 - DNA, 328 bp, Homo sapiens
gatttgcaacgtgcccttgtaacaccaaatttgatcagttttttaaaaaatgatcgttatgtaggtgattgagaagtaaatgtattcttttttaaggtaaaaatttggacccttatcatgcatacccccctctgtgctcttcaaatcaacatcattattaatatctgtacatttttgctcatctgagccagcacaggctgaggctgtcagaatggacaccttttggttgttgggtttctgtcagtttctggggtgaagctgcgtgattgagaacgtagctcttggctgccatctcggggattattaaggactgtgaactctatccaca

SEQ ID NO: 24244 - DNA, 372 bp, Homo sapiens
ggggacgggcctcgccagtcacactccagcgcccccacgagccagcacagtgcctgctctcagtgaaaggccactgttctccttgggtgacccccatgatgcctgaccgctcctcgtgcctcctggaacagccagggtccttatgaagtggtgaccactccagtcagcaggggtggaaaatggtaccagtcaaacccgaggcggaggaggagcagcccgcagtcgctgccgcgagatggaggagcccacgcccgagcccgtctatgtcgacgtagacaaagggctgaccttggcctgcttcgtcttcctctgcctcttccttgtcgtgatgatcatccgctgtgccaaggtcatcatggacccttacaagcg

SEQ ID NO: 24245 - DNA, 427 bp, Homo sapiens
  misc_feature (1)...(427): n = a,t,c or g
gcctcctttgattggaaaaattttgaacagaaaatgctgaaaaaaggagggtcatggattcaagaaataaatgttgctgaaaaaaattggtacccccgacagaaaatatgttacgctaagagaaagttagcaggtgccaatccagcagtcattacttgtgatgagctactcctgggtcatgagaaggcccctgccttcagagactatgtggctgtggcacgaggaagcaaagatcacaacattcgtgcccaagaaccagagagtgggctttcagaagagactcaagtgaagtgcctgatggaccaggcaacagaccccaacatccttggcagaacctgggaaggatgggagccctgatgtgaggtctgtgggagtctgcagatagaaagcattacattgtttaaagaatctactatnctntggtggg

SEQ ID NO: 24246 - DNA, 615 bp, Homo sapiens
caccacccgagtatggccctcacgccgacagccctgtgctcatggtctatggcttggatcaatctaagatgaactgtgaccgagtcttcaatgtcttctgcttatatggcaatgtggagaaggtgaaattcatgaaaagcaagccgggggccgccatggtggagatggctgatggctacgctgtagaccgggccattacccacctcaacaacaacttcatgtttgggcagaagctgaatgtctgtgtctccaagcagccagccatcatgcctggtcaatcatacgggttggaagacgggtcttgcagttacaaagacttcagtgaatcccggaacaatcggttctccaccccagagcaggcagccaagaaccgcatccagcaccccagcaacgtgctgcacttcttcaacgccccgctggaggtgaccgaggagaacttctttgagatctgcgatgagctgggagtgaagcggccatcttctgtgaaagtattctcaggcaaaagtgagtcgagtgtgcccacctccttgccctaattgcatggtggttggtgggcagctgcctagttcctattgggtgagtctaaaaccttgacttttccccttggtttgcaat

SEQ ID NO: 24247 - DNA, 1279 bp, Homo sapiens
gcaaccctccaagagggcccttttatgatccccattttacaatggggaaattgaggcacggggggttaatttgctcagtctgtttgctcacagactcagcagatggccaagctggtacttaggccaaggcagtctggccccaatgcccatgctgggaattgctggggatcacagtcctctgtgcctctctcaccacaaaactggaacctcacaaactccctgccactaggcagggcctccccagcccctactggcctgccccacctccatttggactggcacatttggactgggccatcacattcccctcagaacagccctgataaatgtaccggtgcatgtgagtacatatatgcatgtgcacgcatatgtgtgcgcctgtgtgcacgtgtgggtgggtgtttactatcaagaagcaacagacagccgtgagcctcactcaccccaactagggggtgggaagcccaggggtggggcagatgtttgctgtgagcattactcaagagagagaagatgacttaatggcttgcatttcagccacatcaaaaagccctgcgccaacgttaaaatcacatcccattgccaccagccccataaagggcttccctggacgtgcccgatttccaaagcctaatctttgtagtcacatctccacctctatctgccagtgttggggcccctctggggcccagcagcgctaagacaggaggaaggcacggggctgggggagaaggaacccctagaccctgctcaccactgcccttcggcttttcagccacaccggtgagccccgccatgtcctacctgagtgagtacatgctggcagctgccactcctcccactgcttagagcctgcccctgccacatgtccctccaccgtggctactcactcagctctccgggatgggcagatggacaatgtgccctgaggagattgcggggtgggagggcaatggcattagcgagcgggaaggggaggggaggggcataagctgaactcctatgggggtcgtcgggcgcctcccagggccacttgcttagctcagccctctctccctttgtatctgcagccagctaccagcctcctcaaaacccctactactatgtggacggggatccccacttcatcatccaaattccggagaaagacgatgccctctgcttcaacatcgatgaagccccaggcacagtgctgcgccttattcaggatgcagtcacaggcctcacagttaatgggcagatcactggcgacaagagaggcagccctgactccaagact

SEQ ID NO: 24248 - DNA, 465 bp, Homo sapiens
ggcaatttttttatactaccaagtgaccataaaggcatggcatttgttgtgactggcacccaatgtttgattttttttttaaaactatccaattaaaattaaggtctgggagtgttctgtttcccattactttaatactcacctcctcccagactttctacacctgttgcacctcaggcagaggatgttctggacctccccctcttggtccctactagagacctctcaacagatctgtgggcccagtcattgggttttatcagtgcttaatgtgaactaagttttttacttccacagaatacaagccactaccttctgacctccccaccccccaccaacccccatcttttaatatgctgtggggcatagaactccggaatgaccagcatgatattttcagagtcttgtccccggggtattagcacctctttttgaacagggaattgattcaagattggacatggg

SEQ ID NO: 24249 - DNA, 584 bp, Homo sapiens
ttgattacgaatttaatacgactcctatagggaatttggccctcgaggccaagaattcggcacgaggtgagtcccaagatagttttacaaatgataaaagaggaagaagctggctgggcgcagtggctcacgcctgtaatcccagcactttgggaggctgaggcgggtggatcacctgaggtcaggagtttgagaccagcttggccaacgtggcgaaaccccgtctctactaaaaatacaaaaattagccggacgtggtggcgggcgcctgtaatcccagctactcaggaggctgaggcaggagaattgcttgaacccgggaggcggaggttgcagtgagctgagatcacgcccctggactctagcctgggcaacagagtgggactccatctcaaataataataaatttgggcatttcacatcaggtttgcataaattaaaacatacaattcaagccacgcaacacggttgatgtctgtaatcctggcattttgggaggcctgggtgggcagatcacctcgtgccgaattcttggcctcgagggccaaattccctatagtgagtcgtattaaattcgtaatcat

SEQ ID NO: 24250 - DNA, 438 bp, Homo sapiens
  misc_feature (1)...(438): n = a,t,c or g
gagatgagtgaaggcatctaggggcgctgttgtctgtccactcttcctgaagcctggctgatcaacctgtgctttatggcataagctccctcattgtttcaggtggggttctgtgcttgcaaccaagcagcgatgcctaagaggagaggcaaacattcattcagcctggatgtgtcccaagagaacttcccggtctccaacccttccctggcctactctataaggctgggctctatattaacccctacagtcttgctgatctgttggtgtattctgtctggcatctcagtctatcaataaaataataatcataggtattacttgagggtctctggtacaataagcattttacatctattattgctctcattgggttaaattaaaatttcaaaaggnaaaatcctgactctcgtgcaaatgtgaaatgaacccatgcca

SEQ ID NO: 24251 - DNA, 522 bp, Homo sapiens
  misc_feature (1)...(522): n = a,t,c or g
tttgaaatntgaatcctaacagctatgacatgattacgaatttaatacgactcactatagggaatttggccctcgaggccaagaattcggcacgagtcagcctcccaaataggactacaggcgtgtgccaccacgcccagctaatttttttttttnnnnnnnnngtananacgtggtttcattgngttggccacaatgacctcgatctcctgacctcatgatccacctgtctcagcctcccaaagtgctgggattacaggcgtgagccaccgcacccggctctgctctctgctttcaanatggcactttcttgctacatccttacatggtggaagggggcaaaaagggaaaaatgctgtgtcctcacatggccaaagagatgaaagggccaggcagctctctgaaacctctttaanagggtattaatcccattcctgaaggaaagccgtcatgacttaatcactattaaaaggccgcacctctttatttatttatttattnggtnatttttttgagactgag

SEQ ID NO: 24252 - DNA, 462 bp, Homo sapiens
  misc_feature (1)...(462): n = a,t,c or g
tttganccctnttganncctnnnnnnnnnnnnnnnnnnnnnnnnnnnnnnnnnnnnnnaattcggcacgagagacagtgagtcacctgggtccccgctgcttacaggacagagccagaataatgacaataataatagaggtccacggtgctgttattaacgcccacctttcttccagggaccatgcttccttatccatttgacagcccttggggcagggggcccaanaaattttgtngccctgcttaaatagggggaactgaggtaaagtgtttnccactgaactggtancctganaataggactttgctcnnaaggccccgatgccnggaaagttttgancccccaggttnggggcttcccacttgccaaagtttttgnntaaggngccnanagnccncanttttggaattttacactnttgggctttaaccctanttncaacaacagntntnngggctta

SEQ ID NO: 24253 - DNA, 513 bp, Homo sapiens
  misc_feature (1)...(513): n = a,t,c or g
atttgnanaccgtttgactgattacgaatttaatacgactcactatagggaatttggccctcgaggccaagaattcggcacgagcggcacgagccaaggttgaaaagaaaaagaaggagaaggttctcgcaactgttacaaaaccagttggtggtgacaagaacggcggtacccgggtggttaaacttcgcaaaatgcctagatattatcctactgaagatgtgcctcgaaagctgttgagccacggcaaaaaacccttcagtcagcacgtgagaaaactgcgagccagcattacccccgggaccattctgatcatcctcactggacgccacaggggcaagagggtggttttcctgaagcagctggctagtggcttattacttgtgactggacctctggtcctcaatcgagttcctctacgaagaacacaccagaaatttgcattgcccttnaccaaaatcgatatcagcatgnaaaatnccaaaacttnttactgnggcttctttaanaaaa

SEQ ID NO: 24254 - DNA, 522 bp, Homo sapiens
gcttgactgattacgaatttaatacgactcactatagggaatttggccctcgaggccaagaattcggcacgagagacagtgagtcacctgggtccccgctgcttacaggacagagccagaataatgacaataataatagaggtccacggtgctgttattaacgcccacctttcctcccaggaccatgtctcctttatccatctgacagcccttggggcagggaggggccgagggcccaagagattttgttgccctgtcttaaataggggggaaactgaggctaaagttgtttcccactgaactgctagtcctgagaataggactctgcctcctaatgtccccgatgccaggaaagttctgcagccccacagttaagtggtctcctcactgacaaagctctaggctcagggagcaaagagcccacatttctggatttctcacactctgcctctaacccttacttacaacaacagctctagggactaagttatgaatattatcctcattttgatggatgaggac

SEQ ID NO: 24255 - DNA, 460 bp, Homo sapiens
cctatgacatgattacgaatttaatacgactcactatagggaatttggccctcgaggccaagaattcggcacgaggaacatgctttccaaagaggggttctccctcaggagaacgagtcatgttcatgggaaactcaatctgggtgtgaagtgagagagccatgtaatcatgccaacatcctgaccaagcccgatccaagaaccttctggactaatgatgatccaggtattattggaaaaatacaacctgtttcctgttatgtacaggatacattctgtagtaaagctctacacaaaggcaaggtttggggggaaatatttttttgtttgtttgttttttgttttttgtttttcttgagacagagtcttgctctgttgcccaggttggagggcagtggcgcaatctcagctcactgcaagctccgcctcccaggttcacgccattctcctgcctcagcct

SEQ ID NO: 24256 - DNA, 334 bp, Homo sapiens
gctggagcttgagtagctgacattaaatactcatgttgtctttggttatagatttaatctccctgactctgtttatttttcgtttttgtctttcatcatgagtatgtggtcctaaagcagtgaatctcaaactatgtttctaaagcatctgaacctgctgggaaatgaaaagttacccactatttaatataaatatacatgcatatacacatacacatacaaatgcatatacaaatacatatgcaaatacatgcacaagtgcatatacatgagcatgtatccacgcatatcatatacatgtacacatacacatacatacatatacacatataga

SEQ ID NO: 24257 - DNA, 571 bp, Homo sapiens
  misc_feature (1)...(571): n = a,t,c or g
gcgaaaggaatggttaactaatttcatggaggatagaagacaacgaaagttacttgggcttcctgaggattacttgtatggacaaactaccacatatctgacatataatgacttcatcaacaaggaacttatcttgttctcaaattctgataacgagagatctatcccttctatggtggatggtttgaaaccaggtcagagaaaggttttgtttacttgcttcaaacggaatgacaagcgagaagtaaaggttgcccaattagctggatcagtggctgaaatgtcttcttatcatcatggtgagatgtcactaatgatgaccattatcaatttggctcaaaattttgtgggtagcaataatctaaacctcttgcagcccattggncagtttggtaccaggctacatggtggcaaggttctgctaatccacgatacatctttacaatgctcagctctttggctcgattgtatttcaccaaaagangacacacttcaagtttnnangatgacaacagcgttngagctgaatggtaatccattatccangggctgataaatgngcganggatcg

SEQ ID NO: 24258 - DNA, 454 bp, Homo sapiens
  misc_feature (1)...(454): n = a,t,c or g
ggtggggttaagatgtagaaccaaagtgtttggttgcattgggatattcagaaagattgcatggaaagtacatgaaggttgtctcagaagatcatgactagggttggaaatctttttaaaaacaaacaccctcattatgtttgccttggagttcagcttgtagaattggattttccttctgtgtcatactgctaagtaaaacaaggacttggtaatatgctgaactaactgtgacaagaaagcatgggtgatgtaagttaacaataggtagataaccaggacttaaatcagctgagatggttcgaaggcaaggcttggtatttcaagggcatgtgcgggtgattacctgaagagtttgcctaactcatggcctctgagtgaagcagccattaattatgcctggcattattaggaagcaggtcataaaatgtgntggccttatggctaaaacttg

SEQ ID NO: 24259 - DNA, 361 bp, Homo sapiens
ggaaaatcagctagacgtggtggcgggtgcctgtaatcccagctactcgggaggcggaggcagggagagttgctggaacccgggaggtgggggttgcagtgagccgagattgcgccattgcactccagcctgggcgacagagagagactcggtataaaaaaaaattaaaaattaagagtcataggtggtagattgcttttttatggtatgtgcactgagggaggctcttgagattacaatggagaagtcagttttagattagtttctgccagttcctaggttctgttgaacagcctaagagtgatatacagttagtattctacagttgatcaacaacataacagatatttgaatattttat

SEQ ID NO: 24260 - DNA, 795 bp, Homo sapiens
tttaatacgactcactatagggaatttggccctcgaggccaagaattcggcacgagtgcaagatggcgggtgaaaaagttgagaagccagatactaaagagaagaaacccgaagccaagaaggttgatgctggtggcaaggtgaaaaagggtaacctcaaagctaaaaagcccaagaaggggaagccccattgcagccgcaaccctgtccttgtcagaggaattggcaggtattcccgatctgccatgtattccagaaaggccatgtacaagaggaagtactcagccgctaaatccaaggttgaaaagaaaaagaaggagaaggttctcgcaactgttacaaaaccagttggtggtgacaagaacggcggtacccgggtggttaaacttcgcaaaatgcctagatattatcctactgaagatgtgcctcgaaagctgttgagccacggcaaaaaacccttcagtcagcacgtgagaaaactgcgagccagcattacccccgggaccattctgatcatcctcactggacgccacaggggcaagagggtggttttcctgaagcagctggctagtggcttattacttgtgactggacctctggtcctcaatcgagttcctctacgaagaacacaccagaaatttgtcattgccacttcaaccaaaatcgatatcagcaatgtaaaaatcccaaaacatcttactgatgcttacttcaagaagaagaagctgcggaagcccagacaccaggaaggtgagatcttcgacacagaaaaagagaaatatgagattacggagc

SEQ ID NO: 24261 - DNA, 668 bp, Homo sapiens
  misc_feature (1)...(668): n = a,t,c or g
cccgcatgtttcctagcacctttaaaacaaacctttgacctggcagatgcacaaacagtattggctttatctgagtgtgcagtgacactgaaaacaattcatctcaaacggggcccagaatgtgttcagtatcttcaacaagaatacctgccctccttgcaagtagctccagaaataattcaggagttttgtcaagcgcttcagcagcctgatgctaaagtttttaaaaattacttaaaggtgttcttccagagagcaaagccctgaggactggatttccctgtgcctacttcatgatcatgaattccagttaatttataaagaggcgatttttgtgtgccattcacactggtctttttcacattgttttgagcttattgcagtatatgttttgggatttttctgtaaaatgggtgtaattttcctaatacaggtatgtaacaacaaaagaagttgcctgcatgccggtccaaattgttctgtataaagatgctcttaaaagacacaagagttatcctagaaccttaattcttttttatttgaaattttaagtcaagtcctttataaagaccatagcagtggaaaacagtgtactttttaaaaaattgctgaatataaaatctttgaaaattttctttatgtgtgaagacacanagtatgggggaaga

SEQ ID NO: 24262 - DNA, 386 bp, Homo sapiens
gccctgaagatgtggctggggagctcatccaggacatcgcccagaaacttttcttcctccaagtgaaggaaggaatccttagcgatgagatctactgcccccctgagactgccgtgctcttggggtcctacgctgtgcaggccaagtttggggactacaacaaagaagtgcacaagtctgggtacctcagctctgagcggctgatccctcaaagagtgatggaccagcacaaacttaccagggaccagtgggaggaccggatccaggtgtggcatgcggaacaccgtgggatgctcaaagataatgctatgttggaatacctgaagattgctcaggacctggaaatgtatggaatcaactatttcgagataaaaaacaagaaagga

SEQ ID NO: 24263 - DNA, 411 bp, Homo sapiens
  misc_feature (1)...(411): n = a,t,c or g
gcttgaagactcgtggggaaatggtgaagaaccggactgtggactgggctctagcggagtacatggcgtttggctcgctcctgaaggagggcatccacattcggctgagcggccaggacgtggagcggggcacattcagccaccgccaccatgtgctccatgaccagaatgtggacaagagaacctgcatccccatgaaccatctctggcccaatcaggccccctatactgtgtgcaacagctcactgtctgagtacggcgtgctgggtgagtgcctggagccacaccaccagggcctgtcacccacccacccccgctgggcctactggctggtgtcctggaatggtttctccttcctttgtcccttgtaagctttaacctggcttcgccatggccagtnctaaagccctg

SEQ ID NO: 24264 - DNA, 435 bp, Homo sapiens
cggacgcgtgggctgaaccaaatctgccttcctaaccgtcagcatgtggtatatggtccctggaacctaccacagtccagctactcccacctcactcgccagggtgagaccctcaatttcctggagattggatattcccgctgctgccactgccgcagccacacaaaccgcctagagtgtgccaaacttgtgtgggaggaagcaatgagccgattctgtgaggccgagttctcggtcaagacccgaccccactggtgctgcacgcggcagggggaggctcggttctcctgcttccaggaggaagctccccagccacactaccagctccgggcctgccccagccatcagcctgatatttcctcgggtcttgagctgcctttccctcctggggtgcccacattggacaatatcaagaacatctgccacctgaggcgc

SEQ ID NO: 24265 - DNA, 303 bp, Homo sapiens
gggaggagacccgtggtggtggcagtggctacggtggagaccgaagtggaggctatggaggagacaggagtggtggcggctatggaggagaccgaggtgggggctacggaggagaccgaggtggctatggaggcaaaatgggaggaagaaacgactacagaaatgatcagcgcaaccgaccatactgatgactgttttgaatgttcctttgtctctgacatgatccatagtgaaattgccagagttttgcctgctgctttcctcgtggcctcttcttgggtagtgaaattaagtgacatctgg

SEQ ID NO: 24266 - DNA, 1429 bp, Homo sapiens
gactcctatagggaatttggccctcgaggccaagaattcggcacgagcctcagggttcactttgaggaatccagcaagctagaagacctgttgcggaaggttcgcgccaaggagaccaggaagcgagcactcagcaggttaaagctgaagctcaacaaagatatagtgatctctgtgggcatttataatctggtccagaaggctctcaagcctcctccaataaagctctatcgggaaacaaatgaaccagtgaaaaccaagacccggacctttaatacaagtacaggcggtttgcttctgcctagcgataccaagaggtctcagatctatgggagtcgtcagattatactggagaaagaggaaacagaagagctaaaacggtttgatgatccaggtttgatgctcatgggtttcaagccgttggtactgctgaagaaacaccattacctgaggccctccctgttcgtgtacccagaggagtcgctggtgattgggagctcaaccctgttcagtgctctgctcatcaagtgtctggagaaggaggttgcagcattgtgcagatacacaccccgcaggaacatccctccttattttgtggctttggtgccacaggaagaagagttggatgaccagaaaattcaggtgactcctccaggcttccagctggtctttttaccctttgctgatgataaaaggaagatgccctttactgaaaaaatcatggcaactccagagcaggtgggcaagatgaaggctatcgttgagaagcttcgcttcacatacagaagtgacagctttgagaaccccgtgctgcagcagcacttcaggaacctggaggccttggccttggatttgatggagccggaacaagcagtggacctgacattgcccaaggttgaagcaatgaataaaagactgggctccttggtggatgagtttaaggagcttgtttacccaccagattacaatcctgaagggaaagttaccaagagaaaacacgataatgaaggttctggaagcaaaaggcccaaggtggagtattcagaagaggagctgaagacccacatcagcaagggtacgctgggcaagttcactgtgcccatgctgaaagaggcctgccgggcttacgggctgaagagtgggctgaagaagcaggagctgctggaagccctcaccaagcacttccaggactgaccagaggccgcgcgtccagctgcccttccgcagtgtggccaggctgcctggccttgtcctcagccagttaaaatgtgtttctcctgagctaggaagagtctacccgacataagtcgagggactttatgtttttgaggctttctgttgccatggtgatggtgtagccctcccactttgctgttccttactttactgcctgaataaagagccctaagtttgtactaaaaaaaaaaaa

SEQ ID NO: 24267 - DNA, 312 bp, Homo sapiens
caacttggtaagttttgttccaacagacagttaaattactgatagatccaccttgaacttgtggaggattatgcatcattggagtggatctgtttcagttttagccttagtcttggaacctagtgttaaaaaataaaaaggcacggcctttctgaagttttgatggaaagcacaaggtgtttacccacattctcccttcagactcagtctcccctgtaacaggcagctgctgaaatctttgctcaatgtcgacgcggccgcgaattccagatctatgaatcgtagatactgaaaaaccccgcaagttcactt

SEQ ID NO: 24268 - DNA, 354 bp, Homo sapiens
gcaatgagatcccctctcctggtgacaatggctggctaaacctgtaccatttctggagggagacgggcacacacaaagtccaccttcaccatgtccagaatttccagaagtatggcccgatttacagggagaagctcggcaacgtggagtcggtttatgtcatcgaccctgaagatgtggcccttctctttaagtccgagggccccaacccagaacgattcctcatcccgccctgggtcgcctatcaccagtattaccagagacccataggagtcctgttgaagtgagtcctgggccatctcccagggactggagggaggtggtggggagctgtggagagggcagaggctgggg

SEQ ID NO: 24269 - DNA, 540 bp, Homo sapiens
ggagataggaagcgtagaagagggaaaatgggggttcagatgagcttttgattttaaggagcccatggaacacccaggtagcatatccattgggtaaacacaaacctggaacttaacagtgagatatgagctgtctatgaagatttggaagtcagttgaccaattgaagataattgaaatctattgtagtcataataattgtactgaatgtagagtaagaagagaaagcctggtagggaattctaaagaatgtacttcttaagggactagcttactaagaggatcctgaaaagtatcctaaggaagaagagcttgtgagagaataagtaatggtaagcaccatgatagaagtatttagtcaccttcttgaaagtacagaggcaaactggaggcagcagccagattgtaatgaataaaagggatgttgaagattatcttgtgagcatcttgtcagagaaagatagttggtagcaagaactgaatgtggagttggaagaggactaccatttttcatttttaaaaaatcctccagcctgggca

SEQ ID NO: 24270 - DNA, 609 bp, Homo sapiens
  misc_feature (1)...(609): n = a,t,c or g
tacgaatttaatacgactcactatagggaatttggccctcgaggccannaattcggnacnancggttgagggatgctgaccccattctgacatgtgagatggcttccactggagaggtggcttgctttggtgaaggtattcatacagccttcctaaaggnaatgctttccacaggatttaatgataccccanaaaggcatcctgataggcatccatcaatcattccggncaanattccttggngtggctgaacaattacacaatganngnttcaagctgtttgccacggnagccacatcagactggntcaacnccaacaatgtccctgccaccccagtggcatggccgtctcangaagganagaatcccaacnnctcntccatcaaaaaattgnttagagatggnagcattgaccnantgattaaccttcccaacancaanacnaaatttgtccatgataattangtgantcggaggacagctgttgtactggaatccctctcctcactaattttcangtggccaaacnttttgctgaaactntgcacnaatctcgcaagggggncncaaanatnctttcantaaaggaagntaantnnggaaccccgg

SEQ ID NO: 24271 - DNA, 408 bp, Homo sapiens
ggctttccctactatgggtttcagatccgaaaccttaagaaaagtacgtgatgagttcgtgataagggatgaagatgtaataatattgacttaccccaaatcaggaacaaactggttggctgagattctctgcctgatgcactccaagggggatgccaagtggatccaatctgtgcccatctgggagcgatcaccctgggtagagagtgagattgggtatacagcactcagtgaaacggagagtccacgtttattctcctcccacctccccatccagttattccccaagtctttcttcagttccaaggccaaggtgatttatctcatgagaaatcccagagatgttttggtgtctggttattttttctggaaaaacatgaagtttattaagaaaccaaagtcatggga

SEQ ID NO: 24272 - DNA, 231 bp, Homo sapiens
ggagaaacaagagttgaaataaaagaatctgttcgtggccaagatattttcattatacagacaatacccagagatgtgaatacagctgtgatggagttgctcatcatggcttacgcactgaagactgcctgtgccaggaacattattggggtcatcccctacttcccctacagcaagcagagcaagatgaggaagaggggttccattgtgtgcaagctgctagcatccatg

SEQ ID NO: 24273 - DNA, 413 bp, Homo sapiens
gcggcacgagagttggcagagctgagacttctcccagtacaagctatgatcaactatgaagttagctggaaagtgaattttgtctaagaaaatttagttattttacatggaattgtcaggcacttacaaaaatcctccaaactgacggtgattctgctgttggccaactgggagtgtgctgagtgcttcagtggaccagtggataatgcccactgggagataccgtcctttgcaagtaattgactttcttttctaattcattctattctgcagctgtttgagtatctcttaggtccaggcaccatgccagggtgataaagaagacaaagcctataaggagatcacaatataaaaaggtctcaatcttgtgccaaaattatagaatgggaattatttagttgtgagggattggg

SEQ ID NO: 24274 - DNA, 374 bp, Homo sapiens
gacaaattagagatcaccatgctgtcccagggcgtgtccatgctctattccttcttcatgccagctgccaagctcaaggaacggttggatcagccgatgacagagattgtgagccgtgtgtcgaagcgaaagctgggccgccacgtgcgggcgctggtgcttgagctgtgctgtaacgacgagagcggcgaggatgtcgaggttccctatgtccgatacaccatccgctgaccccgtctgctcctctaggctggccccttgtccacccctctccacaccccttccagcccagggttcccatttggcttctggcagtggcccaactagccaagtctggtgttccctcatcatccccctacctgaacccctcttgc

SEQ ID NO: 24275 - DNA, 330 bp, Homo sapiens
ggatcactcgtgtgcctttgggttcagtcatcaagtgtatagtttattataaagagcctttctggaggaaaaaggattactgtggaaccatgattattgatggagaagaagctccagttgcctacacgttggatgataccaaacctgaaggcaactatgctgccataatgggatttatcctggcccacaaagccagaaaactggcacgtcttaccaaagaggaaaggttgaagaaactttgtgaactctatgccaaggttctgggttccctagaagctctggagccagtgcattatgaagaaaagaactggtgtgaggagcagtactctg

SEQ ID NO: 24276 - DNA, 390 bp, Homo sapiens
gtggaccaattggccaattgtgaggacattctcatgaacttcctggtgtctgctgtgacaaaattgcctccaatcaaagtgacccagaagaagcagtataaggagacaatgatgggacagacttctcgggcttcccgttgggctgaccctgaccactttgcccagcgacagagctgcatgaatacgtttgccagctggtttggctacatgccgctgatccactctcagatgaggctcgaccccgtcctctttaaagaccaggtctctattttgaggaagaaataccgagacattgagcgactttgaggaatccggctgagtgggggaggggaagcaagaagggatgggggtcaagctgctctctcttcccagtgcagatccactcatcag

SEQ ID NO: 24277 - DNA, 527 bp, Homo sapiens
  misc_feature (1)...(527): n = a,t,c or g
gaaatccaaggagggccatcttcagaatggaaaaatgcaaactaaacccaatgccaactttgtgcaacctggagatctagtcctaagccacacacctgggcagccacttcatataaaggttactccagaccatgtacaaaacacagccactcttgaaatcacaagtccaaccacagagagtcctcactcttacacgagtactgcagtgataccgaactgtggcacgccaaagcaaaggataaccatcctccaaaacgcctccataacaccagtaaagtccaaaacctctaccgaagacctcatgaatttagaacaaggcatgtccccaattaccatggcaacctttgccagagcacagaccccagagtcttgtggttctctaactccagaaaggacaatgtcccctaatcaaggtttggctgtgactggttcanctactctcctgaacaaggacctccccanaancaacaagaatcaatggcaaacntgcgatattcanatntccccanaccgggaatcacaaggga

SEQ ID NO: 24278 - DNA, 432 bp, Homo sapiens
  misc_feature (1)...(432): n = a,t,c or g
ttgantttgaataccagnttgactgattacgaatttaatacgactcactatagggaatttggccctcgaggccaagaattcggcacgagaaatttgtccatgataattatgtgattcggaggacagctgttgatagtggaatccctctcctcactaattttcaggtgaccaaactttttgctgaagctgtgcagaaatctcgcaaggtggactccaagagtcttttccactacaggcagtacagtgctggaaaagcagcatagagatgcagacaccccagccccattattaaatcaacctgagccacatgttatctaaaggaactgattcacaactttctcagagatgaatattgataactaaacttcatttcagtttactttgttatgccttaatattctgtgtcttttgcaattaaattgtcagtcactt

SEQ ID NO: 24279 - DNA, 412 bp, Homo sapiens
aaccctttgacatgattacgaatttaatacgactcactatagggaatttggccctcgaggccaagaattcggcacgagggcgggtgggtcaaggtaactctgggctacagagtccttgctgggggttcggggagcgcttggaccccggcttctgggacgcgtcaggagaagggagcactggctttgctttcatcaggccaaagatgcctttctttgggaatacgttcagtccgaagaagacacctcctcggaagtcggcatctctctccaacctgcattctttggatcgatcaacccgggaggtggagctgggcttggaatacggatccccgactatgaacctggcagggcaaagcctgaagtttgaaaatggccagtggatagcagagacaggggttagtggcggtgtgga

SEQ ID NO: 24280 - DNA, 515 bp, Homo sapiens
  misc_feature (1)...(515): n = a,t,c or g
accagctatgacatgattacgaatttaatacgactcactatagggaatttggccctcgaggccaagaattcggcacgagggggcgcagggggcggcgtcaccgaggagcaggagggcttcgccgacggctttgtcaaagccctggacgatctgcacaagatgaaccacgtgacaccccccaacgtgtccctgggcgctaccggggggcccccggctgggcccgggggcgtctacgccggcccagctcaaacagaaggtcatgacccacgtcagcaacggctgtcagctgctgcttggggtcaagggacacgccttctgaacgtcccctgcccctttacggacaccccctcgcttggacggctgggcacacgcctcccactggggtccagggagcaggcggngggcacccaccctgggacctaggggcgccgtaaccacactggacttcggccttctacctgggccagtccttcactttgacgttacaagccccccttccactttttttttttttt

SEQ ID NO: 24281 - DNA, 457 bp, Homo sapiens
  misc_feature (1)...(457): n = a,t,c or g
gaggttgtntntctcnnatccctntnnanacccttntnactgcntacgaatttaatacgactcactatagggaatttggccctcgaggccaagaattcggcacgaggggggagaaagataagttgaggacttctctttatcttttgttaatcagaggtggtgatagagtggaaaatataacacgtttcggcattcaggagacctaccttccaatgtaaataagcccttgcggccttgatattttattccttttgtaccttcatctcataatctgtatgaagactttagagttccaagctcttaagatccctattagctctcaaattgtcccataaaaataattgttaaggcatgcctaatactcttatacagactttgtaaactgatttcacagaagcgattaaggaattgtactgtctttaaacaatatttagaatgcttcagtaaaagcattttt

SEQ ID NO: 24282 - DNA, 438 bp, Homo sapiens
  misc_feature (1)...(438): n = a,t,c or g
gantttcgagnccntctatgacatgattacgaatttaatacgactcactatagggaatttggccctcgaggccaagaattcggcacgaggagtcataaaaatctcctgatcaacttggtgattgaattggattgcattagttctgatagaaactgtttaaaaaattacctgacattctatagaaatgaaaggagccatgctgtgtaatcacaaggctttcatgacatgacatttatagattatatgaaataggtaatttcaaatgtaaattttaagttttatttactattagtcatcgttttttgattatttaaaaatttgtactatggacaactaattaattttactttttatcctctgagatttgattgtggagcggcataagggggagaaagataagttgaggacgtctctttatcttttgttaatcagaggtgg

SEQ ID NO: 24283 - DNA, 474 bp, Homo sapiens
ggaaagtgtctttaaaaacaaaaacaaaccctgaaatgtatatttgggattatgataaggcaactaaagacatgaaacctcaggtatcctgctttaagttgataactccctctgggagctggagaatcgctctggtggatgggtgtacagatttgtatataatgtcatttttacggaaaccctttcggcgtgcataaggaatcactgtgtacaaactggccaagtgcttctgtagataacgtcagtggagtaaatattcgacaggccataacttgagtctattgccttgcctttattacatgtacattttgaattctgtgaccagtgatttgggttttattttgtatttgcagggtttgtcattaataattaatgcccctctcttacagaacactcctatttgtacctcaacaaatgcaaattttccccgtttgccctacgccccttttggtacacctagaggttgatttcctt

SEQ ID NO: 24284 - DNA, 439 bp, Homo sapiens
gaggacacagagacagtgtacagtgaagtccggaaagctgtccctgatgccgtggaaagcagatactctagaacggaaggctcccttgatggaacttagacagcaaggccagatgcacatccctggaaggacatccatgttccgagaagaacagataatccctgtatttcaagacctctgtgcacttatttatgaacctgccctgctcccacagaacacagcaattcctcaggctaagctgccggttcttaaatccatcctgctaagttaatgttgggtagaaagagatacagaggggctgttgaatttcccacataccctccttcccaccaagttggaacatccttggaaattggaagagcccacgaggagatccagggcaaggccattggggatatcctgaaaacttgaatattttgtttcttgttgccagagataa

SEQ ID NO: 24285 - DNA, 822 bp, Homo sapiens
gattcctgctgactatgttgcaattaaggctcccatgttttcctggccccggttgagggatgctgaccccattctgagatgtgagatggcttccactggagaggtggcttgctttggtgaaggtattcatacagccttcctaaaggcaatgctttccacaggatttaagataccccagaaaggcatcctgataggcatccagcaatcattccggccaagattccttggtgtggctgaacaattacacaatgaaggtttcaagctgtttgccacggaagccacatcagactggctcaacgccaacaatgtccctgccaccccagtggcatggccgtctcaagaaggacagaatcccagcctctcttccatcagaaaattgattagagatggcagcattgacctagtgattaaccttcccaacaacaacactaaatttgtccatgataattatgtgattcggaggacagctgttgatagtggaatccctctcctcactaattttcaggtgaccaaactttttgctgaagctgtgcagaaatctcgcaaggtggactccaagagtcttttccactacaggcagtacagtgctggaaaagcagcatagagatgcagacaccccagccccattattaaatcaacctgagccacatgttatctaaaggaactgattcacaactttctcagagatgaatattgataactaaacttcatttcagtttactttgttatgccttaatattctgtgtcttttgcaattaaattgtcagtcacttcttcaaaaccttacagtccttcctaagttactcttcatgagatttcatc

SEQ ID NO: 24286 - DNA, 358 bp, Homo sapiens
ctttcaaataactctaatgaatattcaagatattttagccttttaaaaagttgagatttagctcatggatatattttttggtagggaaacattagggtctccttttcttccttttacctagaatgcctcatttaaaagtgccttgaaaacatttagctccccttcttcatgagcatctgtagagctgaaagtattctggaactttagacagaaagctgaaaggaatctgcagtctcctgctgcagttcaactctgctgtttttcagtcatttcctactgtgagtggagtgatgtttgtgtgtgtgttggcaacatgcctaatgttttcttaatgatgacaacaaatattttaaaactg

SEQ ID NO: 24287 - DNA, 407 bp, Homo sapiens
gagagctgtattaggaacccttcaggacggcactcccagccttccctacattggagccacgcagccttgcaagccaacgagtgctctcactcctgacactcataaagaacctgacagtttcatcttaaggccatatacattattttaattgcccatttgggctcatgggatcaagggaggggagttgtagagggagcattcaagttcccccgtggagtatacaatctagtgcaactgtaagcctatgagggaattacccattaaaagaaactcaagtttaaatactacctgtctctgccaatatcccttcctaacttccttttgtattttacagaggatttacaatttatactcctaaacagcctatccacaaggcctattcataatgatgaattcatctcttaaaa

SEQ ID NO: 24288 - DNA, 431 bp, Homo sapiens
gacaggactggtgtggaatttacttaagcttggatttatttctgcttttccttatcagcactagtgaaatcccagcatatatattagccttttaatgtaatgaatcccaaacatcatggtctcattcatgatattagttggctatcatttaaacagtgttttaaaagaagtactctttttagtggcctggctaaagccagcaaggatggaaaccaatatttattgataacggtgccttatgtatcttacctcatttaattcaaatgaaaattcagtgagattgttattacaggtctatcatcccttatccaaaactcttgaagcaagatattttcagaaaggtagtgcactaccttagacatccagcgaggtctggagcagcatcctaaaatcaaccacattaacaaatctgcagcaaaacctattggtcc

SEQ ID NO: 24289 - DNA, 488 bp, Homo sapiens
  misc_feature (1)...(488): n = a,t,c or g
gngnnnanngttgtgttntgctngatagnactnnttngntatgaccacgaatttaatacgactcactatagggaatttggccctcgaggccaagaattcggcacgagcttcctttcagtacatgtatttgctgaaagacctgtggcaaaagaggcagaagcaagtaaaagataatgaaaatgtagtcaatgagtactcctcagaactggaaaagcaccaattatatatagatgagactgtgaatagcaatatcccaactaaccttcgtgtgcttcgttcaatcctggaaaacctgagaagcaaaatacaaaagttagaatctgatgtctcagctcaaatggaatattgtcgcaccccatgcgctgtcagttgcaatattcctgtggtgtctggcaaagaatgtgaggaaattatcaggaaaggaggtgaaacatctgaaatgnatctcattcaacctgacagttctgtcaaaccgtatagaagtatac

SEQ ID NO: 24290 - DNA, 367 bp, Homo sapiens
gccaaaattttatttttctactgtttcatatctcagatacatacattgtatattaataatgaatttccaatatgaaaaagacaaatttccacactttctaattgcaggcttttttaacacacttttttgatacaaggtctggctctttcacccaggttgggagtgccgtggcgcagtctcggctcactgcaacctccacctcctgtgctcaagccacccttccacctcagcctcctgagtagctgagactacaggcatgcatcaccacatctggctaatttttgtatttttttgtagagataagagtttggccatgttccccaggctgatctcaaactcaggagctcaagccattcgctcacctctc

SEQ ID NO: 24291 - DNA, 389 bp, Homo sapiens
aaaggtcaggccgaggccggcgcggagaatctgctgtcgcctgcagctgctcgcctgtctccgtcggaagggagcccaagctttgcagagaacatgaacgattggatgcccatcgccaaggagtatgatccactcaaagcgggcagcattgatggcaccgatgaagacccacacgaccgcgcggtctggagggcaatgctggcacgatatgtccccaacaaaggtgtcataggagatcccctcctcaccctgtttgtggccagactaaacttgcagaccaaggaggacaaattaaaggaagtcttttcccgctatggtgacatccggcggcttcggctggtcagggacttggtcacaggtttttcaaagggctacgccttcatcgaata

SEQ ID NO: 24292 - DNA, 350 bp, Homo sapiens
gggcacattcctgtgatcccagctactcgggaggccgaggcaggagaatcgcttgaacccgggaggcagaggttgaggtgagccaagattgcaccattgcactccagcctgggcaacaagagcaaaacttcatctaaaaaacagaaaatattaagatgattaccatgtgaaaacctttttaatattcaggatttggaaagtatagttgccccaggcatgtggttgttgccttaggtcctgcgaatattgctgaaaatcggattttccacattcactttcttccctgttttagggaagaaaatgatcatagacattcgattttccaaattggcgctcttattttcaatgct

SEQ ID NO: 24293 - DNA, 339 bp, Homo sapiens
gctgtctctactaaaaatgcaaaaattagcgaggtgtagtggcacacacctgtagtcccagctactcgggtggcggaggaggagagtcgcttgaagctgggaggcagaggttgcagtgagccgagactgtgccattgcactccagcctgggtggcaagagtgagactgtttaaaaaaaataataataacttctatttctaaagctgtgatacatagaaaacaagttatctgtttctgagatgcaatggtgggacaggtgaagaagcattcccattccaaaagagataaattggaaggagaaaaggggtttaaagcaggtttgtaagtctgcaggacaaa

SEQ ID NO: 24294 - DNA, 327 bp, Homo sapiens
  misc_feature (1)...(327): n = a,t,c or g
ctagctctcattttctttcccactacaaagactttctacatcttactctgctgccatttaaacatagaaattaatttcagggaaaagctccattgggaatagtcagataccactataagctggcttatcaagaactgtagtagtaagtatggtgccttttcccattttctgctaatccaaataaggagaaaatgtctgcctgttatcatggaatccatacttctttgaaaaatttagaatgaaacatagagtagccaggcgcggtggctctcacctataatcccagcactttgggaggctnaggcaggtggatnacgaggtcaggag

SEQ ID NO: 24295 - DNA, 464 bp, Homo sapiens
  misc_feature (1)...(464): n = a,t,c or g
cacatttnatgacatgattacgaatttaatacgactcactatagggaatttggccctcgaggccaagaattcggcacgaggatggacagtgattcagaaccgtcaagacggtagtgttgactttggcaggaaatgggatccatataaacagggatttggaaatgttgcaaccaacacagatgggaagaattactgtggcctaccaggtgaatattggcttggaaatgataaaattagccagcttaccaggatgggacccacagaacttttgatagaaatggaggactggaaaggagacaaagtaaaggctcactatggaggattcactgtacagaatgaagccaacaaataccagatctcagtgaacaaatacagaggaacagccggtaatgccctcatggatggagcatctcagctgatgggagaaaacaggaccatgaccattcacaacggcatgttcttca

SEQ ID NO: 24296 - DNA, 493 bp, Homo sapiens
tttggaacccctatgacatgattacgaatttaatacgactcactatagggaatttggccctcgaggccaagaaattcggcacgagctggaagactgctaaaacaagatgaaagctgaggattggttaaattcattacttttgactaagttgcaaactatgcaaccagcgaaacagtgctactaaattaatgcctctaaagagatgctggggcctctaataagcatccaataactccctgaatggcagtgagttcataatggcccttccccctggcctctcggcccggaataaacaggctgcaggtcttacggagggagccccaacgggagacagacactgaaacaggaagcccttggcacgggcctggctctgcccagaagtaatcactttcactcactggacctccgtttcctcacatagaagatcagaggggtttataaaaaggcaaactcctcaaggtcccccaagtgcgtttttaaaacagtaaaaccc

SEQ ID NO: 24297 - DNA, 334 bp, Homo sapiens
gcggacctacgtctcagggggaaaggatgcaaattctccagaatttcaagcacaaccccaaaattaacaccatcttcatatccaaggtaggtgacacttcgtttgatctgccggaagcaaatgtcctcattcagatctcatcccatggtggctccaggcgtcaggaagcccaaaggctagggcgggtgcttcgagctaaaaaagggatggttgcagaagagtacaatgcctttttctactcactggtatcccaggacacacaggaaatggcttactcaaccaagcggcagagattcttggtagatcaaggttatagcttcaaggtgatcacgaa

SEQ ID NO: 24298 - DNA, 425 bp, Homo sapiens
aaccctttgacatgattacgaatttaatacgactcactatagggaatttggccctcgaggccaagaattcggcacgagtgactctccaggggtcctaggcctcaactcctcccatagatactctcttcttctcataggtgtccagcattgctggactctgaaatatcccgggggtggggggtgggggtgggtcagaaccctgccatggaactgtttccttcatcatgagttctgctgaatgccgcgatgggtcaggtaggggggaaacaggttgggatgggataggactagcaccattttaagtccctgtcacctcttccgactctttctgagtgccttctgtggggactccggctgtgctgggagaaatacttgaacttgcctcttttacctgctgcttctccaaaaatctgcctgggttttgg

SEQ ID NO: 24299 - DNA, 337 bp, Homo sapiens
gggggacctgacagcacaccactgtcttccccagtcagctccctctaaaatactcagcggccagggcggctgccactcttcacccctgctcctcccggctgttacattgtcaggggacagcatctgcagcagttgctgaggctccgtcagccccctcttcacctgttgttacagtgccttctcccaggggctgggtgagggcacattcaggactagaagcccctctgggcatggggtggacatggcaggtcagcctgtggaacttgcgcaggtgcgagtggccagcagaggtcacgaataaactgcatctctgcgcctggctctctaaaaaaaaaaa

SEQ ID NO: 24300 - DNA, 463 bp, Homo sapiens
  misc_feature (1)...(463): n = a,t,c or g
gnnnnnnnnnnnnnngtnnnttnnnnctntgataccgttatttgatgatcnctaatttaatacgactcactatagggaatttggccctcgaggccaagaattcggcacgagctgatgtctcagctcaaatggaatattgtcgcaccccatgcactgtcagttgcaatattcctgtggtgtctggcaaagaatgtgaggaaattatcaggaaaggaggtgaaacatctgaaatgtatctcattcaacctgacagttctgtcaaaccgtatagagtatactgtgacatgaatacagaaaatggaggatggacagtgattcagaaccgtcaagacggtagtgttgactttggcaggaaatgggatccatataaacagggatttggaaatgttgcaaccaacacagatgggaagaattactgtggcctaccaggtgaatattggcttggaaatgataaaattagccc

SEQ ID NO: 24301 - DNA, 334 bp, Homo sapiens
cagaaacagagatcccatcttggagttttcagtaccacatgggagataaagggttttgaacatgaaatgacaaaaacaacagcaagaagaaaattcttgtcctttttcattactatcagactcaaataaatgtcttggctcttacattacattcattcttcaaccattgtggtctggcttccacttccttcacttcaccaacatggctttgccaaaggaagcccgtgatctctaggccatcactttaattgatctttctacaacatttatcctggttgttaagccctccttacaacattcttctctctttggttttatagctccatctctcctg

SEQ ID NO: 24302 - DNA, 403 bp, Homo sapiens
ggaagtgggagaggcattaaggtgatggccagggctgaggctccaccagcgtgagagggaacatgtgggaactggcccctgcccttgattcctctgcctcaaagttgggatctgaaagccatgtagggctagaagaccctgaggctgttctcccttctgttcatagtgagactcaaaaagccaagtcccagaagttctgaagggctgtgactagaagtgcccaggtccttcagggagctttaagaatgaccccacagaactcaagtttaactaggggttaggtcccagattcagacccaggagtttataaaaatgagctctacttccagttttggtttaaattacacatccaggccaggcacagtggctcacacctgtaatcccagcactttgggaggccagt

SEQ ID NO: 24303 - DNA, 530 bp, Homo sapiens
  misc_feature (1)...(530): n = a,t,c or g
gctcggcgtggcctgcaggcatttggggctgggagaactccccactcctcattccatagtgtggtgaacaggtacaggcttcaggctagatagggcctgtgatcctcctgagctcctctacctctttgagcctcagagtcctcttgtgtaaagcagggagactctgccactcagctcaaggactgcatgagggttgaatgggacagtgtaactaaagaacccagcccacagctgacttttagcaaatggtaactactaaatgagattcatggaggaagctagggctgaattaaacatgggacagagtggagaaggaattcccacagggccgaggaggtggatctgagactgttaggaggcaggtgagcatgcanagatacctgntgaggnatctgtttgaatnanaatgtgccaataaancacccgctaggacaatgataantncatgannancanaaccttccncctggccacataggaaatcccgctgtnctaaaattanaaantancccggngtgngccggcncctg

SEQ ID NO: 24304 - DNA, 365 bp, Homo sapiens
gcgtggtgccgggctcaggagttgtgaaaggcctgcaagaagtgggcctgcctttgcatcgggggtgcctccttattgcggaaatgagctccaccggctccctggccactggggactacactagagcagcggttagaatggctgaggagcactctgaatttgttgttggttttatttctggctcccgagtaagcatgaaaccagaatttcttcacttgactccaggagttcagttggaagcaggaggagataatcttggccaacagtacaatagcccacaagaagttattggcaaacgaggttccgatatcatcattgtaggtcgtggcataatctcagcagctgatcgtctggaagcagcaaga

SEQ ID NO: 24305 - DNA, 244 bp, Homo sapiens
gaaacaaacaaacaaggcttctagttgcagtaggagggacgaattgagagcaagggtttaaggactaaatgcagggtgcagtacagtgtcagtgtcagtgtgcagtgctcaggaaatatttgttgaaggggaagagtatgcttcttcagtccaaggtggaagcatgaaggaaactgtaagcacattgatctagaccacagtttcaggtacagaggggagccgttaactaaagctcagagcgggg

SEQ ID NO: 24306 - DNA, 430 bp, Homo sapiens
  misc_feature (1)...(430): n = a,t,c or g
gcggcacgagcggcacgagtgaaaatgtttcgtaaacttctgatagattacaatcaagagtttcatgtaaatatcttttttctttctgctgcagtaccaatgcactttacagtttccaagttcatcgttaactacctaaattcttagatggctttggggtacatctcagacaggatggaaaccacatggttatatggtagcacttatatacatgttgctttttatgtaaagagtttctatgggctggattttgtcttagtttggcttccccataaagtgattctgcaaaaatgccagtggcaagtgaatgagatagagaagcgaaggcagccgataaagtcttatgatcaaaaaagttaccacttggattattggagcttgatcatgctggagacctccaagtgtcagtgttatcccatncagtgggaaa

SEQ ID NO: 24307 - DNA, 455 bp, Homo sapiens
  misc_feature (1)...(455): n = a,t,c or g
ggtgttnnnnntttgantccgntatccatgattacgaatttaatacgactcactatagggaatttggccctcgaggccaagaattcggcacgaggcaaaatacaaaagttagaatctgatgtctcagctcaaatggaatattgtcgcaccccatgcgctgtcagttgcaatattcctgtggtgtctggcaaagaatgtgaggaaattatcaggaaaggaggtgaaacatctgaaatgtatctcattcaacctgacagttctgtcaaaccgtatagagtatactgtgacatgaatacagaaaatggaggatggacagtgattcagaaccgtcaagacggtagtgttgactttggcaggaaatgggatccatataaacagggatttggaaatgttgcaaccaacacagatgggaagaattactgtggcctaccaggtgaatattggcttggaaatga

SEQ ID NO: 24308 - DNA, 387 bp, Homo sapiens
ctcactatagggaatttggccctcgaggccaagaattcggcacgagaagtctgaatatttatagttgattcttaactgtgcataaacctagatataccattatcccttttatacctaagaagggcatgctaataattaccactgtcaaagaggcaaaggtgttgatttttgtatatgaagttaagcctcagtggagtctcatttgttagtttttagtggtaactaagggtaaactcagggttccctgagctatatgcacactcagacctctttgctttaccagtggtgtttgtgagttgctcagtagtaaaaactggcccttacctgacagagccctggctttgacctgctcagccctgtgtgttaatcctctagtagccaattaac

SEQ ID NO: 24309 - DNA, 342 bp, Homo sapiens
aggtaaaccaccacccaactaatggcattaatcaaatatcaacctttgccaaataaaggactaactcctcatggagaattaaattctgatgataatgctttctattaaactttatttataaacagcatcaaaggggagaattaagcaggaaatataaaaggaaaaacaagtaaagggaaaacaagtcctttgctgaccagtctgactcactccaaaggcctgctggagctatgataattatctgcaaggccaggcaggggctccgaaggagtgggctccaggagcagggatgagaaaaacaagttctccttatcagtttccctgtttgaaattctctcccca

SEQ ID NO: 24310 - DNA, 393 bp, Homo sapiens
gaactggaagagcaggtgaagaggctccttgggtgggcacccctggcgtcctcccatgagggcagcctcacaggggtgtctgcctgtgagttttgttacagggcctcaccaagagagggcctatggaggccgaggaccagggggagcttttcctgcacctccggtcagtggcacgtgccccccagaccttatctatgcaccgactccagagaaagctgaaggaggcagccagaaaaatcatcagcctccgcctggagaaagagcagctcatcgagatggggaacaggctccgtgcagagctgggccgacccgaaaggtggctgttgcaccacgccctccctcctgccctgaggcccggaagccaggcgaggagcccaggaggcctttggatcg

SEQ ID NO: 24311 - DNA, 553 bp, Homo sapiens
aaagaagaagaagaaggaggtgaaggtgaagaaggagaggaaaccaaagaagctgaagaggaggagaagaaagttgaaggtgctggggaggaacaagcagctaagaagaaagattgaacccccatttccttaattatttcaggaataattctcccgaaatcaggtcaaccccatcaccaaccaaccaaccagttgagttccagattctatgtgaattaaaaagtcaatatatgtataattctgagatgacttaggttggacattcaatgttgtgctatgaatttcctctttatgcagagtatctgtttgcttgcagagtggctttctggcttgctgccagcctgtgcatggtccacgcttatgagttcaggatctacggcaatgtgaatcattcagatgtttacaataaaaaacaccacatgagtaaatgaattcactaatgttaatgttaaacttcatggaaaaatagtcctttgaaccttcggtggttagcaattaaagaccctgagttatgtgcaataaatagtaaataaagttataaaaaaaaaaaaaa

SEQ ID NO: 24312 - DNA, 393 bp, Homo sapiens
aacggtggtaatcagaatctaagggtggccggatgaggcgttgaaggtagatgattgtgactgtcatcctgaattttcaccaccatcaagtcagcctccaaaacataaaggaaaacaaaaatctcgaaacaatgaatcagaaaagttcagttctagttcaccattgactttaccagcagatttgaagaacatcttggagaaacagttttctaaatcttccagagctgcacaccaggattttgctaatataatgaaaatgctgagaagcttaattcaagatggctatatggccttattggagcagcgttgccgcagcgctgcacaggcctttacagagttgctgaacggtttagatcctcaaaaaataaagcaattgaacctggccatgattaa

SEQ ID NO: 24313 - DNA, 385 bp, Homo sapiens
gtgtttcagaacccaaatgtcctcaggtagttaggagcatctctatgagatgggattatgcagatggcctatggaaaatgcagctgcataattaacacattatcaaagtcctcttacaatttattttccgcagcatgtcagctaagtagacccaatggggagagaaaatgcctgctttctttccctctttttctgcactgccatattcacccccaaccatccaatctgtggataattggatgttagcggtactcttccacttgcgggcctggagcttggcttgtatccaagtgtatgggtgctttgcctaagaggaatccctctatttcacctgttctggaggcaccagaccttgaaaagaacatgctcaaaataaaatgttatc

SEQ ID NO: 24314 - DNA, 462 bp, Homo sapiens
  misc_feature (1)...(462): n = a,t,c or g
tnnnnnttttgaaatntgaatncctgattacgaatttaatacgactcactatagggaatttggccctcgaggccaagaattcggcacgagaaaattagccagcttaccaggatgggacccacagaacttttgatagaaatggaggactggaaaggagacaaagtaaaggctcactatggaggattcactgtacagaatgaagccaacaaataccagatctcagtgaacaaatacagaggaacagccggtaatgccctcatggatggagcatctcagctgatgggagaaaacaggaccatgaccattcacaacggcatgttcttcagcacgtatgacagagacaatgacggctggttaacatcagatcccagaaaacagtgttctaaagaagacggtggtggatggtggtataatagatgtcatgcagccaatccanacggcagatactactggggtggcagg

SEQ ID NO: 24315 - DNA, 419 bp, Homo sapiens
  misc_feature (1)...(419): n = a,t,c or g
ccctttgannacagctatgacatgattacgaatttaatacgactcactatagggaatttggccctcgaggccaagaattcggcacgagtgaaacttgaaagtgctataggactgaggttgtaagtgacagaaacccaattcagactaagcagaaagagagctttgtctccaggatccgagggtgcattctggaggcccgagctaggatgtggagcaagggatgtggctgagcccacagtgcagctggaaccagggatgcaaatgccgccaggacctctctgtttctcacctctgcttccatccgcatctctgcctcctccaggccaaattttggtgaacagtgactgtgtccattctttatatctcatcattaaattatgggaagagtcctgcgtgaaagtccgaaggtcagatcctgg

SEQ ID NO: 24316 - DNA, 430 bp, Homo sapiens
gaagaacagagaaaacaggcttttgaagaattgcgagatgatttggttgagttaagtaaagccaaatattcgagaaatattgttaagaaatttctcatgtatggaagtaaaccacagattgcagagataatcagaagttttaaaggccacgtgaggaagatgctgcggcatgcggaagcatcagccatcgtggagtacgcatacaatgacaaagccattttggagcagaggaacatgctgacggaagagctctatgggaacacatttcagctttacaagtcagcagatcacccaactctggacaaagtgttagaggtacagccagaaaaattagaacttattatggatgaaatgaaacagattctaactccaatggcccaaaaggaagctgtgattaagcactcattggtgcataaagtattcttggact

SEQ ID NO: 24317 - DNA, 463 bp, Homo sapiens
  misc_feature (1)...(463): n = a,t,c or g
acccgctatgacatgattacgaatttaatacgactcactatagggaatttggccctcgaggccaagaattcggcacgagcagggtcttgctctgttgcccaggctggaatgcagtggcacaattacagctcactgcaacctagaacacctaggctcaagcgatcctccaactcagcttcctgagtagttgggactacatgtgcacaccactacacttggctaattttagtttttgtatggatgagatcttactatattgtttaggctggcttgaactcctggccttaagcaattctnctgccttggcctgccaaagngctntgattacccgnntgagccactgngcctggtncctttcnatcttactacactttnttatctngcntccttntttactacntgnacgattnnacanacaaacagnatngnccnnntactnnatntcnnttactnnntatnctgc

SEQ ID NO: 24318 - DNA, 412 bp, Homo sapiens
gggggcgggtccagtcccgggcgggccgtcgcgggagagaaataacatctgctttgctgccgagctcagaggagaccccagacccctcccgcagccagagggctggagcctgctcagaggtgctttgaagatgccggaggccccgcctctgctgttggcagctgtgttgctgggcctggtgctgctggtggtgctgctgctgcttctgaggcactggggctggggcctgtgccttatcggctggaacgagttcatcctgcagcccatccacaacctgctcatgggtgacaccaaggagcagcgcatcctgaaccacgtgctgggagcatgcggagcccgggaacgcacagagcgtgctggaggccattgacacctactgcgagcagaaggagtgggccatgaacgtgggcga

SEQ ID NO: 24319 - DNA, 1159 bp, Homo sapiens
cccttgacatgattacgaatttaatacgactcactatagggaatttggccctcgaggccaagaattcggcacgaggtgtcctacaggatgtcagttgcaagaggctttgctacaacaggaaaggccaatcagaaatagtgttgatgagttaaataacaatgtggaagctgtttcccagacctcctcttcttcctttcagtacatgtatttgctgaaagacctgtggcaaaagaggcagaagcaagtataagataatgaaaatgtagtcaatgagtactcctcagaactggaaaagcaccaattatatatagatgagactgtgaatagcaatatcccaactaaccttcgtgtgcttcgttcaatcctggaaaacctgagaagcaaaatacaaaagttagaatctgatgtctcagctcaaatggaatattgtcgcaccccatgcgctgtcagttgcaatattcctgtggtgtctggcaaagaatgtgaggaaattatcaggaaaggaggtgaaacatctgaaatgtatctcattcaacctgacagttctgtcaaaccgtatagagtatactgtgacatgaatacagaaaatggaggatggacagtgattcagaaccgtcaagacggtagtgttgactttggcaggaaatgggatccatataaacagggatttggaaatgttgcaaccaacacagatgggaagaattactgtggcctaccaggtgaatattggcttggaaatgataaaattagccagcttaccaggatgggacccacagaacttttgatagaaatggaggactggaaaggagacaaagtaaaggctcactatggaggattcactgtacagaatgaagccaacaaataccagatctcagtgaacaaatacagaggaacagccggtaatgccctcatggatggagcatctcagctgatgggagaaaacaggaccatgaccattcacaacggcatgttcttcagcacgtatgacagagacaatgacggctggttaacatcagatcccagaaaacagtgttctaaagaagacggtggtggatggtggtataatagatgtcatgcagccaatccaaacggcagatactactggggtggacagtacacctgggacatggcaaagcatggcacagatgatggtgtagta

SEQ ID NO: 24320 - DNA, 426 bp, Homo sapiens
  misc_feature (1)...(426): n = a,t,c or g
tgctttganncctttgatgnnatgatgtatataactatctattcgatgatgaagataccccaccaaacccanaaaaagagatctctcgaggatccgaattcgcggcatttgatatgagagaaatagggtgtacaactgtaaattttagaatagaggagtgatatatgaacctgctttggaaagatttccttgatagctttttacaggataaattgaaaggaaggggagagaccaaaaaaaaaaagggccanccaggaggcctttanngttttnagggtttnaggngatggcttggaattnanncaaatnggntanntccaggtntttttnaaaaaaantnctngnttantnttncntntganaatttagggaaaaggaaaacccananntatttgtaaatttngaangccacttgttagnccttta

SEQ ID NO: 24321 - DNA, 494 bp, Homo sapiens
  misc_feature (1)...(494): n = a,t,c or g
cgctatgactgattacgaatttaatacgactcactatagggaatttggccctcgaggccaagaattcggcacgaggcttaggatgggggcctatgtcttcatcggcgtgggggcagtcactatgctcatgggcttcctgggctgcatcggcgccgtcaacgaggtccgctgcctgctggggctgtactttgctttcctgctcctgatcctcattgcccaggtgacggccggggccctcttctacttcaacatgggcaagctgaagcaggagatgggcggcatcgtgactgagctcattcgagactacaacagcagtcgcgaggacagcctgcaggatgcctgggactacgtgcaggctcaggtgaagtgctgcggctgggtcagcttctacaactggacagacaacgctgagctcatgaatcgccctgaggtcacctacccctgttcctgcgaagtcaagggggaaaaagaccacagcctttnttngaagaaag

SEQ ID NO: 24322 - DNA, 442 bp, Homo sapiens
ccgctatgacatgattacgaatttaatacgactcactatagggaatttggccctcgaggccaagaattcggcacgagcatctacgtagtatttgggctgtcaagactaaatagcaaaagggtagaatattagatcattctcttaataagacctgatttattccttaggatgttatacaaacctttttatttcaggcctactttcttgttttttcctaaaaggatctaggatagaggagaacataatatgcctgtatacttctcccatggtttattcataagctgcttcatctcattggagatggtcattgaggagagcagtaataagtgacgatgattctgaggacttggctagactgagcggatcaatggcacacaccagcactggtagaggctgaccagaagctcatcgattccatatgctgcacccagggtgcagattt

SEQ ID NO: 24323 - DNA, 592 bp, Homo sapiens
  misc_feature (1)...(592): n = a,t,c or g
tttgatgatcacgaatttaatacgactcactatagggaatttggccctcgaggccaagaattcggcacgagctactggcctcattttacagatgagaaaactgtggcatagagaagctaagtaacttgtcgaagttcagagagccagtttcgaacctgagattggactctcccaggcatgtggcctaagcctgttttcttcttggataagaaagcagatcagagaggcctggtgatgtggcccaggtcacacagtgctcaggggcagagtcagggagccagacgtagggtgggtctgggaccccaggcctgcatggctcctccccaaatgccagctctggaagtcagggagcattcaaaggcttccagtcggcccctggcacttggacagggcctgagaggcctgtgtcatgcctgttagttcatggttacatttgagctgggtgtgggtggggctggctgcagggaagaaggggctgggggctgggaaggacccctgggtgancaggcccaataatgtccaccggtggtgggcaaacttcaagganggaaatggaagaataaaatnaactttcttggcacccgccaaccgg

SEQ ID NO: 24324 - DNA, 425 bp, Homo sapiens
gatttaatgaagttcttagaacaagtctgggtgatacacattcatctgtgtgagtcttgatctgtccaggttcgctgggctgtttagaatcactgggtcttcagccatttccaaaacgcagaacacagttgatattttaagccaatcaatgtattgagagttcagcgtgtgtcagcacaagagtagatgtcctgggagatgcagaagaaatgtgaagcctggcctctgttccctaggtgccttcagagtcaacttggcagcatcccaccgggcaccattttctgggcagcccctctgatcctcttcataagtgtccaccccgcaggcaatcttggctgagcacagagaatgggatgtttcacgggatgtctctgctgcgacagtggatatccttgctggaacattcacagtactggcccattcca

SEQ ID NO: 24325 - DNA, 428 bp, Homo sapiens
  misc_feature (1)...(428): n = a,t,c or g
gcaagggcctattacattggcttcagatttttcaatgactgcttttctaaagcaaaactaaatggatcttttaatacttgttattatatttcctatgttaaatggattcaattcagtctctttttaaaactcttataaatataataaatgcatgtccttagaaaaggccacagccaaggctattcctgtaattccttctgaagtgaccctagcaacatgatacccagtaaacctggacctgatactgcctaagcaccaggaatgtggctgaaacttagcagctaggaagctagttgtagttcagtctaattttagttcctgattaaccaaatgtcttctagaggcccttttaatggaataaggaatttgcttaatagagtcacaacagtttaccacatccagtttaaccatnttaaactncaaataaa

SEQ ID NO: 24326 - DNA, 365 bp, Homo sapiens
gagcttcaataccctgacctttctgcatccttcaaaatcactgatgacttcctccctgacattcatccttcctttggcttcacagatatcaccttctattttttgcccaccctgcctcctctggctatactgtctccttcatagaatcctgttccttccccacctcttgtaaatactgctttttccagttttctacttgctctagacattttccctgggtgagtccctcaataataatagtgatagtagcatcggccgaaatgtactaaaggcatgtactatgtgctacctgttattctaagcctttaaatcaaattgattgaaaggcaatgatatctctgtaaattgtgcctatgaagtaggaa

SEQ ID NO: 24327 - DNA, 498 bp, Homo sapiens
  misc_feature (1)...(498): n = a,t,c or g
ctatgacatgattacgaatttaatacgactcactatagggaatttggccctcgaggccaagaattcggcacgagggagatttgggttttggcaggcccagagtagttggttgtgatccacaattaccccaggattcccatagcccattagggagctctaggtagtttcaggactgatagagaaattcagatttttttcttggataggtcttgggagctgatatctgcccaaatccttgttggttatactgagtatgctctagatggttcagagcatttgttacctatgtaccaaccctgtccccctaggcccacaacaggtcataataggcctaggagatggaggggaagcaaaatacttcagttgttctgcattcctcaggaacctatgtgaatcatctcatggtaaacttaatgagactttgagattgaagaattaagatattactttgccattggcttatcttacagtttgggcctttggccnaaanacaccatt

SEQ ID NO: 24328 - DNA, 350 bp, Homo sapiens
ggactgcagaaggactgtggtgctgggaggcacagctctggatggcattgggacagtggttagcactacaggtttgggctgcagtggcggcttccgggtgggcagggctttgcctgaggagccatcaagggatgggcccatgctgatctggacagctccaagtgagggggctgggacatcccacaggaggcatcctgaaggggacagggactctgtcttcacttccaggacctcctctcctataaaagcctggctggaggagtcggctgagagcagggaggcctcagagttgacggaagaacatggagagacaggttctatcttggtctggacatctgaggaatcatcaa

SEQ ID NO: 24329 - DNA, 558 bp, Homo sapiens
  misc_feature (1)...(558): n = a,t,c or g
gagaacctgtctctccatgttcttccgtcaactctgaggcctccctgctctcagccgactcctccagccaggtgagcangaccttccttccttcctccaggttttccagtgagttcctcctgacctagaggtatgagagctttcccttcttcagctccttctcctcgacactcttcctgactaatgtatctctggaatgccccacataggcttttataggagaggaggtcctggaagtgaagacagagtccctgtccccttcaggatgcctcctgtgggatgtcccagccccctcacttggagctgtccagatcagcatgggcccatcccttgatggctcctcaggcaaagccctgcccacccggaagccgccactgcagcccaaacctgtagtgctaaccactgtcccaatgccatccagagctgtgcctcccagcaccacagaccttctgcagtccctcgtccagccacccccaggtactgaagaaggagaagagggccgggcaatggtggctcacgccggtaatcccagcactttgggaggctgaggcggacgaa

SEQ ID NO: 24330 - DNA, 422 bp, Homo sapiens
caggagtaacaattgatgagcaatattcagagtgaagtaaatctggaaatggtagactgtgttgggattggggggagggccatgggaggggtacatcgtcaacatagccgatcctgttacatttaagagtagcctcgtaggttgaatttcttctggtagcttcatggtaaatgcatccgaataagccatactggattgcagtgtttgtttctgtagggtgtttaaggacttgacttcctttctcccatgattcctctggactgcacacagcacccacaaccagccccatgcatgctgctgcctctgggcagtcgtagaatctcccacttcagtttctcgttgattgtactcacctttatggaatccaaatacatccaaaagggtaaggcagttttaaaaatgtgaaaacatttaaaaatgat

SEQ ID NO: 24331 - DNA, 418 bp, Homo sapiens
gtggaggtggtcctgggggtgattatgcagccatgggggcctgcccagcatctgagcaagggtatgaagagatgagagcttttcaggggcctggacatcaggccccccatgtccattatgcccgcctaaaaactctacgtagcttagaggctacagactctgcctttgataaccctgattactggcatagcaggcttttccccaaggctaatgcccagagaacgtaactcctgctccctgtggcactcagggagcatttaatggcagctagtgcctttagagggtaccgcttctccctattcctctctctcccaggtcccagccccttttccccagtcccagacaattccattcaatctttggaggcttttaaacattttgacacaaaattcttatggtatgtagccagctgtgcact

SEQ ID NO: 24332 - DNA, 304 bp, Homo sapiens
gtgggatgtaggctgctatagcaagacttgcatactcgactgggttcaaagagctgctggctgggaactggaaccttctggttacaacaactggagcagaatacgttcccacaattcctgcagtggtgcttcctgctggcaagccagaaggcactgtcgcacgcatagcagtgggcggccaggtggtcaggaagccaacgggtcatctgcaaaacagatgggaccaggttactgacaggagatgggccatccagctggagccagcagagccatgctgggggcagcaagagtcacaaggaccaca

SEQ ID NO: 24333 - DNA, 410 bp, Homo sapiens
gcatgccttattcaaccagtcccctattaaggacatttggactctttccagtctttggctgttataaatagaagcagtgtactttttgccttacagtataaaaaatgttataaaaatgtaaaatagtgttagcaagaagtgggtgcagagtttcaattaaaaaaaacgttaaactcctggacaggaaagacagccaataccaaaatgagtgagaggggtgctgttctcctctttctggctaccattaaaagttaggccaagggctgggcacagtggcttacacctgaaatctcagcactttgggaggccaaggcgggcagatcacatgagcttaggagtttgagaccagcctgggcaacatgacaaaaccctgactctaataataacaacaaaaactagccaggtgtggt

SEQ ID NO: 24334 - DNA, 344 bp, Homo sapiens
gaaaagatgatgtatggccaaagaatggaatgaactaagggaaagggccatataaatatctggggaagaacattttaggcagtggaatgtgtcattgcccttcaaccaaagactaccagaaacatacccatagttgacagattgagtttattactcttactccagggagggacaacacacactataggtaactatgatgtgtttcaataagaagttgttagaatgaacctattataggatttggacaatttgggggaaggtctaggaatcaggagttccgtctcagatacatcagaaagcaggggcaattgtatgattgcacatttcaataaatcttatttata

SEQ ID NO: 24335 - DNA, 461 bp, Homo sapiens
  misc_feature (1)...(461): n = a,t,c or g
ttngnnnnnnnttgnnnncnaacagctatgacatgattacgaatttaatacgactcactatagggaatttggccctcgaggccaagaattcggcacgagctggaggagagcttgtgggagccaaggagcaccttggacatctggagtctggcaggagtgatgacgggtggaggggctagctcgaggcagggctggtggggcctgaggccagtgaggagtgtggagtaggcgcccaggcatcgtgcagacagggcgacatcagtacgagtgtgcgtgagtgtgagccaccttggcaagtgcctgtgcagggcccggccgccctccatctgggccgggtgactgggcgccggctgtgtgcccgaggcctcaccctgccctcgcctagtctnnnnnnnccgaccgacatcacggagcacctttaagcattcatttngccccaatttgtttntggcccntccccc

SEQ ID NO: 24336 - DNA, 593 bp, Homo sapiens
gttttatagaaaataaaaactttatttttttcaagtttataagatagttcccattacatataacattacggtcacggattctacagccacaaatgcccgcagtcacataaatatatccaatccaatcaatgccttttcctgctaacagaggcatctgaagttcagagggagagtcgcattttgagtagaagtcgtccttaatgggagggctcctgtcagtgcattaggaactagccaaggagccttgcttgccagagctgtctgactcagaggagaggaagggacagatggcctgctgactggggctgaggcagaactagattttctctcttgtggtttaagatattttagaatctcggaattcagatcctatagtgtgaatatctggggagttctaacttctggatgaaaaaggaaaccaatttagtggtaagaaatagaagcctgcttaagagggaccctaactgcctccttgaggagtaaggagtcagaggaagaccctaagctcaccattccttggcccagaccattgctctaccccatactcctctcccctgtggttcagtgacactgacaaccattcaaggtagtac

SEQ ID NO: 24337 - DNA, 482 bp, Homo sapiens
  misc_feature (1)...(482): n = a,t,c or g
aattcggcacgagagtacgtccactcttctgtccagcttttaacaatctaactaatgccctctccagggtcaccctagaatcagatctgctccccagcatcttctgtttcctggtgagtgattcctgctactttggatggccatgacgggctggagctgccttgtgacaggagcaggagggtttctgggacagaggatcatccgcctcttggtgaaggagaaggagctgaaggagatcagggtcttggacaaggccttcggaccagaattgagagaggaattttctagtaagtaaacttgggtcatgggtgtgtggttccatcttaaacactgcatgtatgtggggggagatggaccttgtctagcaagttattgaaatttgtatgccaaatctaagccaatctcacatccaaagtcatcaanaaataantantaaatantataaaatggcatagtangaaagatactgggtgggatttcca

SEQ ID NO: 24338 - DNA, 348 bp, Homo sapiens
gagaaagggaggtagaggccggaggcggggaagggagagaaagagagggaagtggaagaaatagtggaacttgccaaagtgtacaataaaaagaaatttcagtcttaaaagcagtcagtacagaattaatctcagcaaacaacacgattaagaagctagataatattaggtaataaggaaaaaggcgtacattgtttctatcaatgagaaaacaaaagggcagaaactctgaaaagaggggaaaaaaatatttgttggaaagttgaagtacaaataggaacctaaatcaatggcatgatttttgagcagtagatacagtataaagaaaaagaatccagtcaaacttat

SEQ ID NO: 24339 - DNA, 168 bp, Homo sapiens
aacagctatgacatgattacgaatttaatacgactcactatagggaatttggccctcgaggccaagaattcggcacgagaaaataccttagagtgggtaatttataaacaacagacatttattgcttacagttctggacgtgagaagtctcagatcaaggtgcccagg

SEQ ID NO: 24340 - DNA, 460 bp, Homo sapiens
  misc_feature (1)...(460): n = a,t,c or g
cgctatgacatgattacgaatttaatacgactcactatagggaatttggccctcgaggccaagaattcggcacgaggctcggcgtggtggcgcgtgcctgtagtcccaggctactcaggaggctgaggcaggagaatcgcttgaacccaggaggcagaggatgcagtgagccgagatcgcgccactgcactccagcctggcaacaaagactccatctcaaaaaaaaaagaggatcaattatgattaatgtctaagttttgttttttaccaaacaaggaaagtagttttggatgggtaaggaaaacagaagggaaatttaaaagggcaaagcttcttgttataggcagttttaaaagatgagagacagctggacgtccttaaaaaaagaatcagtcttcttacaagcttttcctaaatatgcatactgaagttaggtgcccctnttacagactcccactgc

SEQ ID NO: 24341 - DNA, 468 bp, Homo sapiens
cagaagtctctgaggatgccaagcagctgatccgcctcctgttgaagacagaccccacagagaggctgaccatcactcagttcatgaaccacccctggatcaaccaatcgatggtagtgccacagaccccactccacacggcccgagtgctgcaggaggacaaagaccactgggacgaagtcaaggaggagatgaccagtgccttggccactatgcgggtagactacgaccaggtgaagatcaaggacctgaagacctctaacaaccggctcctcaacaagaggagaaaaaagcaggcaggcagctcctctgcctcacagggctgcaacaaccagtagctcatggggccttggaggagcctggcctctcagcctgcataacagactgaaatgtgctcaggccctggccaggagggcccagggtcattcttttaacaaaaggattattttggtgtgttttaaaaaaaaa

SEQ ID NO: 24342 - DNA, 487 bp, Homo sapiens
  misc_feature (1)...(487): n = a,t,c or g
gaaattgatctccatgcaatacataatcaaaagaaagctacaccagctatattaatgccagacaaaatagactttaagacaaagggcattcctttatctggaagacgaagagggtcactacctaatgattaaaagttccattcaccaggaagagaaaaaaatcataagcttgtatgcacatgataacttagccttaaaatgtaggaagcgaaagtgaccaaatgtacgaaaaaataacacatccacctaatagtgggagaatctaatagatctttcctgataatagttgaaacagacccccaaaaaatcaggatatagaacttgtaaagcacaggagctggatatactgaacatgtttataatactgtaccaaacagctgcgcaaacacactctttgtaagcacatgtagatttatgaaatttgatgacactgaaccaaaagcaagcctcaaactgtcaaaggnttactatcacggtgggtagccta

SEQ ID NO: 24343 - DNA, 366 bp, Homo sapiens
ggcaaatactacgtcaaggagaggtctaaggtaggacgcgctcggcgccctgccgcagctgctcccgcggggacgggaggcactcggagtccgttgtatgtcgacttcccagggccgtaagcgaactttgttttttaaccaagaagtcagcctggtttgtctctactcgctgcttccccccacccctcgccccagctcctctgagcgaaagtcaacgttaaggggctcaggtgaaccatgatgatgaccttctgttgactttgaaatattggctcttgtgggtgacaaaagccagacaagctgtggctgtggtccgattttaagacgaggttctcaaagatccaaaggagggaaagggtattggaa

SEQ ID NO: 24344 - DNA, 444 bp, Homo sapiens
  misc_feature (1)...(444): n = a,t,c or g
gacagtaagtatttgggaaccaaagtaatagattaggaaactttgcatatttattgaatgccttttgtttttcatcttcaaaactgattcctgactgggtgcagtgggtcatgcctgtattcccagcactttgggaggccaaggggggcgtggatcacctgaagtcaggagttccagaccagcctggccaagatggtaaaaccccgtttctactaaaaatacaaaaattaaggccaggagtggtggctcatgcctgtaatcccagcagtttgggaggccgagacgggtagatcacctgagatcaggagttcaagaccagcctggccaacatggcgaaaccatctctaccaaaaatacaaaaaattaaccaggcatggtggcgggcacttgtaatcccagctactcgggaggcaggagaatcgcatgacctcatgaaggngcttt

SEQ ID NO: 24345 - DNA, 640 bp, Homo sapiens
gggacccctccccctgcgggcgctcccatggcacagttcgcgttcgagagtgacctgcactcgctgcttcagctggatgcacccatccccaatgcaccccctgcgcgctggcagcgcaaagccaaggaagccgcaggcccggccccctcacccatgcgggccgccaaccgatcccacagcgccggcaggactccgggccgaactcctggcaaatccagttccaaggttcagaccactcctagcaaacctggcggtgaccgctatatcccccatcgcagtgctgcccagatggaggtggccagcttcctcctgagcaaggagaaccagcctgaaaacagccagacgcccaccaagaaggaacatcagaaagcctgggctttgaacctgaacggttttgatgtagaggaagccaaagattcttcggggtcaatggaaaaccacaaaatgcgccagagggttatcagaacagactgaaagtactctacagccaaaaggccactcctggctccagccggaagacctgccgttacattccttccctgccagaccgtatcctggatgcgcctgaaatccgaaatgactattacctgaaccttgtggattggagttctgggaatgtactggccgtggcactggacaa

SEQ ID NO: 24346 - DNA, 465 bp, Homo sapiens
gactgcatagggtcgcgtggtgggatctgaacggtgtagtccactgggttttcattctttggtttcttgggcatcttggaaggcagagggtccatgcctaggactttatggagctggccgaaggcagcgagccgcagtgcgtgctgcgcactctgtgtgatatcttcccgttgctgtctgtctagatgcccaatagcatcaggggcttctttttcacaagggtcataaatgccagaaccatctggcatcacgatgcccgacgccaggcactccagcactctccgcagggcctcgccagcacccatcggtctgttggccgtgccaatggatttctcacacaggagctcgagaggccagcctcggaggggaccccaggtgggcacgcgagtgcacaggtccctcaagacccggatcacaatgacacaagacttcacccgttggctctggcctggaaccacttgcgtg

SEQ ID NO: 24347 - DNA, 447 bp, Homo sapiens
  misc_feature (1)...(447): n = a,t,c or g
gctcgagtattttggtatcagggagtctctgtctcccataagccccatgaacttaaaagtttgatgtggtttttgttttgtggtaagactgccatagctgtcacttcctgttgcatcgtgtaagcaggtacataatgtctgatggtcctcctttctgtgatcttaagattggttggtgggtccaggggtggtcagcctaatccctccattatgcagtccctgggtgccttattcttgatctgtaaaatgtgactagattaagcacaggggtctctactccacagggatcttatgtgaatgaaatggtataacagattagaaagcactttgttttaaggagcccatagcaatcagaccaattctggacttctgctatagagtcagatctgaagggcacaccttttcctctaaggccacagctttttttcactgntgactttntaaccc

SEQ ID NO: 24348 - DNA, 396 bp, Homo sapiens
  misc_feature (1)...(396): n = a,t,c or g
aagatgttttgtttctttcctatcttgttcagctgcttgacagcaggtgcaatttgtctgtaggaatctgtagatgagttcagcaaggagggagtggtagatggaatgatctgatagaatgagtttcagtggggctatggagttttagggatgagcgagatagaagcagcattgaagagcaataactcatattaccaaacctccagggttaaggtagtgtgtgagagagaaacagtaaagcagttgaggtatttacagaagcagtgtcttcaggggctagctaagtttcccttagagtagaggtggcatctatagcccttatgccaaaactggttgctngttttttttaagntttattggaacacagccaagcccatttgtttacataatgttacc

SEQ ID NO: 24349 - DNA, 351 bp, Homo sapiens
gcggcacgaggaccatacagacagattacattgtttatatggatgaactctcctccttcattggggcaaagcccaacatcccatggctgtttctcacagatcccaaattggccatggaagtttattttggcccttgtagtccctaccagtttaggctggtgggcccagggcagtggccaggagccagaaatgccatactgacccagtgggaccggtcgttgaaacccatgcagacacgagtggtcgggagacttcagaagccttgcttctttttccattggctgaagctctttgcaattcctattctgttaatcgctgttttccttgtgttgacctaatcatcattttctc

SEQ ID NO: 24350 - DNA, 383 bp, Homo sapiens
aagtcagatgctgattttgactccatttcaaggtcaaggccatggtgctcaacttcttgaaacagttcatagatactacactgaatttcctacagttcttgatattacagcggaagatccatccaaaagctatgtgaaattacgagactttgtgcttgtgaagctttgtcaagatttgccctgtttttcccgggaaaaattaatgcaaggattcaatgaagatatggcgatagaggcacaacagaagttcaaaataaataagcaacacgctagaagggtttatgaaattcttcgactactggtaactgacatgagtgatgccgaacaatacagaagctacagactggatattaaaagaagactaattagcccatataagaaaa

SEQ ID NO: 24351 - DNA, 950 bp, Homo sapiens
aaacagcttgctgttataagccctgagaagtatgacataaaatgtgctgtatctgaagcggcaataattttgaattcatgtgtggaacccaaaatgcaagtcactatcacactgacatctccaattattcgagaagagaacatgagggaaggagatgtaacctcgggtatggtgaaagacccaccggacgtcttggacaggcaaaaatgccttgacgctctggctgctctacgccacgctaagtggttccaggctagagctaatggtctgcagtcctgtgtgattatcatacgcattcttcgagacctctgtcagcgagttccaacttggtctgattttccaagctgggctatggagttactagtagagaaagcaatcagcagtgcttctagccctcagagccctggggatgcactgagaagagtttttgaatgcatttcttcagggattattcttaaaggtagtcctggacttctggatccttgtgaaaaggatccctttgataccttggcaacaatgactgaccagcagcgtgaagacatcacatccagtgcacagtttgcattgagactccttgcattccgccagatacacaaagttctaggcatggatccattaccgcaaatgagccaacgttttaacatccacaacaacaggaaacgaagaagagatagtgatggagttgatggatttgaagctgaggggaaaaaagacaaaaaagattatgataacttttaaaaagtgtctgtaaatcttcagtgttaaaaaaacagatgcccatttgttggctgtttttcattcataataatgtctacattgaaaaatttatcaagaatttaaaggatttcatggaagaaccaagtttttctatgatattaaaaaatgtacagtgttaggtattatttgaatggaaagacacccaaaaaaaaaaatgtgctccgactaggggg

SEQ ID NO: 24352 - DNA, 447 bp, Homo sapiens
  misc_feature (1)...(447): n = a,t,c or g
ggggctagggattcatttttttttctccacctgattttacaggaggcttctgccatcccttagtgtgaaggcagagtgcagacgctctgcggttatttgtccaggaggagaagagcttctgggaggtcacagatctgattgttgtaatagcactgacatttttaaatgggagaatgttgatatctatagtaaacagagtaaaacttcagtagcttcaatataaagatgccgagatgatcttagagccactttgtccatagatccttctgcggtgtggaactgcagcgtctctctaccagcctctgtggtcagtggccacctgtgggtaattgaatgcttgaagtgcaaatgagaaactgatacttctaattttatttaattttagacaaatttaaatagctacatgggccgggcactgtggctcatacctgnattcccagcagtttg

SEQ ID NO: 24353 - DNA, 542 bp, Homo sapiens
  misc_feature (1)...(542): n = a,t,c or g
ccaagctaaaattaaccctcactaaagggaataagcttgcggccgcttaattaatatgaaggcagtaagaactttttattctttcagaatggaacaaaagtgggacttttaaaatgttgccctgtaagaagagaagaactacagtgacagagtccctacagcataaaggcaatcaagaggaaaacaacgtagacctagaatcagccgttaaaccagaatctgaccaggttaaggacttgagttcggtgtcactatcctgggatccaagtcatggcagagtagctggcttcgaagtacagtctttgcaggatgcaggaaatcagcttggtatggaggatacatctctgagctctggaatgctcacccagaacacaaatgtaccaattctagaaggtgttgatgtggccatctctcagggaatcaccctaccttccttggagtcttttcacccccttaatatacacattggtaaaggaaaactccacgctactggntcaaagaganggaaaaaaatgcaccaaggcctgggcaantnnccaaga

SEQ ID NO: 24354 - DNA, 452 bp, Homo sapiens
ttggccctcgaggccaagaattcggcacgagcggcacgagctggaataaaccattaaaccctttttattttagctatagcttaaatacaagggacacctctctctccataccatttcatgagtggtattctctgaatttttgtgggaccaaagagctgactggaagtagaatggttggctttactatactggcagcagccaagtagtgactggactgtgttccaaaagttggtttttaagtaagatgttcagaattttaaaagcaagcattttcccataaaaataatgtctaagttcctggggtagtcctcccaaaagacaatttcacacaaatgtattcattcgtagtatagcataaaaagtaccagagaaactcactactatttatatcttaacaatatttcaaggaggaaaatatattcagcatgggcctcaacttgggatgccaaaac

SEQ ID NO: 24355 - DNA, 475 bp, Homo sapiens
  misc_feature (1)...(475): n = a,t,c or g
gctatggaacaggctgtggctgagggccatgaaggaaggctgccaagtccgggcccagccaggtagcagccacacctctatctaccctgctccccaacactgggcaccagcactcacctgcccaggacccacagtgaaaacccacccacaaaaaatgcactttggagaagagtagcaggtcccaggcagagccagggccacctctcagaaaggacatcaagtttctcgcccagctgagagatggacagatgaccgcacaagccactcacagcccaaggtgatggactctaggatatattcaaggctgagcaactggcttgaagtcgtgtctacttacatattcaaagacctagtgagcattcacaagtcattctttttacccttcaactagccgggtctcaaccagnctacctaggaatgcttgtggctgtgaaactccanaggctggattttanagtncttcaaggggattaac

SEQ ID NO: 24356 - DNA, 392 bp, Homo sapiens
ggcatcgtagtatcaacatccaagacctaaatcattacttggaataaaacatgtagactatttggccagtaatagtgattaacagcaaaagtaatctaaatttagtaaaaataaacatttatttttgagattaaaaagaaccaaattttttagaagttcctaagagtaaaatttttcagtgttaatatattcgcttagcaaatttttcaagtaggcatttttattacttaaatccattaaaaatttcattaattggccattcaattgaattcctattaaggcactatgctaaaatgctgtaagtaatattaagatggctaaaccttatttcttgccttaaagacacatacatgacttcaaaaagtttggtgtgattgccattgtgtttttat

SEQ ID NO: 24357 - DNA, 335 bp, Homo sapiens
  misc_feature (1)...(335): n = a,t,c or g
gcagagaggctcaaaaccaaaactgggaagaagagttccagcccaacgagttccttccaaacaaagaagccttagattctaacccagcttcagagagcacagtcattcaaaatgtgactgaaataataagcctttttatttatggcttacccatggatgcaataggtgttcccaaaaagtgtgtagaagatggagcctctgttccaaagtcactcccaaagatatccaaagagagaagaaataataatcttttttgctgcaggcaatgagaatagtgtttgtcaattccagatcaaggcagattcagttaaaatatnnaaaagaatgatgtttgg

SEQ ID NO: 24358 - DNA, 598 bp, Homo sapiens
gcggatgagggaacattctgcagtataaagggagcagggaaggcgggagacagcgcagtttgaatcgcggtgcgacgaaggagtaggtggtgggatctcaccgtgggtccgattagccttttctctgccttgcttgcttgagcttcagcggaattcgaaatggctggcggtaaggctggaaaggactccggaaaggccaagacaaaggcggtttcccgctcgcagagagccggcttgcagttcccagtgggccgtattcatcgacacctaaaatctaggacgaccagtcatggacgtgtgggcgcgactgccgctgtgtacagcgcagccatcctggagtacctcaccgcagaggtacttgaactggcaggaaatgcatcaaaagacttaaaggtaaagcgtattacccctcgtcacttgcaacttgctattcgtggagatgaagaattggattctctcatcaaggctacaattgctggtggtggtgtgatccctcacatccacaaatctctgattggaaagaagggacagcagaaaactgcttaaagggatgctttaaccaaccctcttcctccccgtcaatgtactgtaactggga

SEQ ID NO: 24359 - DNA, 327 bp, Homo sapiens
gccatgttggccaggctggtctcgaactgctgacctcgggtgatccgcctgcctcggcctcccaaagtgctgggattacaggcgtattccactgtgcccagcctgagtttctgtttataaacaacagtctatgatagtataatcctctcttttttgtacacagagtaaagaggacaaataggtgaaagaataaatgaaaggctggaatcccacttcccccgctgtcccagggcattggatattgacggataggaggcagcaaaccactcacagagccaggaagaaatgaatgcgttggtattgccaggaggggaagccggcccggct

SEQ ID NO: 24360 - DNA, 256 bp, Homo sapiens
tttgaatccatatttatgacctgattacgaatttaatacgactcactatagggaatttggccctcgaggccaagaattcggcacgagggagttctggggtaggaagtggtcccgggagattttggatggaaaagtcaggaggattgacagcagacttgcagaattacatagagaaattaggaacccccaaatttcatgtcaattgatctattccccctctttgtttcttggggcatttttcctttttttttttttt

SEQ ID NO: 24361 - DNA, 436 bp, Homo sapiens
gtggcatccgagctgagggacgcgagcctgagacgccggtgctgctccggctgagtatctaccttgtttccccgatgggattcccgtccaagctatctcgagcctgcagcgccacagtccccggccctcgcccaggttcactgcaaccgttcataggtccccaggagctgctgctggcgagcccgctactgcagggacctatggagccattccgtaatgccatcccgagcaacgcactgctgcagcttccctgagcctttccagcaagtttgttcaagattggctgtcaagaatcatggactgttattatatgccttgttttctgtcaagacaccatgattcctggtaaccgaatgctgatggtcgttttattatgccaagtcctgctaggaggcgcgagccatgctagtttgatacctgagacggggaacaaaaa

SEQ ID NO: 24362 - DNA, 459 bp, Homo sapiens
  misc_feature (1)...(459): n = a,t,c or g
gatcttcttcctccccagccaccaccctggcaggcagaggcggtcggtggctcatttcatagctggaggctgagactccaggctccaggtgcggggaagccagcaggagacaggaggaccgggatgggaagcagggcggggctctgggccaagtccccagcagcccccaggccctggtcccgcactcgccgctgtgtctcagtttcctcacctgcaaagcagagccagttctcggaacaaatgcgctcccgtccgaccctcaggacagccccgggaggcatgctggtgaatttttgcagcgatttgctgtgtgaactcaggcaggcactgtcctagggtaaattgtgtcccccaaagaaaaggtggagggcggtgggtccgctgtgaccccagcactttgagaaagcaacacgtgaggatcaaggacccaagaggtccagaacnancnnggnaaattta

SEQ ID NO: 24363 - DNA, 445 bp, Homo sapiens
cagacctgacatgattacgaatctaatacgactcactatagggaatttggccctcgaggccaagaattcggcacgagggaaagccctgcgggcagcaccaccatggccccagcagtcctttagtatctggccttctcaggcagccctgcttctacatccaggacggaggctgccaggttgaaatgcctccctcttttggtcctccagatggagttggaagtcccgcccctttgtcccctctgcaggttgctcactgcacttattctaagacgccgttgcttatgcgtgtcctccagtagtctccagtgggagccccgagggcaggctgtctttgccacctgagccttgtgactggcctggtagacaccacgctcccaatcatggttaagtaaaatctgcttaagaaggcaggaagacttcaccccaacctgtaccatttgaatgg

SEQ ID NO: 24364 - DNA, 379 bp, Homo sapiens
ctccaaaagatcatacacctgctctaaaagctgaactcccaggccacgaattacatcagttctcaagacttcaactagtctcctgatcttttcagaacctggcataatagctgaaggtagctctttaaaatggatttcctctgcctcttctgcaaccttcccatgaagtatcagtgtgtcccgatatttccgatgaagtttgaattctgacactgggtttgctaccgggacatcttcacagctctctttagaatccagtttcagggtctgagtcatcaattgtaccaaggcattaatttcatttgtctgacctttcctgggggaaaaaaatatccctttgttatttaattggcttcatgagaatttttcattaaaaaat

SEQ ID NO: 24365 - DNA, 498 bp, Homo sapiens
tttgacatgattacgaatttaatacgactcactatagggaatttggccctcgaggccaagaattcggcacgagggcagcggaagggaatgaagctctgatgccagtaggcggatgacccttgaagacactgctgagcgagagaagccagtcacagaggctgcatactgtgtggttccctttatatgcaatacccagtacaggcaaatccacagaggcagaaagctcagtggcagccaggggcggcagggacagggaattcagagtgaccggagattggaacaacattttcttctgtggtgatgaaaagttctggaattagcagtgataggtgtacaaccaaccatgtaaatgcgctaaatgccgctgaattgtgcactttaaaagggtgaattttagccgggtgtggtggtgcacacctgtaatcccagctacttgggaggctgaggtggaaggatcacttgagctcaggaggacaacgctgcggtgaactatgattg

SEQ ID NO: 24366 - DNA, 836 bp, Homo sapiens
atttaatacgactcactatagggaatttggccctcgaggccaagaattcggcacgaggacctggcaaacatcaaccaatgggtgaaggaggccacggaggggaagattcaggaattcctctctgggctgccggaagacaccgtgttgcttctcctcaacgccatccacttccagggtttctggaggaacaagtttgacccgagccttacccagagagactccttccacctggacgagcagttcacggtgcccgtggaaatgatgcaggcccgcacgtacccgctgcgctggttcttgctggagcagcctgagatccaggtggctcatttcccctttaagaacaacatgagctttgtggtccttgtacccacccactttgaatggaacgtgtcccaggtactggccaacctgagttgggacaccctgcacccacctctggtgtgggagaggcccaccaaggtccggctgcctaagctgtatctgaaacaccaaatggacctggtggccaccctcagccagctgggcctgcaggagttgttccaggccccagacctgcgtgggatctccgagcagagcctggtggtgtccggcgtgcagcatcagtccaccctggagctcagcgaggtcggcgtggaggcggcggcggccaccagcattgccatgtcccgcatgtccctgtcctccttcagcgtgaaccgccccttcctcttcttcatcttcgaggacaccacaggccttcccctcttcgtgggcagcgtgaagaaccccaaccccagtgcaccgcgggagctcaaggaacagcaggattccccgggcaacaaggacttcctccagag

SEQ ID NO: 24367 - DNA, 337 bp, Homo sapiens
aggacattaagttgccactgtcaaaaggcaccatggatgatattagtcaggaagagggtagctcccagggggaggactcagtgagtggttcacagagaatttccagtatctatgcacgagaggccctcattgagattgactacggtgatctgtgtgaggatctgaaggatgcccaggctgaggaagagatcaagcaagagatgaacacactgcagcagaagctgaatgagcagcagagtgtgcttcagcgtattgccgcccccaacatgaaggccatggaaaagctggaaagtgtccgagacaagttccaggagacctcagatgagtttgaagcagc

SEQ ID NO: 24368 - DNA, 474 bp, Homo sapiens
  misc_feature (1)...(474): n = a,t,c or g
ggtnnnnntttgnnntttgaaancgntatgacatgattacgaatttaatacgactcactatagggaatttggccctcgaggccaagaattcggcacgagctgggccttgtgtgctggcttccgctgtcacccagcaaggcacaggctcctgtatttgagactaggatagcttcatcttgagcctgagccttagaatctgtagaggagcctggagtcggatctagccatggctggcagaggtttctagggtgggccccagccgtggcgtgaactgaggatgacccggggcagctggcaggagagagccttggcctgacctggcacagaaagggcagcttcagtctctgcagtgtccattatctgctgttccttcgagggttccaggctgtgtgtggggcccaagcatgccccacccacccctcctgggcccaggcagcacctggagcccacagagtctgtgtgtagccaggaagc

SEQ ID NO: 24369 - DNA, 698 bp, Homo sapiens
  misc_feature (1)...(698): n = a,t,c or g
aacctctatgacatgattacgaatttaatacgactcactatagggaatttggccctcgaggccaagaattcggcacgaggctgtcgtccccctccagtgcttggctgccccacaggccacacgctgcccaggctctgctgacttctgagcagttttccaggaggccggggggagcaggaggaggaaaggtagcccccgagggatgtccttggggaggggtcagctctggccacaaccctccccaccagtctcacccactaggataggaactgggccttgtgtgctggcttccgctgtcacccagcaaggcacaggctcctgtatttgagactaggatagcttcatcttgagcctgagccttagaatctgtagaggagcctggagtcggatctagccatggctggcagaggtttctagggtgggccccagccgtggcgtgaactgaggatgacccggggcagctggcaggagagagccttggcctgacctggcacagaaagggcagcttcagtctctgcagtgtccattatctgctgttccttcgagggttccaggctgngngnggggcccaagcatgccccacccacccctcctgggcccaggcagcacctggagcccacagagtctgtgtgtagccaggaagccccgctnaggtagccaccaccggggcactggctgctctgcttggcctgttaacc

SEQ ID NO: 24370 - DNA, 411 bp, Homo sapiens
ggcactcggcggtcgaaaggggagttcaaggagacgggggcgacgcggctgagggcttctcgtcggggtcggggctgcagccgtcatgccggggatagtggagctgcccactctagaggagctgaaagtagatgaggtgaaaattagttctgctgtgcttaaagctgcggcccatcactatggagctcaatgtgataagcccaacaaggagtttatgctctgccgctgggaagagaaagatccgaggcggtgtttagaggaaggcaaactggtcaacaagtgtgctttggacttctttaggcagataaaacgtcactgtgcagagccccttttttaccaggaattattgggacttgcattgattatactggccagcagttatttcgtcactgtcgcaaacagcagcaaagt

SEQ ID NO: 24371 - DNA, 476 bp, Homo sapiens
ggtttttcagtatctacgattcatagatctggaattcgcggccgcgtcgaccttaaagtaaaaaaaaaaaattatgtaattaaaccagaggataaaataaataaaactcaagttaatttgccacgtagagctgtatggaagtgaggaaggtgctcttacataaacaccctccggcttccacactcatatgtatctgcttcctggtaagtctgaggttgggggaactgcaccttacttttcctctcctatatcccctagtgcggcaatatcagaacccaagggaggaaaagctggcaaagttgtcatgtgccaagcggccaatccctcctgaaatgaaggtaggttcactcggtctctcctaagcagaagaggatgtccaggaaataaaatttaaaaagccattgaagatccaacaaaccgcagccttggggtcgacgcggccgcgaattccagatctatgaatcgtagatactgaa

SEQ ID NO: 24372 - DNA, 1108 bp, Homo sapiens
ggaagggaggcacttgagaaatgtctttcctccaggacccaagtttcttcaccatggggatgtggtccattggtgtaggagccctgggggctgctgccttggcattgctgcttgccaacacagacgtgtttctgtccaagccccagaaagcggccctggagtacctggaggatatagacctgaaaacactggagaaggaaccaaggactttcaaagcaaaggagctatgggaaaaaaatggagctgtgattatggccgtgcggaggccaggctgtttcctctgtcgagaggaagctgcggatctgtcctccctgaaaagcatgttggaccagctgggcgtccccctctatgcagtggtaaaggagcacatcaggactgaagtgaaggatttccagccttatttcaaaggagaaatcttcctggatgaaaagaaaaagttctatggtccacaaaggcggaagatgatgtttatgggatttatccgtctgggagtgtggtacaacttcttccgagcctggaacggaggcttctctggaaacctggaaggagaaggcttcatccttgggggagttttcgtggtgggatcaggaaagcagggcattcttcttgagcaccgagaaaaagaatttggagacaaagtaaacctactttctgttctggaagctgctaagatgatcaaaccacagactttggcctcagagaaaaaatgattgtgtgaaactgcccagctcagggataaccagggacattcacctgtgttcatgggatgtattgtttccactcgtgtccctaaggagtgagaaacccatttatactctactctcagtatggattattaatgtattttaatattctgtttaggcccactaaggcaaaatagccccaaaacaagactgacaaaaatctgaaaaactaatgaggattattaagctaaaacctgggaaataggaggcttaaaattgactgccaggctgggtgcagtggctcacacctgtaatcccagcactttgggaggccaaggtgagcaagtcacttgaggtcgggagttcgagaccagcctgagcaacatggcgaaaccccgtctctactaaaaatacaaaaatcaccc

SEQ ID NO: 24373 - DNA, 352 bp, Homo sapiens
cgcatgcgtcggcggctgccctcccggaggtacctcatggcagggccaggttccagcagtgaggaggatgaggcctctcacagcggtggcagcggagatgaagcccccaagcttcctcagaagcaaccccagaccaaaaccaagcccactcaggcagctggacccagctcaccccagaagcccccaacccctgaagagaccaaagcagcctcaccagtgctccaggaagatatagacattgagggggtacagtcagaaggacaggacaatggggcggaagattctggggacacagaggatgagctgaggagggtggcagagcagaaggaacacagactgcccctggccagga

SEQ ID NO: 24374 - DNA, 426 bp, Homo sapiens
  misc_feature (1)...(426): n = a,t,c or g
ggctatattgtttgcctggaaaaaactatgtctgtgtcatacgcacacattgggcagctgggtgagggctgtattgtttgctggaaaaaactatgtctgtgtcatacgcacacattttggttttcccgggcaagtaccttaaccctgagtatggaagatattcatcctgcagaggttgggctgggcagggaggtgaggcctttccatgagttacctgccgctctggtctctgtgctcagagcctggaaagtggtccactctgcatttccctggctgtttccatctgcagcttgttcggctgctgcaagccagggcttgaagaccaggctccaccagagagccagccaacctgtggctgacttgctgtggtgcttctgggatgctggggacnaacccgnccggaccgggcgggttccttgaataaaa

SEQ ID NO: 24375 - DNA, 379 bp, Homo sapiens
gcccagattatattttggctgtaatcctgctcccaagcttgcagatcgttttgcaatttgttttaattgcaaaacaattgtcccgttgaaccttgggcattatatgtagttcagtatgtgctagaggttttaggtgatgtttagaactatgaaaatgatttcatggtggggtgaaagaattttatttctcactcctctccctggtattctaaggtgctgattggtctccaagtctgagtgcaaattctgcctagatggaaacccgcctctgaaacaggactgccactgtctttgtcagttatctgatggttatcatgatgtccttggggctctgaagtccccagcatgtccaggggtcttttctctgagcacaggaacc

SEQ ID NO: 24376 - DNA, 418 bp, Homo sapiens
gggagagaaatcccttagtgggcacacgagtgagtgccccttggagtccatctgtggaaaggaagcggtgataggtttccgcagtgaggaaagaaactcctttctctgggtgtagaggaattcctagaggtgagggcggggaggatttgctaggagtaactgcaggaagagaatgagcagggtggatgaaagaaacacgtttgttcttaagccgcacagatagcattactctctggagctgtcacgagttcagtgttaatccaataagatctgtcttgcttgtggcacaagttcacactgttgtgaaagtgtcaaaacacaactcccggagagtcagatttaaactgtgtttggaggtcccttctgcggcagggcagggaactgcatccaccaatcttattcaccggggtgtgaagac

SEQ ID NO: 24377 - DNA, 472 bp, Homo sapiens
  misc_feature (1)...(472): n = a,t,c or g
gcagcttaggggctgctgacctccacagcttcccctctctcctcctgcccacctgtcaaacaaagccagaagctgagcaccaggggatgagtggaggttaaggctgaggaaaggccagctggcagcagagtgtggccttcggacaactcagtccctaaaaacacagacattctgccaggcccccaagcctgcagtcatcttgaccaagcaggaagctcagactggttgagttcaggtagctgcccctggctctgaccgaaacagcgctgggtccaccccatgtcaccggatcctgggtggtctgcaggcagggctgactctaggtgcccttggaggccagccagtgacctgaggaagccgtgaaggccgagaagcaagaaagaaacccgacagagggaagaaaagagctttcttcccgaaccccaagggagggagatggatcaatcaaaccccccggccccttcgncaggca

SEQ ID NO: 24378 - DNA, 780 bp, Homo sapiens
  misc_feature (1)...(780): n = a,t,c or g
atcccaatttgaatgttacatgttcggaaaaactttcagttgctcaagggcaataagaaaatttgaggccgggtgtggtggctcacgcctgtaatcccagcactttgggaggctcaggtgggcgaattgcttgagcccaggagttcgagaccagccggggcaacatggcaaaaccctgtctctactaaaaatacaaaaattagctgggtgtggtggtgcatgcctgtagtcccagctactcgggaggctgaggtgggaggatcccgtgagcctgggaggtggagtttgcagtgagctaagatcgtgccactgcactccggcctgggtgatggagcaagacctcgtctcagaaaattggaaactattgactaagagaagtttctaggtttgcactgaattgatgcaggagccaggttggtctgttaggatgaacaaaggttgaggggagggcaggattcgtgcatctgggggccaaacacatgttccgtcttgattgccttaagagttactagcgaggtcagtgttaggcttgcaatagggattttaaaatacactaactagttccttagctaccttcacatacattctataggccttcttaaattagcactaacctccacttccttctctgccccattgcctcccaaatatgctatggagctatttttgntaccacgttataacgtgaatatttatacagtagcctcttcaggctttgtaattttcattccaaaaatgcccggtgtgatgctttacactctacaaagtatgggtaaaggc

SEQ ID NO: 24379 - DNA, 668 bp, Homo sapiens
tttggaaaccctttttgatgaccctaatttaatacgactcactatagggaatttggccctcgaggccaagaattcggcacgaggagtaaagcaaagagaaaggaagcaggcccgttggaagtggttgtgacaaccccagcaatgtggagaagcctggggcttgccctggctctctgtctcctcccatcgggaggaacagagagccaggaccaaagctccttatgtaagcaacccccagcctggagcataagagatcaagatccaatgctaaactccaatggttcagtgactgtggttgctcttcttcaagccagctgatacctgtgcatactgcaggcatctaaattattatattgttgttaatcatcaaggaatctcttctcgattaaaatacacacatcttaagaataaggtttcagagcatattcctgtttatcaacaagaagaaaaccaaacagatgtctggactcttttaaatggaagcaaagatgacttcctcatatatgatagatgtggccgtcttgtatatcatcttggtttgcctttttccttcctaactttcccatatgtagaagaagccattaagattgcttactgtgaaaagaaatgtggaaactgctctctcacgactctcaaagatgaagacttttgtaaacgtgtatctttgg

SEQ ID NO: 24380 - DNA, 332 bp, Homo sapiens
gcgactgtgggagaatgagggggcgggatgcgaggtcactcggcccagaaggccactgtgcccttgacctcctcggctgtgcctggtcaaaacgggctggacagcacgcttcagctgaacccacaggccaggaggaaataccaggaaaagctcgccatgggcctccaacctggctcggccacgtcctgctccatagctgcgggtgacatcatctgccctcttcgagggctttagtttccttgtgtgtgatggggaataattgggacagggaaagaccggcggtcatgctgagcaggaggctgtgcccacggtggggtgggggcagggcggac

SEQ ID NO: 24381 - DNA, 346 bp, Homo sapiens
gagattttggtatgtttaaaaatgatttcatattgaatggaaacttgagagttgtttttgactcctgtttccagcctgactctcagacattctagaccagtatcaccgtttctgtgtgcatgactaccctgccattctcactgtccccacgtggcagcctgtttttactttcacacctgagctaaccattgcatctcctttctgtggggtgatcttccctgtcactcagggtccttgttagatcctgcttcagctcccagacaacaaattgttttttcttgccttactcatctgcccttgggtgcatggagtgacagcagtgtgaggcctgtggcccggtgctgcc

SEQ ID NO: 24382 - DNA, 404 bp, Homo sapiens
ggttaaaaataatatgtcaaaagtgtgtttttgacttaagatattttcagcttgtgatggatttatctgggatataattccgtcataaatcaaggaaccatctgtattttagaactgtagaatttattgaaacttgcagcttccagaggaagacttggacagtacattgtggttaaattttgtcaatttctttaaaaaaaaattagtgtaatagacactgtcatagcctgagtcccttagaaaataaagcctaaggcaaaatatatatgctaatgctttgaagaggattgcagaaatgtctccagttctctgttcctccctatattcattcatttgcaatgtgtctctgtaactcccctcattaaagagtggaatctatttcctcaaccctggaatctgagcta

SEQ ID NO: 24383 - DNA, 390 bp, Homo sapiens
gatgagccaactccagtttcttaaggaaaccactggaatctgcagcccccacatgcatctgtctaacgcatgcctcgtgttcgttttgcaaacatgcctgtggtggagggtggtcagttgtagccctgtgcgtctcaaggctgccttgtgaggccattcccagtgcgtgcccttgagctccttaccaccccttttcctgctcggccctttaatccctgacagacctggactgtgtggctgaagggggacctgcagcactgcagaaatgcctctgcgtggtgccatgaaggaaagaaaccttggcctggtctcgagaagcttcccatgcttcaggaagttagtaagggtggggtggcttgcaggattggcctgtttccagggcctcccaca

SEQ ID NO: 24384 - DNA, 1136 bp, Homo sapiens
gcaagtatgatggcttccgagaatcggagtttgagaaactctctgatttcttcaaaactcactatcgccttgagctaatggagaaggacctttgtgtgaagggctggaactgggggacagtgaaatttggtgggcagctgctttcctttgacattggtgaccagccagtctttgagatacccctcagcaatgtgtcccagtgcaccacaggcaagaatgaggtgacactggaattccaccaaaacgatgacgcagaggtgtctctcatggaggtgcgcttctacgtcccacccacccaggaggatggtgtggaccctgttgaggcctttgcccagaatgtgttgtcaaaggcggatgtaatccaggccacgggagatgccatctgcatcttccgggagctgcagtgtctgactcctcgtggtcgttatgacattcggatctaccccacctttctgcacctgcatggcaagacctttgactacaagatcccctacaccacagtactgcgtctgtttttgttaccccacaaggaccagcgccagatgttctttgtgatcagcctggatcccccaatcaagcaaggccaaactcgctaccacttcctgatcctcctcttctccaaggacgaggacatttcgttgactctgaacatgaacgaggaagaagtggagaagcgctttgagggtcggctcaccaagaacatgtcaggatccctctatgagatggtcagccgggtcatgaaagcactggtaaaccgcaagatcacagtgccaggcaacttccaagggcactcaggggcccagtgcattacctgttcctacaaggcaagctcaggactgctctacccgctggagcggggcttcatctacgtccacaagccacctgtgcacatccgcttcgatgagatctcctttgtcaactttgctcgtggtaccactactactcgttcctttgactttgaaattgagaccaagcagggcactcagtataccttcagcagcattgagagggaggagtacgggaaactgtttgattttgtcaacgcgaaaaagctcaacatcaaaaaccgaggattgaaagagggcatgaacccaagctacgatgaatatgctgactctgatgaggaccagcatgag

SEQ ID NO: 24385 - DNA, 383 bp, Homo sapiens
acacggaagtctgactctcaactccccccaaagtgcctgactttagtgaacctagaggtgatgtgagtaatccgcgctgttctttgcagcagtgcttccaagctttttttggtgagccgaatgggcatggctgcgctggatcctgcgcctctggacgtgctagccatttccagtgtcccaactactgtcatcgtgaggttttcatcggctgtgccatttcccaacgtcttttgggatttacatctgtctgtgttaaaataatcaaacgaaaaatcagtcctgtgttgtcagcatgattcatgtatttatatagatttgattattttaattttcctgtctcttttttttgtaaattttatgtacagatttgatttttcatagtt

SEQ ID NO: 24386 - DNA, 455 bp, Homo sapiens
  misc_feature (1)...(455): n = a,t,c or g
gntnnnnnnnnnnnttgannaccgtnattgaataccngctatgacatgattacgaatttaatacgactcactatagggaatttggccctcgaggccaagaattcggcacgaggatcattgatttcttcctgggggcctctctcaaggatgaggttttgaagattatgccagtgcagaagcagacccgtgccggccagcgcaccaggttcaaggcatttgttgctatcggggactacaatggccacgtcggtctgggtgttaagtgctccaaggaggtggccaccgccatccgtggggccatcatcctggccaagctctccatcgtccccgtgcgcagaggctactgggggaacaagatcggcaagccccacactgtcccttgcaaggtgacaggccgctgcggctctgtgctggtacgcctcatccctgcacccaggggcactgncatcgtctcc

SEQ ID NO: 24387 - DNA, 432 bp, Homo sapiens
ggggagccaagtagaagaatcagtttctactgtagtttggttactaagaaaacattattctgattgaataaaaggcagtcccaggagtttacacaacttgacaacagccagcaactttctgcttccctttttatgcttttcctggaaagggaagagcaaactagacagattgatagggccacaccttggattagagggctcccagaaagccaactcaccccgagggggtcagggttctggatcttcgtgcagcacctgcagcccccagctgagcagcactcaacaccctcctggggctcaggagtacccccgtgggaacccatacttctcagaagattcccaaaaatcctgttctcttaggctagtgaaggccagaaacgttaagcaaactgatacagtagaaattaaagagaaggtgctttggtactttat

SEQ ID NO: 24388 - DNA, 457 bp, Homo sapiens
  misc_feature (1)...(457): n = a,t,c or g
gagttgagaaccaggagttaagacagcgcttggggatggatgccctggttgctgaagaggaggcggaagccaaggggaatgaagtgaggccagtggccgggtctgctgagtccgcagcactcagactacgtgcacctctgcagcaggtgcaggcccagttgtcacccctccagaacatctccccatggattctggcggtattgactcttcagattcagagtctgatatcctgttgggcattctggacaacttggacccagtcatgttcttcaaatgcccttccccagagcctgccagcctggaggagctcccaaaggtctacccagaaggacccagttccttacaggcctccctttctctgtcagtggggacgtcatcagccaagcttggaagccantaattgactaatccgttttgncaacatnatttncaanccctagtcttnnganacctctgg

SEQ ID NO: 24389 - DNA, 364 bp, Homo sapiens
gagaaaaggaaccctggcctgaggtaaagcggacattgcacaaggtgacctatgtcctttgctttgcgtggcagatgtgagatttctggcttccttcgtgaggtcggaggccgctcggatcctccaaatgtggtggctggatgctggcgacagaagtcacttttattgccctgacatacatttatgtaaactttttgttttcctgatgatacaaaagaaacgacaggagcttttgttcatcgatacagaactagactgaagggcaggaaaggctggttatttatttcactgagaagtgtagtgccgttgaccttttaaacaaggcttatgtttttttaggctgctacccgcaagattgaaagga

SEQ ID NO: 24390 - DNA, 341 bp, Homo sapiens
gggccggtctccgtcgtgacctctgacggtttctgagcgttggcctttggcacgcgctacccccttttgctttggttctgccatgccgatgtaccaggtaaagccctatcacgggggcggcgcgcctctccgtgtggagcttcccacctgcatgtaccggctccccaacgtgcacggcaggagctacggcccagcgccgggcgctggccacgtgcaggaagagtctaacctgtctctgcaagctcttgagtcccgccaagatgatattttaaaacgtctgtatgagttgaaagctgcagtaaccaacataatccaagcggatgacccacgactttaaccac

SEQ ID NO: 24391 - DNA, 794 bp, Homo sapiens
  misc_feature (1)...(794): n = a,t,c or g
taatacgactcctatagggaatttggccctcgaggccaagaattcggcacgaggtgaaaggcttgtgaaaatttctggaaagagcattggctggcttgttcatctctctgtttggtcagttgctgtgtttctgccggatcagatgagcagattggttagtgaaggtcagtgtgagaagaagattgtttctgagcttgagaagcttctggaggattgaagagtattnnaagncngngncaaacatccatatcataagtggaattntggagatattcanagaatgctgtcacaagggtatctcagtggacttgagtactggaatgacatccactggagttgtgcctcttataatgagcaggtggctggngaaaaggaagaggagacaaattctgttgctaccctttcctattcctctgtggatgaaacacaagtcagaagtctctacgtgagctgcaaatcatctggcaagtttatctcttcagtgcattcaagagagagccaacatagcagaagtcagagagtcacagtgctgcagacaaaccccaatcctgtgtttgaaagcccaaacttggctgcagttgaaatatgtagagatgccagcagagagacctacttggttccatcttcttgcaaaagtatttgcaagaattataatgacttacagattgcagggggccaggtgatggccattaattcagtgacaacagattttccctctgagagcagttttgaatatggccctttgctgaagtcatctgagattcctttacccatggaggattccatttctactc

SEQ ID NO: 24392 - DNA, 424 bp, Homo sapiens
gctatgacatgattacgaatttaatacgactcactatagggaatttggccctcgaggccaagaattcggcacgagtttttttaaatcaaagagtagtttattaaaaaagaatcaaacagaaactctaagtaccagtgtgtacattgtacacatttaaatgactcacgagaatgaagtttttttcaaatatattaagatcacaccaccttgttgtttatcgaaagatattcaaggagaaagatctgactctccaaactgcatctgagattgccactttaaacagacctcatttcaaacatgcaacaacgccactggtaataaagctttggaatgggtgctcattctattatttcactacaaacagcatagaaagcaagagaagttgggaatttattctaaaatagaatggaggttgcatctacag

SEQ ID NO: 24393 - DNA, 417 bp, Homo sapiens
gtaaatagctaatatatttaatggcactaattgttgttcacggctttcatcatacttttaaacagaatccaaagtattcaaaggaaagtaagcgaagttatccaaagccaactttgtttcaggtgtgtcccctgccccaaatagattttagggcagaaatagaaaactgagtttacacagaactatttttggaaaagctgcactggagtagatggattcttcttcagcatacttttttgtttgtttgtttgagatggagtcttgctttgtcacccaggctggagtgcagtggtgtgatctccactcactgcaacctccacctcccagcttcaagtgattctcctgcctcaaccttccaagtagcttggattacaggcgtgcgccaccacagctggctaatatttgattggtagtaaa

SEQ ID NO: 24394 - DNA, 1023 bp, Homo sapiens
ccatttgctatgacatgattacgaatttaatacgactcactatagggaatttggccctcgaggccaagaattcggcacgagaaacaccaaatggcggatgacgccggtgcagcgggggggcccgggggccctggtggccctgggatggggaaccgcggtggcttccgcggaggtttcggcagtggcatccggggccggggtcgcggccgtggacggggccggggccgaggccgcggagctcgcggaggcaaggccgaggataaggagtggatgcccgtcaccaagttgggccgcttggtcaaggacatgaagatcaagtccctggaggagatctatctcttctccctgcccattaaggaatcagagatcattgatttcttcctgggggcctctctcaaggatgaggttttgaagattatgccagtgcagaagcagacccgtgccggccagcgcaccaggttcaaggcatttgttgctatcggggactacaatggccacgtcggtctgggtgttaagtgctccaaggaggtggccaccgccatccgtggggccatcatcctggccaagctctccatcgtccccgtgcgcagaggctactgggggaacaagatcggcaagccccacactgtcccttgcaaggtgacaggccgctgcggctctgtgctggtacgcctcatccctgcacccaggggcactggcatcgtctccgcacctgtgcctaagaagctgctcatgatggctggtatcgatgactgctacacctcagcccggggctgcactgccaccctgggcaacttcgccaaggccacctttgatgccatttctaagacctacagctacctgacccccgacctctggaaggagactgtattcaccaagtctccctatcaggagttcactgaccacctcgtcaagacccacaccagagtctccgtgcagcggactcaggctccagctgtggctacaacatagggtttttatacaagaaaaataaagtgaattaagcgtgaaaaaaaaaaaaaa

SEQ ID NO: 24395 - DNA, 398 bp, Homo sapiens
ctaaactggacaggtacttctaagtcagcgagtacaatacaaaggacatgtggacatccccaatttgtctgatgaaaacagcgtggatgaagtggagattagtgtgagccttgccaaagatgagcctgacacaaatctcgtggccttaatgaaggaagaaggggtgaaacttctaagagaagcaatgggaatttacatcagcaccctcaaaacagagttcacccagggcatgatcttacctacaatgaatggagagtcagtagacccagtggggcagccagcactgaaaactgaggagcgcaaggctaagcctgctccttcaaaaacccaggccagacctgttggagtcaaaatccccacttgtaagatcactcttaaggaaaccttcctgacgtcac

SEQ ID NO: 24396 - DNA, 411 bp, Homo sapiens
ttatgactgattacgaatttaatacgactcactatagggaatttggccctcgaggccaagaattcggcacgaggtaatacagtaattttagtgggccctagaatctatatttaaatttaaaaaattctctgccaggcgcagtggctcatgcctgtaatcctagcactttgggatgccgaggtgggtagatcacttgaggccaggagttaagagaccagcctggccaacattgtgaaaccccatctctactaaaaatacaaaaaattaagccaggccgtggtgggcaaggcacctgtaatcccagctactcagggggctgaggcaggagaattccttgaacccgggtggtgaaggttgcagtgagccaagatcgtgccattgcactccagcctgaggaacagagtgagactc

SEQ ID NO: 24397 - DNA, 668 bp, Homo sapiens
atttcacttcctgtaacactatgtctgtagaggaaatgaaatgcaaatgtgcaattttttttaaaggagcttttaaacaaagtaataataattggtgttgagaacatcagttgccttattctaagatttcataaggctgagtttgcacgcttggacttcagttctgctagcatgtaaagagtggtggactttaaaaccgtaagaggtatcattacaagtcacctggaacagactcaaagaacaggttctttgggcaacagacatgaagaatcaagttctgtgctgtcccgtgagtgtgtctgagtaccattcactggagttgctgcttaggtctgggacgtgtgtgtgactcttaacaattgctgtctgaaaatgagagagaagacttcggaagcacattgtgttcataatgtactccacaatggccagtccaattgctatctatttttttatccagaggcttaattaaatgatgtggtaaaatgatgtttgagcattaagacaatgtaattctttatttctgggtggaaagatataccggattaaatttatctgtttaaaaaaatgacaaaagttatcaccaaaaccccctttcccatcttgcactgtttgttttggattgggtttgggggaaagagatgtttttcttagttgctactttgtttgaa

SEQ ID NO: 24398 - DNA, 356 bp, Homo sapiens
gaactggagggtgcccagcccatgctgttgtcttggctgatagtgctgcagggcgtaaccctggtagtgcagggagctttgagttaacttctagttgctccaatggagtttaaggtttagctatggacctgtcactgtgtattaatctttgtttacatagatagcagggatagaggtgacctcagacaagacagacagaagtcagcccacagaggaaagaagacctgagactcacatagcagaggggactcaggacttggtccagtccccttattagttccccgttccaactcacatagtaatttggggacaaagctagaaccaaggacaacattgaataaaatgcagggcacaat

SEQ ID NO: 24399 - DNA, 485 bp, Homo sapiens
  misc_feature (1)...(485): n = a,t,c or g
gtggcaaagctatcaggcaccttgctcaagaggcaaaagaaggcaccaaagctgacttagaagttcttacctattacaggtaccagctaaacctctttgcaaggatgtgcttggatcgccagtatctggccataaaccagatttctacacagctgtctgtagacctgatcctgcggtgtgtgtcggatgagagcctgccgttcgacctccgagcgtccttctgtcgcctcatgctccacatgcacgttgaccgggatccccaggagtccgtggtgcctgttcgctatgccaggctctggacagaaatccccacaaagatcacaattcatgaatatgattctataacagactcttccagaaatgatatgaagaggaaatttgccctgacaatggaatttgttgaanaatatttgaaagaagttgtaaaccagccctttccttttggggataaagaaaaaaataaactgccnttganggggnccctt

SEQ ID NO: 24400 - DNA, 471 bp, Homo sapiens
gaaaactttaaaaggaaggaagtcttcttagggatccagttcaaagctatttgggggcatcaaactgaaactctcttctccactactcaagacttcgtgcctcagtccaagtaggtaagagcaaaagggaaatgcatctctacacaatggcccatggtcagggccaccagagcaagctgggcctagatctccacctgtcagtgactggccattctaagaggtgaaacagcagatcgttgaggctgtgagggaggatctttgaattcccatgagacatagcataagaagggtatcattaaagccctgggctctaaagttacagagcctggttttgagtcctggctccaccactgccaactgggtaaatttgagcaaatggtattctctttcttatctcagctcctgcgtttctaaaatgagggtctgcgttatgaatagttaggaggattaagtgagaggatgtataaccca

SEQ ID NO: 24401 - DNA, 332 bp, Homo sapiens
gggacatcattcaaacaaaccagaatatattcagatgctaatgcctccactgacccagaaatggaacatgttaaatggtgaagataaagatctcttccctttacttgagtgcctatcttcagttgccacagcactgcagtctggattccttccgtactgtgaacctgtgtatcagcgttgtgtaaacctagtacagaagactcttgcacaagccatgctaaacaatgctcaaccagatcaatatgaagctccagataaagattttatgatagtggctcttgatttactgagtggcctggctgaaggacttggaggcaacattgaacagctgg

SEQ ID NO: 24402 - DNA, 263 bp, Homo sapiens
gatctgtgagctttcattctctttctttctaggacagtgataccaccaagaagaagaagaagaagaagaaagcaaaagaggtagaattggtttctgagtagtgaaggccacttgaagctggaggagaaactaaagccttattgagaaaacatgttatagatccttttgttgctgagagagtggaacataggtcctagacagggtgaagagttctggcacattttaactgctactttgagacctcggtgatgttacctggtgtg

SEQ ID NO: 24403 - DNA, 368 bp, Homo sapiens
caaaaaacgtgcgtgtgctcaaatgtgggcacaagtatcacaaagggtgctttaagcagtggcttaaagggcagagcgcttgcccggcctgccagggtcgtgatctcctgacagaagagtcaccttctggaagaggctggcccagtcagaatcaggagctgccttcctgctcttctaggtagtcacacttcactaaagtgtcatccaccagtgtgttgaatccgaagaatgacaattttctaccactggtgtaaaaaacaaacatttgaagacccttgtgcattgtgtgtcacaaagctaaatacatggaaatcgttaatatcgttgatattaagtaatttccccactctgagtgaatactttgatga

SEQ ID NO: 24404 - DNA, 395 bp, Homo sapiens
gaaaatgactggcacccgtaagccgtacacagtactgcttgagattccctgggagtgggtctccaccgccaggcctgtcttcttgccttgcaggaagacatgaggataagcttgttgtttaggttcttcccaggactcaaggaccaagagaacagaatggccctccctcgagggttctgatgaggttcaagcagcatttctgactcctcacagagccctctctctggacagatgacagttggagcttgagccaggggaggaagagaaaagggagggaattcgggtgcttttaaagagggattgcagcacacccaggcagtggattgttgttttgctggcatgcagcaggtagactctgaaacagcagtgggggcctttctgccttggctgcttgg

SEQ ID NO: 24405 - DNA, 309 bp, Homo sapiens
tttgagaccgttatgactgattacgaatttaatacgactcactatagggaatttggccctcgaggccaagaattcggcacgaggcatggctgagcaggagcccacagccgagcagctggcccagattgcagcggagaacgaggaggatgagcactcggtcaactacaagcccccggcccagaagagcatccaggagatccaggagctggacaaggacgacgagagcctgcgaaagtacaaggaggccctgctgggccgcgtggccgtttccgcagaccccaacgtccccaacgtcgtgactgggaaaca

SEQ ID NO: 24406 - DNA, 388 bp, Homo sapiens
ggctttggctgtatatatcttgctgatatgaattcttcagagtcagttggcagtgatgcaccttgtgttgtaaaagtggaacccagtgacaatggacctctttttactgaattaaagttctaccaacgagctgcaaaaccagagcaaattcagaaatggattcgtacccgtaagctgaagtacctgggtgttcctaagtattgggggtctggtctacatgacaaaaatggaaaaagttacaggtttatgataatggatcgctttgggagtgaccttcagaaaatatatgaagcaaatgccaaaaggttttctcggaaaactgtcttgcagctaagcttaagaattctggatattctggaatatattcacgagcatgagtatgtgcatg

SEQ ID NO: 24407 - DNA, 410 bp, Homo sapiens
gcactcatccagggtgtattgagaattaatccaaagaagtttcatgaagccttcattccttccccggatggtgatcgagacatttttattgatggggttgttgctcgtaatagagccttaaatggggatctggtggtcgtgaaactgcttcccgaggagcattggaaggtagttaaaccagagagcaatgacaaagaaacagaagctgcgtatgaatcagatatccccgaggagctctgtggacaccatctcccgcaacagtccctgaaaagctataatgacagtcctgatgtcattgtagaggctcagtttgatggcagcgactcagaagatggacatggcatcacacaaaatgtgctggttgatggtgttaagaaactctcagtttgtgtttctgagaaaggaagaga

SEQ ID NO: 24408 - DNA, 319 bp, Homo sapiens
ggaagttcttgataaaattgtcagcgtgagtatgccactgaattaataagccatgctttattcgtggtatgttgtgcaatatgtcagcatttcccctttctttcctgtaaattgtaacttttccgatgactagcatttaaagtcttttcctgattaaggaattgtcagctgaaatcatcagggatttccccttaactattttggaagaaatctgaagaatgtaatgtgttgcttggaaattaagaaatttggaataattcatgtgaacctaaatggtgaaatagaatcaagaaatgatagttttcttaaaaataagatg

SEQ ID NO: 24409 - DNA, 666 bp, Homo sapiens
gcggtgacgacctacgcacacgagaacatgcctgtgagtgctttggtccaggtttcggcggagatctcgctgttctgtccgaactctcccctcacgctgatttcggatcgtagagggtcctcatttaccctctgcacttcttaggacattaactccagggaccgcagcggcccacgggccacccgcatagacgggagcggagaggagataagatggcggcccagctgcgcagacaccaggggcggcgaggggcgagctctccccggtgtgtgacagtgggggctattttcgaccatcccattttcgctgttggtttctaaatctctgcatttctgtccctcttagctcgcaaaggatctccttcatccctctccagaagaggagaagaggaaacacaagaagaaacgcctggtgcagagccccaattcctacttcatggatgtgaaatgcccaggatgctataaaatcaccacggtctttagccatgcacaaacggtagttttgtgtgttggctgctccactgtcctctgccagcctacaggaggaaaagcaaggcttacagaaggatgttccttcaggaggaagcagcactaaaagcactctgagtcaagatgagtgggaaaccatctcaataaacacattttggataaataaaaaaaaaaaaaa

SEQ ID NO: 24410 - DNA, 323 bp, Homo sapiens
tgcgattttctcagagctgtgacaagcagtactgcagttcacaaacagggaccctccagcagagagcacagggttctggggctccacccgcaaaaggaactcctgcccctggacacctggggtcagcagacagcagaccagcagagtccagcaggccctgggccacaacacggatggtaccatggtggccgtcgacgcggccgcgaattccagatctatgaatcgtagatactgaaaaaccccgcaagttcacttcaactgtgcatcgtgcaccatctcaatttctttcatttatacatcgttttgccttcttttatgtaact

SEQ ID NO: 24411 - DNA, 420 bp, Homo sapiens
gggaggatgtgtatcgcaaccacagcatcttcttggcagatataaatcaggagcggggtatcaatgagtcctacaagaaaaacctgatggccctgaagaagtttgtgatggtgaaattcctcaatgattccattgtggaccctgtagattcggagtggtttggattttacagaagtggccaagccaaggaaaccattcccttacaggagacctccctgtacacacaggaccgcctggggctaaaggaaatggacaatgcaggacagctagtgtttctggctacagaaggggaccatcttcagttgtctgaagaatggttttatgcccacatcataccattccttggatgaaacccgtatagttcacaatagagctcagggagcccctactcttccaaaccacatgggagacagtttcctt

SEQ ID NO: 24412 - DNA, 541 bp, Homo sapiens
ctatgacatgattacgaatttaatacgactcactatagggaatttggccctcgaggccaagaattcggcacgagcagactgtagaaaaatagttttggcctaaaaagaaaattgtactttgttcaacaaaatttttggaatatttattaaatgcttaccacatgctgatcattgtcttagaggcctagcttcttatatgttaagaccatatttttatttcccaatcatgtctttgaagaaagacaatctaggttatggctgataatgcctctttatcccaagattgtgtagcagacttatcacctgatgtgatagactttccttggctcccataatgtaggagtaggctcaagccctatgaactccactggcttctcagctcatgtgcacacggtttataagggaaagggtgtactttctccctctggagtctaaaaccctttttgatggcaggtaggtaactcactatcctagcaaacaaaacaaagcattctcatcagaggaggcttggagcagaatgcctttatagcgagctatcaga

SEQ ID NO: 24413 - DNA, 469 bp, Homo sapiens
  misc_feature (1)...(469): n = a,t,c or g
gaaagatcttttttttgtttgagacagttctgctctgtcgccctggctggagtgcaatggcgcaatctcggctcactgcaacctccacctcctgggttcaagcgagcctcctgcctcagcctcccacatagttgggattacaggcgtgcaccaccacacccagccaatttttgtatttttagtagagatggggtttcaccatgttggccaggctggtctcgaactcccgacttcaggtgatccacctgcctccgcctcccaaagtgctgggattacaggcatgagccaccatgcccggccaacctaccattattaaccatgacagtaagacagtgaagttacttaactcttcaatttcatcaactgtgtaataaataatacaccaaactgagtggcagtgaaaattttttaaaatactaaaataatagctaacatttatgtgngttacacctcatttaacatttacaac

SEQ ID NO: 24414 - DNA, 417 bp, Homo sapiens
gttataagattattagtataaaatgacttccttgcagcagctgagcaccatgactatgtcccagatccagcgcctactcgctgttcccactgcccccagcctggaccaagcctccagcctctctccctgttctcccggctcccgccttgcgctgcacctttccttctgcacagggcagccaggggacgcacggaatcccgctgcaatccgaccacgccatcctctgtccaccaccctccagtgctttccagcccacctggaggaaaagctgagtcccagctatggcctctgggatcctacaggattttgggctgtcacctctcaggtctcaggacctacctctccccagcccaccacaatgcagccacacagcgcccagatgcctgtcctggaacgtacaagccttcccgggagctc

SEQ ID NO: 24415 - DNA, 304 bp, Homo sapiens
tttttaaactggtagtgctttttcttagatgaaacataaaagtttttcggggagaaaaaagacaacctttagaatggattgagcaaatagtaatatgcttaggaatttacccagaataccacacagagataatgaacgagcagttaagacatggaggatagattgagaaccaccagtgtaggaatttcagaagaaaagaataaagtgaatggcaagagaagcaatgtttgatgaaataatggctaagaattttcttgtgttgaagaagtacaatctacagatcaagttttatttcaagtatgtt

SEQ ID NO: 24416 - DNA, 342 bp, Homo sapiens
ctcagtcttaaaattcctaggaaagaatacattatgaaaaatatttttaaaggtagcattatgataaagctagctatataatttagtatgctatttaagaatgttcatgagatactcttcttaggttttatccaagaacttttgtggggtgagaagttgtatttgtgtgtgcacctgaggggaagtagggaggtacaggaagctgaacgcaaggtgtgggagtgggggcagcttgacaacaaccaccacaaaaatagaaaacgtccaaacacaactttcaaaagagaatttaaaaaattaaggaaatctcatcaattattctaatagaacttcagcattaaa

SEQ ID NO: 24417 - DNA, 1182 bp, Homo sapiens
gcaggacgtcagcttggcccttgacgtggacaataggttttttactttgacagtgataaggcaccacctggccttccagatgggagtcatattcccacactaagcagcccttactaagctgagagatgtcattcctgcaggcaggacctataggcacgtgaagatttgaatgaaactatagttccatttggaagcccagacataggatggggtcagtgggcatggctctattcctattctcagaccatgccagtggcaacctgtgctcagtctgaagacaatggacccaagttaggtgtgacacgttcacataactgtgcagcacatgccgggagtgatcagtcagacattttaatttgaaccacgtatctctgggtagctacaaaattcctcagggatttcattttgcaggcatgtctctgagcttctatacctgctcaaggtcagtgtcatctttgtgtttagctcatccaaaggtgttaccctggtttcaatgaacctaacctcattctttgtgtcttcagtgttggcttgttttagctgatccatctgtaacacaggagggatccttggctgaggattgtatttcagaaccaccaactgctcttgacaattgttaacccgctaggctcctttggttagagaagccacagtccttcagcctccaattggtgtcagtacttaggaagaccacagctagatggacaaacagcattgggaggccttagccctgctcctctcaattccatcctgtagagaacaggagtcaggagccgctggcaggagacagcatgtcacccaggactctgccggtgcagaatatgaacaatgccatgttcttgcagaaaacgcttagcctgagtttcataggaggtaatcaccagacaactgcagagtgtagaacactgggcaggacagctgacctgtctccttcacatagtccatatcaccacaaatcacacaacaaaaaggagaagatatattttgggttcaaaaaaagtaaaaagataatgtagctgcatttctttagttattttgagccccaaatatttcctcatctttttgttgttgtcatggatggtggtgacatggacttgtttatagaggacaggtcagctctctggctcagtgatctacattctgaagttgtctgaaaatgtcttcatgattaaattcacctaa

SEQ ID NO: 24418 - DNA, 456 bp, Homo sapiens
  misc_feature (1)...(456): n = a,t,c or g
gggcctgaactatacagaagtgcacttcttttccacatagaaggtcagcagactagggcagaattagtgactgcttggcatccaggacagccttctgtggttcactcgtgtgtgcttgggtgtgacctccgtgacctgaccgtcgatggctgtcatggatgagtcacagcgtggaggagagggaaccgcaggaccgccggagaagctcagtccccagcagggcagctttctcttagaggtttcctggagttcaacacaacactggtgcttacatctcaggcccggatattgatcatgtcatcatgcctggcttccagcagcttggaaatgtctttaagctggacctgttgctggccctaaatatactcggaanagagggagaatgggcggcgggtggaaactgatctgtggcctgtgcgctgggagtcggtccagtangaccatctgtgatgatgg

SEQ ID NO: 24419 - DNA, 446 bp, Homo sapiens
  misc_feature (1)...(446): n = a,t,c or g
ggcaaacccaagaaccatcagtttcctgattcgtgtgctggaccttgggcttaccgctgagccactacggagaggaacaagaaatgaagctcccggaaggagagaagctgcgggcggggcaatcacctcggaggtccaagaggcctcagcggcccaaagaaaggggaggtgtgtgcgggagaatctcaatggagatgaggagagcagcggtgactggtccttgcgcagagtggtccttgcacagaggtagccaatggaccctcgaggctgtaccccagacaccgcgaaccgaatttgctaacatcttcagccaccgtggcctccgcgtgttttgtgggcccatcggtgttcagtgagggattccgtgtgtctggcaatgtgtgtcaacaggtgttggcctgaaatttgccgggcacggtggctcacgcctgnaatccagcactttg

SEQ ID NO: 24420 - DNA, 514 bp, Homo sapiens
ctaacagctatgacatgattacgaatttaatacgactcactatagggaatttggccctcgaggccaagaattcggcacgagggtgacatgaaggaaaagcccagcatgctatgatcgtttagtgaaaggctctatggggtctgagaaggcttcctgaggcttcagacatccttttaaatgccactttcttaagaaaaccttttgcaatcctaaacacgtgtgagcgaacactacttaaaaccctccttttgccctccaggctttgcccaggatggttccttctggaatgtctattcccctccttccctccctgaagctctttgtcagggacaaaggtaggatccctccccttccgtcttctccactggatgcctgtgtcgtattcatctgtgaccaccaggtactaccacagagctggagctgaggaaggtttgttgagctaaacttctaacacttgcattcttcttaacactctgctgaaagccatttgtgtattcttcacagacacttgatt

SEQ ID NO: 24421 - DNA, 341 bp, Homo sapiens
gtagctcagcaaggaaagaatgggctcagaaaaaggagggctggctggaggagtgaggggcagcttaagtttggggagggtagaaacgccgtttccttgggaactggagtgcagtatgagctgggtgtcacttggctctgaacatactggctttgctgtaatgcttgaaaaggcgttggtatcttcattttacagttcattaacccaagtacgttttcttatttaaatgacaactttggtgctttaaaatgaggtaccactttttaaagctagctgtgtcgagttaaagaaaaaatcagcagttttttctcccaaaaatgtaattgccaaacactattcat

SEQ ID NO: 24422 - DNA, 408 bp, Homo sapiens
gcagcttcttcttccccttttacaaatactgaaatcaaacagggcacgttgacccttcctatggtgcttactttttaatcttacacatggattcactatggcattgcttccccagcctgatcaaaagaagtcatttggagcgttcatttaaaatgcagatttttggccaggagcaatggctcatgcctgtaattccagcactttgggagactgaggcaagcagaacacgtgagcccaggagttcaagaccagcttgggcaacatgatgaaatcctggctctacaaaaaatacaaaaaaattagctgggtgtagtggtgtgcacctatagttccagctacttgggaggttgaggtaggaggatggcttgagcccgggaggcgaggctgcagtgagccatgatcacgcca

SEQ ID NO: 24423 - DNA, 404 bp, Homo sapiens
gctggaagaaatgtttgtcagagtcaaagaaagtgatgatataaggtaaaacgcccgccggtcacattctctctagggccttcaaacagcacgttagtataataattcagggacacatttaaacagccctgtgggctggcctggggacccatacgtaaccgcagcagagtctatgacaaattgcccctttagttccaggtaaccatgagataaatgaacttttgtaaaagttgataattcttgcaaaagttgggaacatcttgcataagaacggcaacttggaaagtgactcgatttctaaccacagtatgaggagctttgtaaccgatcctttgtgtaaaggccaaaaacgattttcaaggtcccatgtgaaaaagcaggagacaattgccgtacaaatttaa

SEQ ID NO: 24424 - DNA, 1057 bp, Homo sapiens
ggatcccaacactggacggtcaagagggtttgggtttatcctgttcaaagatgcagccagtgtggagaaggtcctagaccagaaggagcacaggctggatggccgtgtcattgaccctaaaaaggccatggctatgaagaaggacccggggaagaaaatcttcgttgggggtctgaatcctgaagccactgaggaaaagatcagggagtactttggcgagtttggggagattgaggccattgaattgccaatggatccaaagttgaacaaaagacgaggttttgtgtttatcacctttaaagaagaagaacccgtgaagaaggttctggagaaaaagttccatactgtcagtggaagcaagtgtgagatcaaggtggcccagcccaaagaagtctatcagcagcagcagtatggctctgggggccgtggaaaccgcaaccgagggaaccgaggcagcggaggtggtggtggaggtggaggtcagggtagtacaaactacggcaagagccagcgacgtggtggccatcagaataactacaagccatactgaggcggcagcaggagcgaccaactgatcgcacacatgctttgtttggatatggagtgaacacaattatgtaccaaatttaacttggcaaactttctattgcctgtcccatgtgcatcttatttaaaatttcccccatggaaatcactctcctgttgactatttccagagctctaggtgtttaggcagcgtgtggtgtctgagaggccatagcgccatcatgggctgatttttattaccaggtcccccagaagcaggtgagaggctctgcttcctgctgccgctctgcagcctggacctgtggaccctggttgtaaagagtaaattgtatcttaggaaaccagtgtcacctttttttcaccttttaattttatattatttgcgtcatacatttcctgtaacggaagtgttaattttactgtactttttggtaccttttgggaatctaatgtattgtaaggtattttacacgtgtcctgattttgccacaacctggatattgaagctatc

SEQ ID NO: 24425 - DNA, 173 bp, Homo sapiens
aaccaaagaagctatgcatttttaagattattactattgcatgacaaacagcctttttcaagagggggacttacagacatggcagccagagatttatggtgcatgcttctttaaaatctttaatctcacttttaatttttgcttctaaacagactccaatttaaagtaatccg

SEQ ID NO: 24426 - DNA, 533 bp, Homo sapiens
aggaagtagaagagcagaaactacatcaagcagcatgcttgattcaagcctattggaagggttttcagacaagaaagagattaaagaagcttccatctgctgtgattgctttgcagaggagtttcagatccaaacgatcaaagatgttgctggagattaataggcagaaggaagaagaggacctcaaattacaattgcaacttcaaagacagagagccatgagactttcccgagaattgcagctgagtatgctcgaaatagttcatccaggcgcttaaattcctagcgaagtgccgtaagaaaaagaaactatttgctccttggcgaggactccaagaactcactgatgcacgccgagttgaactgaagaaacgagtggatgactatgtcagaagacatttgggctctccaatgtcagatgtggtcagtagggagctccatgcccaagctcaagaacgactgctcactactttatgggcagggccctagaagagcgagcccagcagccagagaagctctgatagcacagatca

SEQ ID NO: 24427 - DNA, 461 bp, Homo sapiens
  misc_feature (1)...(461): n = a,t,c or g
gctcaccagtgagaagctaagatcgttggccttatcagtccttctaactgataatatctactggcaggagattttaaacacagtcattcaggatgccacttcctctgacttctctggcctgctcctccctgttctttatttttagattagcagaaaatgtcaggatggccaggtatcagtgacaggaagtttgggactacaaaataattcccaaggtatgtgtaactctgaactcctcacaagctctgctttcatgagccttaacaggacgggtgaacagctaatcccttgattcagtgaaatctatttctgatgctaggggagcccaagggccaaggagaggccacagtggttgcactgacccacgcaccgttttccaccttgcagatcgttcctagctatcaccagacaagcttccaccatgataagcgncctacacatagggaatttctcaacaagac

SEQ ID NO: 24428 - DNA, 433 bp, Homo sapiens
ttgacctgattacgaatttaatacgactcactatagggaatttggccctcgaggccaagaattcggcacgagctatactagagtttgtgttagggatacagagcaggttctacctcgcaagcgtgaagcttttcatttaaaaaaatctacgtagaggcctcttcgcacaattccacaatactttatttgggacagtatgatgacagaccctctgctaaacaaatgaggatatgttaatgaattgaggatgcgttagtgacaggtattaggttcaatcacacataatttgctttgagggagtgctatggtttgaatgtgtctcccaaaagttcatctgttggaaactgaatctgcagtgcaacagtgttgggaggtgcagcctaataacaggtgattgggttatgagggaggagtcctcatgaatggattaatg

SEQ ID NO: 24429 - DNA, 407 bp, Homo sapiens
  misc_feature (1)...(407): n = a,t,c or g
ggtcacagaattactaatatcatattgttaatgatagctagaaagtaagcaaaattagacccaaaaaggcatattttatttttatgtaagtttttaaaaactacatcatggtttttgtacttttctgaaatctcagcattttgtttctatcttatgatcattacagatgggccgtgtgtgtacgtgtttgtattggaggcggttggaaggtgtgagatgtagagttttaaagacttggtttgctacttgctagctcttttggggtgagctacttagctggtctgagcctctgttttctcaacgttcttttttgnttgtttgtttgnttttgagatggagtctcgctctttcgcccaggctggantgctgtggcgcgatctcggntcactgcaagctccgctcccggg

SEQ ID NO: 24430 - DNA, 206 bp, Homo sapiens
ggttggagaaggccagagcaacagcgagctcgccatcctgtccaatgagcatggctcctacaggtacacggagttcctgacgggcctgggccggctcatcgagctgaaggactgccagccggacaaggtgtacctgggaggcctggacgtgtgtggtgaggacggccagttcacctactgctggcacgatgatatcatgcaagccg

SEQ ID NO: 24431 - DNA, 299 bp, Homo sapiens
gaggaatctggtatactgtttaagcatttgaaaaactataaaggagtatagaaattttgttaccactactatgattagtttctcatttggtttttcactttaagaattggaataaaagttgaaatcttgattaaaaaaacaagaaatgattcacaaattattttacaaattgaaatactgaaatacagaatgttcaaccactgtcaacatgaactcctattctgtaattaatattctataaacatctgtatttgctaaagagcaacagatcaaggaaaagaaaaaataatccttgccat

SEQ ID NO: 24432 - DNA, 355 bp, Homo sapiens
gcgtgggggtggggcaaagaacttgaatggtcatttttctaaagaagatatacaagtggccaataagcacctgcaaaaatatgcaacatcaataatcattaggaaaataccaatcaaaaccacaatgagataccattcatactcataaggatggcaataaaacaaaaaataacaagtgttggtgaaggtgtagggaagctagcaccctcgtgtggtcctggtaggaacataaaaaggtgcagccaatgtggaaaagatagtatggcagttcctcaaaaagttaagcacagaaatgccacatgacccagcaattccattcccaggaatatactcaatattcaaacaaatacttgtc

SEQ ID NO: 24433 - DNA, 462 bp, Homo sapiens
gcgccaacatgggccgcgttcgcaccaaaaccgtgaagaaggcggcccgggtcatcatagaaaagtactacacgcgcctgggcaacgacttccacacgaacaagcgcgtgtgcgaggagatcgccattatccccagcaaaaagctccgcaacaagatagcaggttatgtcacgcatctgatgaagcgaattcagagaggcccagtaagaggtatctccatcaagctgcaggaggaggagagagaaaggagagacaattatgttcctgaggtctcagccttggatcaggagattattgaagtagatcctgacactaaggaaatgctgaagcttttggacttcggcagtctgtccaaccttcaggtcactcagcctacagttgggatgaatttcaaaacgcctcggggacctgtttgaattttttctgtagtgctgtattattttcaataaatctgggacaaca

SEQ ID NO: 24434 - DNA, 384 bp, Homo sapiens
ctggtgtgcactctgttccagaatcatgtggggatccaaagttatgtccaacttcgtgagcaaaagtaatgtgagagactttgggaggtacatgagacccatagttctgaacagtaataattccagtgtttaaggacttcttcttaccatctgaatagagtttacttttttcacatattcctccagagcttcctgaaggtgctccaacccaagccagaccaagtacgccatcatcaaaatctcggtctgtgaagacataggccaaacagtagtcatcatgattctgctcagaattcaattccagaaacttctccacaccaatatttgggaaacggaaaggatttgtagggtccttctcatcagcagttgtattgattcttatgc

SEQ ID NO: 24435 - DNA, 413 bp, Homo sapiens
ttaaaatttagaagaatctttttcttaatataattctgtaattctatatattttcttttttcttgtgacggtggtgcatagtcattgatatattcttcacatagaaacaatcctgtgatagtttctgtagagagactagaaatgtactttttattttttctagtatatttggatcattttgttatgtcagtggcaattttacctactgtttagtctggaactcccagacattgtcagaagaagatgtgtcagatgtggtaagacatgatctgatacaataggatacaataggaaacataaaccatgcaacttcatacacaggtgtatttgcagtttgaagtactgctggaggtttttgcctaccacaaagaaatactaatcaaatctattttattttatttccatcaaaaata

SEQ ID NO: 24436 - DNA, 609 bp, Homo sapiens
gctattacatgattacgaatttaatacgactcactatagggaatttggccctcgaggccaagaattcggcacgagcgcctgtaatcccaacacttcgggaggccaagatgggaggatctcttgagcccaggatttcaagaccagcttgggcaacatagtgagaccctcttctctgcaaaaactgacaaaaattagccacttgtagtggtgtacacctgtagtcccagctactcaagaggctgaggtgggaggatcacccgagcccagaagttcaaagctgcagtgagctctgatcacaccaatgcactccagcctgggtgacagagccagaccctgtctctaaaaaacaaaaaagaaaagcttgggttgaagccaggccatattcttttatatgctgttcaatgacttgattcacatgtgaccttttagtagtttgcaaacaataataacagaagttgcaattcataattcagagaaatgaccatgaagccggtgtttccctgcttgatttctatgttcttggattctcacacaaaagaggagttacctagaggggatcagtagccatccctgttgcacacaaccctcacttctgagtggtttccacta

SEQ ID NO: 24437 - DNA, 322 bp, Homo sapiens
ggtttctcatttatttgaaaggccatctagtgagagatttctccaaatgttggggtagggaagggaggggaagcactttaaagtctgagcctttagaggtgattcctcaagaccctgcttaatcctaacaattttcctcattagtaaaagtcagcccaaactgggggcttgttaagatccttaccagccacatccatctgaaattatgaatttcaaagtatcttacaaatttggtgccacattatcttttttaagtttgttttgttttgtttttttgagacagagtctcgctctgtcacccaggctggagtgcagtggcgcg

SEQ ID NO: 24438 - DNA, 359 bp, Homo sapiens
  misc_feature (1)...(359): n = a,t,c or g
gttggaatgaatgtcctttttgggtttaatctggttctttggttgggggattttgagttggtttgcatttttagagaggccacagcaatatttaatattctgcagctaagtcaaaggagtaagacatttttcaggtcacttttggtttaaattgatagcataactatacctgggaaacagtctgactatgataattgaaagtaaaaaaaaaaattaaaacactgagtcatgcttggaaaaagaaaaaaaaaanggcagtcagncntacccancaangacatgaatattcccagctagcactgacanaaanatttcctgcaggcccccttaaaaananaggccttcntttgcatcctgca

SEQ ID NO: 24439 - DNA, 448 bp, Homo sapiens
ggtgacataaagttttaattttttgcctcattcaaatttatgagacttcaaagtcatagatgttttaaattttggtaaggggtaactgggtgttatgaaacctaaaatgtaagttgattttgcattggtaatttggaaataagatttattaacattccctgtatttagtattttatattcatgcacaaaatttttattatcttaaataggactcagtgtatattataaagatttttcttttttgtgttttccttccctgtcattccctttataatttcacagtcacttgctatgaagtcctccctcctttttgattatgcagcattcaatttcagaaatctatgaatgagaaggccttatacctaattttctgtacaggatcacatctggcagtcccaggagaagtgagctgattgcttttgatatctctttcccatggcctaggtaa

SEQ ID NO: 24440 - DNA, 493 bp, Homo sapiens
  misc_feature (1)...(493): n = a,t,c or g
gnnnnngnnngnntnnggtnncctctttgaannccctctgagaccttatgactgacacgaatttaatacgactcactatagggaatttggccctcgaggccaagaattcggcacgagcttctgtatccagctgcctttgatttgtggaacctattattttacagagtatttcaatattccttatgattgggaaagaatgccaagatggtattttcttttggcaagatgctttggttgtgcagtcattgaagatacttggcactattttctgcatagactcttacaccacaaaagaatatacaagtatattcataaagttcatcatgagtttcaggctccatttggaatggaagctgaatatgcacatcctttggagactctaattcttggaactggatttttcattggaatcgtgcttttgtgtgatcatgtaattcttctttgggcatgggtgaccattcgtttattagaaactattggntggccatagggg

SEQ ID NO: 24441 - DNA, 317 bp, Homo sapiens
ggtgccagatagaagacaggttgtgtttttatcctgtggcttgtgtagtgtcctgggattctctgccccctctgagtagagtgttgtgggataaaggaatctctcagggcaaggagcttcttaagttaaatcactagaaatttaggggtgatctgggccttcatatgtgtgagaagccgtttcattttatttctcggtgtgttttccccaacttctagttgataaaaaaaaaattcttaaagagttttcgtatgtgggagctaaggtggtcttgtaaaatttcaagtcatccttaaacaaaatgatccacctaagat

SEQ ID NO: 24442 - DNA, 405 bp, Homo sapiens
gggaattcagacacagcttacctggatcccttggcccatggtctctcacaggctacagtaaaggtagccctcagttccttgccatgtgggcctctccgtggtgcagctctcaggatggcagcagaatttatcagagcaggtaagtgaataaagccagaaaaagagtatgagcaagacaaaatccacagtctttgtcacctaatctcagtgacattccatcatgtttgccataccctatttgtcagaagcaagtcgtttgctccatcccacactcaaagggaggggattgcacaaggctgtgtattccaggagatggggtcattgagggccatttcagaagctgcctgccatactcccctccacatgtacctgcccattcctgtgtgtcccaatagtgatagttcc

SEQ ID NO: 24443 - DNA, 341 bp, Homo sapiens
ggaactgacaccagatattgtaagaaattggggctgttttggaaaatcttccctttttaccttttttgtctgtggccactgaatcaccattcattttttcaattacaattcatatgtccaggatgagagagactcctcgtccatgctgatccaaataaaggttgctagtctctctcacctcagctccatttgcagtggggatgaagatctgtgggaaaatgaaagggttttctttttcagttacatcaagaagatggaaagtaagtttttttaaaaatagccttttctaaactttctgatgactgatggagccatcatttgctcaaacaaggaaagatgta

SEQ ID NO: 24444 - DNA, 433 bp, Homo sapiens
gcttaaaacatcccagttcttctactaagacatgtggtaaagtatttctaaatgttcttgttttagggacatgttcatcctggaacttacacaaataccttagaacgtctagtgaaggaaatggaagacacacaaaggtttgttagcataaagattaatttgctaaatttaacattttgcttgtttgtgtggcttacttttaatttaccttttttaaaaaatcatgagaaattagcgtgcattttggactctgttgtcaactgtgttagaataagatatgttggccggacgcagtggctcatgcctgtaatcacaacactttgggagacccaggcaagattacttgagcccaggagttcaaggctgcggtgagtcgtgatggcgccacttcactgcagcctgggtggcagagtgagacccagctcaaatgaaa

SEQ ID NO: 24445 - DNA, 274 bp, Homo sapiens
gggccaaccagatctcactcgtggtaaagttgcaccgatttggactccggcactcatctctgtggccctcacccctctgtctggcagggccgtctactctgggatgtgggcccaggggacggcgaggcactgggctttgagtggggaccttccggcctcgggggttatagatgcatccacctgtctcacccaagaggtagcccatccttctcgtggggtactcacaggcactcaggcaggaattcacatcctcgctgggcagatgggccggctg

SEQ ID NO: 24446 - DNA, 325 bp, Homo sapiens
tgcacctgtaatcccagctactcaggaggctgaggcaggagaattgtttgtaccggggagacagaggttgcagtgagctgaaattgtgccactgcactccagcctgggcgacagaatgagactcactctcaaaaaaaacaaaacctagctgaaagtatgatctcatctgagaagccttcctgaattcctcttgtgattcagatacacctcctctgagatcctccagcatcttcttttttagaggtagggtcttgctccatcactaaggctggagtacattggtgcgatcatagctcacagcagtctctaactcatgagatgaagt

SEQ ID NO: 24447 - DNA, 495 bp, Homo sapiens
cgaggcccaggccaagaaacacgccctaaactgccaccgaatgaagcctgctctctttagcgtcctgtgtgaaatcaaggagaaaactggcctcagcattcggagctcccaggaggaggagccggtggacccacagctgatgcgcttggacaacatgcttctggcagagggtgtggctgggcccgagaaagggggcggctcagcagcagcagctgcagccgctgcagcctctggtggtggtgtgtcccctgacaactccatcgaacactcagattacagagccaaattgacccagatcagacaaatctatcacacagaactggagaaatatgaacaggcatgtaatgaatttactacacatgtgatgaaccttctccgagaacagagtagaacacgtcccatttctccaaaagagattgaaagaatggtgggcatcatccatcgaaaatttagttccattcagatgcagctcaaacaaagcacttgtgaagcagt

SEQ ID NO: 24448 - DNA, 1113 bp, Homo sapiens
gcagagacatgggaaaaccaatggaagtgtttcaaagttcttctctttaatcacttctgtatccagctgcctttgatttgtggaacctattattttacagagtatttcaatattccttatgattgggaaagaatgccaagatggtattttcttttggcaagatgctttggttgtgcagtcattgaagatacttggcactattttctgcatagactcttacaccacaaaagaatatacaagtatattcataaagttcatcatgagtttcaggctccatttggaatggaagctgaatatgcacatcctttggagactctaattcttggaactggatttttcattggaatcgtgcttttgtgtgatcatgtaattcttctttgggcatgggtgaccattcgtttattagaaactattgatgtccatagtggttatgatattcctctcaaccctttaaatctgatccctttctatgctggttctcggcatcatgatttccaccacatgaacttcattggaaactatgcttcaacatttacatggtgggatcgaatttttggaacagactctcagtataatgcctataatgaaaagaggaagaagtttgagaaaaagactgaataaatatctcacgtaaaccttcctgaaagataaacgttttcctgaattcagaaactagtagctaacattgcttctggagagcagaaataagcatgtcttctggctactaagtgataaaaagaacattaacaacctttaattaccttcctagtgggaactttttctactttacctacaagttctatatatgtagaaatgaataaatatatatttaagtacagttttcatgaggaagttttaaaagaccatgttcctaagcttccaagaaggttttggatactagaagtattaatctatggcttttctcccagtaaaaccataggcctgaagttcacattgggtctttaaatcttttagatatatactggtcatttcagaaaattcttcatagtggtattggccttatatttaactttttttttattttttttttgagacaaagccacactctgtctccttggctggagtgtggtggcacagtctcagctcactgca

SEQ ID NO: 24449 - DNA, 334 bp, Homo sapiens
cgcgtgagacttctccgccgcagacgccgccgcgatgcgctacgtcgcctcctacctgctggctgccctagggggcaactcctcccccagcgccaaggacatcaagaagatcttggacagcgtgggtatcgaggcggacgacgaccggctcaacaaggttatcagtgagctgaatggaaaaaacattgaagacgtcattgcccagggtattggcaagcttgccagtgtacctgctggtggggctgtagccgtctctgctgccccaggctctgcagcccctgctgctggttctgcccctgctgcagcagaggagaagaaagatgagaagaaggag

SEQ ID NO: 24450 - DNA, 419 bp, Homo sapiens
gcagcattacttcacctgggaaatcattgaaaaacaattactgtgagactggattggctctctttttgcctgctgccatccatgtaagacgcgacttgtttctccttgccttctgtcatgattgtgaggcttccccagacacttggaactgcacaaaaacgtgttttgaacctactctaaccaactgtcaaaaggctgtgttaagtgattctctgacaaggcccaggagcttcaaattgtcttgggacctcaagaggagaggaatttagccaaatcatgcagaaccttggccattctgatgtttaaccaagagttgagctgagtggctctgaccagcgtggaagatgagagcagcctgaacttacactgtgaaaatgtacccccagaatccagattgcagctacaggccctcctgatga

SEQ ID NO: 24451 - DNA, 497 bp, Homo sapiens
ggttgttatagtagaggaggacattttttctagagggcagagagatctagggaatatgactgttaacatttgaacactttcaaatagcagtacgttttactgtggttttgataacctgacatagaataagctgctgagatgcaaggataccttggtatatagaaagagccttagacttcgtatgaaaaaaacttaggttttatcttcagcctagccatctaatgtctctgtaactttacagacatctggtgtttcacttaacctctctgagacttagtttccttttctgtaaattgatagttgtggccaggcaccatggctcacacctataatcccagtacttttgagaggccgagactggtggattgccagaactcaggagtttgagaccggcctgggcatcatggcgaaacctcatctctaccaaaagtacaaaaacagttacctgggcatggtggcactcacctatggcccatctgctcgggaggctgaggcag

SEQ ID NO: 24452 - DNA, 438 bp, Homo sapiens
  misc_feature (1)...(438): n = a,t,c or g
gccctgctgccgaggcgcgcccttccggagtgaaactttggtttctcacgacccggaaggcttgaagcaaacctgcaattactcactgcctggtctgtgcgggctgcagctctcagactcaggatgaggtggcggtaggtggggtggggctcttgggacccttttaccccttcgtgctgctggctgggggaggccactaaagtctgcgcgctgccttccacgcgttctccagacactttccaaatccctgcggacactaccttataaacagatactggaattttcaaagtactgtcatgctgtttgggaccagaaattccctcccatgagggttggatatgaagccagtttggagggggaagctgagggtgcatgcccctggatctaccaaagccttctctttnatctgggaggtttttttcttttcttttncttttg

SEQ ID NO: 24453 - DNA, 337 bp, Homo sapiens
gatcaatcccaccgatggaagtgtcatctgccaggtatccctggcccaagtcaccgacgtcgacaaggcagtggccgcagccaaggatgcctttgagaatggacggtgggggaagatcagtgcgcgggaccggggccggctgatgtacaggttggcagatctcatggagcagcaccaggaggagctggccaccattgaggccctggatgcgggtgccgtctacacgctggccctgaagacccacgtgggcatgtccatccagaccttccgctactttgctggctggtgtgacaagatccagggctccaccatccccatcaaccaggccagacccaac

SEQ ID NO: 24454 - DNA, 447 bp, Homo sapiens
  misc_feature (1)...(447): n = a,t,c or g
gnnnnnnnnntnnncccctttgnnagccgctatnacatgantacgaatttaatacgactcactatagggaatttggccctcgaggccaagaattcggcacgagcttgaacttacactgggcaaatgttgtttactacagtccaaatgaagttaaagtggtagcagaaggatttgattcagcaaatgggatcaatatttcacctgatgataagtatatctatgttgctgacatattggctcatgaaattcatgttttggaaaaacacactaatatgaatttaactcagttgaaggtacttgagctggatacactggtggataatttatctattgatccttcctcgggggacatctgggtaggctgtcatcctaatggccagaagctcttcgtgtatgacccgaacaatcctccctcgtcagaggttctccgcatccagaacattctat

SEQ ID NO: 24455 - DNA, 528 bp, Homo sapiens
  misc_feature (1)...(528): n = a,t,c or g
gattccagctatgccttgacttggcagaaggttatctctagcttatcctcagttcttagtaactttacccactagtgaagagatactgtctattttcaatgtggactcggaaaaaaagacttataagtaggaagatagaacaatgatgccagttgtcaggctcctcccaggttatgttttcatagtgtttctttcatcatcttcattgaactcttgggaatctccagataatcagattatttcatttggtaaattttaaaaaatatgcaatcaggcacagtgcctcatgcctataatcccagcactttgggaggccaaggtgggtggatcacttgagttcaggagttcgagatcagcctaggcaacatggtgaaatcctgtctttaccaaaagtttaaaaattagcttggtgtggtgccctctgcctatagccccagctacttgggaggctgaggtgggaggatcgcttgagcccaagnggttnaagctgcantgagncatgatcaatccactgnantttanccgggg

SEQ ID NO: 24456 - DNA, 266 bp, Homo sapiens
gattattctaagaggaaaaaagggcttcattatcaggaaaacaaaggggaggatttctggagtgttggcactgttctactgcacatggatgacaggtgcattggtattcattttctaactctactcttccattttctgcatttttcttatttatatttcacacacaaaaattttaaagacattttctttgatggtaaaattttatgaaagtggctttccaaagtctactataagttttaacacactaaatctggcctcattctttt

SEQ ID NO: 24457 - DNA, 384 bp, Homo sapiens
  misc_feature (1)...(384): n = a,t,c or g
cacacatttgatcattcagatgataaaatgaacaatttcttgaaagacacaaaccaccaaaactcagtcatggagaaatgactgatgtgaacaggcttacatgtattaaataaattgaatcattaataacttcccagaatagaaaacatcaggatgagggtttcacactggtgaattctggcaaacatttacggacaaaacgatactagtattctaccatctcttccagaaaacaaacagtggggatacttcttaactcaatctttgaggccagcacttccccaataccaaaattaaataaagacatcataagaaaggaaaattacagactaatatgtctcatgaacatgaatacnanaatcctcaacaaaacattatcaaatc

SEQ ID NO: 24458 - DNA, 446 bp, Homo sapiens
ggtttaccatgacaagtctcaccctcaccccaaccctgactcactccctctttctataaataatgacttttagtgtcttgtcatcccagtgtttattttactaatttatttatttatttaatttttgagatggagtctccctatgctgcccaggctggtctggaacccctggcctcaagtaatcctcccacttcagcctcttgaggtgctgggactacaggtgcacactaccacacccagcctcttcccaatgtttctttatcaaatacaagcaaatgtaaatatatattcttatttctccgttttcttatgcaaagttatcccatgtacaccactgtgcaccttgcttttttcaccatttggtaatttttttaaacaaaggcttaacaatcctggtaatggatttctgtgctcacagctttctctcctctgctcacagatcctgt

SEQ ID NO: 24459 - DNA, 518 bp, Homo sapiens
  misc_feature (1)...(518): n = a,t,c or g
gcggcacgaggagttggggagctgctccggcttcggcgcggaggggcggcggccggggaggcggcggcggcggcaggattcccaggagccatgttgtcagaagtcctactggtgtctgctccggggaaagtcatccttcatggagaacatgccgtggtacatggcaaggtagcactggctgtatccttgaacttgagaacattcctccggcttcaaccccacagcaatgggaaagtggacctcagcttacccaacattggtatcaagcgggcctgggatgtggccaggcttcagtcactggacacaagctttctggagcaaggtgatgtcacaacacccacctcagagcaagtggagaagctaaaggaggttgcaggcttgcctgacgactgtgctgtcaccgagcgccttgctgtgctggcctttctttacttatacctgtcatnttgccgaaacaaaaggccttgccaaccttggatatcgaatgnggncgagttgcccccgggcggcttggctca

SEQ ID NO: 24460 - DNA, 792 bp, Homo sapiens
gggataactgggtgtttcttcattattttgtcttgtttctctccccatactgtaatctcaaaggcaagattcttcccacagagggaggaccaccatccacttgagaactaaataagagcatcttaactccttctgtaagggatgcctgcactaaaaaaattgtgtaagtcatccctgaggaatttggctaatgtcagaaagccagttcactttggtgcatagatatctatgacattagtactttcatcagaagaagaacaatttattgaagatatacagattttagcttctgatttctgaaaaatagatttatcctagaatgtttgggaaggacatcatgaaacaggtgtttactcacataatatactaataaacgatcttttctcgacaggtacttcgcatccagaatgttttgtctgagaagcccagggtgagcaccgtgtatgccaacaatggctctgtgcttcagggcacctctgtggcttctgtgtaccatgggaaaattctcataggcaccgtatttcacaaaactctgtactgtgagctctaacagaccgatttgcacccatgccatagaaactgaggccattatttcaaccgcttgccatattccgaggacccagtgttcttagctgaacaatgaatgctgaccctaaatgtggacatcatgaagcatcaaagcactgtttaactgggagtgatatgatgtgtagggcttttttttgagaatacactatcaaatcaagtcttggaatacttgaaaacctcatttaccataaaaatccttctcac

SEQ ID NO: 24461 - DNA, 373 bp, Homo sapiens
gattagaaactaccaagaacaatgtagttcagccagtttcggaagagggaagaaaatctaaatccaaaccagataagcagcttatccagtataccgcctttccacttcttgcattcctcgatgggaaccctgcttcttctgttgaacaggcgagtacaacagcatcatcagaagttttgtcctctgtagataaacccatagaagttgatgagcttctggatagcagcctagacccagaaccaacccaaagtaagcttgttcgcctggagccattgactgaagctgaagctagtgaagctacactgttttatttatgtgaacttgctcctgcacctctggatagtgatatgccacttttagatagctaaatccc

SEQ ID NO: 24462 - DNA, 445 bp, Homo sapiens
gctatgacatgattacgaatttaatacgactcactatagggaatttggccctcgaggccaagaattcggcacgagagacacttcgctggtaacaggaagaagaaaaattgggcaaacatcacataaagacctactttcttgatggcgtatctatacaacaatgaaggaaagaagccagtagtgtaattgcccagtgggttcttcctgcccactgcatggaaaacagtttcctgagactgtgctatttgagtacacaaagagttttattaatgtcatgctggccatacaggagatagagttattactcaaatcattctccctgaaggctcagaggttagggtttttcaaggatagtttggtgggcagaagactaggggatgggtgctgctgattgctttgaggatgaaatcatagggtgtggaaaacggtctttgtgtgcccagcc

SEQ ID NO: 24463 - DNA, 404 bp, Homo sapiens
ctttggaacaccttgactgattacgaatttaatacgactcactatagggaatttggccctcgaggccaagaattcggcacgagaggtctttaccggtgctgctactggaaggagacaggctggtcaaagcccagtaaagttctagagttggaggcaccaggccaactgcccaagcccatcttctggattcaggctgagacccccgctcttcctgggtgtaatgttaacatcctctgccatggctggctgcaggatttggtattcatgctgtttaaagagggatatgcagagcctgtggattaccaagtcccaactgggacaatggccatattctccattgacaacctgacacctgaggatgaaggggtttacatctgccgcactcatatccagatgctccccac

SEQ ID NO: 24464 - DNA, 284 bp, Homo sapiens
gatcgattgatcaatctattgatctatttattatacataaaggtcaaaacaaggtctcactatattggccaggctagagtgcagcggctattcacagatgcgaacatagtacactgcagccttcaactcctagcctcaagtgatcctcctgtctcaacctcccaagtaggattacaagcatgcgccgacgatgcccagaatccagaactttgtctatcactctccccaacaacctagatgtgaaaacagaataaacttcacccagaaaacaaaaaaaaaaaaaa

SEQ ID NO: 24465 - DNA, 392 bp, Homo sapiens
ctcactatagggaatttggccctcgaggccaagaattcggcacgaggacaggactatgtcagcattttaggagtggatcttgtacccttggctcccgcctgagaatggaagtcttccagaccccttggaaggtctcggctcagggaagagaatgactgtctttggagagactaggccaggtggggtgggctgcactcccaactaaggaggccaggcacctgctagggtagtgggaggtgatgggggatctgcgcctgtgaggtgggcagctggaatctgaacctagggctgccttactctaaaaccccgtcccccacaccgccagttgccatggaggttaatagcaggcgttcctgagtcagtctcccagagctggtccaaggcccagctcc

SEQ ID NO: 24466 - DNA, 415 bp, Homo sapiens
acttcagacccccactagttgaccgagcagcagaatttcaactccagtagacttgaatatgcctctgggcaaagaagcagagctaacgaggaaagggatttaaagagtttttcttgggtgtttgtcaaacttttattccctgtctgtgtgcagaggggattcaacttcaatttttctgcagtggctctgggtccagccccttacttaaagatctggaaagcatgaagactgggctttttttcctatgtctcttgggaactgcagctgcaatcccgacaaatgcaagattattatctgatcattccaaaccaactgctgaaacggtagcacccgacaacactgcaatccccagtttaagggctgaagctgaagaaaatgaaaaagaaacagcagtatccacagaagacgattccac

SEQ ID NO: 24467 - DNA, 416 bp, Homo sapiens
  misc_feature (1)...(416): n = a,t,c or g
gggatactcctttgcatgaagctctaaggcatcacactttgtctcagctacgtcagctccaagatatgcaagatgtggggaaggtggatgctgcctgggagccatccaaaaacacgttaataatgggacttggtacccagggggcagagaagaagagtgcagcatctattgcctgtttcttggcagccaatggtgctgacctgagcattcgaaataagaagggtcaatcgccacttgatctctgtcctgatccgaatctctgcaaagcactggcaaagtgtcataaggaaaaagtcagtggtcaagtgggttctcggagtccttctatgattagtaatgattctgaaaccttaaaagagtgtatggngtgctcagatatgaagagagatactctttttggccatgtggacatattg

SEQ ID NO: 24468 - DNA, 363 bp, Homo sapiens
ggagcacccaagtggggccagaggaacgttgtgtgtggcagcaaggagcccgcagaggaacatggggctgctctgggggctcctggtgctcagctggtcctgcctgcaaggcccctgctccgtgttctcccctgtgagcgccatggagcccttgggccggcagctaactagcggtccgaaccaggagcaggtgtccccacttaccctcctcaagttgggcaaccaggagcctggtggccagactgccctgaagagtcccccaggagtctgcagcagagaccccaccccagagcagacccacaggctggcccgggccatgatggccttcactgccgacctgttctccctggtggctcaaacgtt

SEQ ID NO: 24469 - DNA, 326 bp, Homo sapiens
  misc_feature (1)...(326): n = a,t,c or g
gatgtatttgagatccttaagtgttacagaagtggatatattacataagcagtttggatatgtggttttggaggtcttgagagtaattaaagctatggatagatgggcttcccttcatgccaaagagaaaaatatagaatgagataagcagaaagcttgttttgaagaactaaaacatttcacatttggaaggaagagggtgagctggaaagaccactgagaaggagcagttggagaggttgaaggagtatggatgtcatagatgccaaggcccangcgagtttcaagaaaaagaaagggatcactttgagttgaatgcttggtga

SEQ ID NO: 24470 - DNA, 471 bp, Homo sapiens
  misc_feature (1)...(471): n = a,t,c or g
gnacntaccgtttgacatgattacgaatttaatacgactcactatagggaatttggccctcgaggccaagaattcggcacgaggacgcggcctccacgctagtgacgggctctgagtatgagacgatgctgacggagatcatgtccatgggctatgagcgagagcgggtcgtggccgccctgagagccagctacaacaacccccaccgagccgtggagtatctgctcacgggaattcctgggagccccgagccggaacacggttctgtccaggagagccaggtatcggagcagccggccacggaagcagcaggagagaaccccctggagttcctgcgggaccagccccagttccagaacatgcggcaggtgattcagcagaaccctgcgctgctgccgccctgctccagcagctgggccaggagaaccctcagcttttacagcaaatcagccggcaccaggagcagttcat

SEQ ID NO: 24471 - DNA, 379 bp, Homo sapiens
  misc_feature (1)...(379): n = a,t,c or g
cctttgtttgaccgccatgacatgattacgaatttaatacgactcactatagggaatttggccctcgaggccaagaattcggcacgaggggataaatatgctggttgacagttagcaacatattccccattatttttacagatgagaaatctgagctagccagaaccaagaccagaaatcaagtctctagttcagtgccttttttgccatatcagtagcttctacctttttctcccccgactgggatnnnnnnactgcatttatttaaacaattactttgttttctcattttntatgagtctaagtcataacatatccatctagatcttttgataatcatantataacctgtgccatcacactgagttttttctntttt

SEQ ID NO: 24472 - DNA, 458 bp, Homo sapiens
ttgattacatcctgactgattacgaatttaatacgactcactatagggaatttggccctcgaggccaagaattcggcacgaggttgcagtcaagtgtctgtcatgtgttgatatccacacagaattaggccctaatgagagccttagaccctcaaccatgcccccttcgttggcatcacagggccttatttggaagagcgggcaaagaggatggaaatcataaaatatttcatgggaatcgaacctagggatagtgctccacttctgacgatggagtgaagacacttggcagacttgagccagacacttcacctagtagttcctgaaactgtgagcaccactgcactaagccagtgcggagctgttagggacgggcccagctcctgcaccacggacacagaatgtctggagagggccagcaggccctctgagggttctggaatctgtgcaccttattt

SEQ ID NO: 24473 - DNA, 364 bp, Homo sapiens
gcggcacgaggtgaatatagatttgattcaacttttagttacgttctctcaagaatcctaatcaactttcagttagcctcttaagaaagggaaaaaaaggtgctgccagtcatccccaaattatgtttttggctgtgcattctattttctacatagcactgaatctgagtaacagtcatcctggatttatagttggaacagaacagtaacagacctaactgggactcagccagcactagcctcatcttagctgccccttttctctgctttgcagtttactgcttccctgggctagccataacggggttctgggcaggtcagactcttcagcaagacagtgtattaatagtgtgaattagatcac

SEQ ID NO: 24474 - DNA, 523 bp, Homo sapiens
  misc_feature (1)...(523): n = a,t,c or g
gggtgttgaaaatggcaagacccaagaatgtgcgtattctggcatcatatctaatcttcaagtaatattttgacttatttgatgtgaacagggttgggtgctcagcattttttccctgatatacagcggcattctgtgtaccttttaagctattcctttagcccttagctaaatgcagtttggtgtttgtactctatgatttgcatcttacacatctcttgctgcttctgatattaatgataaaaagtgggggaagatgaaatggtagcactgaaaaataaagagggcctggaagttgaaactattaccaaaattttgcttaaaggtctaggtctcttactctttctgatacatggcagtgattgngggttattttaaaagtactcntttttccccaaactttcatgaactgtccgcntccttccaacgatttgcaanacnntcattttgnatcaggattgngannacccaactccancttcancaatgttgcctgacactaggcaaaagggaaaanagccag

SEQ ID NO: 24475 - DNA, 461 bp, Homo sapiens
  misc_feature (1)...(461): n = a,t,c or g
tttgaaaccttttgaatnattacgaatttaatacgactnctatagggaatttggccctcgaggccaagaattcggcacgaggccggccagggtacctcagcacccccagaggcctcacccacagctgccccagagtcctctacatccttcccgcctgcccccaccttaggcatgtcccatcccccacctgccgccagagaggacaagagcccatcagaggaatccgcccccacgacgtccccagagtctgtgtcaggctctgttccctcttcaggtagcagcgggcgagaggaagacgcggcctccacgctagtgacgggctctgagtatgagacgatgctgacggagatcatgtccatgggctatgatcgagagcgggtcgtggccgccctgagagccagctacnncaacccccaccgagccgtggagnatntgctcacggganttcctgggagccccga

SEQ ID NO: 24476 - DNA, 480 bp, Homo sapiens
tagaaattagaaggatatgtagtagaagagattaggagatgtgtggtaggtaagtgtgtcattagggaacaccagaaaacctcacaatgtgttatttaccttgatgaattttctatagcctaattgatgactgtttcttagttctgcatgtccagaaacttaattttaatagcagacagagattcagtcttttgggaatggactcatgctgagttcaaaagagaccaataagtaaaccaaaagaaataaaaataattaggttcattctttcccaaaataatatctatcttaataggaaataaattatagttagattacttagtgagcctgtaatgagaaagtggtgtaggtcatgtgattttatgttaaatggcaccagtatgtgacattcttcttcccatttttttcatctgtcaagaccagaccatttggattggcatcctcaactttttctatttttctaggtttcttggttggcca

SEQ ID NO: 24477 - DNA, 479 bp, Homo sapiens
  misc_feature (1)...(479): n = a,t,c or g
ccagatccaattcatggaattagcaataggcactattttaatcttctaaattgctaatcatcttatttctttactttctgtataggtctcctcctctcacaatgcttttcctctgtgctacaaaattttctgcctctgccccttcatcttctacagacatcaccagcttcttgagcagtgacccaagttctctgccaaaggtgccagttaccagctcagaagctaagacccagggaagtggcccagcggtgacagccactaagaaagcaaccacgtctctggaatcattcttccaaaaagctgcagaaaggcagaaagttaaagaagcttcgctttcatctcttactgctcccactcaggctcccatgagcaattcaccacgccgagccctatgctcgtgccgaattcttggcctcgagggccaaattccctatagtgagtcgtattaaattcgtnatcatgtcanangggtttcaaag

SEQ ID NO: 24478 - DNA, 420 bp, Homo sapiens
  misc_feature (1)...(420): n = a,t,c or g
ggatgaagcacaaggacatccggccctacatctgctcagagtgtggcatggagtttgtgcagccgcaccacctcaagcagcactccctcacccacaagggtgtgaaggagcataagtgtgggatttgtgggcgggagttcaccctgctggccaacatgaagcgacacgtgctgatccacaccaacatccgctcctaccagtgtcacctctgctacaagagcttcgtgcagaagcagaccctcaaggcacacatgatcgtccactctgacgtgaagcctttcaaatgcaagctttgtggaaaggannnnnnnnnnnnnnnancctngnnnggncncatnnnccttngctnttaaacggaaaaccntttnaagngcctntattgcccaagcaaattcaccctgaaggggaacctgacacgcc

SEQ ID NO: 24479 - DNA, 459 bp, Homo sapiens
tatgacatgattacgaatttaatacgactcactatagggaatttggccctcgaggccaagaattcggcacgagcgagtccccgtggcagtcccgggcgaggacactgtgcagtctctaacccagggagatggcgtggccaaactcagcatcaacacacaccccagccagaagcccttgagcatcacggtgcgcacgaagaagcaggagctctcggaggcagagcaggctaccaggaccatgcaggctctgccctacagcaccgtgggcaactccaacaattacctgcatctctcagtgctacgtacagagctcagacccggggagaccctcaacgtcaacttcctcctgcgaatggaccgcgcccacgaggccaagatccgctactacacctacctgatcatgaacaagggcaggctgttgaaggcgggacgccaggtgcgagagcccggccaggacct

SEQ ID NO: 24480 - DNA, 575 bp, Homo sapiens
  misc_feature (1)...(575): n = a,t,c or g
gtaagatggcggcggcgtgagttgcatgttgtgtgaggatcccggggccgccgcgtcgctcgggccccgccatggccgtcaccatcacgctcaaaacgctgcagcagcagaccttcaagatccgcatggagcctgacgagacggtgaaggtgctaaaggagaagatagaagctgagaagggtcgtgatgccttccccgtggctggacagaaactcatctatgccggcaagatcttgagtgacgatgtccctatcagggactatcgcatcgatgagaagaactttgtggtcgtcatggtgaccaagaccaaagccggccagggtacctcagcacccccagaggcctcacccacagctgccccagagtcctctacatccttcccgcctgcccccacctcaggcatgtcccatcccccacctgccgccagagaggacaagagcccatcagaggaatccgcccccacgacgtccccagagtctgtgtcaggctctgttccctcttcaggtagcagcggncganaggaagactccggcnttccacgcttntgaccgggctttgaantttgaaaacgatgc

SEQ ID NO: 24481 - DNA, 356 bp, Homo sapiens
ggaatgactagaggaataaaagccacagagagcaggatgatacctgtctggtgattatagtacatgggctttgttttgttttagatattttgggggctataagcccctttgagaatccagtgaaagttgtgcagtcttcagaaaaacagcatacattcatgcatttgcatacaacttcgcaggatgttctttgatcactgagacccattcacatcactcaagttagaatttatgattccagtgtcaccagtgtactcctgatcttacttttatgtaacctgaaagcatacaatctcagcctatcagtacagggagcggagactgattatggaaccaaaaaactgctgtgacgacca

SEQ ID NO: 24482 - DNA, 802 bp, Homo sapiens
ccatttgtttgtgactatgaagggtgtggcaaggccttcatcagggactaccatctgagccgccacattctgactcacacaggagaaaagccgtttgtttgtgcagccaatggctgtgatcaaaaattcaacacaaaatcaaacttgaagaaacattttgaacgcaaacatgaaaatcaacaaaaacaatatatatgcagttttgaagactgtaagaagacctttaagaaacatcagcagctgaaaatccatcagtgccagcataccaatgaacctctattcaagtgtacccaggaaggatgtgggaaacactttgcatcacccagcaagctgaaacgacatgccaaggcccacgagggctatgtatgtcaaaaaggatgttcctttgtggcaaaaacatggacggaacttctgaaacatgtgagagaaacccataaagaggaaatactatgtgaagtatgccggaaaacatttaaacgcaaagattaccttaagcaacacatgaaaactcatgccccagaaagggatctatgtcgctgtccaagagaaggctgtggaagaacctatacaactgtgtttaatctccaaagccatatcctctccttccatgaggaaagccgcccttttgtgtgtgaacatgctggctgtggcaaaacatttgcaatgaaacaaagtctcactaggcatgctgttgtacatgatcctgacaagaagaaaatgaagctcaaagtcaaaaaatctcgtgaaaaacggatttggctctcatctcagtgggtatatccctcccaaaaggaacaaggga

SEQ ID NO: 24483 - DNA, 480 bp, Homo sapiens
gctttgaatgattacgaatttaatacgactcactatagggaatttggccctcgaggccaagaattcggcacgagcaccaaacataggttgacctgaaggtcaggtaaaaagaggagggaaagagaatactatacgcggtatattatattaatattattccacttgcttttaagcccacttttaaaaaatcagatttattgaggcataatttacataaaataaaattcatccactgtaagtgaacagttggatgggtttggcaaatatgttcaatggggaaaacgtcatcacagttataataagacttctgtccccctgacatcatctcctgttcccatttgaagtcaatcctttccccttccccagctcctggtagccacccatctgctgtcactatagttttgccttttccagaatttcatataaatggaatcatacaatatgcagtctgtcgtatctaccttctctcacttacttgag

SEQ ID NO: 24484 - DNA, 367 bp, Homo sapiens
gctggcagatgtatgggtctttgggaagtaaagtctcctccctcaatttacgtagcatgggcttcaagatgccagaatataaacccctgtaaagtacccattatcccaggagtgggctgatgcagcggttacaggtgcagctactagagtcacactagctaagttcaaaaccggcctctaccacttacatgctgtataaccttggacaagttacttaacctctctgggcctcagtttccaagttagtaagattaagacaatagtccttatcttatggaggaggggagtaaaaaaggctgggaagagggcctggcataaagtaaataagtgtttaataaatgacagctggttcaattcctttttattt

SEQ ID NO: 24485 - DNA, 483 bp, Homo sapiens
gcacaacctccgctatccacctggctatttccccagggataatttaaggatgaagaatgaccctttagactggaatggtgatcacatccacaccaatttcagggatatgtaccagcatctgagaagcatgggctactttgtagaggtcctcggggcccccttcacgtgttttgatgccagtcagtatggcactttgctgatggtggacagtgaggaggagtacttccctgaagagatcgccaagatccggagggacgtggacaacggcctctcgctcgtcatcttcagtgactggtacaacacttctgttatgagaaaagtgaagttttatgatgaaaacacaaggcagtggtggatgccggataccggaggagctaacatcccagctctgaatgagctgctgtctgtgtggaacatggggttcagcgatggcctgtatgaaggggagttcaccctggccaaccatgacatgtattatgcgtc

SEQ ID NO: 24486 - DNA, 450 bp, Homo sapiens
  misc_feature (1)...(450): n = a,t,c or g
tttgatancnttttgacatcattacgaatttaatacgactcactatagggaatttggccctcnaggccaataattcggcacgagggaagccatctctgaccggatctgcatccacaccaatgcgcacgtcagcgtggaggtgtcggcggaggacctgctcacctgctgtggcagcatgtgtggggacggctgtaatggtggctatcctgctgaagcttggaacttctggacaagaaaaggcctggtttctggtggcctctatgaatcccatgtagggtgcagaccgtactccatccctccctgtgagcaccacgtcaacggctcccggcccccatgcacgggggagggagatacccccaagtgtagcaagatctgngancctggctacancccgacctacaaacaggacaagcactacggatacaattcctacanngattccaataacga

SEQ ID NO: 24487 - DNA, 516 bp, Homo sapiens
  misc_feature (1)...(516): n = a,t,c or g
ggcaacacgtggccagtggcgatttcgatgcttgcgtccaagtctgtgaatgtaaaacccctcgtcacccataggtttcctctggagaaagctctggaggcctttgaaacatttaaaaagggattggggttgaaaatcatgctcaagtgtgaccccagtgaccagaatccctgatgttaatgggctctgccctcatccccagtctcgggatctcagggcacaatggctggacatgggtgggctctgatgcagaactttctcttttgaatgttaagaataactaatacaattcattgtgaacagaagtccttacgcagaggaattggtgtgccttaaagatacaatctgggatagtttgggggaacttgtagccagaatgccctgttcatgctgagcaaagttcagcaagtanagcagagtttggcaggcaggtgccaggaactccccttcttcctggaggccttcattgaggaaagaaatcnggcccttggggttnctgggtcactgntactgacc

SEQ ID NO: 24488 - DNA, 385 bp, Homo sapiens
gaaagtactccagatggattttcttgttcatccagcctgagtgctctgagcctcgatgagccatttatacagaaagatgtggaattaagaataatgcctccagttcaggaaaatgacaatgggaatgaaacagaatcagagcagcctaaagaatcaaatgaaaaccaagagaaagaggcagaaaaaactattgattctgaaaaggacctattaggatgatgatattgaaatactagaagaatgtattatttctgccatgccaacaaagtcatcacgtaaagcaaaaaagccagcccagactgcttcaaaattacctccacctgtggcaaggaaaccaagtcagctgcctgtgtcaaacttctaccatccaaaacaggttgcaacc

SEQ ID NO: 24489 - DNA, 442 bp, Homo sapiens
gctgggtttaagcatcagagaaaataaatggaccacagttataacagacaacctcacagataatgttgcagtaactcaagttcaaaaggcaaatcctgcaagtctattgcagaataataccatttttatagagctcaaactcagggaagagtaatcatatactacttaagcatctattaatgggtgcagaaaatacattattttaggcaagagcataataaatacactacttaggatgggtcacctgtcccagagagggggcagggaataggaggtgggaggaatataccaggtggatgcaattgactggcaaagctctggttcttaaggttgggtggaaggttcctgggtgttcactgtattatattttgcaaccaaaatgcatggtatgcaactgtttatatatttttaaaaaacattttacaaagtaaagacagtaaga

SEQ ID NO: 24490 - DNA, 334 bp, Homo sapiens
acttgatgcctttcagtggcctggagccccacggccaaacttgttcctcaggcatcccagggtctctgagtgagggctgcccagaaaatgtcagtgtgtgtcaacgtttactgcaggttcagagctccctccagagtccctgagtacatcatgtgctcctgagagttttaagggaaagccaagtaaagacgtgatgatgttctaaacccaagcaattaataaaggccatacggaaatcattcattcacttaccaagtatttctctgatttctgccatgtcacgggcccatgatcccctggagactgagggaaataagatcataggagctcccac

SEQ ID NO: 24491 - DNA, 351 bp, Homo sapiens
ggtgactaagttcatgtcagtgtagacaaaaaaaagaacaccattagcgcactaaaaattaagtcattttgaaatacaaaaaaagcaaacatgagaaagaaacaaaattatatgcaaataatacaactatttatatagaaaatccaaaagaatctggccgggcacagtggctcacgcctgtaatcctagcactttgggaggccgaggcgggtgggttgcctgagctccggagttcaagaccaccctgcgcaacatggtgaaacctcatctctactaaaaatacaaaagttagctgggcatggtggtgcatgcctgtaatcccagttactggggaggctgaggcaggagaat

SEQ ID NO: 24492 - DNA, 443 bp, Homo sapiens
  misc_feature (1)...(443): n = a,t,c or g
ggtatttgataaatttacctctttccaatgcatatgggaagtcttttaataaaattactctattgtgagtttataatcatctcaagttatgtaataagttaggactttgcatgtggggtttccataaatcactgtacactaatgcagctgtaagaaaacagaagaatctagttgtattctagcctgggctgtgggtaatacaaaagctggttacatcgtaaaaaattattctaatgtccacatatttttataagctagtaatctgggttcagttgtataatgtttgctgctttccagtgtttggaacatctcttaatacctcacttaacctaattttagtcttgctagttatatttgttgaatttggagattaaagtanattaatggtacttgnctttattattgncaacaccaattgtgagtccaagcttcaggntaagtgg

SEQ ID NO: 24493 - DNA, 412 bp, Homo sapiens
gtgccttgcagggatgctgcgggcgggagcaccaaccggggacttaccccgggcggggagaagtccacaccgggaccaccatcatggcagtggagtttgacgggggcgttgtgatgggttctgattcccgagtgtctgcaggcgaggcggtggtgaaccgagtgtttgacaagctgtccccgctgcacgagcacatctactgtgcactctctggttcagctgctgatgcccaagccgtggccgacatggccgcctaccagctggagctccatgggatagaactggaggaacctccacttgttttggctgctgcaaatgtggtgagaaatatcagctataaatatcgagaggacttgtctgcacatctcatggtagctggctgggaccaacgtgaaagaggcaaggatatgga

SEQ ID NO: 24494 - DNA, 364 bp, Homo sapiens
gaacctcagttctccatcgaacatgcttcctgtccggccccaaactaatgctttgatagggggacccatgcctatgagcatgcccaatgtgatgactggcaccatgggaatggcccctcttggaaatactccgatgatgaaccagagcatgatgggcatgaacatgaacatagggatgtccgctgctgggatgggcttgacaggcacaatgggaatgggcatgcccaacatagccatgacttctggaactgtgcaacccaagcaagatgcctttgcaaatttcgccaattttagcaaataagagattgtaaaagaagcagattgaatgaagaatttttagctgtgcagataggtgatgttggga

SEQ ID NO: 24495 - DNA, 512 bp, Homo sapiens
  misc_feature (1)...(512): n = a,t,c or g
gtgaagatcttgtggaagccctgaagccagagtatgtggcacctcttgtcctttggctttgtcacgagagttgtgaggagaatggtggcttgtttgaggttggagcaggatggattggaaaattacgctgggagcggactcttggagctattgtaagacaaaagaatcacccaatgactcctgaggcagtcaaggctaactggaagaagatctgtgactttgagaatgccagcaagcctcagagtatccaagaatcaactggcagtataattgaagttctgagtaaaatagattcagaaggaggagtttcagcaaatcatactaagtcgtgcaacgtctacagcaacatcaggatttgctggagctattggccaagaaactccctccattttcttatgcttatacggaactgggagctattatgtatgcccttggagtgggagcgtcaatcaaggatccanaagatttgantttattangaaaggaattctgantctccggttgccaacttc

SEQ ID NO: 24496 - DNA, 296 bp, Homo sapiens
gggcgtggtgtgtgcctgcccagctacttgggaggctgaggtgggaggatggagcccaggaggcagaggctgcagtaagccaagatcatgccactgcactccagcctgggagacagaaccagactctgtctcaaaaaaaataattaaaaaaaaaccaaaacaaaattgttttactcagaaaagaagctcaaatgttaataattaactgaagtctatgaaatcataagagtaattttttccataacataactttcttcactgacttgagttttatgacatacctttttttttttttt

SEQ ID NO: 24497 - DNA, 698 bp, Homo sapiens
ggcaggggatactggcagcctgcatcatcctcccattgggctgacagctggccctactttcctccctctgctgcttggtccctcaccttgatgatgtggcttcgccccctccactctactgccagtgttctcccagggcttgctaaatccagcagacccctttcctgtcttactagatctgggcagcatttgacatggctgatcaccccttgcttcttggatggcacttccctggcacctctgtggctagttgtcctacctccctggctgttcctttcaggcttccgtgcaggcttctccacttgcccatgcacagtagggtctttcagggttctgctgtgggctccctagggaagcccatccatctggatggtttcaaggatggtgaggaatttagagttgacctccagccccaacatccttcctgatcacctgaaccacagttttgctgccctctaggtgcacagacaattcaggtccatggcccagatggtacttgctgtcttctgcaaacctgccccttctgggtacttcccttgaccccgagatcactcaggagccagacaggaaacttattctattcctgttttctctttctgcccaccacatccaatctctcaaaacggtcaggtctaccttaacatctcttgatttgagccactcccactgtcatcaagctttcacctggattatcgtga

SEQ ID NO: 24498 - DNA, 324 bp, Homo sapiens
ggtgaggccacctaattatgggcaagcttcaccttttcctgacattccaacaaaatggttgccaattcctataactggttcttccagccccatgtgactccaggctgagaactggctgccagccacaaagtctgatagaagcttgtattttctgggcttaaaccaggcagcatacactcccacagtgacccacagggcagagggcagtaggttgtattctgtcattggaattgctcacctcaaaaatatccagtaaaggcaagccatgtataacacctgcctaggaactgtcagtaccacatgccaggccctaaggcaggtaat

SEQ ID NO: 24499 - DNA, 1149 bp, Homo sapiens
  misc_feature (1)...(1149): n = a,t,c or g
aattcggcacgagggcggagacaaaggggaagagtcatcgcctgtcggggctaggatatgatgggtgtgtttgtagttgctgctaagcgaacgccctttggagcttacggaggccttctgaaagacttcactgctactgacttgtctgaatttgctgccaaggctgccttgtctgctggcaaagtctcacctgaaacagttgacagtgtgattatgggcaatgtcctgcagagttcttcagatgctatatatttggcaaggcatgttggtttgcgtgtgggaatcccaaaggagaccccagctctcacgattaataggctctgtggttctggttttcagtccattgtgaatggatgtcaggaaatttgtgttaaagaagctgaagttgttttatgtggaggaaccgaaagcatgagccaagctccctactgtgtcagaaatgtgcgttttggaaccaagcttggatcagatatcaagctggaagattctttatgggtatcattaacagatcagcatgtccagctccccatggcaatgactgcagagaatcttgctgtaaaacacaaaataagcagagaagaatgtgacaaatatgccctgcagtcacagcagagatggaaagctgctaatgatgctggctactttaatgatgaaatggcaccaattgaagtgaagacaaagaaaggaaaacagacaatgcaggtagacgagcatgctcggccccaaaccaccctggaacagttacagaaacttcctccagtattcaagaaagatggaactgttactgcagggaatgcatcgggtgtagctgatggtgctggagctgttatcatagctagtgaagatgctgttaagaaacataacttcacaccactggcaagaattgtgggctactttgtatctggatgtgatccctctatcatgggtattggtcctgtccctgctatcagtggggcactgaagaaagcaggactgagtcttaaggacatggaaggagtttggatcttgacataagtaaaaccaatgtgaatggaggagccattgctttgggtcacccactgggaggatctggatcaagaattactggcacctggtcacgaattaaggcgtcgaggnggaaaatatgccgttggatcagcttgcattgga

SEQ ID NO: 24500 - DNA, 351 bp, Homo sapiens
ggcagtatcattggtggcaatgctttgtctgcaattaagccaggaatcaggaaggaactgcagatttcttagaaagttgtagtgctctatgagggcacttagccagttgttttgaccgactaggcagataatcacactgagctgatacaatcgtggtgctaaagtatcataattattaaaatattagtcctatgtgttctcaacacatgtaaaggaagagtgaccagattgatcttaatcagaaatgtccagttacatgtcggccgacagcattgatttcacattttagtattctagttaaaatttgctaatgaatagctaatataatacctcgaactgtaggtggttcag

SEQ ID NO: 24501 - DNA, 387 bp, Homo sapiens
ggtcccagcctgtagacatcttttactccaatttcctgaatagatagctttattccttcaaggtaatatagtgcggtggcttctggctgagatgtttgctgttgttttcttcatcttgtctttgatgacttgtcagcctggggtaactgcacaggagaaggtgaaccagagagtaagacgggcagctacacccgcagcagttacctgccagctgagcaactggtcagagtggacagattgctttccgtgccaggacaaaaagtaccgacaccggagcctcttgcagccaaacaagtttgggggaaccatctgcagtggtgacatctgggatcaagccagctgctccagttctacaacttgtgtaaggaaagcacagtgtggacaggg

SEQ ID NO: 24502 - DNA, 406 bp, Homo sapiens
  misc_feature (1)...(406): n = a,t,c or g
ggagatagatctgacaggtttgacttattgaaattagtgaaccattccagtgatgtgctagagccagctggtgctggccagtgagagctgattgttacatattgtcatgacttttgcaagcagctgacttcatgttagtagtgccaaattggctatgtttggagagctgacatcatagaaatctgcacacacacacacacacacacacacacacacacacacacccgacgccctgctaaaaatacaaaaattagctgggcgtggagacacatgcctgtaatcccagctactcgggaggctgaggcangagaattgcttgaacccaggaggtggaggttgcagngagccaagatcacaccactgcacttcacctggcanagagagggacctgtctcaaaaaaaaaaa

SEQ ID NO: 24503 - DNA, 398 bp, Homo sapiens
aattcggcacgaggtcgctcaaatgtagcaccgtcgtctgcgtgatctgcttggagaagcccaaataccgctgtccagcctgccgcgtgccctactgctcggtagtctgcttccggaagcacaaagaacagtgcaaccctgaaactcgtcctgttgagaaaaaaataagatcagctcttcctaccaaaaccgtaaagcctgtggaaaacaaagatgatgatgactctatagctgattttctcaatagtgatgaggaagaagacagagtttctttgcagaatttaaagaatttaggggaatctgcaacattaagaagcttattgctcaatccacacctcaggcagttgatggtcaacctcgatcagggagaagacaaagcaaagctcatgagagcttac

SEQ ID NO: 24504 - DNA, 849 bp, Homo sapiens
gtgggagaagacttcatcatgacaggacttcagcttaccaagcagcagccatagctgtgtggaggcttcagcatagctagcatgtttactgctctatgcctcctgatccagaccaggcattgcccagcctgggaatcttttctttgtgggaatcaaattacaagctatttaagtttatattccatcacaaccaagtcagacttgtattataagtcaaggatgagcctgatctggggagagggccggggctcgggactggccaccactgttcagcacatgacctaactacgtaagcctctttggcaagggtcctggtgcccagcacccaggctaaaatatcctgtctggcagagtgttttggtagctatgcaggcctcccttcagtgtacctctttttccaacttctcactcctccttactaggcttggccttgacatgcttcttcgagggttggcagcacaccgggaggggatgcttggacaagtttctgggcctacatttcttgactaggccctctcatttcctccctccttggggcttctgcccagggctccaggatcagggatattacttctcaacccgcacttctcctctactgaacccactggcatcacctgatgccactaatttgtgaacaacaagaaatcatttccccattggttggagtattccctcagcctatagcatcaaagcagaccagtggccaacagccccaaggggagcccaattaaatacctgggttcagtatcctaacctgttatgtcctgacagcaatggtaaccccagtaattctgtaatgttgtaatttccgcatggccctgagctcccttttcttaactcagtgaggcc

SEQ ID NO: 24505 - DNA, 425 bp, Homo sapiens
gcctggggaatatatatcctctgtggcctggatcaaagagggcaactacttggctgtgggcaccagcagtgctgaggtgcagctatgggatgtgcagcagcagaaacggcttcgaaatatgaccagtcactctgcccgagtgggctccctaagctggaacagctatatcctgtccagtggttcacgttctggccacatccaccaccatgatgttcgggtagcagaacaccatgtggccacactgagtggccacagccaggaagtgtgtgggctgcgctgggccccagatggacgacatttggccagtggtggtaatgataacttggtcaatgtgtggcctagtgctcctggagagggtggctgggttcctctgcagacattcacccagcatcaaggggctgtcaaggccgtacatggtgtcctgg

SEQ ID NO: 24506 - DNA, 400 bp, Homo sapiens
ccaaaaccgagctggtgaggggctgcaggtggcggcgcagtctcggtaggcggtatgagtttggctgggggccgggcaccccggaagaccgctgggaaccggctttctgggcttttggaggcagaggaggaagatgagttctaccagacgacttatgggggtttcacagaggaatccggagatgatgagtatcaaggggaccagtcagacacagaggacgaagtggactctgactttgacattgatgaaggggatgaaccatccagtgatggagaagcagaagagccaagaaggaagcgccgagtagtcaccaaggcctataaggaacctctcaagagcttaaggcctcgaaaggtcaacaccccggctggtagctctcagaaggcgcgagaagaaaagg

SEQ ID NO: 24507 - DNA, 352 bp, Homo sapiens
  misc_feature (1)...(352): n = a,t,c or g
gctggaagagtaaacacatacttaaatattcaagttggtcacatgacactcagccattgtgaaatgccaaaggtaaagaagtaaacagcaaactattataacaagttataactggagagaaaggcaagagacaagttcaacgtgaacagtttttattaatgcaattaggcaaaaacaactgtaaagcatgcttatagcatcagggttccggaccttcctatacaactcacgaaaggactgcaaaggaattagtccataaacaccatactccaatgattataacaggaggaagactgtttccccctactttccaactgccttcttgttcgtttagcangtttattccccctag

SEQ ID NO: 24508 - DNA, 443 bp, Homo sapiens
caaacagctatgacatgattacgaatttaatacgactcactatagggaatttggccctcgaggccaagaattcggcacgagccactttccaatacttgcaccttagttccagcccttttccttgttagccatacctatgatgggacatcatctaagatgtaattgagggccagacaccttactggatttcatccccagacagaggtaattcctttcttctctgagcttgtgcaaccctttatctaggcctttcttaccacttactgcttagctaactaacatcagctattcatttgcaagccttggttctcctctattactctaagtttcagatgattctctttctcccctacaaagttctctgcccatagggtatacttcataatttctatgttgacttagtcaacagagaccaaccccatatataaacataactaatttat

SEQ ID NO: 24509 - DNA, 402 bp, Homo sapiens
gtaagctatctataaaagtattaaggctacattaagctataatttgaacacaccctaacttacatgccttaggtaaaggaaaatcacaagtttggggggaataattatttacagcatgcgcaaaagaacccatattctataggaataaacacaataaaggggttgcatgataaattccagtttatattgagtaagttatgttttaaaatatagatgcagcctcccaaagtgctgggattacaggcgtaagccactgtgcccagccacatgtgaccatttaaataaatctagccattttggcaatcttttggtaactgttcatgtgatatgtaacagatttctctgaatccaaatagtcatccttaaattggaaatttatagtgctgctgctttgtgctacaa

SEQ ID NO: 24510 - DNA, 441 bp, Homo sapiens
  misc_feature (1)...(441): n = a,t,c or g
aacngntatgacatgattacgaatttaatacgactcactatagggaatttggccctcgaggccaagaattcggcacgagggcggccggcagcaggagcctgggaaagaggccctcgccaggtgatggcagggccagggtggcctggggcacccagcggaatgtgcttagtatttggtcaccagccgtcatcctgggcttttcctactgtgtcttgttacaaggcctcagcaatccacagaactctctctccttccttccacctgtcagcttctctgcttctgagataagaaccatttgtgtaacaccaacacttaacttcagaaagacatgcattatgtggtgtaatcaaacccgatgctttcagatgacctacttacatcttcaatgtggataagataaagaacaaaacacatgcatctaaactgctgggcaatccagtt

SEQ ID NO: 24511 - DNA, 345 bp, Homo sapiens
gtttcagtattagtgatgtcatctgtcactataggtcatacaatccattcttaaagtacttgttatttgtttttattattactgtttgtcttctccccagggttcagtcctcaaggggccatcctgtcccaccatgcagtgcccctagcttagagcctccctcaattccccctggccaccaccccccactctgtgcctgaccttgaggagtcttgtgtgcattgctgtgaattagctcacttggtgatatgtcctatattggctaaattgaaacctggaattgtggggcaatctattaatagctgccttaaagtcagtaacttacccttagggaggctgggggaa

SEQ ID NO: 24512 - DNA, 132 bp, Homo sapiens
atttgaaaacgctatgacatgattacgaatttaatacgactcactatagggaatttggccctcgaggccaagaattcggcacgagggggagctacaagcatgcaccacacccagctaatttttttttttttt

SEQ ID NO: 24513 - DNA, 421 bp, Homo sapiens
ggtaccaatgggatgcagaaactcaaggatggattctcggttcctttttttatggctacatcatcacacagattcctggaggatatgttgccagcaaaataggggggaaaatgctgctaggatttgggatccttggcactgctgtcctcaccctgttcactcccattgctgcagatttaggagttggaccactcattgtactcagagcactagaaggactaggagagggtgttacatttccagccatgcatgccatgtggtcttcttgggctccccctcttgaaagaagcaaacttcttagcatttcatatgcaggagcacagcttgggacagtaatttctcttcctctttctggaataatttgctactatatgaattggacttatgcttctacttttttggactattggaaattttggtt

SEQ ID NO: 24514 - DNA, 722 bp, Homo sapiens
  misc_feature (1)...(722): n = a,t,c or g
gcagtcgtattctctctctctctctctctctctctctcagtatccatgacaggtatgaaacatattgtctctttataaatgtcattttacaaattatgtgattatctggaagctctaagatgagagcaaatgcctgatcactctggccaaatgtcagatactaaagcccattcttggccgggcatgttggctcccgcctgtaatcccagcactttgggaagcccaagtgggtgaatcacctgaggtcaggagttcaagaccagcctgaccaacatggggataccccgtctctactaaaaatacaagccgggcgtggtggcgcatgcctgtaatcccagctactcaggaggctgaggcaggaaaatcacttgaactcgggaggcagaggttgcagtgagctgagatcgcgccattgcactccagncctgggtgacagagcaagactctgtctcataaataaatacaaagcccattcttccagagtcttgtgccttaaataaaacacacctctctgctgtgggaagactgtgcaatggcacagccgcanagcttggtttgggaggttgaagtgctctgggganaattcgtanatcatcctcagaaaaccttgccctgggttctaccanaaaaactctccatcaccaggaaantgtcanagtatcccccttaccacgttcactttcangggtcanttactgcgncaacaaggctgaaatattaat

SEQ ID NO: 24515 - DNA, 790 bp, Homo sapiens
agcagctctgacatgattacgaatttaatacgactcactatagggaatttggccctcgaggccaagaattcggcacgagcccacctccccttcagttcagagccaaaatgggtctagaatctggcactttactcatttcctttgataaattgtactatgcagagctgtcaggaaccttcagatagcagtagaggactgcagctgtctaggtctgcggccacatcttggggacacactggactgttcccatgtgcagggttcagcagttatgtgggagtgctaggggttaggcttttgagcttgaacgcctgcgtgtgaacagatgaaaaatccttcagtacccaagtcccagtctgtcctatggggagcagtttgggggcggccggcagcaggagcctgggaaagaggccctcgccaggtgatggcagggccagggtggcctggggcacccagcggaatgtgcttagtatttggtcaccagccgtcatcctgggcttttcctactgtatctttgttacaagccctccgcaatccacagaactctctctccttccttccacctgtcagcttctctgcttctgagataagaaccatttgtgtaacaccaacacttaacttcagaaagacatgcattatgtggtgtaatcaaacccgatgctttcagatgacctacttacatcttcaatgtggataagataaagaacaaaacacatgcatctaaactgctgggcaatccagttgacttttaaatgtaagaatggaattccaaacacttaacacattcagctat

SEQ ID NO: 24516 - DNA, 385 bp, Homo sapiens
agttaaaggccttattatcagtcttacctatacaagtagtaaattttgtcattgctttagttacaaccatctgtaaataacttaaaagacttattatgtggggttcaaattgagtggaataaagtatagattaaaagtatacaatccttagcacgttatctcagggcttatgaaatgtaattaaatttattaagaaaatagatgaaaaattagggtacacagctggccaccaaatgcgaagtcaatctgctacttaaccctgaaaacaaaatcagttttgcatattaccactaacactaatacatatagagagcggaaccataactcattgaattttggagaggaataagcttagcgttaatattgacaatattaaggcaatatt

SEQ ID NO: 24517 - DNA, 513 bp, Homo sapiens
atcacccacctgcagcactgcacgtgtgtggacgactgctctagctccaactgcctgtgcggccagctcagcatccggtgctggtatgacaaggatgggcgattgctccaggaatttaacaagattgagcctccgctgattttcgagtgtaaccaggcgtgctcatgctggagaaactgcaagaaccgggtcgtacagagtggcatcaaggtgcggctacagctctaccgaacagccaagatgggctggggggtccgcgccctgcagaccatcccacaggggaccttcatctgcgagtatgtcggggagctgatctctgatgctgaggctgatgtgagagaggatgattcttacctcttcgacttagacaacaaggatggagaggtgtactgcatagatgcccgttactatggcaacatcagccgcttcatcaaccacctgtgtgaccccaacatcattcccgtccgggtcttcatgctgcaccaagacctgcgatttccacgcatcgctttt

SEQ ID NO: 24518 - DNA, 396 bp, Homo sapiens
cacccctttgacatgattacgaatttaatacgactcactatagggaatttggccctcgaggccaagaattcggcacgagcaaaagtgaaatagtctgtgcttttttaaaggacattgattattattttgttcattcattcaccattcattgattctctactacatttcaggcactgggctaaatgttacaggtagaagctagatgtggtggctcacgcctgtaatcccaacactttgataggctgaggcaggaggactgcttgaggccaggagttcaagaccaacctgggcagcatagtgagatcccgtctctaccaaaaaaaaattttttttaatgttacaggtggaccctagtttaataaagattcaccaagtttcacgcaaaaaaaaaaaaaa

SEQ ID NO: 24519 - DNA, 392 bp, Homo sapiens
gggaaaaattgctttcagaattttattatgccgtatttcccttcattatagtaaaatatatgctcacgaatcaatgctgatttttaaaatatgtataatctgaagtggaaattgtttgcttagagtttttaaaaacctagtctttgaaaagcagtttgtgctatacttttcccccaaccctccaataaatcttaaatttaaaacctacaatgtagtgtctcccctttaggttcatcaaactgatgaaaataatttttctgcttcctgactccatatagtatttatgttctctgaggtacttgaactaaatctttggacagtgagtgataattaaaaagaatccagaagattaaatgtattcacaaaatagaagaatgtaacagtaatatttt

SEQ ID NO: 24520 - DNA, 358 bp, Homo sapiens
gggagctgggaagattggtcagattgtcttagtcaagatcctgaaagtcccaaaccgaagtttgtaagagaagttctagaaaaatgtatgaggttgtcttaccatcagcgtatattagatattgttcctcctaccttctcagctctatgtcctgcaaacccaacctgcatttacaagtatggagatgaaagtagcaattctcttcctggacattctgttgccctctgtttagctgttgcctttaaaagtaaggcaaccaatgatgaaatcttcagcattctgaaagatgtaccaaatcctaaccaggatgatgacgacgatgaaggattcagttttaacccattgaaaatagaagtct

SEQ ID NO: 24521 - DNA, 350 bp, Homo sapiens
gccacagggcaagcagaaaggctataaccatggacaaggcagctactcctactcgaactcctacaactctcccgggggcgggggcggatccgactacaactacgagagcaaattcaactacagtggtagtggaggccgaagcggcgggaacagctacggctcaggcggggcatcctacaacccagggtcacacgggggctacggcggaggttctgggggcggctcctcataccaaggcaaacaaggaggctactcacagtcgaactacaactccccggggtccggccagaactacagtggccctcccagctcctaccagtcctcacaaggcggctatggcaagaaacgca

SEQ ID NO: 24522 - DNA, 353 bp, Homo sapiens
gcactgagttgctggaacgaggggagaggctgccacggcccgacaaatgtccctgtgaggtctatcatctcatgaagaactgctgggagacagaggcgtcctttcgcccaaccttcgagaacctcatacccattctgaagacagtccatgagaagtaccaaggccaggccccttcagtgttcagcgtgtgctgaggcacaatggcagccctgcctgggaggactggaccaggcagtggctgcagagggagcctcctgctccctgctccaggatgaaaccaagagggggatgtcagcctcacccacaccgtgtgccttactcctgtctagagaccccacctctgtgaacttatt

SEQ ID NO: 24523 - DNA, 925 bp, Homo sapiens
atgccatgattacgaatttaatacgactcactatagggaatttggccctcgaggccaagaattcggcacgagggggactggcgggactgcgcggaggcgactacaggcatggcggtctgggtcctgtcgcgcctgctgagcgctccgcgcctggcgctggccaaggcggtcctgaggcacgtgaatggccaggatcagattgtgcccggcctgtacgcctgtggggaggccgcctgtgcctcggtacatggtgccaaccgcctcggggcaaactcgctcttggacctggttgtctttggtcgggcatgtgccctgagcatcgaagagtcatgcaggcctggagataaagtccctccaattaaaccaaacgctggggaagaatctgtcatgaatcttgacaaattgagatttgctgatggaagcataagaacatcggaactgcgactcagcatgcagaagtcaatgcaaaatcatgctgccgtgttccgtgtgggaagcgtgttgcaagaaggttgtgggaaaatcagcaagctctatggagacctaaagcacctgaagacgttcgaccggggaatggtctggaacacagacctggtggagaccctggagctgcagaacctgatgctgtgtgcgctgcagaccatctacggagcagaggcgcggaaggagtcacggggcgcgcatgccagggaagactacaaggtgcggattgatgagtacgattactccaagcccatccaggggcaacagaagaagccctttgaggagcactggaggaagcacaccctgtcctatgtggacgttggcactgggaaggtcactctggaatatagacccgtgatcgacaaaactttgaacgaggctgactgtgccaccgtcccgccagccattcgctcctactgatgagacaagatgtggtgatgac

SEQ ID NO: 24524 - DNA, 339 bp, Homo sapiens
gggaccaaagagaactggatccacgtgaagtcctgtgtgtggctggtccctacctgggcagtctcatttgcacccatagcccccatctatggacaggctgggacagaggcagatgggttagatcacacataacaatagggtctatgtcatatcccaagtgaacttgagccctgtttgggctcaggagatagaagacaaaatctgtctcccacgtctgccatggcatcaagggggaagagtagatggtgcttgagaatggtgtgaaatggttgccatctcaggagtagatggcccggctcacttctggttatctgtcaccctgagcccatgagctgcttt

SEQ ID NO: 24525 - DNA, 450 bp, Homo sapiens
gctgcatagggccgtggtacctggagggcaagagggaggggtgggaggctcggtctgctgcccaacacgtgtggcatcccaggcaagtcatctcagctttggcctccgcgcactcaaggagccacacaggcagtcccggctttgcacagctctgctatacacgaggagctgcggttactgcaatttgtccaataaacagcaggacctcaaggacatgattaagttacatggaaagaactgtaacttgtgacatgcaaacatggctgcacacgcctcagtccacaccacaaccagtgacccgcactgcacacctgtccacgcctcagtcacgccacaaccggtgacctgcaccacacacccgtccctcagttcatgcacagactgcgaagcgtgaactgtgtcacctcctctccagtgacagacccaggtgacagtatttttttttttttt

SEQ ID NO: 24526 - DNA, 465 bp, Homo sapiens
  misc_feature (1)...(465): n = a,t,c or g
ggtcagcatttcacaagacctccacaggagccccagctgccatcaggaaactctaccaggtgaaggggaagaagaacatccgtgccaccgagcgggcactgaactgggacagcttcaacactggggactgcttcatcctggacctgggccagaacatcttcgcctggtgtggtggaaagtccaacatcctggaacgcaacaaggctagggacctggccctggccatccgggacagtgagcgacagggcaaggcccaggtggagattgtcactgatggggaggagcctgctgatatgatccaggtcctgggccccaagcctgctctgaaggagggcaaccctgaggaanacctcacagctgacaaggcaaatgcccaggccgcagctctgtataaggtctctgatgccactggacagatgaacctgaccaaggtggctgactccagcccatttgcccttgaactgt

SEQ ID NO: 24527 - DNA, 932 bp, Homo sapiens
attcgagtcaccagatctctgcactcgtcctaagagcccaggcctccgagatcttacttgaagagttacagcaggggctttcccaggcaaagagggatgttcaggaacagatggcggtgctgatgcagtcacgggaacaggtttcagaagagctggtgaggttacagaaagataatgacagtctccagggaaagcacagcctgcatgtgtcattacagcaagcagaagacttcatcctcccagacactacagaggcactgcgggagttggtattaaaataccgtgaggacatcattaatgtgcggacagcagcagaccacgtagaagaaaagctgaaggctgagatacttttcctaaaagagcagatccaagcagaacagtgtttaaaagaaaatcttgaagaaactctgcaactagaaatagaaaactgcaaggaggaaatagcttctatttctagcctaaaagctgaattagaaagaataaaagtggaaaaaggacagttggagtccacattaagagagaagtctcaacagcttgagagtcttcaggaaataaagatcagtttggaagagcagttaaagaaagagactgctgctaaggctaccgttgaacaactaatgtttgaagagaagaataaagctcagagattacagacagaattagatgtcagtgagcaagtccagagggattttgtaaagctttcacagacccttcaggtgcagttagagcggatccggcaagctgactccttggagagaatccgggcaattctgaatgatactaaactgacagacattaaccagcttcctgagacatgacaccctcatggcaggattctagcctgcactttgggtttttaactcatctttagagcaacagtaattattatttaactcttaactgaagaaagagaagtcacaacaaaaggaaga

SEQ ID NO: 24528 - DNA, 415 bp, Homo sapiens
gcccagctactcaggaggctgaggcaggagaatcgcttgaacccaggaggttgaggttgcagtaagccgagatcatgccattgcactccagcctgggtggcagagtgacactttgtctcaaaaaaaataaaagtaaagccttatatttactgtagtattttttacttattagaaagttaaaaatgtgttcttaaaatatgagccttttgttttgttaggattattatttttgttaatggtctgattataatgttgcaagaaatttgggtagtttatttctaattctatttttctcattagtcctattatttttaatatgcagttttgaatattttaaggatttgggatatattgtatgtcaaaactcatgtacactaatgctctccacacttagaaaggaatgccttccttactt

SEQ ID NO: 24529 - DNA, 446 bp, Homo sapiens
gccttcctatgttttgagtgggtctgctatgaatgtggtattctctgaggatgagatgaaaaaattcctataagaggcgactagagtttctcaggagcacccagtggtgctgacaaaatttgttgaaggggcccgagaagtagaaatggacgctgttggcaaagatggaagggttatctctcatgccatctctgaacatgttgaagatgcaggtgtccactcgggagatgccactctgatgctgcccacacaaaccatcagccaaggggccattgaaaaggtgaaggatgctacccggaagattgcaaaggcttttgccatctctggtccattcaacgtccaatttcttgtcaaaggaaatgatgtcttggtgattgagtgtaacttgagagcttctcgatccttcccctttgtttccaagactcttggggttgacttcattgatg

SEQ ID NO: 24530 - DNA, 431 bp, Homo sapiens
ggtaccatggcggagaagactcaaaagagtgtgaagattgctcctggagcagttgtatgtgtagaaagtgaaatcagaggagatgtaactatcggacctcggacagtgatccaccctaaagcaagaattattgcggaagccgggccaatagtgattggcgaagggaacctaatagaagaacaggcccttatcataaatgcttacccagataatatcactcctgacactgaagatccagaaccaaaacctatgatcattggcaccaataatgtgtttgaagttggctgttattcccaagccatgaagatgggagataataatgtcattgaatcaaaagcatatgtaggcagaaatgtaatattgacaagtggctgcatcattggggcttgttgcaacctaaatacatttgaagtcatccctgagaataccgg

SEQ ID NO: 24531 - DNA, 746 bp, Homo sapiens
ggttagtaaaagatgtactttgacatttctgatgtaaaacctatatgtaaatattgtaatttaaatatgattggacagctgttaagttttggggagggaagcagatgccagcgttctctgctgaaaagacaagatggcgcttgacggaccacagcagatggagctggaggaggaaaaggcaggcagtggactctgccagtattatctgtccaagattgaagaactccagggtcaactgcaatataaattggatgggggaaagccacaaggaacagttctgaactccaggtgcatttgcagctgattgtgaatgataagagccaaaacctccggaggctgcaggcacagaggaacgaactaaatgctaaagttcgcctattgcgggaggagctacagctgctgcaggagcagggctcctatgtgggggaagtagtccgggccatggataagaagaaagtgttggtcaaggtacatcctgaaggtaaatttgttgacaaggtagacccattagtgtcactgatgatggtggagaaagtaccagattcaacttatgagatgattggtggactggacaaacagatcaaggagatcaaagaagtgatcgagctgcctgttaagcatcctgagctcttcgaagcactgggcattgctcagcccaagggagtgctgctgtatggacctccaggcactgggaagacactgttggcccggctgtggctcatcatacggactgtcctttattcgtg

SEQ ID NO: 24532 - DNA, 564 bp, Homo sapiens
  misc_feature (1)...(564): n = a,t,c or g
gacttgtgctaatcttagtactggatatttgtttttggttttctgtgggagatagtcaagcctaattgcttcttgcttctacttcattttggtgatgttacccttattctttttgtttatttatttantttttttttttgaaaaagggccnggcnctgtcacccaggcnggattgnantggaaaancctnggcccattgcaacctcaatttcccggggttnaanntgttcngcaaactnantccccctgagttnncggggattnaagggaacccccaacaaaccccaangaatttttttggntttttaaaaaaaagnaggtttcaanannttggccnggntggccctgaacccaaaacttgnggngncctanccnccttgcccccccaaagngcngggattaaaggnnttngccnccgtgccnggaaacccttattcccnaaatttaaaaaaaacnaaattgccaatggaanttgcaaancaattnttnaaggggtataaaatttccccnttttaacgngaaaaattttccccncccaaaaggngggccccaannccanaaaaa

SEQ ID NO: 24533 - DNA, 366 bp, Homo sapiens
  misc_feature (1)...(366): n = a,t,c or g
cccacgcgtccggtaaataagatgtttacaagactgtaagactgtattgtaaggaagggaagatagtctgcttagaacttttagtataagaaagaatgtgtcacatgattcatgtaatgtttccaagtaaaatccttcaggattggttttgcatgatcagttcatcactgtgctgatgagaagatgccaccttaacacttcccatctggttggcctgtagtaaattttaaaaagcaaaagcggtaatatgtcaatatgcactgatggttagggtctctcaggttattgatgagatgacacgtctaggcttccattcatgtgatgagatagatgtctttgacattgattaaaganagaatccattgc

SEQ ID NO: 24534 - DNA, 527 bp, Homo sapiens
  misc_feature (1)...(527): n = a,t,c or g
cccccccccttgaccccanagctatgacatgattacgaatttaatacgactcactatagggaatttggccctcgaggccaagaattcggcacgagaacagattgattgacctgggcattcaggactaccacacatttctgatatacatcacggagttactgaaaaagctgcaatcaaccacagtcatgaacccctacatgaagcttgctccaggagaacttactatcatcctctaatttttnaanagaantcttnatttattcttctttncnaattgaacttnnacntagnncagannntnttcaaantgcntatattgatannacnntncanngagnnngccttgcngnacgnnaagctgtctgagcatgntaaggcnctgnntagcctgnggccngagctgnncnactttgcngnggncgatgactactgcctgaggagctccgaggncccaganncancccacgncngcaantctttccccctgatgnccattacctgcgtnctgccccntggncnntactgcc

SEQ ID NO: 24535 - DNA, 469 bp, Homo sapiens
  misc_feature (1)...(469): n = a,t,c or g
gactattctgtgtcctttacctgtgttaactagttttaaccctctgcaaatatctgaggtatgctctttttacagatgggaaaacaatcttggactttaatattttttcttaatgttacacaattagtaagaggcagggggccaggtggagtggttcatgtttggaattccagcactttgggaggctgaggtgggcagcttgagcccaggagttggaagactagcctgggcgacatagtaaaacctgatctctgcaaaaatattagccgggtgtgttggtgggtgcctgtagtccgagctactggtgaggctgaggtgggaggaccaactgagcccaggaggtcaaggctgcaatgagctgtcatggagccagtgcactccagcctgggagacagagtgagactctgtcttaaaaaaaggcagcagtagggtttaaacccccngcattttgtctttattgcctctaaac

SEQ ID NO: 24536 - DNA, 479 bp, Homo sapiens
gtggaagaattgtttgctcccattaaggaatcggggaagaagccccgggggaagagcaaagggatgaggggagatctctgcctggcctggctcccctacccccagcacctgtttctggggttttgcctgtactgaatgaacacaaggatgaggagtgaatgacaccctgaatcattctcagctgtccgggggtgggacaggaggcccacccaccaggcatgaagacagcctcagccaagacatggcagattctcattattcaggtggtcagattctgtaaggtggccgcgaacactgagttagcgaatcctgaaccagtaccctgggggaacacagggttaggttcctggagcctctaatcacactcttgtcgactgaccgatacataactgttttacatgtttctgtttaaagatgccttatttaatacgtatccctgatcgattggcattgagctcacgggcagcagcactatcact

SEQ ID NO: 24537 - DNA, 543 bp, Homo sapiens
gcctctagctaaaatgtttgatcttcctgaataaagcacagcattctttgtcttccaagcaagcaggagtaaacaggcatgctgctggctatttatgttgtctggagttacttctcttgagtctttgctgcaggaagttgatgaggaacaagaccatttccactgccttctcagatatcagttctctgaccttggcaacaaccttacccttgttaagtagtgtttgtctctgatatggtttggctgtgtccccacccaaatctcatcttgaatttgtagctcccataattcccacgtgccatgggagggaccaggtgggaggtaattgaatcatgggggcgaatcctttcccatgctgttcccatggataatgaataagtctcatgagatctgatggttttaaaaagaggagttcccctgcacaagttctctctttgcctgccaccaaccatgtaagatatgatttgctcctccttgccttccaccatgattgtgaggcctccccagccacgtggaactgtgagtccaattagacctctttct

SEQ ID NO: 24538 - DNA, 447 bp, Homo sapiens
accgtttgactgattacgaatttaatacgactcactatagggaatttggccctcgaggccaagaattcggcacgagcgactgtttgcagggaatcagaaagggattacaacatggattttttgactttgagacaattgatgtggatgaatatgaacattatgagcgagttgaaaatggtgacttcaactggattgttccaggaaaatttttagcatttagtggaccacatcctaaaagcaaaattgagaatggttatcctcttcacgcccctgaagcctactttccttatttcaaaaagcataatgtgactgcagttgtgaggctaaacaaaaagatttatgaggcaaagcgcttcacagacgctggcttcgagcactatgacctcttcttcatagatggcagcacacccagtgacaacatcgtgcgaaggttcctgaacatctgtg

SEQ ID NO: 24539 - DNA, 425 bp, Homo sapiens
gaataccctgtctctactaaaaatatcaaaaattagccgggcatggtggggggcgcctgcagtcccagctactagggaggctgaggcaggagaatggcgggaatccgggaggcagagcttgcagcgagccgagactgcgccactgcactccagcctgggtgacagaacgagactccatctatcctcaggtgagtggcaaccaccagaagtggctgtttcagggctactgccactcgttttcctgttcctcttcactcctgctggaacaccaaggctgtttctctgccaatattcttttaactgtggatagaacacagggttactgatgattacacttggctattgctgtcatttggttcttttgatcttcactttgagtcaatggaactgttcaggcattctgtaaggaggacagacaccagcgt

SEQ ID NO: 24540 - DNA, 450 bp, Homo sapiens
  misc_feature (1)...(450): n = a,t,c or g
tgactgattcgaatttaacacgactcctatagggaatttgnccctcgaggccaagaattcggcacgaggggaaagagaagattgcagagctttctgccactgctcaggaaataattaaaagccaggccattgcgacgaagaaaataatttctgattaccaccagcagtttagatataaactggaagatttttcagaccaactctctgattactatgaaaaatttattgctgaatccaaaagattgattgacctgtccattcaaaactaccacacatttctgatatacatcacggagttactgaaaaagctgcaatcaaccacagtcatgaacccctacatgaagcttgctccaggagaacttactatcatcctctaattttttaaaagaaatcttcatttattctttttttccaattgaactttcacatagcacagaaaaaattcaaact

SEQ ID NO: 24541 - DNA, 480 bp, Homo sapiens
  misc_feature (1)...(480): n = a,t,c or g
gcagatgaggtaattgtccattttgattctgggaagggtctaaagagtaaagtgagatttgcagggctgacctggtggtgatgagaaatggcacagatagttcttttgttctttttgggtctcccgggcttatagtttgtagtctttctgttcagtttttggggaaaatatactttaattttgtctggtgaaagactttataatttcatgcttcgttttttattcagataagccaatcccacggaaaacagggatataaacagttgttgatttacatttttaaaaagattattagcaggaaagggcattctgttttgaattatacagtgagcatgttcttgcctaaaccaagagacagtttattcattggtggtgcaacatttaagtagaggccnnaatgtgaaccttggaatgaaacctggggngcttctaaccactctgggaaaattanntanctantcttgaggttnctggtcttcg

SEQ ID NO: 24542 - DNA, 406 bp, Homo sapiens
cgcctttcctaggctcccttgaagctaaatgtagccatgggaactgagtctgggccaatgggatgtaagcagaagcaacctctgggaaatacccttaaagaaaggggacacaggccgggtgcagtggctcacgcctgtaatcccagcactttgggaggtcgaggtgggcagaacacctgaggtcgggagttcgagaccagcctgaccaacatggagaaaccccacctctactaaaaatataaaattaggctgggtgcagtggctcacgcctgtggtcccagcactttgggaggccgaggcaggtggatcatggggtcaggagttggagaccagcctggccaacacggtgaaaccccgtctctgctgaaaatacaaaaattagccaggcacggtggtgtgtaacctg

SEQ ID NO: 24543 - DNA, 419 bp, Homo sapiens
cttgactgattacgaatttaatacgactcactatagggaatttggccctcgaggccaagaattcggcacgagtggcacccctcccctcaccacagatgctgagatggtagcatagaaatgatggccgggcgcggtggctcacgcctgtaatcccagcactttgggaggccgaggcgggcggatcatgaggtcaggagatcaagaccaccctggctaacacggtgaaaccccatctctactaaaaataaaaaaaaaaattagccgggtttggtggcgtatgcctgtaatcccagctactcgggaggctgaggcaggagaattgcttaaacctgggaggtggaggctgcagtgagccaagatcgtgccactgcactccagcctgagtgacagagcaagactccgttcaaaaaaaaaaaaaa

SEQ ID NO: 24544 - DNA, 454 bp, Homo sapiens
tttggaaaaccgttatgacatgattacgaatttaatacgactcactatagggaatttggccctcgaggccaagaattcggcacgagcctcctggtactatttcttttgcaaattcagagtctgggtctggatattgatagccgtcctaccgctgaagtctgtgccacacacacaatttcaccaggacccaaaggagatgatggtgaaaaaggagatccaggagaagagggaaagcatggcaaagtgggacgcatggggccgaaaggaattaaaggagaactgggtgatatgggagatcagggcaatattggcaagactgggcccattgggaagaagggtgacaaaggggaaaaaggtttgcttggaatacctggagaaaaaggcaaagcaggtactgtctgtgattgtggaagatccggaaatttgttggacaactggatattagtattgctcg

SEQ ID NO: 24545 - DNA, 529 bp, Homo sapiens
  misc_feature (1)...(529): n = a,t,c or g
ancngctatgacatgattacgaatttaatacgactcactatagggaatttggccctcgaggccaagaattcggcacgagcccctacatgaagcttgctccaggagaacttactatcatcctctaattttttaaaagaaatcttcatttattcttcttttccaattgaactttcacatagcacagaaaaaattcaaactgcctatattgataaaaccatacagtgagccagccttgcagtaggcagtagactataagcagaagcacatatgaactggacctgcaccaaagctggcaccagggctcggaaggtctctgaactcagaaggatggcattttttgcaagttaaagaaaatcaggatctgagttattttgctaaacttgggggaggaggaacaaataaatggagtctttattgngtatcataccactgaatgtggctcatttgtattgaaagacagtgaaacgagggcattgataaaatgttctggcacagcaaaacctctagacacatagtgngattaagtaac

SEQ ID NO: 24546 - DNA, 681 bp, Homo sapiens
gcctattatcaatatggtgcttgaatatattcctataactgtagaacagtgtggaaagtgatggtaactttgaagttgttcatgttttattggctttgttttaattgacactagtagagttttaatggtctttgtgtaaattttaatggcttttccattgtttttgcttctcttaaaaagtttaagaagaatatgacctcattaaatgtgctgttttatttggaccagtcacacaaaatgtctctctagagttgactttaaagttgtttacagaaatttaaactcaattccagagattgaagttgtccaaacagctcatgggcttagtgtccaaacccctgcccagccttccctttccaagttggtgccacctccaggtagccattggtggttttcctattactgatgtggctgtggaatgataaggtcctagaggggccctggcatttcaggaagcggacctggtattccctgacaaacattgcttaggaaagagggccggagaataagaagccagcacctcatcagtcagccctgcaatgtgagacttccgtagctgttgagagtcactgcaggtgttctttcatcccgtctgattttaacccatggttgagacgttccaagttagatctgctgctcttaggtgtggggctgtccacattagggaacttgcctcaaaaa

SEQ ID NO: 24547 - DNA, 440 bp, Homo sapiens
  misc_feature (1)...(440): n = a,t,c or g
gctcttttcttctgagatggagttttgctcttgtcacctaggctggggtgcaatggcgcaatctcggctcactgcaacctctgcctcccaggttcagagtgattcccctgcctcagcctccctagtagctgcaattacaggtgcctgccaccacgcccggctaattttttgtatttttggtggagacggggtttcgccatgttggccaggctgatatccaactcttgacctcaggttatccgcctgcctaggcctcccaaagtgctgggattacaggcactttgggagccaccgcagctggcctgttaattgccttctctgaagagaaaactaaatgcagttttctcagtgtcatacttctcactgnctctctagtgtttaaatgaaggaatcaggatttgaacctaggttaggcttaccctaggacttattctcaattt

SEQ ID NO: 24548 - DNA, 382 bp, Homo sapiens
gatcgcaaaggtcttgcttgggcccgttcaaaaaaccctcaagagatgcttcatcttcacccattagatctccagagcgcattgtccatcgtcagcagcactcaggaggctgattctaggctgcttacagaaatctcgtcttcatgggatggatgccagaagtatttttatcgctctcttgcacggcatgccaggcttaacgcagcactagcaactcctgccaagggaaatgggcatgggcaacgtggagaggtgcagagggttctcagcacatttgatgaagatgctcgtccgacagcggcgctccctgaccacgctcagtgagcagtggatcatcctcaggaacctcctcagctgtgtgcaagagattcacagcaggctg

SEQ ID NO: 24549 - DNA, 719 bp, Homo sapiens
ggtgcaggggaagtacgtgaagaaggagacgtctcctctgcttcggaatcttatgccttcattcatccagcatggtccaaaaattccaggacgaactgatatctgtcttccagattcaagccctaatgccttttcaacttctggagatggagtagtttcaagaaaccagagtttccttagaactccaattcaaagaacacctcataaaataatgagaagagaaagcaacagattatctgcaccttcttatcttgccagaagtctagcagatgtccctagagagtatggttcttctcagtcatttgtaacggaagttagttttgctgttgaaaatggagactctggttcccgatattattattcagacaattttgttgatggtcagagaaagcgcccacttggagatcgtgcacatgaagactacagatattatgaatacaaccatgatctcttccaaagaatgccacagaatcaggggaggcatgcttcaggtattgggagagttgctgctacatctttaggaaatttgactaaccatggttctgaagatttaccccttcctcctggctggtctgtggactggacaatgagagggagaaaatattatatagatcataacacaaatacaactcactggagccatcctcttgagcgagaaggacttcctcctggatgggaacgagttgagtcatccgaatttggaacctattatgtaagat

SEQ ID NO: 24550 - DNA, 473 bp, Homo sapiens
gaaggggtacgtgagtaaactgttcaaacagtaggaaagtgtaaacagttcactctccagaggcaagcactattaacatcttcttaacagttctttccagaaattttctaagccgatggaaacgtgtgtatgtatgcatactcttagtaagacatgggagtttagacattattctggctcctgtttttttcctgtaactatttatcttccaaatagggaagcaaatagatttaccctatacttttcaaggcctcatttgaaagttatactattaaatggatctaacacagtggcttttaatcaggggcaactttgtttcctaggggacatttggcaatgtctaatgatatttttggtgttgcattcagggtggggagagctgctgctggtgtcttgtgggtagagaccaggaacgctgtcaggatctcaccatgcacagaccactccccatgacagaggattatctggcccca

SEQ ID NO: 24551 - DNA, 903 bp, Homo sapiens
  misc_feature (1)...(903): n = a,t,c or g
acgaccacgaatttaatacgactcactatagggaatttggccctcgaggccaagaattcggcacgagagaatattttgatccaagtatagttggctggacagtgaaatattatgaacttgaagaaaagatagtcagtctgatcaagaacctgttagttgctcttaaggacttccattctgaatatattgtcagtgcctctaactttacttcccaactctcaagtcaagttgagcaatttctgcacagaaatattcaggaatatcttagcatccttaccgatccagatggaaaagggaaagagaagattgcagagctttctgccactgctcaggaaataattaaaagccaggccattgcgacgaagaaaataatttctgattaccaccagcagtttagatataaactgcaagatttttcagaccaactctctgattactatgaaaaatttattgctgaatccaaaagattgattgacctgtccattcaaaactaccacacatttctgatatacatcacggagttactgaaaaagctgcaatcaaccacagtcatgaacccctacatgaagcttgctccaggagaacttactatcatcctctaattttttaaaagaaatcttcatttattcttcttttccaattgaactttcacatagcacagaaaaaattcaaactgcctatattgataaaaccatacagtgagccagccttgcagtaggcagtagactataagcagaagcacatatgaactggacctgcaccaaagctggcaccagggctcggaaggtctctgaactcagaaggatggcattttttgcaagttaaagaaaatcaggatctgagttattttgctaaacttgggggaggaggaacaaataaatggagnctttattgngtatcata

SEQ ID NO: 24552 - DNA, 371 bp, Homo sapiens
tttggagtagtttttaaaagtttaaaatggtaatagaggagccagaaactttttaagcattgtaaaatgttttgaattgatattgactttgtttggaagagagtagaggcagtgcgcaggggagatgaagggattgctaaagaccaggagttcaagaccagcctgggcaacacagtaagaccttgtctctaaaaaataaaataaaataaaaaattattcttaaattagccaggcgcagtggcatacacctataatcctagctattcgggaggctgaggcaggaagatagccagagtgagaccttgtctcgggtaaaaaggaagaaaaatgacaataatagattatagcactctgaactaaagagtacataa

SEQ ID NO: 24553 - DNA, 383 bp, Homo sapiens
gcatttaagggctgctgaaattctttactatttcgccctgagacaagctcacaaatacaagataaataaatttctctcatcatcactttacacggcactgacagaagccagaaggaatttgggactgtttcaacatcatgatgctatcacaggaactgcaaaagactgggtggttgtggattatggtaccagactttttcattcgttaatggttttggagaagataattggaaattctgcatttcttcttattttgaaggacaaactcacatacgactcttactctcctgataccttcctggagatggatttgaaacaaaaatcacaagattctctgccacaaaaaaatataataaggctgagtgcggagccaaggtaccttg

SEQ ID NO: 24554 - DNA, 404 bp, Homo sapiens
caccaccacccaggcctcctatgcagctcagtctgcatatggcactcagcctgcttatccagcctatgggcagcagccggggcatggaccgaggtggctttggtggaggaagacgaggtggccctggggggccccctggacctttgatggaacagatgggaggaagaagaggaggacgtggaggacctggaaaaatggataaaggcgagcaccgtcaggagcgcagagatcggccctactagatgcagagaccccgcagagctgcattgactaccagatttattttttaaaccagaaaatgttttaaatttataattccatatttataatgttggccacaacattatgattattccttgtctgtactttagtatttttcaccatttgtgaagaaacattaaaac

SEQ ID NO: 24555 - DNA, 548 bp, Homo sapiens
  misc_feature (1)...(548): n = a,t,c or g
ggagaggaggagctgtcgcggaccctgtagagtcggtctctgttgctctttttgcctgaggagtcttccatcctacgtcgagctctgactcccgtgctgtcgagagggagtccccggggacacctcggcacgcagcggagatgcctctttttgccaccaatcccttcgatcaggatgttgagaaagcaaccagcgagatgaatactgctgaggactggggcctcattttggatatctgtgataaagttggtcagtctcgcactggacctaaggattgtcttcggtctattatgagaagagtgaaccacaaagatcttcacgttgctatgcaggctttgactcttctaggagcatgtgtatcaaactgtggcaaaatttttcatttanaagtatgttcaagagattttgctagtgaagtaagcaacgtattaaataagggtcatcctaaagtagtgaaaaattaaaggtcctaagggttaatggacagatnaatttagaatgaccacagcttagnccaatacacaatgattaaaaccttaagggacaag

SEQ ID NO: 24556 - DNA, 1151 bp, Homo sapiens
  misc_feature (1)...(1151): n = a,t,c or g
gttcccagagtggggcacagcgaggcgctagggggaacgctggcctctgaaactagctctgggaccggggtctgcggccggcccctagctggccccgtctcccatccccagaagggtattcactggggattctgagctttggctactccagtttcccacgacacgatgttccctttctacagctgctggaggactggactgctactactactcctggctgtggcagtgagagaatcctggcagacagaagaaaaaacttgcgacttggtaggagaaaagggtaaagagtcagagaaagagttggctctagtgaagaggctgaaaccactgtttaataaaagctttgagagcactgtgggccagggttcagacacatacatctacatcttcagggtgtgccgggaagctggcaaccacacttctggggcaggcctggtgcaaatcaacaaaagtaatgggaaggagacagtggtagggagactcaacgagactcacatcttcaacggaagtaattggatcatgctgatctataaagggggtgatgaatatgacaaccactgtggcaaggagcagcgtcgtgcagtggtgatgatctcctgcaatcgacacaccctagcggacaattttaaccctgtgtctgaggagcgtggcaaagtccaagattgtttctacctctttgagatggatagcagcctggcctgttcaccagagatctcccacctcagtgtgggttccatcttacttgtcacgtttgcatcactggttgctgtttatgttgttggggggttcctataccagcgactggtagtgggagccaaaggaatggagcagtttccccacttagccttctggcaggatcttggcaacctggtagcagatggctgtgactttgtctgccgttctaaacctcgaaatgtgcctgcagcatatcgtggtgtgggggatgaccagctgggggaggagtcagaagaaagggatgaccatttattaccaatgtagattgcactttatatgtccagcctcttcctcagtcccccaaaccaaagctacacagccagatttctcaagcagtctnactncagccctcatctncccttactatgntctgntttccagttggttttgattgnatctttactagaaactggctc

SEQ ID NO: 24557 - DNA, 528 bp, Homo sapiens
caccatcctcatggacaccacccccatggacaccatccccatggacaccatccccactgccatgatttccaagactatggaccttgtgacccaccaccccataaccaaggtcactgttgccatggccacggcccaccacctgggcacttaagaaggcgaggcccaggtaaaggaccctgtcccttccattgcagacaaattggatctgtgtaccgactccctcctctaagaaaaggtgaggtgctgccacttcctgaggccaattttcccaagcttcccattgccgcaccacaaacatcctctaaagccagacattcagccctttcctcaatcagtctctgaatcatgtccagggaagttcaagagtgggtttccacaagtttccatgttttttacacatacatttccaaaataaaatgtgattcctttgaagaggaaaatgaataatacattgaattagaaacataaataaaatgaccagtaattgtgaaaattacagttcttttcaacctactttcatactgaaga

SEQ ID NO: 24558 - DNA, 393 bp, Homo sapiens
gaaatgcccaacgcctgcagtgaacctgctcagcctgtatcacataaaagtagtatcaggccagattaagctgtgcgtgtgtccatttggcatgggcaaaggaacatgacagtggaaacctacatttggtccaatattttcagtgacctctgttgcaaagaactcagcaaaggcctaactttgaaacaccttttagagaagcgatcccccaaaccatgtgctaagctagatcccctctacatgtgcagtggtgcaccgtggatatacaagcttcataatgtacagctgtcaggcctgctgggacattccacttcgctgcaacttagactagtatttggtaaggaaccaggggttggcatttaggtgaactgagtcaaatcaaaggatggggtg

SEQ ID NO: 24559 - DNA, 449 bp, Homo sapiens
gtgttttcactgcttctctggagagtgatgtggtcagtaagcagcagagacgatgagagaggggtgttgtttgttgcatctttgccaaattgcccggtccacagatatccaccaaggcataaaagaaagtaaggctgataaatagcatgacactggcttcatggactcatccacatctggatcaaataggcttccacctgtgagcagagaagtctttctccaggcttgtgcccaacagccctagccagggcctgcacaggcctggtcctttagggttgctgtgggaactttgctgacaattcagttggtggtgcaggaggcccaatagtgtcttgttatgtatttcctagcatctaggttccatagtgctaacaggaaaaaaatgcttgctggtgtgtcagcaaatggcctctaaaacacatagggagaggactcaggagagggaaatt

SEQ ID NO: 24560 - DNA, 441 bp, Homo sapiens
  misc_feature (1)...(441): n = a,t,c or g
ggaactgaaagggacttcaaaacattggaagaaaatagtctgaaagctcagagtgtgcttggctcctggtaggtatgaaggcttgataaagaggcatcttttgcactgacaggtgtttgtgtgccagtgtggtgagggcttttgatgacaaagccacttagttttctctagcttacccttccctttgtgcagaggagttaggaaaactctaataaagtaactaaataataaggataaaaagttagcattgttgtttttttcttcatctcctcttttgtgcccatcggatttttgagactcacttttcaggccctaagtaagcaagaggcagaggtgaggaggggagtgtctgcactgtccctatggttctggaatatgctgctcttcaaaggctagcatcagcagcaacatccttcttgaagccnaaggaaaatttagatg

SEQ ID NO: 24561 - DNA, 916 bp, Homo sapiens
  misc_feature (1)...(916): n = a,t,c or g
gtattcattttccagtgtctgtaaagccaggtgaggaagtgatcccaaaagatgaaaatggaaaaatactatttgacacagtggatctctgtgccacgtgggaggccgtggagaagtgtaaagatgcaggattggccaagtccatcggggtgtccaacttcaaccgcaggcagctggagatgatcctcaacaagccagggctcaagtacaagcctgtctgcaaccaggtggaatgtcatccttacttcaaccagagaaaactgctggatttctgcaagtcaaaagacattgttctggttgcctatagtgctctgggatcccaccgagaagaaccatgggtggacccgaactccccggtgctcttggaggacccagtcctttgtgccttggcaaaaaagcacaagcgaaccccagccctgattgccctgcgctaccagctacagcgtggggttgtggtcctggccaagagctacaatgagcagcgcatcagacagaacgtgcaggtgtttgaattccagttgacttcagaggagatgaaagccatagatggcctaaacagaaatgtgcgatatttgacccttgatatttttgctggcccccctaattatccattttctgatgaatattaacatggagggcattgcatgaggtctaccagaaggccctgcgtgtggatggtgacacagaggatggctctatgctggtgactggacacatcgcctctggttaaatctctcctgcttggtgatttcagcaagctacagcaaagcccattggccagaaagacaataaatttttatcattttgaaataaaaaaaaactcgtgccgaattcttggcctcgagggccaaattccctatagtgagtcgtattaaattcgtaatcatgtcatagcanangngatctagtnngncaa

SEQ ID NO: 24562 - DNA, 398 bp, Homo sapiens
tgtcactttctcccatcacgctcaggtgggaccattcagttgcaggaaaacaagcttaacacgcccactaattctacattatggtgagttctatgattattttattatatattacagtgtaataatggaaataaagtgcctaataaatgcaaatgtgcttacatcttttggcccagctcctacctcccggcagcctctccaggcccagaactttctccagtcagcctctacagaccaagctcatgactcacaatggcctatttaggcccataccctacgtcacggcagcctccgcagatgagcctactgcctcacaacagcctccacaggcacagctccatcgttacaatggcctctttagtcgacgcggccgcgaattccagatctatgaatcgtag

SEQ ID NO: 24563 - DNA, 349 bp, Homo sapiens
gctaacatagcacttactttatgttgcaatgctgtgtgcaatgctgtgtttttttactcactagctctgagcaaaacattatttattcttggtaattgtaacacttggtagtgaagacatattttttgccatataatggattatactttgtatttgaatccatgtgaatcagtagcatattggtcttcattgtttttcctccttctcggacgtttttttgagacagggtctcactctgttgcccaggctggagtgcagggcacaattacagctccctgcagccttgatttctcaggctcaagccatcctcttgcctcagcttccctagtagctgggactataggtgcat

SEQ ID NO: 24564 - DNA, 398 bp, Homo sapiens
  misc_feature (1)...(398): n = a,t,c or g
ggagaatatatgttagcagcctgaaacctaagattgcagtgattcttattgctgctcatttctgtttaaatctttgtttcctaatcagcaagtaacactctagaaattaacaataacatttatgaaactatttcaagtcctttctcttattggaaacagatttgaaccttttctagcttcatgcataggatggaacaaaatttagggggaaaaaagttaacagtgcaagccaaataactcagtcatatcagggtcattttgttttctttgctggtgctttgattcttcagactttagcaagaaagacctgtaagaatgttgnttctacactttgggaggctgaggctggcggancacctgaggttggganttccagaccancctgccaatatggtgaa

SEQ ID NO: 24565 - DNA, 605 bp, Homo sapiens
aattcggcacgagggattcaaaacatcagtgtttgaagctaaatgatggtcacttcatgcctgtcctgggatttggcacctatgcacctccagagaatcatctcttttgaaaaatcgattcatcaaatgaatcttcagccaacaactgttcaagaaggatgcaaatatcacaggttcctaaaagtaaagctttagaggccaccaaattggcaattgaagctggcttccgccatattgattctgctcatttatacaataatgaggagcaggttggactggccatccgaagcaagattgcagatggcagtgtgaagagagaagacatattctacacttcaaagctttggtgcaattcccatcgaccagagttggtccgaccagccttggaaaggtcactgaaaaatcttcaattggattatgttgacctctaccttattcattttccagtgtctgtaaagccaggtgaggaagtgatcccaaaagatgaaaatggaaaaatactatttgacacagtggatctctgtgccacatgggaggccatggagaagtgtaaagatgcaggattggccaagtccatcggggtgtccaacttcaagtcgacgcgg

SEQ ID NO: 24566 - DNA, 433 bp, Homo sapiens
  misc_feature (1)...(433): n = a,t,c or g
gggatcacttgaacccaggagttcgaggctgcagtgagctatgatgtggtctcattggactctagcctgggtgacagagtgagaacctgactcaaaaaaacaaaaaaagaatgaaggtaacagcatctttgttcttcagacagattctctctgacatctacctcccaatttctgccccatataattttatggctaaaaaacatttaccttctattcttaaccataattaagtattccacagactgaccgtaaaacatgaaaatcacttaaacagcatttattaggttggtgcaaaagtaattgtcatttttgccattgaaagtaatggcaaaaaccatattgcagtattctctaatattattttctctgaagaggcaaaatggttataagaattgctcttcttggctggacatgggggctnatgccngggaat

SEQ ID NO: 24567 - DNA, 465 bp, Homo sapiens
ccctatgacatgattacgaatttaatacgactcactatagggaatttggccctcgaggccaagaattcggcacgaggccatagctgttaaggaaatgagaaaaacatttcctgtcaagaggctgtgaaattaggagtacacatgagaccctggccttctgtaactttagtagcttaggttccttgctttgtgtacttagtaagtatgaacaagataaaatatttcttctgtgataaataagtatcttattatattcttatgagttttaccccttagtgaattactttagagattcttgtggtttgaaccttatttgtgcaccttcagtgagctgaggtgcaaatattgggcttaaggttttgtctagagttggaagatgctgattgggaggtaaggggcctttcactactgggtctacttctcaaattcaccctttgcatgtggctatcaagtttgaaaaaccgt

SEQ ID NO: 24568 - DNA, 234 bp, Homo sapiens
ggggggctacatgaccaatgccttccaatatgtgcagaagaaccggggtattgactctgaagatgcctacccatatgtgggacaggaagagagttgtatgtacaacccaacaggcaaggcagctaaatgcagagggtacagagagatccccgaggggaatgagaaagccctgaagagggcagtggcccgagtgggacctgtctctgtggccattgatgcaagcctgacctcctt

SEQ ID NO: 24569 - DNA, 446 bp, Homo sapiens
catgattacgaatttaatacgactcactatagggaatttggccctcgaggccaagaattcggcacgagcttattcaatatggcttttgacttctcttataacatggacttttctatgaaacaggcactgaaactaaaggaaatgatggaagaaggattggcactgatagaaacgtttttagagaaactaaaaagtaaagcagacagaaattatgatgtatttcatgaagttacactgaatgtgcctgcctctcccgcctcccttccacctcctccatgtcttccacacctgagacagcaagacccgtcccttctcttccttctcctcctcagcctgctcagtgtgaagaggatggggatgaagatctttgtgatggcggtccacttccactcaatgaatagtaaattttctctttcttatgattttcttttcttttttcttttttt

SEQ ID NO: 24570 - DNA, 1348 bp, Homo sapiens
gcccgaggccgcacaacctatcaggctctgccctgcctaccctccatgtatggctatcctaatcgcaactggaaggatgcagggctgaagaatggtgtaccagctgtgggcctgaagcttaatgacctcatccaacggttgcagctgtgctaccagctcaccacagttggcaaatttgaggaggctgtggaaaaattccgttccatccttctcagtgtgccacttcttgttgtggacaataaacaagagattgcagaggcccagcagctcatcaccatttgccgtgagtacattgtgggtttgtccgtggagacagaaaggaagaagctgcccaaagagactctagaacagcagaagcgcatctgtgagatggcagcctatttcacccactcaaacctgcagcctgtgcacatgatcctggtgctgcgtacagccctcaatctgttcttcaagctcaagaacttcaagacagctgccacctttgctcggcgcctactagaactcgggcccaagcctgaggtggcccaacagacccgaaaaatcctgtctgcctgtgagaagaatcccacagatgcctaccagctcaattatgacatgcacaacccctttgacatttgtgctgcatcatatcggcccatctaccgtggaaagccagtagaaaagtgtccactcagtggggcctgctattcccctgagttcaaaggtcaaatctgcagggtcaccacagtgacagagattggcaaagatgtgattggtttaaggatcagtcctctgcagtttcgctaaggccccctttgtgtgcatgggtcaagtcaccatatgttccccccagagaatgtgtctatatcctccttctaacagcaccttccccctgcagctactcttcagatctggctctctgtaccctaaaacctagtatctttttctcttctatggaaaatccgaaggtctaaacttgacttttttgaggtcttctcaacttgactacagttgtgctcataattgtccttgcctttccagcttaattattttaaggaacaaatgaaaactctgggctgggtggagtggctcatacctgtaatcccagcactttgggaggctacggtgggcagatcatctgaggccaggagttcgagacctgcctggccaacatggcaacaccccgtctctaataaaaatataaaaattagcctggcatggtaagcatgcgcctatagtcccagctgctcaggaggctgaggcatgagaatcgcttgaacctaggaggtggaggttgcattcaactgagatcataccacttcattccacctgggtgacagagcaagactctgctcaaaaaaaaaaaaaa

SEQ ID NO: 24571 - DNA, 352 bp, Homo sapiens
gtttttttaagcaacaaagctccaagaaggctcatatctgaaaaaagaaatagagtgtaacatggagggacagagcatgacgagaacctggctaacatgttcacgaaactatgccaggatatagatacggtttactttctcataagacactactgctgttctttctttagtcattttgccaaccttcaaatgactttagaaacaaagcaagagtgaaaatgagacaactcagatactgtcattaaacattcaggaacatgcagaaattttggcagtcacaagtctgaacaaaaatctccagttgtaatctaaaaattacttcctaagagtttctttctgatcattagtgaag

SEQ ID NO: 24572 - DNA, 384 bp, Homo sapiens
ggtaacataaaaataatttggaatgataaagtacctatacgaacagattttttctttcaacaaacatactaaatgtctataatgtaccagccgtagctaagtgagagagacagagtaggtaaaaaccagtttctttctttggtggaggtgaggtagggaatgagacacatgtaaataattaaaattgaatacaatgtactttaataaaagcatgcctactgtgccttaagaaatgaaaaccatgaaaaacttggctaaggataggggacaacgggtggtctctgaagaagaattattaaacatgacattggagctagtcccagaaagctgaatgggggtttactaggcagagaaggagatgtatagcaaggggcagatgttcta

SEQ ID NO: 24573 - DNA, 526 bp, Homo sapiens
  misc_feature (1)...(526): n = a,t,c or g
aaaaatttgaanccgatcacctatgacatgattacgaatttaatacgactcactatagggaatttggccctcgaggccaagaattcggcacgaggctctgctgtgtgctctattccaaccatgggctggatgtgactttcataactgaaggtcaaaggcccctctttccagtataggagagaataccccatgaatgagaaagactgaaaaatatgaaagagaaagaatagtaacacaactggaaagaattaagctgtgtcttacaatgttggaatgtagattatgttgggaaaaaatggaaaatttccagccttctacactggaacccaaccccccctacagtgtcaggaaattagaaacttaaactgtcacaagaaatacaatgggctgtaaagaacgtctacaccacttatcagggagaaagccctgctgactgccaattctttacaagggctgtggctttagtctcaaaattaagatgcccagaactttggcatgagactttggaatggaacactcccagtgg

SEQ ID NO: 24574 - DNA, 450 bp, Homo sapiens
  misc_feature (1)...(450): n = a,t,c or g
gacagaggaagctattcctggcttttccactccaacccaggccaccctttgtctctgccccagagttgagaaaaaaacttcctcccctggttttttagggagatggtatcccctggagtagagggcaagaggagagagcgcctccagtctagaaggcataagccaataggataatatattcagggtgcagggtgggtaggttgctctggggatgggtttatttaagggagattgcaaggaagctatttaacatggtgctgagctagccaggactgatggagcccctgggggtgtgggatggaggagggtctgcagccagttcattcccagggccccatcttgatgggccaagggctaaacatgcatgtgtcagtggctttggagcaggctagctggggctcatcgagggtctcagccgaggccactgcagtgccagtgcccccctnaggg

SEQ ID NO: 24575 - DNA, 527 bp, Homo sapiens
cggacgcgtgggcggacgcgtgggctgcttgataggggtaataccagggataaagaggcttcaaaagagaaaggatcagagaaagggagggcagagggagaatgggaagatcaggaagctctagattacttcagtgataaagagtctggaaaacaaaagtttaatgattcagaaggggatgacacagaggagacagaggattatagacagttcaggaagtcagtcctcgcagatcagggtaaaagttttgctactgcatctcaccggaatactgaggaggaaggactcaagtacaagtccaaagtttcactgaaaggcaatagagaaagtgatggatttagagaagaaaaaaattataaacttaaagagactggatatgtagtggaaaggcctagcactacaaaagataagcacaaagaagaagacaaaaattctgaaagaataacagtaaagaaagaaactcagtcacctgagcaggtaaagtctgaaaagctcaaagacctctttgattacagtccccctctacg

SEQ ID NO: 24576 - DNA, 357 bp, Homo sapiens
gtgggggatgatctcacagtgaccaacccaaagaggatcgccaaggccgtgaacgagaagtcctgcaactgcctcctgctcaaagtcaaccagattggctccgtgaccgagtctcttcaggcgtgcaagctggcccaggccaatggttggggcgtcatggtgtctcatcgttcgggggagactgaagataccttcatcgctgacctggttgtggggctgtgcactgggcagatcaagactggtgccccttgccgatctgagcgcttggccaagtacaaccagctcctcagaattgaggaagagctgggggatgaagctcgctttgccggacataacttccgtaatcccagtgtgctg

SEQ ID NO: 24577 - DNA, 363 bp, Homo sapiens
cgccttcaagaaacacaagttaaatacaaagatgcaaacaggttaaaataaaagaatggaataatatataccatgcttacgctagtcaagagaaagctagagtagaaatactaatatcaggcaaagcatatttcagagttaaacacaacatttttccactatttgcagtcaaaagtatcgttaacactctctttactctgctcaaagttacagagttcttttgtataaacattagaacacttatcacagcctgcctataatggagaataattccatgttgtatactatacaacactcttactaaagtccattagacagaaatatgtagcatttaagacaccttccaattataaaactctatgc

SEQ ID NO: 24578 - DNA, 370 bp, Homo sapiens
  misc_feature (1)...(370): n = a,t,c or g
ttctatcccagagaggccaaagtacagtggaaggtggataacgccctccaatcgggtaactcccaggagagtgtcacagagcaggacagcaaggacagcacctacagcctcagcagcaccctgacgctgagcaaagcagactacgagaaacacaaagtctacgcctgcgaagtcacccatcagggcctgagctcgcccgtcacaaagagcttcaacaggggagagtgttagagggagaagtgcccgtcgacgcggccgcgaattccagatctatgaatcgtagatactgaaaaaccccgcaagttcacttcaactgtgcatngtgcaccatctcaatttctttcatttatacatcgttttgccttctttt

SEQ ID NO: 24579 - DNA, 425 bp, Homo sapiens
gtgtgcccatctctgacagatctttcccatgtggctcttcctttctggaaattcaccagtgttcaccagccccatcaagaaaactatgaacatattatacacattattctaactttagattggatatggattaaatgttggcatcacctggttctgtcagattgcctcatctggctccttagaaaccaaaatgggagaattcacatgttttggttgttaaatcatagttccagctgtcagaccatactgcttgtgctagaggaatagggaacgatgtgtgtgggtggcaggaaaaaggcagacactaaggggcatttataaccaacataaatatgtaataaaggcaatgtcagtataaattaaatacatacaaaataaaggcaattattaatatgtaagcataggctccagagatgtttcagttt

SEQ ID NO: 24580 - DNA, 338 bp, Homo sapiens
  misc_feature (1)...(338): n = a,t,c or g
cctctgtagccaaaatcatgtaacttgtattccagaccatctaagttaccagaagtttctaacaaatatttggccaatattttcttctgctctctagaatttgtggccactgtgattggataccaggactgaacaagaatagtctcaatccaatttgtaagccagtaacactctggatctgtgttttccaccgtgaagagaacatttcctctgggaatgacaaagccctcaggaacagcttttatttctattggaagatgcccatcatacttctcaagaatgtagttccatcccttttcatcanagacntcatcttgnaaangttctttgaanacatc

SEQ ID NO: 24581 - DNA, 414 bp, Homo sapiens
gcggcacgagaataccctggaatctagtgtttgatgcactccactgctatgactttcaatactgatgattgtgatggtggtggtggtagtgatggtagtgactgagaggaaaaaggatttcaggaatcaaatcccaagaaaatagtgtgtttcccaagaagtactctaagcagtttaatacctttgactttgacctgaaaatggctgcattcagaacagggaagaagagtgaactcctctgcttggtacatggaatagtctgtgcttgcgaccacaatctggtctccaggtttccaactactaacatcatctagcaaatttagcttcactccatctacaacctctacccggaatcctgaaagagaaacgccttcaatccattcactataagctgtcacagagaacttctggcca

SEQ ID NO: 24582 - DNA, 420 bp, Homo sapiens
  misc_feature (1)...(420): n = a,t,c or g
gggttgtgagaattaactgaagaattcagagatgcatggcacataggaggcacttcctaacccacctaaagaaagcaaacccacagggcagcaaatcagaaatggatgagggctgacctcctctttattcagtagcacatgtctaatagacccgactgtgtctcgcacatgctgcccctgaggaagacttattatagggagctacaaacagtgtcacctgggaaagacagtgaactcagttatagaacaagaacacctgcccgggctgactgggggccaggatgcagggaaggctgcctggaggaagtgacatacccctgagtctcaattggccagggaaacaactgagcaatgatttgtgaaaatgagttcagtagagggtaataaaaattgggagtcctggncagngctnaccccttt

SEQ ID NO: 24583 - DNA, 302 bp, Homo sapiens
ggcctcgctggctgtattccttatatgatgctgtaagtaacttaccttaaatttactttatatgtggtaggccatgtcataattaagggtcattaaaaaacaaaggtttagtttttccagtttctagtgccttataacttaagatatcgttaagagtggtggctcacacctgtaatcccagcactttgggaggccaaggcagggggattgcttgaagccaggcattcaagaccagcctgggcaacatggtgaaaccccatctctacaaatacaaaaattagccaggtttggtggcatgtggc

SEQ ID NO: 24584 - DNA, 352 bp, Homo sapiens
ggtctcaggagccatatcacatctgtcccttggggagatcccagctatggcacagccgtttgtatcctcggaagaacggaaggaacgatgggaacagggccaggctgattatatgggagcagattcctttgacaacatcaagaggaaacttgacacttacctccagtagaaacactgcatttttctgtgaacacatccacttcacaagccttgtttctgatacttagtatctagagctgggttgagaaaagtctgttacagttgctagaggttttcattaaaacttatcagatgagaggctttttttaggataagaggtgagaactgggcaaaagttgtgaagcagcaattc

SEQ ID NO: 24585 - DNA, 517 bp, Homo sapiens
  misc_feature (1)...(517): n = a,t,c or g
gacacgcgttgtctgtgtcggttttcaataacaagaacagtggcttctggcacagcagcttaattgaccggaacctcattgattattttgttcccttcctccccctggaatacaaacacctaaaaatgtgtatccgagtggaaatgcagtcccgaggctatgaaattgatgaagacattgtaagcagagtggctgaggagatgacatttttccccaaagaggagagagttttctcagataaaggctgcaaaacggtgttcaccaagttagattattactacgatgattgacagtcatgattggcagccggagtcactgcctggagttggaaaagaaacaacactcagtccttccacacttccacccccagctcctttccctggaagaggaatccagtgaatgttcctgtttgatgtgacaggaattctccctggcattgtttcaacccctggtgcctgcaggcaaccanggaccacgggcnaggactnaancctcccgaacaccncnananggaagg

SEQ ID NO: 24586 - DNA, 424 bp, Homo sapiens
  misc_feature (1)...(424): n = a,t,c or g
ggaanttttgaanaccgttatgactgattacgaatttaatacgactcactatagggaatttggccctcgaggccaagaattcggcacgaggactgttttggtttgaaatgaacagattggtaacctaatttgtggcctcctgacttttaaggaaacgtgtgcagccattacacacagcctaacgctgtcaagacattgcttcaacattgccttcattccttaaaaacctacaaaaggtggtgtaaattaatatggataattttatttacctccaggtctaaaaggtagtgtgacccaaatttgtataaagatttttcatgtgaaaggactggggttttagcaaacacaggtctaatctcttttgtgtttttgtgcaccaggcccggctgcgtagcagttgagtgatgctggttagctattaagg

SEQ ID NO: 24587 - DNA, 445 bp, Homo sapiens
gggtttgaggaagagaattccagcagaatcctgtaataacacgcctcggcatgacatggatcaggatagaccccctgagtaagctcatgccacagtgggaggaacctcccccttcaggggagtctgggctgggctctgggcccaggcactgccctgggggtcagaggccattccagcatctagctcagtgtgaggcactgttctaagtgcagggaaccacagtatggggtcaggttcatgtcctgtttctgcctaagttaactcccaggcaacctctccctgaaacacttcctctcccaaagagggccttagaatccatgaagctcctaggccaggcccacctgtgatcctgtaaacttttctctcagaaaagccccatctcaggctaggcatggtggctcacgcctataatcccagcactttggaggtcaaggtgggcagatca

SEQ ID NO: 24588 - DNA, 401 bp, Homo sapiens
ggagaacctctgtatgtctcacgtaggaattttagtaagtaaaatagaattaaagacataacagccaggtgcagtggctcgcacctgtaatgccagcactttgggaggcctaggctggcggaccacttgaggtcaggagttggagaccaggctggccaacatggtgaaatcctgtctctattaaaaatacaaaacttagccaggtgtggtagcaggtgcctgtagtcccagctactcaggaggctgaggcttgaaaatcgcttgaacctgggcagcaaaggttgcaatgagctgagatcatgccactgcactccagcctgggtgtcagagcaagattgtatctcaaacaaaacaaaacaaaacaaagagttaaagacataaaagactcaaaatgggaacca

SEQ ID NO: 24589 - DNA, 397 bp, Homo sapiens
gcacaaaggaacacaacctgtgcttcctctagacattctgacttggcaggtgcaaggcagatccaagaatctcatgccagcaggctcccaggtgccgctgatcccaccagtccgtggctttgtaagggcatctgctgtgttgctggctgggcttccatcctcctgcctcctgggtccaacattcctgttttccttgggagcgagcccatccccgactcccattcacggggtccagaaacaggagtgggtggggacctgggccgtggccactcagaacagccctgtcactggctgcagcaattggtacaggcatgggcacgtgactcaagaccggccaatgagagccgaggagtttttttctaggacgtatttaaagagattatttccatggctgtgc

SEQ ID NO: 24590 - DNA, 350 bp, Homo sapiens
gcagcttgcttctgtcttgcaaagattgcaaattcaatggtgagcacatggacaggaccaccagccatgaagtcactcttcactaggatgttttgttgtaaaagttgtccaaacattgtgaaaacaaacaactttatgagctttcaaagctattttctacaaaagactatgccagttgcaatggctttattaagagatgttcataatctttgtcctaaagaagtcttaacgtttattttagacttaatcaagtacaatgacaacaggaaaaataagttttcagataactattatcgtgcagaaatgattgatgccctggccaactctgttacacctgcagtcagtgtgaa

SEQ ID NO: 24591 - DNA, 416 bp, Homo sapiens
gacctgtagtcccagctacttaggaaggttgggtgggaggatcatctgagccagggagggcgaggctgcaatgagccatcagtggacaacagagtgagtctcaaatgagtgagtgagtgagtgaaatgacaagggggtcagctggaagaaaatgttggagagattcccactctgaaggtttcttttgtaggagacaggtcagggttattaaatagtgctaagcccatgggatgttccagacctcaataataaagtaaatgtaaataaatcccttgaaccagatggcatccacccaccacttctgcaagaacgcaggggtgcgattgtggaacattgccaaatggaggccctgtctttacagacatttggtgaattgccagtttgatccttccacaagggttcaaaggaaaccttgg

SEQ ID NO: 24592 - DNA, 359 bp, Homo sapiens
tgcatggccacttttgagacacaagctgatcacaggaaatatgccactattaaaagaaacccaggagaacaacatagagtggggagaggacattcctaaataatgggagggtgctgttaccaaaggatgggggaaagagatactgaggagatagaaatatcagatgttcacaccataccatgagtatggaagagaggaagaactctggagaatgtttcaagaaaaacagtaaaagccaaggtaagaaaaaaatgtgctctgagtataagagaaacaaactgttgattacatggtagatgctgacctgaacggattaaaacgtcagcaagtggatcacattaagactgtgaaaagagtta

SEQ ID NO: 24593 - DNA, 357 bp, Homo sapiens
ctgagttgtcagccgttgttttttcgtgctcgctagtcgccgcctccgctccgccatggggaagcgacagcaccaaaaggacaaaatgtacattacctgtgctgaatacactcacttttatggtggcaagaagccagatctcccacaaacaaattttcgtcgtttaccttttgaccactgcagtctctctctgcagccctttgtctacccagtctgcactcccgatggcatcgtctttgacttactgaacattgttccatggcttaagaagtacgggaccaaccccagcaatggagagaagctggacgggaggtccctgatcaagctgaacttttccaagaacagtgaggggaagta

SEQ ID NO: 24594 - DNA, 422 bp, Homo sapiens
  misc_feature (1)...(422): n = a,t,c or g
gggttggtgagcttgtaattatgtggttctcaacaccttaaatcctaagcctagtctggctgatcttttctctttttgagacggagtcttgttctgtcatcaggctggagtacagtggcacaatcttggctcactgcaacctccacctctaggtttaagcgattctcctgcctcggccaccttagtagctgggagtacaggtgccgtcccaccacacccagctaatttttgaatttttaatanagatggggttgcactgtgttagccaggatggtcttgatctcttgaccttgtgatccgcccgcctcagcctcccaaagtgctgggattacaggtgtgagccaccgcacctggcctctctggcttttgttttctaatgctttgttagatgttctttggcttgctttgtgaaatagncatgg

SEQ ID NO: 24595 - DNA, 385 bp, Homo sapiens
  misc_feature (1)...(385): n = a,t,c or g
cctgaacttgcttgtttgttctaggagattcttttatggattccttaggattttctacgtagacaatcatgtcatttgcaaattggataatgtttctatcaaatctatgtgccttttatttttctttgtggcctgtgttgactaggactttcagtactatgttgaacaagaatagtgaggatggatattctttcttggtttcaaccttgagggaaaaggattgtctttcctattaagcattacgttagttgtaagttttttggtaaacgctccttatcatgttgaagaaggcccttttattcgatgcttgcttggaggntttaatcatggagtgagtggtgattttttttcttttttgagaacggagcttgctctggcnacgcgg

SEQ ID NO: 24596 - DNA, 339 bp, Homo sapiens
gcctatttctaaataaggtcatgtgcacaggtactagagattaggaatatgaacatatctttttgagaaatacacttcaatccataacaaatactaatgattctaatccgttatattacctctcccaaacagacagaatttatgccactaatcaactagttatggctgaagtttgttgtttggacattgaccaaactccagtagcccctggtggtagcttactcaatgcacgaaaagtatctaagatattaacttactttgaatgttaactttggaaacctaaaaatataaagtaactataggaaggttataggcagaaagtaattgtttaatattccc

SEQ ID NO: 24597 - DNA, 477 bp, Homo sapiens
  misc_feature (1)...(477): n = a,t,c or g
gagaaaaaatttgaancctttggaaacnncttgactgattacgaatttaatacgactcactatagggaatttggccctcgaggccaagaattcggcacgaggaatcaatactccaagaagatataacagtccttaatgtgggtgcacctaacaacagagcttcaaaatacatgaggcaaatctggtggaactgcagagacaaatagatgaatccattattatatgtgaagacttcaacacccttatatcagaaatggacagcaccaggccaaaaatcagtaaggacatagttggactcaacggcaccatcaattaattggatataattgacatttatagactactttagccaacaacagcagaaaagacatttttctcaagctcacgtggagcattcacctagatggaccacattctgtgctatgaaacacacatttacaaatttaaattgcatgaatagagatcatacaatgtctg

SEQ ID NO: 24598 - DNA, 462 bp, Homo sapiens
  misc_feature (1)...(462): n = a,t,c or g
tttgnnacccctnttcgngatcccnaatttaatacgactcctatagggaatttggccctcgaggccaagaaatcgagggcncagngnaattcggcacgaggaatcaatactccaagaagatataacagtccttaatgtgtgtgcacctaacaaccgagcttcaaaatacatgaggcaaatctggnaatagatgaatccattattatatgtgaagacttcacacccttatatcanaaantggacagccccnggccnaaactcgtngggacatagtnggactcaccggaccatcattaattggntaattgcattantggactacttagccannccngnnaagagancttttttnaagcnccgggngccctttccnaaattggcccntttggggtttaaccccntttccaattnaaatgcctggatanagattttcnctgggtggtttctaaccctatgnaaatt

SEQ ID NO: 24599 - DNA, 376 bp, Homo sapiens
agcgcggaccggcgtgtccttggacttagagagtggggacgtccggcttcggagcgggagtgttcgttgtgccagcgactaaaaagagaattaaatatgggtgatgttgagaaaggcaagaagatttttattatgaagtgttcccagtgccacaccgttgaaaagggaggcaagcacaagactgggccaaatctccatggtctctttgggcggaagacaggtcaggcccctggatactcttacacagccgccaataagaacaaaggcatcatctggggagaggatacactgatggagtatttggagaatcccaagaagtacatccctggaacaaaaatgatctttgtcggcattaagaagaaggaagaaagggcac

SEQ ID NO: 24600 - DNA, 376 bp, Homo sapiens
gagtgaggagtggaaggagacgtgtgcctggtaatatggggcggaatttccactcagctccatttgctggggatttaaagagaacccttgtgctacgccaggcagttaccgagccgaagggagatgatgggccttcgcccctcagtgggatggcagctgagggggccctgcatttgaccgtcgagactgcagcagcgcctttcctgtctgtggtttaagtctttgcagtcaagtactgatgcatccaagccaggcccatgcctggtgtctccctgactgcagaggagccccagggcaaggacagctcagctgctggcagcctgcctggcccatagacatcccccaagtagtctcaggcctctgacatgtccctgag

SEQ ID NO: 24601 - DNA, 376 bp, Homo sapiens
gggttgaaaggaatcacaaacaccatggttgagtgagaacagaagtcaaggcagggaatcaggagctcaggaatacagctggaggcctgtgtgggtgagatgattctggacaaaggctggctcagggcaacgcgcagaatgcccaccccactcccataccacaggagtagacccacagacttgggatctactggccacatgaggttagaaagctctaacagcataagcacaaagccttgtttatctatcttaagaaagatggaggggagatgactgcaggcacaaactggtaaatagggtctgtggtttggttagtaagtgttcattgtcgttttcctgctttgattatgcactgtggttatggaagatatgactg

SEQ ID NO: 24602 - DNA, 611 bp, Homo sapiens
  misc_feature (1)...(611): n = a,t,c or g
aaccacatgatctatcacagggaacccggtttctgaggttaagaacctggtatgagaaagagttcctaacgcagtagtatagggcgtgttcgaaagaggtataatcgtcgcggacccctcgttctgtcttactctcttcacgcacaacgaagttccgcccaaaggggtacgcggggtcggacgccaagtatggtcctcccccgcttaccattcgaaaataaccctcaagacaaaaggaaggcgttacccttccattctcctatttacttcttcttattaaacgcacctaatccaaaatcgcgagagagagagatcgaacgattccttctagcccctttccctctacctaggagacatcgaacacttgttagcccgcagccggcccttccttatccaaggtatatgtcgatcgtactacccttccactcgncaacttcgtccacgcgagcgcgaggaaagctcccgagagggtacgaaagcgttttccacacacgctcgggatccccaagagtcacacctaagggtcgggnttntcccgcttatggacccanggggggaaaaaaccccgtttnccccnnanttcttaacnccggggggaaaaaaaaaaaaaa

SEQ ID NO: 24603 - DNA, 521 bp, Homo sapiens
  misc_feature (1)...(521): n = a,t,c or g
tntntncnctttgatncataccttgacatgattacgaatttaatacgactcactatagggaatttggccctcgaggccaagaattcggcacgagaggaatgatagctttaggctgagctagctctacttttgtgatgttatttgtacttacttgatgttcaatccctacactcttgttttttctgtcagaaaatatggtctactttgccgggcgtggtggctcacgcttgtaattctagcactttgggaggccaaggcagggagatcacttgaggtcaggagtttgagaccagcctgaccaacatggagaaaccccatctctactaaaaacacaaaattagccgggcgtggtggcacgtgcctggaataccagctactcaggaggctgaggcaggagaatcgcttgaacctgggaggtggaggttgcgatgagccaagatctcaccattgcactccagcctgagcaacaagagtgaaactccgtctcaaaaacaaacaancaaacnnacaanaaaaaaacc

SEQ ID NO: 24604 - DNA, 391 bp, Homo sapiens
  misc_feature (1)...(391): n = a,t,c or g
gtggggattctgaccatttatacctcatataaggagaagagcatctttctcgtggcccacaggaaagatcctacaggaatggatcctgatgatatttggcagctgtcctccagtcttaaaaggtttgatgacaaatacaccttgaagctgaccttcatcagtggtagaacaaagcagcagcgggaagccgagttcacaaaggccattgctaagttttttgaccacagtgggacactggtcatggatgcatatgagcctgaaatatcnaaagaannataaagnagccaattctnaaagtagccctctttctnctggntcttgntagaattacnnggctttggtggntgggggagnattnnttngnannnnanntgnntttcgnttgaggagg

SEQ ID NO: 24605 - DNA, 445 bp, Homo sapiens
cgaatttaatacgactcactatagggaatttggccctcgaggccaagaattcggcacgagcagaatacaacattgagtcttcccatccaagacaattgtaaagcctcttcctgtctcaggctctgttttggtgacatgctcaagtcttatagtagattttaagacactcatgaatgggatgtgtatgtaccttgatttagtagtgcttaaatacttgttgaaggaatgatagctttaggctgagctagctctacttttgtgatgttatttgtacttacttgatgttcaatccctacactcttgttttttctgtcagaaaatatggtctactttgccgggcgtggtggctcacgcttgtaattctagcactttgggaggccaaggcagggagatcacttgaggtcaggagtttgagaccagcctgaccaacatggagaaaccccat

SEQ ID NO: 24606 - DNA, 451 bp, Homo sapiens
acgaatttaatacgactcactatagggaatttggccctcgaggccaagaattcggcacgaggttcgtcaggatggtctcgatctcctgacctcatgatctgcccaccttggcctcccaaagtcctgggattacaggcttgagccaccgcgcccggccgaatccgcctttctttttaatctgtatgaggtgttgggttgtcttctgatgtttccatctgtgtcctgtgtgatcgtagatactgcatgccactctctgtccagcacgtgatgccctttgcaacctcctttctcacccaccctggggcttgggagctggagatgggggaataggggtggtcaagtgaaatattaaaaatcagactcctatagacacagtttgcaggtgttatatggagttccttctactgattcattctactgcattacatttttatggtaacttaataggcta

SEQ ID NO: 24607 - DNA, 357 bp, Homo sapiens
ggtgacctgtctctccctgctctggaggtggtgcaggggcagtggcctgcttttctgtgaatgacacctctggtctacaggaagggtactgtgtgagcataggagcaactggtcttctctccttgcctctcccagcataagacctccacccagtgagtgagatggagtgaatgggacccagtactcagaatgctatgcctagcgtagagcttcccctccatgagtaaaggctggactgaggtagggacccctctgcttcttggtctagaatagagcttctgccacagagttggcaggggtgggagctgtgaattgtcaatgttggtagtctccccctccctgggagaaaccataacc

SEQ ID NO: 24608 - DNA, 443 bp, Homo sapiens
  misc_feature (1)...(443): n = a,t,c or g
gtatgttttagctgaaaagaacatttcattgagttttggagagcaggaagggcatttcatctgggtgaatggtgccctgaaacaatcagacttgaacctagcccggtccctttgggtttaagaggtggccctcaggcatgacccatgcccactccgcctatccccaggggtcaggctccagcctagaggcagtggacaggttgccagactgataccaattctggccagcaccaccctgccatttccaactcagaaatgggtgggggagaaggagcattcagctccagttccaaacggatggtatttactactcacatcaatcccttgccatgtgtctttttagctttgaccaaccaaagggaaaagaaatgccttcttttctacacctcctgagtatcttacagaaagacccattctttctggcttggtaaaagngtgaaggg

SEQ ID NO: 24609 - DNA, 335 bp, Homo sapiens
gggaaaagaaggaggaaatggtatgtccaaagggtcatggagggcacagagctctcaaatgatgagcaggtgatggagttgtaataggagcctgaagaggcagactatagctaaaaaccatgtgaggactatgacctcaccttgagagcatgggaaatacccttgaactgctgaaagcaggtacctatggtgccagttttcagtgtggagaaggatggagaggagctcggtagcttcaggccacgctgggccgattggctgactggattactggagtgggtttcagtagagagcctttctatctattgcatttctcaacctgtttatatgtgggt

SEQ ID NO: 24610 - DNA, 445 bp, Homo sapiens
  misc_feature (1)...(445): n = a,t,c or g
gctggaagagagaaaactggacaaaaattggccttttaaaaagctgaaaagtaatgagtatgattcataagttcaacagagataggagggacatggaaaaggcatggcgtacatctgggaatagcgaatgcatatcaaaaggcttcatttcttttgttctttcatgaggcttgtagcacatcaaattttgaatgtcttcttttaaagctatgtgcgcacacacgcacgcacacacatatgcgggcacacacacacatcctccctctgaactgatggtgtttagtatcgataacattttctttcttggtaatacgaggtaaatgaggggggcaaaaacttatgacttctgagtaaaatgccatgtcttctatattccgtgagctgcacaagtcttgcaggaatgctccacatttcagagtnaatctgaaactggnntaaaagctcc

SEQ ID NO: 24611 - DNA, 426 bp, Homo sapiens
ggtgtaatacagcagatttttgtctggtttcatctatgtttgatccatttgggatcctgaggcttagatctttccacagttgttttttgggtttggggggctttcttttccctctgtctctctctctcctctctctctcttttttctctttctctgtctctttctttttccctcagcagattctcattctctatcctctcccctcccctccccacatttctttctttcagaaatttttaaatgctggccaggtgcgatggctcacaactataatcctagcactttagtaggccgaagtgggcagatcatttgaggccaggagtttgaggtttgagaccaacatggtgaaaccccatctctactaaaaaattagccaggcatggtggcaaagcacctgtaatgccagctatgtggggatgctgaagc

SEQ ID NO: 24612 - DNA, 589 bp, Homo sapiens
  misc_feature (1)...(589): n = a,t,c or g
ggcctcaagtgactcagcctggttggagaactgggccacccagtatcttctgtgccatggttcccacattcgcactccatggcctcctgtcctggaccccacgtctgcaaggaaaccctaggaccatggatacctctgtgattcacgctgagcccaagtccccacactggaaaactgggaaatggccagctgtgtgtcccaggaaattcctccccttattcttccttgaagtgcccgagcatgtagggcaagaaggaaggctgaagcgctgtccctaggaggaatttctccttcaggggagcctcagttttgcccatttatctaattgaatcagttttttacccaatcccccgattttgtaggataatctcccttatctaaagtcaactgattatggactttaatcacatctacaaaacacttccatggcgacagctagatgagtgtttgaataactgggactgtagcccgtccaagttgacacataaaactgaccatcgggccgggggcggtggctcacgcctgtaatcccaacactttgggagcccgaggcgggcggatcacaagggcaggagttccnagaccacct

SEQ ID NO: 24613 - DNA, 421 bp, Homo sapiens
gtaaaaattttggacattgatccatgtcagctgcgagacagggaacgacttgttatatgcaccaatttgtcctttaattacttgttaagctttgatttgtcctattatcagaattctcatcctcttctctgcaagtttatgctcgccatggtaggcgactgtagaggtcaccggccccttacagttcagcaagtgtggatttgtgcagacaccgggacgccatcagcacatcgaggcggtagacactcgtcttctcccacggtttccttctgtcacttcatttctgttgctgttgttgtttgcttttgtggaaagaacacttaacgtgagctcagacctctcagagaatttcgaagtgcacagtgccacatggtcagctacaggcacaacgttgtacagcagacctctagtacttactcgc

SEQ ID NO: 24614 - DNA, 890 bp, Homo sapiens
ggacgcagaggcggacaagatggcggcggcagctgtacagggcgggagaagcggtggtagcggaggctgtagtggggctggtggtgcttccaactgcgggacaggaagtggccgtagcggcttgttggataagtggaagatagatgataagcctgtaaaaattgacaagtgggatggatcagctgtgaaaaactctttggatgattctgccaaaaaggtacttctggaaaaatacaaatatgtggagaattttggtctaattgatggtcgcctcaccatctgtacaatctcctgtttctttgccatagtggctttgatttgggattatatgcacccctttccagagtccaaacccgttttggctttgtgtgtcatatcctattttgtgatgatggggattctgaccatttatacctcatataaggagaagagcatctttctcgtggcccacaggaaagatcctacaggaatggatcctgatgatatttggcagctgtcctccagtcttaaaaggtttgatgacaaatacaccttgaagctgaccttcatcagtgggagaacaaagcagcagcgggaagccgagttcacaaagtccattgctaagttttttgaccacagtgggacactggtcatggatgcatatgagcctgaaatatccaggctccatgacagtcttgccatagaaagaaaaataaagtagccaattctaaaagtagccctctttctcctggatcttgctgaattagtggcttggggggtgggggagataaaaagaacttaaaatgggtaaagtaagaaatgttaaaaagtccctgttttgcctgaaattttagtctattctgggtaaataggattttctgacacagatatgaaaagttgtagctctgatg

SEQ ID NO: 24615 - DNA, 323 bp, Homo sapiens
gagttgattagggaaatctatctggcttaactaatgataaaaacaaatttaagaaaataattcctttgggaggccaaggcagcaggattgcttgaggctagatgtttgaaaccagcttaggcaactaagcaaaacgccatctctgcaaaaataaaaaaaaatagctgcacatggtagcacatgcctgtagttctagctactagggaggctaaggtgggaagattgtctgagcccaggagttggaggctgcagagagctgtgatcgcaccattgactccagcttgggcaatagagtgagactctgttgctccaaaaaaaaaaaa

SEQ ID NO: 24616 - DNA, 363 bp, Homo sapiens
gactaaaaatacaaaaaaattagctgggcatggtggcacatgcctataatcccagctgctcaggaggctgaggtggaagaatcgcttgaacccagggggcataggttgcagtgagccgagatcgtgccattgcactctagcctgggcaacagagcaggatcgtctaacaacatcagcaaaaaaaccaaggctgaatttcttgagtgattgagcaggtggctatctattggacagtccagctgaacagtattttcctcaggctgggtgcagtaactctcacctataattccggcacattgggtggctgaggtgggcagatcacttgaggccaggagtgagaccagcctgggtaacgtgcctaaa

SEQ ID NO: 24617 - DNA, 394 bp, Homo sapiens
gaggaaattgaagttgatggcttcctcttccccaagaacacccagtttgtgttctgccactatgtggtgtcccgggaccccactgccttctctgagcctgaaagcttccagccccaccgctggctgagaaacagccagcctgctacccccaggatccagcacccatttggctctgtgccctttggctatggggtccgggcctgcctgggccgcaggattgcagagctggagatgcagctactcctcgcaaggctgatccagaagtacaaggtggtcctggccccggagacgggggagttgaagagtgtggcccgcattgtcctggttcccaataagaaagtgggcctgcagttcctgcagagacagtgctgagctgagtctccgccttgctggg

SEQ ID NO: 24618 - DNA, 354 bp, Homo sapiens
  misc_feature (1)...(354): n = a,t,c or g
ttttaatcttgctactaccgttatacacatatagtgtacagccagaccagattaaacttcatatgtaatctctaggaagtcaatatgtggaagcaaccaagcctgctgtcttgtgatcacttagcgaaccctttatttgaacaatgaagttgaaaatcataggcaccttttactgtgatgtttgtgtatgtgggagtactctcatcactacagtattactcttacaagagtggactcactgggttaacatcagttttgtttactcatcctccaaagttgtcaggttatttattttataatgnccatatgctaatagngatcaagaagactttaggaatggcncgctcaaccgac

SEQ ID NO: 24619 - DNA, 414 bp, Homo sapiens
gaaactgttgtgtgggtgggtttaactttagctccgtaggtagcatcattctgctggggctggacactcacagaggccaatgggctcttccttttccaactcttgccatccaccttccttggcctccccctcccaaccatttgcttcacccgcccaagtctgtgtgattaaaatttttagtacacttggctcattttgaacttttaagcaattttttagagaacaaaacagaagatttttatggcaaactccattaatgccacattaaggctgacattttaattaccccaaagtcaggaaatgcaaagttcaggttcccacagcaacagaaactgtccccttgagtgctggcatcacagcagattctttcattccctgattacacaacactgggtgtggggacattgtttttat

SEQ ID NO: 24620 - DNA, 423 bp, Homo sapiens
acagctatgacatgattacgaatttaatacgactcactatagggaatttggccctcgaggccaagaattcggcacgagggggagaagactgagggacacagaagtggccgaagtgagggcgctgaggtcagcctgagctgagagggccggcagatcacgccgcagccgaagtgaacgaactcgagtgaggaaattactccaggatttgaatcatcacaagagattcaccagaggattttatacacttgggctgtggcagcagactaattacatcacagcactaggctaaagaagaaaaatcacatgatcatatcaatagatgcagaaaaagcatctgacaaaaaccagctctcattcatgatcagaactctcagcaaactagtaatagaggggaacttactcaacttgataaagaacatatgc

SEQ ID NO: 24621 - DNA, 418 bp, Homo sapiens
  misc_feature (1)...(418): n = a,t,c or g
gnnaccttgnanaacagctatgacatgattacgaatttaatacgactcactatagggaatttggccctcgaggccaagaattcggcacgaggcactgtcaaattcctttcatcctttaatagttaagatctttgaatcttcagtctgatttttaatgtaagcaaaaacagaaccattgaatagtaatttcttgagaacctcaggtgttctataaacagtcctttcctgtatgtcttctattaccctaagaccagagttattttggttggttgttttgttttattttttnnnnnngtatccatggctggcactntactcattgnacttganntnatngccccataactannggatcangangatggtagaacggagatctgggntcananctntccnatntangannanngcatnttga

SEQ ID NO: 24622 - DNA, 343 bp, Homo sapiens
agaattcggcacgagccaaatttgggtaccattttatcactgctcaaagcactgtcaaattcctttcatcctttaatagttaagatctttgaatcttcagtctgatttttaatgtaagcaaaaacagaaccattgaatagtaatttcttgagaacctcaggtgttctataaacagtcctttcctgtatgtcttctattaccctaagaccagagttattttggttggttgttttgttttattttttgtttttgtatccatggctggcactttactcattgcacttgagtttattgccccataactaaaggatcaggatgatggtagaacggagatctgggtttc

SEQ ID NO: 24623 - DNA, 502 bp, Homo sapiens
  misc_feature (1)...(502): n = a,t,c or g
atttgaanaacagntatgacatgattacgaatttaatacgactcactatagggaatttggccctcgaggccaagaattcggcacgagcacgttgaatggcaaagatggaaccggttctcatctggtgacagtgcctcctgggcccagtttggctgatgctctcatcagttctccgattttggctggtgaaggtggtgccatgctgggtcttggtgccagtgactttgaatttggagtagatcccagtgctgatcctgagctggccttggcccttcgtgtatctatggaagagcagcggcannnncaggaaggaaggaaggcccggcgggcagcttcagcttctgctgctgaagccgggattgctaccactgggactgaagacttaaaccangccctgctnaanatgaccattagccaacaagantttggcccactgggcttctgacctaancngnatgactgaggaaaagcccantgcttatgccntgcncangtcctgcag

SEQ ID NO: 24624 - DNA, 342 bp, Homo sapiens
ttttttttcctggtccacagaagatgtttatttgatgtaacaaaacaatacagttagtgttagatccaaccacaaagagcaaaaggaatgaaaaatttgtacaatgtacatagaaaaaacaagatatttactgtgacaactatatattcctaaaataatgcttctaaaattactcaattattgaaatctacatgaaaaaaaggatgttaatagcgacaaagtgcataaaatcaaacattgtattttgagcaaattaacatactaggcaattttgctaagaatgcatgattttttttttcttgtttacagtctgctcaaaatatctttataccaacagggtag

SEQ ID NO: 24625 - DNA, 319 bp, Homo sapiens
gaacgtcttggaagagacgagtttaaactaaggctgtggtttaggaatggggtgagatggaggcagacttaagagctcttgaaaaaggccttttcttggctttcataacatccttgctactttgactttgtatctgacaacatctcagtctttgcaaggatgctgtgttttaggtcctctttactcaccctgttcccaatttacatacatgtttgactgcctacttgactaccttggtatcttgaaggtatctcaaactgaacatatgcaaactgaatttataattgtctttaatattccttgtcttagtaaatgtcac

SEQ ID NO: 24626 - DNA, 471 bp, Homo sapiens
  misc_feature (1)...(471): n = a,t,c or g
ggtgnnnnnatttggaaatcgtatgactgattacgaatttaatacgactcactatagggaatttggccctcgaggccaagaattcggcacgagactggaagaattctacagataataaaggggaaagattatgaaagtgagccatcacttttagaattcaagccattcagtaatggtcctttggttggtggatttgtataccggggctgccagtcagaaagattgtatggaagctacgtgtttggagatcgtaatgggaatttcctaactctccagcaaagtcctgtgacaaagcagtggcaagaaaaaccactctgtctcggcactagtgggtcctgtagaggctacttttccggtcacatcttgggatttggagaagatgaactaggtgaagtttacattttatcaagcagtaaaagtatgacccagactcacaatggaaaactctacaaaattgtagatcccaaaaga

SEQ ID NO: 24627 - DNA, 512 bp, Homo sapiens
  misc_feature (1)...(512): n = a,t,c or g
ctcactatagggaatttggccctcgaggcccnnaattcggcacgaggaagaaatggatgggttaagtgatttcacaggctcagtgctacggctggatgtggacacagacatgtgcaacgtgccttattccataccaaggagcaacccacacttcaacagcaccaaccagccccccgaagtgtttgctcatgggctccacgatccaggcagatgtgctgtggatagacatcccactgatataaacatcaatttatcgatactgtgttcagactccaatggaaaaaacagatcatcagcctgaattctacagataataaaggggaaagattatgaaagtgagccatcacttttagaattcaagccattcagtaatgggcctttggntgnnggaantgataccngggctgcagtcacaaagattgtatggaagctacgtgtttggagatcgnantgggaattncctactctccagcatantctgngncgtancatcgngctnnaangccattttg

SEQ ID NO: 24628 - DNA, 1177 bp, Homo sapiens
  misc_feature (1)...(1177): n = a,t,c or g
ggatggagacttcttacccaccaggctgcaggcccagcaggatgctgtcaacatagtttgtcattcaaagacccgcagcaaccctgagaacaacgtgggccttatcacactggctaatgactgtgaagtgctgaccacactcaccccagacactggccgtatcctgtccaagctacatactgtccaacccaagggcaagatcaccttctgcacgggcatccgcgtggcccatctggctctgaagcaccgacaaggcaagaatcacaagatgcgcatcattgcctttgtgggaagcccagaggaggacaatgagaaggatctggtgaaactggctaaacgcctcaagaaggagaaagtaaatgttgacattatcaattttggggaanaggaggtgaacacagaaaagctgacagcctttgtaaacacgttgaatggcaaagatggaaccggttctcatctggtgacagtgcctcctgggcccagtttggctgatgctctcatcagttctccgattttggctggtgaaggtggtgccatgctgggtcttggtgccagtgactttgaatttggagtagatcccagtgctgatcctgagctggccttggcccttcgtgtatctatggaagagcagcggcagcggcaggaggaggaggcccggcgggcagctgcagcttctgctgctgaggccgggattgctacgactgggactgaagactcagacgatgccctgctgaagatgaccatcagccagcaagagtttggccgcactgggcttcctgacctaagcagtatgactgaggaagagcagattgcttatgccatgcagatgtccctgcagggagcagagtttggccaggcggaatcagcagacattgatgccagctcagctatggacacatctgagccagccaaggaggaggatgattaccgacgtgatgcaggaccccgagttccttcagagtgtcctagagaacctcccaggtgtggatcccaacaatgaatccattcgaaatgctatgggctccctggcctcccaggccaccaaggacggcaagaaggacaagaaggaggaagacaagaagtgagactggagggaaagggtagctgagtctgcttaggggactgcatgggaagcacggaatatagggttagatgngggtatctgnaaccattacag

SEQ ID NO: 24629 - DNA, 327 bp, Homo sapiens
ggcaaagaggaactgttgtttgaattttcctgagagcctggcttagtgctgggccttctcttaaacctcattacaatgaggttagtacttttagtccctgttttacaggggttagaatagactgttaaggggcaactgagaaagaacagagaagtgacagctaggggttgagaggggccagaaaaacatgaatgcaggcagatttcgtgaaatctgccaccactttataaccagatggttcctttcacaaccctgggtcaaaaagagaataatttggcctataatgttaaaagaaagcaggaaggtgggtaaataaaaccgcgggcg

SEQ ID NO: 24630 - DNA, 378 bp, Homo sapiens
gatttctctttaacgttataactgagttgagaaaccagtgtcttaagggggaacactagtggcttatcctttagccagaatgagtcaagaacaagatgtccactatctccattcttatttaacattatgttagaggtgttttgttttgttttgttttttctgagatggagtcttcctctgttgcccaggctagagagcagtggcactgtctcggctcactgcaacctccatctcctgggttcaagcaattctcctgcctcagcttcctgagtagttgggattacaggcgcatgtcaccacgcccggctaattttctatatttttagtagagatggggcttcaccatgttggcctggctggtctgaaactcctgacctc

SEQ ID NO: 24631 - DNA, 432 bp, Homo sapiens
gcgtgaatttctttggcaggaagggcacagtgcttttgctaccatggaagaggcagcggaagaggtcttgcagatacttgacttatatgctcaggtatatgaagaactcctggcaattcctgttgttaaaggaagaaagacggaaaaggaaaaatttgcaggaggagactatacaactacaatagaagcatttatatctgctagtggaagagctatccagggaggaacatcacatcatttagggcagaatttttccaaaatgtttgaaatcgtttttgaagatccaaagataccaggagagaagcaatttgcctatcaaaactcctggggcctgacaactcgaactattggtgttatgaccatggttcatggggacaacatgggtttagtattaccaccccgtgtagcatgtgttcaggtggtgattattcc

SEQ ID NO: 24632 - DNA, 391 bp, Homo sapiens
ggctgggtgctggtatctcctctaagtaaggaagatgctggagaatatgagtgccatgcatccaattcccaaggacaggcttcagcatcagcaaaaattacagtggttgatgccttacatgaaataccagtgaaaaaaggtgaaggtgccgagctataaacctccagaatattattagtctgcatggttaaaagtagtcatggataactacattacctgttcttgcctaataagtttcttttaatccaatccactaacactttagttatattcactggttttacacagagaaatacaaaataaagatcacacatcaagactatctacaaaaatttattatatatttacagaagaaaagcatgcatatcattaaacaaataaaatacttttt

SEQ ID NO: 24633 - DNA, 504 bp, Homo sapiens
  misc_feature (1)...(504): n = a,t,c or g
tnatttgaanacctttgaannccntgctatgacatgattacgaatttaatacgactcactatagggaatttggccctcgaggccaagaattcggcacgagccgggagctgctgccctgcggccccgtctgtggctttcagcctctgggtctgagtcatggccgggtgggcggcacagccttctccactggccggagtcagtgccaggtccttgccctttgtggaaagtcacaggtcacacgaggggccccgtgtcctgcctgtctgaagccaatgctgtctggttgcgccatttttgtgcttttatgtttaattttatgagggccacgggtctgtgttcgactcagcctcagggacgactctgacctcttggccacagaggactcacttgcccacaccgagggcgaccccgtcacagcctcaagtcactcccaagccccctccttgtctgtgcatccgggggcagctctggagggggtttgctggggaactggcgccatcgccg

SEQ ID NO: 24634 - DNA, 348 bp, Homo sapiens
  misc_feature (1)...(348): n = a,t,c or g
gctgtcatagagctctacaattttatataaatcaaaggagatggccctgcggcggtagcttacgcctgtaatctcagcactttgggaggccaaggcgggcagatcacttgagggcaggagttcgagaccagcctggccaacatggtgaaaccccatctctacaaaaaatacaaaaattaggcaggcttggtggtgcatgtctgtaatcgcagctacttgggaggctgaggcaggagaatcgcttggaccccggaggcggaggttgcagtgagtcaggattgcaccactgcattccagcctgggcgacgaagcgaggctaggtctcaaaaaaaaaaaataataangctg

SEQ ID NO: 24635 - DNA, 423 bp, Homo sapiens
ggactacctcaacgccctggtgcacctcatcgaggttggcaatggcctcgtcaccttccagctgcgtggccttgagttccggggcacttactgccagcagcgcgaggtggaggctatcaccgagggtgtggaggaggacgagggctgttgctgctgtgaacctggccacctgccacgggtcctgtccttcaatgctgcctttgggcagcgctggctggcttgggaggtaacagccagcaagtacgtgctggagggctatagcattagtgacaataatgctgcctccatgctgcaggttttcgacctccgcaagatcctcatcacctactatgtcaagagcatcatctactacgtgagccgctcaccaaagctggaggtgtggctcaaccatgagggcatcacggcagccctgaggcctgtgcg

SEQ ID NO: 24636 - DNA, 443 bp, Homo sapiens
ggcggcgacggcgagtgccggggccggcgggatagacgggaagccccgtacctcccctaagtccgtcaagttcctgtttgggggcctggccgggatgggagctacagtttttgtccagcccctggacctggtgaagaaccggatgcagttgagcggggaaggggccaagactcgagagtacaaaaccagcttccatgccctcaccagtatcctgaaggcagaaggcctgaggggcatttacactgggctgtcggctggcctgctgcgtcaggccacctacaccactacccgccttggcatctataccgtgctgtttgagcgcctgactggggctgatggtactccccctggctttctgctgaaggctgtgattggcatgaccgcaggtgccactggtgcctttgtgggaacaccagccgaagtggctcttatccgcatgactg

SEQ ID NO: 24637 - DNA, 576 bp, Homo sapiens
  misc_feature (1)...(576): n = a,t,c or g
gttccttgagttgaacaggctatagagatggtggcactgggccgggtgcgatggctcacgcctgtactcccagcactttgggaggccgagacgggtggatcatttgaggtcaggacttcgagaccagcctggccaacgtggtgaaaccccatctctactaaaaatacaaaaattagctgggcatggtggcgtgtgcctgtaatcccagctactctggaggctgaggcacaagaatcacttgaatccaagtggatcacttaaggtgaagagttcgagaccagcctggccaacatggtgaaacctcgtctctagtaaaaatacaaaaataagccaggcacggtgatgcacgcctataatcccagctactcaggaggctgagacacaagaatcgcttgaacccgggaggcagatgctgcagtgagacgagatggcaccagtgcactccagcctgggcgacagagcgagactctgtctccaaaaagaaagaaaaatattgtggcactggggcatcaacttgattgaacgtccaaaggattatatctgctgtaatggcatccntggtttacagtttttcaa

SEQ ID NO: 24638 - DNA, 341 bp, Homo sapiens
gcactgctcccaccagcttggagacaacatgtggttcttgacaactctgctcctttggggctggctactactgcaggtctccagcagagtcttcacggaaggagaacctctggccttgaggtgtcatgcgtggaaggataagctggtgtacaatgtgctttactatcgaaatggcaaagcctttaagtttttccactggaattctaacctcaccattctgaaaaccaacataagtcacaatggcacctaccattgctcaggcatgggaaagcatcgctacacatcagcaggaatatctgtcactgtgaaagagctatttccagctccagtgctgaatgcat

SEQ ID NO: 24639 - DNA, 428 bp, Homo sapiens
gacttcgtaaaataattgattacaatttttatttccaaaaggttgtgttggtgatgctgccatgactgtatatagtctgggaagcaaatacttatgaggttaaaggagaaaggcactgctttggcatttcaaaagagattgtttcataagaagaggacctgaagctgagtgtggtgtccagctactcaggagactgaagcgggaagatcacttgagcctaggagtttgaggctgcagtgagctatgattgtgccactgcactccagcctgggtgacagagtgagactctgcctctgaaaaaataagtaaccaaaggataaatgaaaatatttaaggctttataagaaactagattttactgaatactgaggaagataatcccatggagcgaggaagaaaaatatttgttgactgtccactctgtgctt

SEQ ID NO: 24640 - DNA, 903 bp, Homo sapiens
gaacatggaggccgaccccggccagtaccggtgcaacggcaccagctccaagggctccgaccaggccatcatcacgctccgcgtgcgcagccacctggccgccctctggcccttcctgggcatcgtggctgaggtgctggtgctggtcaccatcatcttcatctacgagaagcgccggaagcccgaggacgtcctggatgatgacgacgccggctctgcacccctgaagagcagcgggcagcaccagaatgacaaaggcaagaacgtccgccagaggaactcttcctgaggcaggtggcccgaggacgctccctgctccgcgtctgcgccgccgccggagtccactcccagtgcttgcaagattccaagttctcacctcttaaagaaaacccaccccgtagattcccatcatacacttccttcttttttaaaaaagttgggttttctccattcaggattctgttccttaggattttttccttctgaagtgtttcacgagagcccgggagctgctgccctgcggccccgtctgtggctttcagcctctgggtctgagtcatggccgggtgggcggcacagccttctccactggccggagtcagtgccaggtccttgccctttgtggaaagtcacaggtcacacgaggggccccgtgtcctgcctgtctgaagccaatgctgtctggttgcgccatttttgtgcttttatgtttaattttatgagggccacgggtctgtgttcgactcagcctcagggacgactctgacctcttggccacagaggactcacttgcccacaccgagggcgaccccgtcacagcctcaagtcactcccaagccccctccttgtctgtgcatccgggggcagctctggagggggtttgctggggaactggcgccatcc

SEQ ID NO: 24641 - DNA, 362 bp, Homo sapiens
gctctgctggagaaggagctggagtctgtgggcatccgcctcaacaagcacaagcctaacatctacttcaagcccaagaaaggtggtggcatctcctttaactcgacagtcacgctgacccagtgctcggaaaagctggtgcagctcatcctgcacgaatacaagatcttcaatgcagaagtgcttttccgagaagactgctccccggacgagttcatcgatgtgatcgtgggcaaccgggtgtacatgccctgcctgtatgtttataacaaaatcgaccagatctccatggaagaggtggaccgcctggcccgaaaacccaacagtgtggtcatcagctgcggcatgaagctgaacctgga

SEQ ID NO: 24642 - DNA, 455 bp, Homo sapiens
cgcggccgcgtcgacctaagggcttatccaggtcaatatccagagccctgtaggggtcgttggggtctttgtcatcctcgtcgctgggcagagcattctcaggcatctcctctgtgacgatgtccacctgctgggcaggggcgatgtcctcgtcgctctccgtgggcagcgagctgtggcggcgcttgcccttcttctccttctccttcctctttttcctcctcttgtccttctccagcttctgccggtgccgccgctcctcctccagcttcacatactgatctgacataggcagccctggaaccttcaaggggacggagaggtcaatctgcaccacgggaatgtgctccacgcccggggtgtcctggtaccgcttctgtggcgatggcgagctcttgatgtagaaggggttgttggcctgctcctgcttccgggcctctcggcgccgagccaag

SEQ ID NO: 24643 - DNA, 337 bp, Homo sapiens
gcagctactcggaaggctgaagcaggagaatggtatgaatccaggaggtggagcttgcagtgagccgagaccgtgccactgcactccagcctgggcaacacagcgagactccgtctcgaggaaaaaaaaagaaaagatacgtgcctgcggtgaggaagctgggcactgtttttgagttcaggtgaattagcctcaatcccccctgttcacttggctcccatagccctcttgatggatcacgtaaaactgaaaggcagcggggagcagacaaagatgaggtctacactgtccttcatggggattaaagctatggttatattagcaccaaacttctacg

SEQ ID NO: 24644 - DNA, 352 bp, Homo sapiens
gagaataagagcaaaaaaggaacatatggggaaccaaatgaagttttcggatataatataaaatattataaaattgaatatttaatggaaagattggaagataaagttagaggatttccaaaaagtagaataaaaagacaaatggttggaatataaaaggtaaaattaaaggatcacttcaggtaattccatatctgactggtagaaattcagcgggagggatggggagaacacagaaaatacagggaagaagaaaatttccccctgaaaaaattttttaaagatggcttagatcataagaacatgagttttcagattgaggggcccattaggctgactagcaatgaatgaa

SEQ ID NO: 24645 - DNA, 519 bp, Homo sapiens
ttaccgctatgacatgattacgaatttaatacgactcactatagggaatttggccctcgaggccaagaattcggcacgaggaaacctgtccccacagcagccacctgccgtctccccctccctgagccctgacggccaggaatgcacttcccatctctggacttgcctgttgtacactgttgtagacgcttagagaaacggatgcattcaccgtgcccctgccctgcttttccaggtttctgaaggggctgcaggtgaggccggcccctctctcagctgagcttcaggctgcgctggccatggagccgacccccggtggggtcaaatacatcattgtcactcaggtggggccagggcctcaaatcctggatgacccctgcgcccacctcctgggtcctgacggcctgccgaagccagctgcctgactgcctcagcagggaccgcatgccgcttggagaaggggtggcctcgccggagctagggagcggatgtggtgggctggccggactcctgggacat

SEQ ID NO: 24646 - DNA, 428 bp, Homo sapiens
atttggccctcgaggccaagaattcggcacgagcacctgttgttggcatgtcctttaccttctctttccctgccacatcaacctacacactgactcatcattgacgtggaagatgtggaagatgtcaagtttgtgatcaactatgactatccaaacagctcagaggattatgtgcaccgtattggccgaacagcccgtagcaccaacaagggtaccgcctataccttcttcaccccagggaacctaaaacaggccagagagcttatcaaagtgctggaagaggccaatcaggctatcaatccaaaactgatgcagcttgtggaccacagaggaggcggcggaggcgggggtggtcgttctcgttaccggaccacttcttcagccaacaatcccaatctgatgtatcaggatgagtgtgatcgaagctt

SEQ ID NO: 24647 - DNA, 410 bp, Homo sapiens
  misc_feature (1)...(410): n = a,t,c or g
ggattaggcttagtctgactttaaggagtaaaacagtagagaacatggagttgaagcagcaaggaaacaacccaacagttaagtgtagctgccatcttggcaaacagggagttccccttcataccaagggtaagctggaagactcccttgggaagaatactttcaacagaattaaggtgtccatagtcggatgcacctagtgtggcaagcacacaggaaaggtcaagttagtccaagctgggttcagcaaaggttactggagaggatgcaggagttaaatcttcaaggataagtagacatcaggcaggagacagaggacaggttatctgaggtgacaaatcaggaccaaggtgaanggttgaatttttgctggcacttactaaatggacttgggcaagtcatttaaaccc

SEQ ID NO: 24648 - DNA, 499 bp, Homo sapiens
  misc_feature (1)...(499): n = a,t,c or g
gccatgacatgattacgaatttaatacgactcactatagggaatttggccctcgaggccaagaattcggcacgaggccagtcatcttcctgattgctactcgctggccccagatctgcatccagaacgaaatgggagctccttagcttggtattcaatgccctccagggtctagccccaacctgcttttctggttatctcctgctctgctccctcacttactggaggctcccgggactatcattgcagctaaaatatttctccctacagttttcctcctcacttctattctttatttcaacacctgtcttctcttcctaccacaacccactttcccaactgcctacccgttcagaatacaagaccaaagttttccattcctttcctcctctgttcccacgacaatcccataagtctttatttttggaaaaggaggaatcctgccaatgataactttttggcttacatatcgaggtcagagaagctagncttattcttta

SEQ ID NO: 24649 - DNA, 431 bp, Homo sapiens
  misc_feature (1)...(431): n = a,t,c or g
gctaggccatgtgtgggagggatctgggccctgtggatggagctacttcatgggtgacatggagaggagggctaggccatgtgtgggagggatctgggccctgtggatggagctacttcatgggtgacatggagaggagggctaggccatgtgtgggagggatctgggccctgtggatggagctacttcatgggcgacatgaagaggtgggctaggccatgtgtgggatttgtgaaactgtttataggtaagggcatcagatgagatttcaaatattctaataaccacagatactgctataatgttttatttggctttagctgacgcccaatctttctatcaattcctccagaaaatcaaacatgactgttattggtgccccgacaaagacagagaaggcaaagctttgccaactgctctcanaattttaa

SEQ ID NO: 24650 - DNA, 333 bp, Homo sapiens
cccaaattgacaaagctgaagttagcataggggccaaactacccagtgagtatggggtcattccctttgaaagttttaccttaatgaaagtatttcaattggaaatgggtctcactcgccatcctgaagaaaagccagttagaaaagacaaacgagatgaattggtggaagttattgaagcgggcttggaggtcattaataatcctgatgaagatgatgaacaagaagatgaggagggtccccttggagagaaactgatatttaatgaaaatgacttcgtagaaggttattatcgcactgagagagataagggcacacagtatgaactctttt

SEQ ID NO: 24651 - DNA, 427 bp, Homo sapiens
gggaaaactcaaaactgattcacttcaaagacttcatgctacccataacttgatggaattgttgatagccaggcacccagggataccacctaccttgcgtgatggccgacttgaggaagaggccaaacagctgcgagagcactacatgagcaagtgtaatacagaagttgctgaagcccagcaagctttatatcctgtgcagcagaccatccatgagcttcaaagaaagattcattctaattctccttggtggctaaatgtgatccacagagcaatagaatttactattgatgaggagctagttcagcgagtgcgaaatgaaataaccagcaactacaagcaacaaactggcaagctttctatgtcagagaagttccgtgattgcagaggtcttcagttcttacttacacacaaatggaagagctaa

SEQ ID NO: 24652 - DNA, 411 bp, Homo sapiens
  misc_feature (1)...(411): n = a,t,c or g
gataaataccagtttgtttcttttttcttttttttgagacagggtctcactctgtcacccagactgcagtgcagtggcacaatctcagctcactgcaagccttgacctcctgggttcacgccattctcccacctcagcctcccgagtagctgggactacaggcgtgcgccaccatgcccagctaattttttgtacttttagtagagacggggtttcaccgtgttagccaggatggtctcgatctcctgaccttgtgatctgcccgcctcagcctcccaaagtgctgggattacaggtgtgagctgccgcacccggccgttcccattttttattgatgccaacatttcaaaacttnatactgtttataaaccgattgnnngnagttatnccaanngcggtccctnnacattc

SEQ ID NO: 24653 - DNA, 619 bp, Homo sapiens
gagagcttatcaaagtgctggaagaggccaatcaggctatcaatccaaaactgatgcagcttgtggaccacagaggaggcggcggaggcgggggtaagggtggtcgttctcgttaccggaccacttcttcagccaacaatcccaatctgatgtatcaggatgagtgtgaccgaaggcttcgaggagtcaaggatggtggccggagagactctgcaagctatcgggatcgtagtgaaaccgatagagctggttatgctaatggcagtggctatggaagtccaaattctgcctttggagcacaagcaggccaatacacctatggtcaaggcacctatggggcagctgcttatggcaccagtagctatacagctcaagaatatggtgctggcacttatggagctagtagcaccacctcaactgggagaaagttcacagagctctagccagcagtttagtgggataggccggtctgggcagcagccacagccactgatgtcacaacagtttgcacagcctccgggagctaccaatatgataggttacatggggcagactgcctaccaataccctcctcctcctccccctcctcctccttcacgtaaatgaaaccactcaagtg

SEQ ID NO: 24654 - DNA, 325 bp, Homo sapiens
gcccgagacgcgcgaatcacaaggtcagaagatcgagaccaccatgcccagccaaaaaattttttttttcaataagaaaacttttaggttagcaagcatttagtaagtgtccacttggtacccacaatgacaccctaattcagaaatagttagggaacattactttgtgttaggccctgggctaggggccaagagatgcaatccctacccttgaggaattatgcagggtagagatggggggcagataaagtagcagttattgtacagagtgataagggcattgctgaaaacctgtcatgccaatcactgaatggctttgcctcaa

SEQ ID NO: 24655 - DNA, 540 bp, Homo sapiens
gtttcacacatttccagcctgcacagctgaccacagttgggaaacgttgctgtctttggattcaggatctttgcatggatctccagaacttgaagcgtgtccgagatgacctgcgcttccggggagtaaagggtaccactggcactcaggccagtttcctgcagctctttgagggagatgaccataaggtagagcagcttgacaagatggtgacagaaaaggcaggatttaagagagctttcatcatcacagggcagacatatacacgaaaagtggatattgaagtactgtctgtgctggctagcttgggggcatcagtgcacaagatttgcaccgacatacgcctcctggcaaacctcaaggagatggaggaaccctttgaaaaacagcagattggctcaagtgcgatgccatataagcggaatcccatgcgttcagaacgttgctgcagtcttgcccgccacctgatgacccttgtcatggacccgctacagacagcatctgtccagtggtttgaacgcacactggatgatagtgcca

SEQ ID NO: 24656 - DNA, 238 bp, Homo sapiens
gtctcctctaagtacaaacagcgctatgagtgtcgcctgccagctggagctattcacttccagcgtgaaagggaggaggaaacacctgcttaccaagggcctgggatccctgagttgttgagcccaatgagagatgctccctgcttgctgaagacaaaggactggtggacatatgaattctgttatggacgccacatccagcaataccacatggaagattcagagatcaaaggtgaag

SEQ ID NO: 24657 - DNA, 405 bp, Homo sapiens
gcggcacgaggtaatctggctcttcccaaaattatggtgaccacgttgtcattaatataattggtaacaggtatttggtctgcaacatgtttgtgggttttgttgttgctgttgtttgagaaagggtgtccctctgtccagcccaggctgcagtgcagtagtgtgatcacagcttgttgtagcctcaacctcctgggctcaaatgatcctcccacctcagcctcccgagtacctgggaccacaggtgttgccactacacctggctaactttttaatttttttgtggagatgaggtctcactgtgttgctcaggctggtcttgaactcctgtgctcaagctcaaacgatcctccaacctcagcctcccaaagtgctgggattacaggcatgagccactgtcctggt

SEQ ID NO: 24658 - DNA, 345 bp, Homo sapiens
ggagagagctagcaccaacctgaaatgcaaataggggaaaatatttcacttacaatataaaaacattatacttaggataaatataacaaaaaagatacaaggccctcaatgatgaaaatgtaaaatcttattaaatggcataaaaaaagatctgtacaaatgaaaagacacagcattaggatatagatcacaaaatgtttaattcttctaaatttaaggcaattccaattggagaccctacagggatattttaatttaataaaataatttcaaagtacgaaaagacaagaaatgtaagcttaggccgggcgtggtgactcacgcctgtgatcccagcactttggg

SEQ ID NO: 24659 - DNA, 482 bp, Homo sapiens
  misc_feature (1)...(482): n = a,t,c or g
gcagagctgtccaaagaggacccgtgccaagctctttccacactgtgggcggctctaccctgagggcctggcgcagctggctcgggctgacgactatgaacaggtcaagaacgtggccgattactacccggagtacaagctgctcttcgagggtgcaggtagcaaccctggagacaagacgctggaggaccgattctttgagcacgaggtaaagctgaacaagttggccttcctgaaccagttccactttggtgtcttctatgccttcgtgaagctcaaggagcaggagtgtcgcaacatcgtgtggatcgctgaatgtatcgcccagcgccaccgcgccaaaatcgacaactacatccctatcttctancgtcctggcccaaggctctcaattgcactctttgtgtgtgtgtgtgtgtgtgtgcgcgtgtgtgtgcgtgtgtgtgtatgtggtctgtgacaagcctgtggctcacctgctg

SEQ ID NO: 24660 - DNA, 424 bp, Homo sapiens
gctgaggtgggaggatcgcttgagcccaggagtttgaggctgcagtgagccatgattgtgccactgcaccgcagcctgggcgacagagagcgatcccgtcttttaaaatatagaaagcggggtttcagaaagatatttgtacacccatgctcacggcagcactattcacaatagccaaaagatggaagcaacccatcttccatccatcagtggaggcgtggataaataaaatgtggctcgtccatatagtggactactagccttaaaaaggaaggaaattctggccaggtgcagtggctcacgcctgtaatcccagcactttgggtggctgaggtgggcagatcatgaggtcaggagatcgataccatcctggccaacatggtgaaaccccgtctctactaaaaatacaaaaattagctgggcg

SEQ ID NO: 24661 - DNA, 419 bp, Homo sapiens
  misc_feature (1)...(419): n = a,t,c or g
tnnnnnntttgaaaccgtttgacatgattacgaatttaatacgactcactatagggaatttggccctcgaggccaagaattcggcacgaggaaaagactgggacttcttgctggatttgcattccttacaggagttggcctgggccctgccctggagttttgtattgctgtcaaccccagcatccttcccactgctttcatgggcacagcaatgatctttacctgcttcaccctcagtgcactctatgccaggcgccgtagctacctctttctgggaggtatcttgatgtcagccctgagcttgttgcttttgtcttccctggggaatgnnnnnnttgnatncatttggttttcaggcnnacctgnatgngngactgnngnnantnannnnntnnnncnnnntnatntnnntnnntatt

SEQ ID NO: 24662 - DNA, 351 bp, Homo sapiens
gcttcagtggttattaaaaatttaaatattgctgtttgtggtggctcacatctgtagtcccacctactcaggaggctgaggtgggagcttgagtctggaagttcaggaatgcagggagctgtgtttgtgcttgtgaatagccactgcagtccagcctgggcagcatagcaagacctcatctcttaaaaaaagaaaaaaactatttatttttaattttcaactcaaggggcacatatgcaggtttgttacatggatacattccatgatgctgagatttggacttcagttgaacctgtcacccaaatagtgaacatactgccaatagatagtttttcaacccttgcctcactt

SEQ ID NO: 24663 - DNA, 383 bp, Homo sapiens
ggagagagctagcaccatgagcttcaataccctgttatatttcttaatcctaacaaagaataaatcttattttttttcctgtgcaatatttgcaattttactttgcaatcaagttgcattatattagtgtcatcttatcaccaatttacaaagcagagagagtaggaatagtagatgttcttttatggccaaaattggaaatgggcaaactgagggagaaaataattcactgtgaagagcaaaggggttaggggattccagagcagggtgagagaagggagagaaaagacagaaggatgaatatttgtatgtaataatgatttttgcctcctcatacagcttggtgactaaggacactcgtatggtgatgccttttagctacg

SEQ ID NO: 24664 - DNA, 825 bp, Homo sapiens
caaaatagtagagatcatgccaatgaggaacttgatgaactgaaaaggaaatatgatgccagtctgaaggaattggcacagttgaaagaacagggactcttaaacagagagagagatgctcttctttctgaaaccgccttttcaatgaactccactgaggagaatagcttgtctcaccttgagaaacttaaccaacagctcctatccaaagatgagcaattgcttcacttgtcctcacaactagaagattcttataaccaagtgcagtccttttccaaggctatggccagtctgcagaatgagagagatcacctgtggaatgagctggagaaatttcgaaagtcagaggaagggaagcagaggtctgcagctcagccttccaccagcccagctgaagtacagagtttaaaaaaagctatgtcttcactccaaaatgacagagacagactactgaaggaattgaagaatctgcagcagcaatacttacagattaatcaagagatcactgagttacatccactgaaggctcaacttcaggagtatcaagataagacaaaagcatttcagattatgcaagaagagctcaggcaggaaaacctctcctggcagcatgagctgcatcagctcaggatggagaagagttcctgggaaatacatgagaggagaatgaaggaacagtaccttatggctatctcagataaagatcagcagctcagtcatctgcagaatcttataagggaattgaggtcttcttcctcccagactcagcctctcaaagtgcaataccaaagacaggcatccccagagacatcagcttcccagatg

SEQ ID NO: 24665 - DNA, 353 bp, Homo sapiens
  misc_feature (1)...(353): n = a,t,c or g
annttggagaancgctatgacatgattacgaatttaatacgactcactatagggaatttggccctcgaggccaagaattcggcacgagagcccgagcagcacccgagaacccctcctcagcagctctgagaacggcaatggtggccgagagacgtctccagctgatgcccggaccgagagaatcctcagtgacctcctgcccttctgcagaccaggccccgagggccagctcgctgccacggcccttcggaaagtgctgtccctgaagcagcttctgtttccggcggaggaagacaatggggcggggcctcctcgagatgggnnnnnngtcccangnggcggncnnntgaccc

SEQ ID NO: 24666 - DNA, 345 bp, Homo sapiens
gagcccgagcagcacccgagaacccctcctcagcagctctgagaacggcaatggtggccgagagacgtctccagctgatgcccggaccgagagaatcctcagtgacctcctgcccttctgcagaccaggccccgagggccagctcgctgccacggcccttcggaaagtgctgtccctgaagcagcttctgtttccggcggaggaagacaatggggcggggcctcctcgagatggggatggggtcccagggggcggccccctgagcccagcacggacccaggaaatccaggagaacctgctcagcttggaggagaccatgaagcagctggaggagttggaggagga

SEQ ID NO: 24667 - DNA, 494 bp, Homo sapiens
  misc_feature (1)...(494): n = a,t,c or g
ggcagattgcatacacagagccttgtaggagctggcaaggggttatgctttaaccctgagtgtggtgggaagccatttggaaggcttcattttatgtatgtttcaagtcgatgattcttgttacacgtggaaagcagattgtgctgggtccaagagtacactcgaaacatacaagctgagagtctgcagcaatgatcctgggagagaaaatgctggtttggcctagtgtagcaacagtggcagtggagcaaaatgagtagatctgctgttcatcttgaagatagaattgataggatttgctgttgagttggatgtggaagctgagagaatttgaggaatcaaagatgatgactgggtttctgttttgggtgatgtcggatggataatggagtcattccccacacaagggaaagtcctgggggaagaaggtggggaaagggcanaaatcangagtcctttttcgganatgcctgtgaaacatacaagtggggatt

SEQ ID NO: 24668 - DNA, 517 bp, Homo sapiens
  misc_feature (1)...(517): n = a,t,c or g
tcctgccatgaataatttcttagacacgtagtacctattcttgaggcgttcactcatggttttcagatccatggggaaccttataacttcataatatcctggagcttctgttctcttcacaggttccatgaagggccaagcgctttgatggctcttcacctgctggaggatgctcttgagcgtgctgtaaagctggtcagggtctctgggctctttacttttctcttttccactcggtttccagcctgtctctctaattccaggaatgctttctataggaatctgtcagaactccatctttaaaacatgaaagtccagggtaaacttttcgaatttgtgcctgttttctttcaatcagttttttaattatctccttctgctttttaatgatgacagaaaattctgtgtacgggatccgtggatttagctcacatcccattaaagtggctccttcataatccttgatatagccaacatatttggttttaggnattttaatttctttggagaaaccctg

SEQ ID NO: 24669 - DNA, 793 bp, Homo sapiens
aattcggcacgaggaagctctggtaggccttggagaggcgggttaggaacagtggagactgctgcacggactctggaaccatgaacatatttgatcgaaagatcaactttgatgcgcttttaaaattttctcatataaccccgtcaacgcagcagcacctgaagaaggtctatgcaagttttgccctttgtatgtttgtggcggctgcaggggcctatgtccatatggtcactcatttcattcaggctggcctgctgtctgccttgggctccctgatattgatgatttggctgatggcaacacctcatagccatgaaactgaacagaaaagactgggacttcttgctggatttgcattccttacaggagttggcctgggccctgccctggagttttgtattgctgtcaaccccagcatccttcccactgctttcatgggcacagcaatgatctttacctgcttcaccctcagtgcactctatgccaggcgccgtagctacctctttctgggaggtatcttgatgtcagccctgagcttgttgcttttgtcttccctggggaatgttttctttggatccatttggcttttccaggcaaacctgtatgtgggactggtggtcatgtgtggcttcgtcctttttgatactcaactcattattgaaaaggccgaacatggagatcaagattatatctggcactgcattgatctcttcttagatttcattactgtcttcagaaaactcatgatgatcctggccatgaatgaaaaggataagaagaaagagaagaaatg

SEQ ID NO: 24670 - DNA, 412 bp, Homo sapiens
cgccaccgcccatcagctgagaattgcagctgagggctccggggtaggtgggtgacggcggtcggaggtgtaggagggagccgtggaggtccaggtgactgcttagaaaactgcacagcatctgatgaaattagcgaataagaacatcaaccatgtcttacactccaggagttggtggtgaccccgcccagttggcccagaggatctcttctaacatccagaagatcacacagtgttctgtggaaatacaaagaactctgaatcaacttggaacacctcaagattcacctgaattgaggcaacagttgcaacagaagcagcagtatactaaccagcttgccaaagaaacagataagtacattaaagagtttggatctctgcccaccacccccagtgaacagcgtcaaaggaa

SEQ ID NO: 24671 - DNA, 429 bp, Homo sapiens
ggttagaccttcaagagaagacagggacaagcggactcacaatgtgctgttttgcataaaagcatgtgacagggcaaggaggaagggaagtccaggtggggaaagcagagccaaggtggccgcgcagctgccagtggcttgggtgccactccacatgtcacagaagccttcacgtccctgccaggaacagagcatgaaggctgccagggcggcctgccatgcctctgatgagggagttcagtgccaggacccactcaggccttcagctgcaggcccagccccccaactcgccctcgtctgtgtcccccacgcacgcttgcgcccatcttggcttctgcttcttagaggacctgatcagcacagagtacattccagaatcttttccagacacatatgcataaggccaactcattcttaattttttttttt

SEQ ID NO: 24672 - DNA, 410 bp, Homo sapiens
gtgcattctttataattcctgggacattcccagtttattggaaaagctgaggctgcttcgccaaatctccccaactctactcagctctactcaaagtgcctctgtgttgttcctctcttccttcctcccatttctggggaggtagtctcccagctacctcccatcaaagcaaattgcttccacgataataccttgaagtcccatgatgccgggaaatccagcgcttcagtggtctactgtgaatgtgggtcccttccacaccagtttatttttgctgcctgtttctgctgacactcagctccaagttcattgctgggcacattgtacaagatgttgagatggaaatcctgaggcatcaccaccatgagagcagctgggttaggcgttaaagccgatatttctgtcaccat

SEQ ID NO: 24673 - DNA, 498 bp, Homo sapiens
  misc_feature (1)...(498): n = a,t,c or g
gtgcaggtggtcaggacaggtacagcacaggcagcgacagtgcgagctttccccacaccaccccgtccatgtgcctcaaccctgacctggagggaccacctctagaggcctataccattcaaggacagtatgccattccacagccagatttgaccaagctgcaccagttggcaatgcaacagtctcattttcccatgacgcatggcaacaccggattcagtgcaggtttggatgcatctgctcagactacttctcatgaactcaccattccaaacgatttgattggctgcataatcgggcgtcaaggcgccaaaatcaatgagatccgtcagatgtctggggcgcagatcaaaattgcgaacccagtggaaggatctactgataggcaggttaccatcactggatctgctgccaacattancccggntcaatatccaanncatgtcagncttcctcggaaacggtggcatggggancaaccagaacatgcagttcatc

SEQ ID NO: 24674 - DNA, 401 bp, Homo sapiens
gagaaaatgtacttgcagactactgtagttaactgttcatatagcattttatcttatgcatactataaaactgttatatgggtatgtaatacagaacagacaaaataaggaaaacattcttttccaaaggactcaccgtagaattcctttaacagagatctctgatggtatgttttgaaatttaatacctataaaacttcagttagattctgcatttcagaagcaaatctattgtatagagccaaatacaactatatatttttacagcacgtttgtttttttgggggagatcattaaagaatatttaccttctaatcagattaaaaacttttctttgatcttttatgtgttcgatttgttaatggtacagttggtatcagattcttctgattaacagcaac

SEQ ID NO: 24675 - DNA, 406 bp, Homo sapiens
tatccatgattacgaatttaatacgactcactatagggaatttggccctcgaggccaagaattcggcacgagagctagcaccatgagcttcaataccctgaaatttaaaaatcacattataaaaatctatttatagctgggtgcagtggcacacacttgtagccccagctactcaggagcctgaggcgggaggattgcttgagcctgggaattcgagtccagcctgggcaacatagtgagaactcatctctaaaaaggtaaaaattaaaaaaattaagattaaaaaaatccaattaggacctcactaaaaataaaaaggtggaggggaaaatggaactggaattaactgctagatcattctggaaatctttaacaagtaagctaaactagagatcaagaagaccaa

SEQ ID NO: 24676 - DNA, 589 bp, Homo sapiens
gggacagtatgccattccacagccagatttgaccaagctgcaccagttggcaatgcaacagtctcattttcccatgacgcatggcaacaccggattcagtggcattgaatccagctctccagaggtgaaaggctattgggcaggtttggatgcatctgctcagactacttctcatgaactcaccattccaaacgatttgattggctgcataatcgggcgtcaaggcgccaaaatcaatgagatccgtcagatgtctggggcgcagatcaaaattgcgaacccagtggaaggatctactgataggcaggttaccatcactggatctgctgccagcattagcctggctcaatatctaatcaatgtcaggctttcctcggagacgggtggcatggggagcagctagaacaatgcagattcatccataatccctttctgctgttcaccaccacccatgatccatctgtgtagtttctgaacagtcagcgattccaggttttaaatagtttgtaaattttcagtttctacacactttatcatccactcgtgattttttaattaaagcgttttaattccttaaaaaaaaaaaaaa

SEQ ID NO: 24677 - DNA, 310 bp, Homo sapiens
gggttctatcaaatataatagcatttgaaacattttctaatagttatgatacttatacatgtgctttcaggaagttccttggtgaaacaattgttcaggggggatctaggtaattggcagattctaaataatataatttccagatagtaattttaagagtactcatcgctcttgccaaataagttcagggtattcaaatcttggactagtcctgcaaggtacaaagaataaaaatcccagtgagatacttggaaaccacagtttattattatttatctgggcaattattgtgtgtgtgaggatggaaggg

SEQ ID NO: 24678 - DNA, 337 bp, Homo sapiens
ggaagtttgcagatactcgccaaggcagagcgcaaagtgctagccactggaaatgcatgacttccctccacccctactctattctgtagttttttggttttgtttctgagacggagtctcagtctgtcacccaggctggagtgatctcagctcactgcaacctccacctcccaggttcaagcgactctcctgcctcagcctcccgagtagttgggattacaggtgactgccaccgtgcccggctaatgtttgtatttttagtagagacggggcttcaccatcttggccaggctggtcttgaactcctgacctcgtgacccacccgccttggcctccc

SEQ ID NO: 24679 - DNA, 521 bp, Homo sapiens
  misc_feature (1)...(521): n = a,t,c or g
acgaatttaatacgactcactatagggaatttggccctcgaggccaagaattcggcacgagggcgtggtcgtgggcttctgtagtcccagctactcaggaggctgaggcaggagaattgctggaacctgagaggcagaggttgcagtgagccgagatcacgccattgcactccagcccgggtaacaacagcaagactccgtctcaaaggaaaaaaaaaaangagcaaacncagaaancncaaganaagaanttatcaaagaaatactgtaataaanaatcttggtactaaagtatatgcncttccaaatcgagngcccagcaaaatgantaaaaataatccacatcaagattcatcatcaagtttccaaacangaataaacnttccaggccaggcaaggnggctcatgtctgtaatcccagtactttgggaggctcaggagggcagatcacttgaggtcaggagtttnaaaccagcctggccagtntgacnagaccccgttttactaaaaatccaaaaatt

SEQ ID NO: 24680 - DNA, 528 bp, Homo sapiens
  misc_feature (1)...(528): n = a,t,c or g
catttatgacatgattcgaatttaatacgactcactatagggaatttggccctcgaggccaagaattcggcacgagcggcacgagctgggtttttgtgaaaatggcaaatggcattttgggtactgcaagcctttgcggctcggaactgtgctgtgcactgtgggactgtgtggctcaatgcgggacggttagcatccctagtcactgtcattacaaaaacagtcacacattctagacacccactgcccgccccaacgccaagggggcagtactgccttcaaccaggaccccaaaagactccagtgtggcagttgttggggagggggaatgtgagaggggcagtggagagggagtcagcaagcaggttctctgagccctggtgagaagtctggattttattttaagccgcctgagtgatgtgatttcatacatgtttttaaaagatcactctggttattccttgcagacagtggaagagtgaccaagttaggaggctattgcatanttcaggtaagagatgatggtgg

SEQ ID NO: 24681 - DNA, 418 bp, Homo sapiens
  misc_feature (1)...(418): n = a,t,c or g
gggtttttggcaatataatatttctctttctgtaaaaatgtgtgacacttttgcttggtataaaattcttgcttggtataaaaacatattcgttagataaaagatattcgacaatctcactgagagacacgaaggctacttgggttatggggaggtatgtcatcccctttgcaaattatgagtatttttggatcatctgtagctgggggcaggactctttcaaaggagaggcgatgtgggctatagtgaggagacactgtttctcaaattccatgtgaatctctggccttcaggggcatttgataccgtgaacgtggctaaaggatctcaagatgagaaacttgcttcattgttaaagttatgggctcagctgtcagggtcatactctgccagagcaggaggaaaggtnctaagcatt

SEQ ID NO: 24682 - DNA, 423 bp, Homo sapiens
aactggaagatggcggcttctcaggcggtggaggaaatgcggagccgcgtggttctgggggagtttggggttcgcaatgtccatactactgactttcccggtaactattccggttatgatgatgcctgggaccaggaccgcttcgagaagaatttccgtgtggatgtagtacacatggatgaaaactcactggagtttgacatggtgggaattgacgcagccattgccaatgcttttcgacgaattctgctagctgaggtgccaactatggctgtggagaaggtcctggtgtacaataatacatccattgttcaggatgagattcttgctcaccgtctggggctcattcccattcatgctgatccccgtctttttgagtatcggaaccaaggagatgaagaaggcacagagatagatactcta

SEQ ID NO: 24683 - DNA, 565 bp, Homo sapiens
gattacgaatttaatacgactcactatagggaatttggccctcgaggccaagaattcggcacgaggcagtagatgatgggatgggagataccttggcaggttgttcctgaatccagccaatactccccactgtgttgtatgaatgagacatgggtgtgtacgaacattaactgaaaactctggacattctgcatatgctgacctgctgtgtgaatgctgtatgtgtgtgtggagtttgtatgtggggacactggtatacccggcctttatgcatgagccaactatgtcggagtgtggctacatgcaggttgagtgtatacagtccaggtgtgtgtagtccatgtgtacgcgggcacacagatgccacggtgcatgctgcggccctctcctggcacccctacctgcctcagccaacttctctggccggtgcttggcttgtaggacagtggcggggcacggcgatctgtgattgggtctggcctcagctacttacccactactatgatgatgcccggacatgtaccaagtgttccgccgtgggcttagcatctcagggaatgggccc

SEQ ID NO: 24684 - DNA, 512 bp, Homo sapiens
  misc_feature (1)...(512): n = a,t,c or g
gcgagaactgatagaacttcgaaataaagtgaatcgtttattggatagcttggaaccacctggagaaccaggaccttccaccaatattcctgaaaatgatactgtggatggtagggaagaaaagtctgcttctgattcttctggaaaacagtctactcaggttatggcagcaagtatgtctgcttttgatcctttaaaaaaccaagatgaaatcaataaaaatgttatgtcagcgtttggcttaacagatgatcaggtttcagggccacccagtgctcctgcagaagatcgttcaggaacacccgacagcattgcttcctcctcctcagcagctcacccaccaggcgttcagccacagcagccaccatatacaggagctcagactcaagcaggtcagattgaaagncaaatgtnccaacagttccagcaanaggccggctatggtganancagccgcaggtcanctcagcagcctcaacagtatggtatcagtatcagcaagctatatcagg

SEQ ID NO: 24685 - DNA, 508 bp, Homo sapiens
  misc_feature (1)...(508): n = a,t,c or g
gnnnnnnnagnnnggnnnnttttaaatcccgtnnnatganaccctttgacatgacacgaatttaatacgactcactatagggaatttggccctcgaggccaagaattcggcacgagcctcattcttatactgcttttcgtggccactttggacaagtcctggtggactctccctgggaaagagtccctgaatctctggtacgactgcacgtggaacaacgacaccaaaacatgggcctgcagtaatgtcagcgagaatggctggctgaaggcggtgcaggtcctcatggtgctctccctcattctctgctgtctctccttcatcctgttcatgttccagctctacaccatgcgacgaggaggtctcttctatgccaccggcctctgccagctttgcaccagcgtggcggtgtttactggcgccttgatctatgccattcacgccgaggagatcctggagaagcacccgcgagggggcagcttcggatactgcttcgccctggcctgga

SEQ ID NO: 24686 - DNA, 599 bp, Homo sapiens
  misc_feature (1)...(599): n = a,t,c or g
ttaacagctatgacatgattacgaatttaatacgactcactatagggaatttggccctcgaggccaagaattcggcacgagctcttgctggtggtctcagcccttcacatcctcattcttatactgcttttcgtggccactttggacaagtcctggtggactctccctgggaaagagtccctgaatctctggtacgactgcacgtggaacaacgacaccaaaacatgggcctgcagtaatgtcagcgagaatggctggctgaaggcggtgcaggtcctcatggtgctctccctcattctctgctgtctctccttcatcctgttcatgttccagctctacaccatgcgacgaggaggtctcttctatgccaccggcctctgccagctttgcaccagcgtggcggtgtttactggcgccttgatctatgccattcacgccgaggagatcctggagaagcacccgcgagggggcagcttcggatactgnttcccctggcctgggnggccttccccttgccctggcaaggggatnatntacatcccctacggaanccggaataacnccccncctcctttggtggnccccngnccttttcgggc

SEQ ID NO: 24687 - DNA, 452 bp, Homo sapiens
ccctatgacatgattacgaatttaataccgactcactatagggaatttggccctcgaggccaagaattcggcacgagctgggtggtttataacagcagagatatgtttgtttcacagttctggaggctagaagttcaaagtcatggcgtcagcaggaacagcctgcctttgagacttggggtagaatctttccttgcctctttccagcttctgatggtggcctcagtcctcggcattccttagcttaaagctgcatccctccagcctctgcctctgacctcacatggcgttggtcctgtgtgtctctgtctcctcacagcattttcctcttcttataaaaacacctgtcacaatggattagagcccactcatatgaactcatcttaacttcattacctctccaaaggccctatttccaaatgattcacaggtatcaggtgttagatacacat

SEQ ID NO: 24688 - DNA, 337 bp, Homo sapiens
ccttaattagtctgtgtgtctttcctaaaaatatggacagtgtctccttttttcagtttactgctggtcctagcatctggagtggtgcgtagatgtttgttgaaaatacaattaaacaaaagaacaaaaagaaataatcattgtaattgtttactattttggttccttttgataattttccttgtgataattttaatatctgattttagcaaaatcaaatgaacctcttaaaataacctatttaaagaaacattattaaagcatgtaaagcccaataactgaaatgtttaatccttgattagtagagtcttgtcctgtaatcatgaggtaagcactg

SEQ ID NO: 24689 - DNA, 950 bp, Homo sapiens
ccctgctatgacatgattacgaatttaatacgactcactatagggaatttggccctcgaggccaagaattcggcacgagatgatatctcctttcagggccccagcttaagggcaaagtgagttaatgtgtagacaaaggcgagggacaagagagagttaacatctagacagtggaaaaagccatggtgtgtggtttctgggaaccaccaacacttgcaggtttagctttttcccagggttgactacaagaaagaaaaccatgtttttgcaagattaaaatgtggttgagtgtgcctaaattaaccatccccatttttatcatatttccaccatcacttcagggttttaagagtcagtgctcacctgggcggagctggtagtacattttgcttcttagaaagctaagtcctgggttccgtctgattttaggttccaggaacttcctgagaacacccgatcgcagagggtaattttctggagtttgttttgcagggatagctgggagtatggccaccctgctccacgatgcggtaatgaatccagcagaagtggtgaagcagcgcttgcagatgtacaactcgcagcaccggtcagcaatcagctgcatccggacggtgtggaggaccgaggggttgggggccttctaccggagctacaccacgcagctgaccatgaacatccccttccagtccatccacttcatcacctatgagttcctgcaggagcactttaacccccagagacggtacaacccaagctcccacgtcctctctggagcttgcgcaggagctgtagctgccgcagccacaaccccactggacgtttgcaaaacactgctcaacacccaggagtccttggctttgaactcacacattacaggacatatcacaggcatggctagtgccttcaggacggtatatcaagtaggtggggtgaccgcctatttcccg

SEQ ID NO: 24690 - DNA, 402 bp, Homo sapiens
atgatgtatataactatctattcgatgatgaagataccccaccaaacccaaaaaaagagatctctcgaggatccgaattgcggccgcgtcgactggaaccaaaggaatccaactttcattttgtgtagaatcatacctacttatacttaatgctagcactgtaagaaataagtcttttttgtttaaaaaagggaagataagattaaagattcttagtgagatcatcttgccaatttgttgtacatctctcattcattgttgggggaaaaaaaagcacaactatacctctttaatgttattttcttccattatccctcatttatttggaaagataagggaaaccttgtctgtattatccagaagcacagatatttgcttgacacaatatttaaattcagccca

SEQ ID NO: 24691 - DNA, 383 bp, Homo sapiens
gctggatgtgggctaagatggaacctccttgcaatttctcaaagaccaagtaaaaccttgtgtcatcttcaaagaactcaatcagctccaaaatgttcttgtttccctgacactgatacagcgtctccacctctcgaaacaccctactccgactgtgccctgcttgtttctcgatgattttgacggcatactctttgccattctgtaggctcacggcaccttgaactttggcataggctccctctccaagcaattcagaggtcagcttgtacatatcttcaaactttcctggcaaggagtcagtggcccggcccctccgcttcttcttcctcctcctgtcaccatctgcgatgggaaggggttcgctactgcccatctctaag

SEQ ID NO: 24692 - DNA, 429 bp, Homo sapiens
ggtaaaagattgctctgtattaaaacaaatccaccaaacaacaagtcatagacccgttagaaaccagcattctaaagcatggtttaagtgtgaacaggtgtttgtagcttatctgagactgacagtaggtaaaggggccaaggagagactgctacatggtggtacccaagataattctctgaagagagagacttttgtgtgaggaagacatttattatacagagtgatttattgcaattcttagctactccatcaagctagacttgtcaccatgtcccattaaaagggtttaagaagaattctttctcagaatcctgcattacagtagcatctgcaataaggagaaaattttcttctgggaatcactccaggaaaccttgacccatcctctacttagtcactcttatagagccctgcattttcttttgg

SEQ ID NO: 24693 - DNA, 349 bp, Homo sapiens
gagaaagaatcaaaagcaatagtgatggtggaatttttaaataatattcagctggggggaaatagactgagtttgtgtgatttcaggttatttagagttattaatgtaaacataagaaggcttgtgactcttatcaccctctatagaatataaagactaaaaataaaaactattacctctgggcctgtttttctttgggattagataaagcctttctaccatatcaccaaatactcataaaggctaacacagaaagcttttccaagttaataatttctaaaattaaatatcagggccaggtgtggtggctgacacctgtaatcccagcactttgggaggccgaagtggg

SEQ ID NO: 24694 - DNA, 414 bp, Homo sapiens
gcattttatcctcacaagtgtgaaataggcagagtaggtattgccattttataggaaacaaacctgaggaatagagaactaaaaagctgcaaggcactattgaaagagtacagaaacagaagttaggagactgcagagaacagtgtaaattctatgtggaactctatgttgctgctaaaatggataagggaaattctatataaagaagtggacatgactgggccccgtggctcacgcctgtaatcccagcactttgggaggtcgaggcgggtggatcacctgaggtcaggagttcaagaccagcctggccaacgtggcgaaaccccgtctctactaaaaatataaaaattagctgggccgtggtagcatgcgcctgtaatcccagctacttgggagacttgggagaactgcttg

SEQ ID NO: 24695 - DNA, 519 bp, Homo sapiens
  misc_feature (1)...(519): n = a,t,c or g
atcgtttgccatgattacgaatttaatacgactcactatagggaatttggccctcgaggccaagaattcggcacgaggggtaggggggaggggcagggctcggggttcgggggcggggtgttcacggtgagaccaaaagtcaggcccgcagccgtgccgggtgctcttcagcatgtccttcatcccggtggccgaggattccgacttccccatccacaacctgccctacggcgtcttctcgaccagaggcgacccaagaccgaggataggtgtggccattggcgaccagatcctggacctcagcatcatcaagcacctctttactggtcctgtcctctccaaacaccaggatgtcttcaatcagcctacactcaacagcttcatgggcctgggtcaggctgcctggaaggaggcgagagtgttcttgcagaacttgctgtctgtgagccaagccaggctcanagatgacaccgaacttcggaagtgtgcattcatctcccaggcttctgccacgatgca

SEQ ID NO: 24696 - DNA, 312 bp, Homo sapiens
cttaaattttaactaccttcacttaatatgcttgaactgtcgccttaactatgttaagcatctagactaaaagccaaaatataattattgctgcctttctaaaaacccaaaatgtagttctctattaacctgaaatgtacactagcccagaacagtttaatggtacttactgagctatagcatagctgcttagttgtttttgagattttttagtcaacacataatggaaacttctttcttctaaaagttgccagtgccacttttaagaagtgaatcactatatgtgatgtaaaagttattacactaaacagg

SEQ ID NO: 24697 - DNA, 404 bp, Homo sapiens
ggtcggttgaatttacccagtttgttttccagtaattactaatctgttaggagaaactccatttctctgaatgaaagggtaggagcggctgagtatggagaaggaaactggaagtgggaataagggaaatgattgcttttggtttcataataagtttgtacagtgagttgttgggctactgcaaataaagattttgtatcccttctccagaatgcttgggaccaaaagtgttttggattttttttaaaaattttggaatgtttgcatatacaaaatcagacatcttgaggatgggacccaagtgtaaatacgaaattcgtttgtttcatatagaccttattcacacagccactaagtcatttgcaatatttttaatacgtctgtgcatgaaacaaagtttgtat

SEQ ID NO: 24698 - DNA, 524 bp, Homo sapiens
  misc_feature (1)...(524): n = a,t,c or g
gccaaaatgtgaaccttcctttctgtgtcttaggttgcaaagacagttgcacagaggctcaacacagatccaatgttgctgcagtttttcaagtctcaaggttatagggatggcccaggtaatcctcttagacataattatgaaggtactttaagagatcttctacagttcttcaagcctagacaacctaagaaactttactatcagcagcttaagatgaaaatcacagactttgagaacaggcgaagttttaaatgtatatggttaaacagccaatttagggaagaggaaataacactatatccagacaagcatgggtgtgtccgggacctgttagaagaatgtaaaaaggccgtggagcttggggagaaagcatcagggaaacttaggcaagtatttcttgagcccaattggtgaccgttcagttagggggtgcagttaacgctgacctctgcaagttgcgttggtggaaatcacccagctgggatccatgcgcgtcattcccagactcannggggtgtgcc

SEQ ID NO: 24699 - DNA, 471 bp, Homo sapiens
gaagtaactgaatttgcaaaaacatgtgttgctgatgagtcagctgaaaattgtgacaaatcacttcataccctttttggagacaaattatgcacagttgcaactcttcgtgaaacctatggtgaaatggctgactgctgtgcaaaacaagaacctgagagaaatgaatgcttcttgcaacacaaagatgacaacccaaacctcccccgattggtgagaccagaggttgatgtgatgtgcactgcttttcatgacaatgaagagacatttttgaaaaaatacttatatgaaattgccagaagacatccttacttttatgccccggaactccttttctttgctaaaagctcgatgaacttcgggatgaagggaaggcttcgtctgccaaacagagactcaagtgtgcagtctccaaaaatttggagaaagagctttcaaagcatgtagctcgcctgaccagagatttcccaa

SEQ ID NO: 24700 - DNA, 373 bp, Homo sapiens
ggaaaccccagcgcagcttctcttcctcctgctactctggctcccaggaactgtggctgcaccatctgtcttcatcttcccgccatctgatgagcagttgaaatctggaactgcctctgttgtgtgcctgctgaataacttctatcccagagaggccaaagtacagtggaaggtggataacgccctccaatcgggtaactcccaggagagtgtcacagagcaggacagcaaggacagcacctagtcgacgcggccgcgaattccagatctatgaatcgtagatactgaaaaaccccgcaagttcacttcaactgtgcatcgtgcaccatctcaatttctttcatttatacatcgttttgccttcttttatgta

SEQ ID NO: 24701 - DNA, 852 bp, Homo sapiens
tttttttttcgcaggggcccagggcagcgctgggtgctttatttccatgctgggtgcccgggaagtatgtacacggggtacgtgccaagcatcctcgcgcgaccccgagagcccggggagcgggggcttgccggccgtcgcactcatttacccggggacagggagaggctcttctgcgtgtagtggttgtgcagagcctcatgcatcacggagcatgagaagacgttcccctgctgccacctgctcttgtccacggtgagcttgctatagaggaagaaggagccgtcggagtccagcacgggaggcgtggtcttgtagttgttctccggctgcccattgctctcccactccacggcgatgtcgctgggatagaagcctttgaccaggcaggtcaggctgacctggttcttggtcatctcctcccgggatgggggcagggtgtacacctgtggttctcggggctgtcctttggttttggagatggttttctcgatgggggctgggaggcctttgttggagaccttgcacttgtactccttgccgttcagccagtcctggtgcaggacggtgaggacgctgaccacacggaacgtgctgttgaactgctcctcccgtggctttgtcttggcattatgcacctccacgccgtccacgtaccagttgaacttgacctcagggtcttcgtggctcacgtccaccaccacgcatgtgacctcaggggtccgggagatcatgagggtgtccttgggttttggggggaagaggaagactgacggtccccccaggagttcaggtgctgggcacggtgggcactcgacacaacatttgcgctcaactgtcttgtccaccgtc

SEQ ID NO: 24702 - DNA, 447 bp, Homo sapiens
  misc_feature (1)...(447): n = a,t,c or g
ggccttgtggttatgtgattatcagggactgagctggaaaatcagctgtgtctgccccatggcagtctgaccccagcctgtcagacccagagctgccattcactcacagcttttgtctgacttcccagataacttaaaacctatcagctgaatataaagacacctcatcccacaccagctctacttaaccacttccttaggtgcctgcccattagaatattataaaactttgtgggcctggcacagtgactcacgcctgtaatcccaacactttgggaggccgaggcaggcagatcacttgaagtcaggagttcaagaccagcctggccaacagggtgaaaccctgtctctactaaaaatataaaaattagcccantgcagtgacacatgcttgtagtcccagcttcttgggaggctaaggcaggaggatnactttgaacnnnggag

SEQ ID NO: 24703 - DNA, 457 bp, Homo sapiens
ctttggacacccttatgactgattacgaatttaatacgactcactatagggaatttggccctcgaggccaagaattcggcacgaggttaggaggctccccatccaccctttacatgatgtagggaccagtgtcttgtgagattaaccttgggacacagtgggttagcctggagaaaatgagaggccctgcctggacccagggagaggagccagtgacacaggcagagcggtgcagccctccttcccttccatttggaggaggtggtgccaggagcctgcccgcttacctctgctgaagcataagtggactttgcttttggggcttatctctgatacatgctggagccctgcctctccactgctagatggaacctggaatctctcatctacctcttagtctgtcagtttctacgtgtgagaagcaagcttgtgggccagtgtccttgtacatgctgta

SEQ ID NO: 24704 - DNA, 400 bp, Homo sapiens
ggtgttttctctcctgttaatctagagtgtgcagttacacatgtgtggataatttcatgttccaggggcgcttggcatctcccatggactgattcccaggaagaaaagcccaaagggaaacccacgattcctttcgagtagatgtgggaaagagcccattggaggatatgaggtcctgtgaaattcagttgtgtgtgtggctccttgttagcagtcatgttgacatggtgttaggaggctccccatccaccctttacatgatgtagggaccagtgtcttgtgagatttaccttgggacacagtgggttagcctggagaaaatgagaggccctgcctggacccagggagaggagccagtgacacaggcagagcggtgcagccctcttccttcatttggagg

SEQ ID NO: 24705 - DNA, 209 bp, Homo sapiens
  misc_feature (1)...(209): n = a,t,c or g
ggaccaacctacacaagttccctcccacaagtggacatcagtgtcttctctgtgaggcatctggccattcgcactccctggtgtggtcagcctctctcacacaaggaggaacttgggtgaaggctgagtgtgaggcacctgaagtttccctgcggagtcnataaattancagaaccacatccccatctgttangccttgtgaggaggcc

SEQ ID NO: 24706 - DNA, 624 bp, Homo sapiens
gcggcacgaggacgatcttagagggccaccttggagtgacaaaggagttactggcctttcaaacttctgagaaaaaatttcatattggttgtgaaaaaggaggtgctaatctcattaaagaattaattgatgatttcatatttcctgcatccaatgtttacctacagtatatgagaaatggagagcttccagctgaacaggctattccggtctgtggttcaccacctacaattaatgctggttttgaattacttgtagcattagctgttggctgtgtgaggaatctcaaacaaatagtagattctttgactgaaatgtattacattggcacagcaataactacttgtgaagcacttactgagtgggaatatctgccacctgttggaccccgcccacccaaaggattcgtggggctgaaaaatgccggtgctacttgttacatgaattctgtgattcagcaactctacatgattccttccattaggaacggtattcttgccattgaaggcacaggtagtgatgtagatgatgatatgtctggggatgagaagcaggacaatgagagcaatgttgatcccagggatgatgtatttggatatcctcaacaatttgaagataaaccag

SEQ ID NO: 24707 - DNA, 585 bp, Homo sapiens
gggctaatcgagaaaaagtccaagaacagcatccagtggaagggtgtggggcctggctgcaatacccgggagattgctgacaaactgattgagctcaaggcagagatcgaggagctgcagcagcgggagcaagaactagaccagcacaaggtgtgggtgcagcagagcatccggaacgtcacagaggacgtgcagaacagctgtttggcctacgtcactcatgaggacatctgcagatgctttgcctggagataccctcttggccatccgggccccatcaggcaccagcctggaggtgcccatctctagggtctcaatgggcagaagaagtaccagattcacctgaagagtgtgagtggtcccattgaggttctgctggtgaacaaggaggcatggagctcaccccctgtggctgtgcctgtgccaccacctgaagatttgctccagcccagtcccaggaagcctcacgtccaaatagtcctcagctcactcccactgctgtccctggcagtgcagaagtccagggaatggctggcccagcagctgagatcacagtgagtggcggcctgggactgatagcaagga

SEQ ID NO: 24708 - DNA, 514 bp, Homo sapiens
  misc_feature (1)...(514): n = a,t,c or g
ggccacgaaagctcagagaaagcagcagatggcagaggaaatggtggaagcagcaggggaggatgagcgggagctggccgcagagatggcagcagcattcctcaatgaaaacctccctgaatccatctttggagctcccaaggctggcaatgggcagtgggcctctgtgatccgagtgatgaatcccattcaagggaacacactggaccttgtccagctggaacagaatgaggcagcttttagtgtggctgtgtgcaggttttccaacactggtgaagactggtatgtgctggtgggtgtggccaaggacctgatactaaacccccgatctgtggcagggggcttcgtctatacttacaagcttgtgaacaatggggaaaaactgggagtttttgcacaagactcctgtggaagagtccctgctgctattgccccattccaaggggaaggttttgatggggtgggaaaacttttcctttcnannacncngggaaacaaaaatttttnccnaaaa

SEQ ID NO: 24709 - DNA, 431 bp, Homo sapiens
gcgtggagcggattcggaggcagctgaagatcaccaatgctgggatggtgtctgatgaggagttggagcagatgctggacagtgggcaaagcgaggtgtttgtgtccaatatcctgaaggacacgcaggtgactcgacaggccttaaatgagatctcggcccggcacagtgagatccagcagcttgaacgcagtattcgtgagctgcacgacatattcacttttctggctaccgaagtggagatgcagggggagatgatcaatcggattgagaagaacatcctgagctcagcggactacgtggaacgtgggcaggagcacgtcaagacggccctggagaaccagaagaaggcgaggaagaagaaagtcttgattgccatctgtgtgtccatcaccgtcgtcctcctaacagtcatcattggcgtccagggg

SEQ ID NO: 24710 - DNA, 472 bp, Homo sapiens
  misc_feature (1)...(472): n = a,t,c or g
ggcagctacagaaaacaaaagcaaacaacagggcagcagaagaagcctttgtaaatgacattgacgagtcgtccccaggcactgagtgggaacgggtggcccggctgtgtgactttaaccccaagtctagcaagcaggccaaagatgtctcccgcatgcgctcagtcctcatctccctcaagcaggccccgctggtgcactgaanagccaccctgtggaaacactacatctgcaatatcttaatcctactcagtgaagctcttcacagtcattggattaattatgttgagttcttttggaccaaacctttttgtctttanagttgttcattgtttgtgattgcatgtttccttccttcaactgtgttctccctggcattcagagaggagggagagggaggaagaggnanggggaaggagttccaagagtagcctcaacctgtgcttctgtgcattattctgagaataaaatt

SEQ ID NO: 24711 - DNA, 524 bp, Homo sapiens
  misc_feature (1)...(524): n = a,t,c or g
agcacacatggtcgcatgagtagaggcttagcaaggagtgcgttatggaggacagatttctgctactgacttcgccgaagtggatccacagcttccatttggctcaggctctttgggagaatttcacttcttttgttacctctaatcttacctatgtgtaaccacacattttggtctttttcttaaatcttttagataatcatcagataagtttacttacctgttattctactactttctgccttgccttttcttcaggccacccccaagtgctataacctgcccaaaggttaggacataacaccgctgccacacgtttatctctgggcataaccacgatggcataaacaccagcattcccaatttttctttgtctcttcggaatgctgacaggcaaagaagagcattttctttagtctccaaatgtgtggctcacgcctgtaatcccaacacttgtgaaggccaaggnagtggattacctgagtcaggagttaagacaacctgncaatctggggaaanccgtc

SEQ ID NO: 24712 - DNA, 414 bp, Homo sapiens
gtggagatgccagggagacctcggtgggcagaaaggaaccgggttgtcttgggccgggcagggcgggtggtgactctcaaaaggaaataggatcatggcagcagatgatgacaatggtgatggaacaagtttatttgatgtcttttctgcttctcctcttaagaacaatgatgaaggctcactggacatatacgctgggttggacagtgctgtttctgacagcgcttccaaatcctgtgtaccatcaagaaattgtttggacttatatgaagagatcctgactgaagaaggaactgcaaaggaggcaacatataatgatttgcaagtagaatatggaaaatgtcaactacaaatgaaagagctgatgaaaaagtttaaagaaatacagacacagaatttcagcttaataaacga

SEQ ID NO: 24713 - DNA, 377 bp, Homo sapiens
tttatttttcgcttttagtgtgctcacagaaaattagaacaccttaagcaggagtttaatagcaatttttgtaagcaaagttacattccatctctaagtcaaattggtcaaagcttctccagtatttacaaaacatgatagacaagatgctacacaaaaccattgcatctgaagattttttttcctttattctcaaagacgactggaaaagaaagcattatctgctgtaatcaaaaacataccacagtataaacagtaaccattccacttatcacagcttggttgagtttaaaatttgtgttttaaaaggtccaagatgactgcagttttacaaaaatgggcagggtggaaagttgcaaacttcatgtgcttctgga

SEQ ID NO: 24714 - DNA, 405 bp, Homo sapiens
cagcttgtccgaaaaccagtccttgctgaggatgcccccctgggagaacatctggctcgtgggctccatctgcctgtccatgtcactccacttcctgatcctctatgtcgaacccttgccactcatcttccagatcacaccgctgaacgtgacccagtggctgatggtgctgaaaatctccttgcccgtgattctcatggatgagacgctcaagtttgtggcccgcaactacctggaacctggtaaagagtgtgtgcagcctgccaccaaatcctgctcgttctcggcatgcaccgatgggatttcctggccgtttgtgctgctcataatgcccctggtgatctgggtctatagcacagacactaactttagcgatatgttctggtcttgactgacagttttcca

SEQ ID NO: 24715 - DNA, 513 bp, Homo sapiens
  misc_feature (1)...(513): n = a,t,c or g
tttgataccctctttgaaaccctnttagctangacatgattacgaatttaatacgactcactatagggaatttggccctcgaggccaagaattcggcacgaggcagacgcgtgccatgcctaccagatctttcaccgcaatgggattcctgacgaacagatcgttgtgatgatgtacgatgacattgcttactctgaagacaatcccactccaggaattgtgatcaacaggcccaatggcacagatgtctatcagggagtcccgaaggactacactggagaggatgttaccccacaaaatttccttgctgtgttgagaggcgatgcagaagcagtgaagggcataggatccggcaaagtcctgaagagtggcccccaggatcacgtgttcatttacttcactgaccatggatctactggaatactggtttttcccaatgaagatcttcatgtaaaggacctgaatgagaccatccattacatgtacaaacacaaaatgtaccgaaagatggtg

SEQ ID NO: 24716 - DNA, 330 bp, Homo sapiens
ggttattctccccagccagagaaagggggccatggactgctgtggcaaatagggagacaaggagacagaccctgcagtcctactacagtctggagtggggtcctaagaagaagggtcccacctcaacccctgtcagtgtccactgtggggtgggggctgacccctgcctttgattgtcattctcctgggaagcccagtctcagtccctcccccaacactgtccacactgcccctccccactgtttatttattgcacggatctaagttattctccccagccagagcccgagctcctgctccctgggaaaagtggcgtatggccctgagctg

SEQ ID NO: 24717 - DNA, 377 bp, Homo sapiens
gttcaataccctgtctcaaaataaataaataataaaagattacaaattgggaaatattttacactgaatgacaataaaaaaaagactgcacatcaaaacttgtgggtacagctaaggctgtatttagagggaaatacatagccttcggtacatacatttaaaaagaaagggaaaggacaagatccacaggaaggtataagacagcaagatggaacagactggcccaactcacctcatcacctcaatgtagcccttggcagcagccacgtgcagggcagaggcgcctgtgcgggggtgccgggcctctggcatggcgcccccattcagccagcacctcgtgtcatgaaggagcaattcctcttctgcccgcttggctg

SEQ ID NO: 24718 - DNA, 412 bp, Homo sapiens
  misc_feature (1)...(412): n = a,t,c or g
ctatgactgattacgaatttaatacgactcactatagggaatttggccctcgaggccaagaattcggcacgaggcatctttatgttgaatcttcccgttcaggaaaatgatatgtcttcaattcatttttttctcccttattagcttttccattgttttcatgggccttttgcactcttcttcgattcatcactaggtttttaaatttttttactccgggaaagtattattgtttgtgtatatgaaggctcttggtgtatgtacatttaaattttttttattttgcctatgctttttccaacctaattgtcatcccacactgtgagggggggtgtgtgtgtgtgtacatgtgcataggngncaacctaantngattannatgtactacaaattgactgttcancnnnngcct

SEQ ID NO: 24719 - DNA, 590 bp, Homo sapiens
cccaaccccagtttaggggaaggtagcacagggcagagccactgggcactttgtttccttggccctccgaagctcactgttgcaaatacccccaagcctttgctctaggccagatcttgtttggtgcaggtgatggacaacacagatgactcgggcatgggtcttggagatcttctgttcaaagtacagtgctggcactggggcacagagtgcccacgttagccccgggctctgatagagaggtaggaggcacgttcttggtcactgttccattgcagaccagacttgctggcctgaccacaagggagtggctgggaactcacagccagcatagggacatccccctgcagccttctgacctgcaatcaaggctggggaggggtttgcaggcaggaatatgctgacctttcaccctgccatcccatcccaaccccagctcactagccttcatatatgccttatacttggagtcacaggggccaaaggcctgagaccccaccctgcccccaaactggctaagacagctttcagttcctgactccccaacttggtctctgccctgaagcagggcactgaactctgggctgctt

SEQ ID NO: 24720 - DNA, 459 bp, Homo sapiens
  misc_feature (1)...(459): n = a,t,c or g
gccaggctgctgtgggggcgggagcagcctcagtgtcaagggcccgcccactgacccagccgtacctattcgtccacggtgccccgtagcagcaggtcctgcggccaaatctgtctcccttcatgggcctcccagggaaggaggaagccctgctgtgcaaacacctctgtggccccccaggagtgtgagtggcctggggagggggccgtggcactgaggccgaaagtgcctgccagacggcacggtctgggtgcgggtgttccctgtgagcccgagtccgcttcaggaggggagcctgcaggtgccggctggtgaggggatgacgcnctgtgggtgggaggaggcancgcccatctcagcagcaccaggactgcctgggactccctggancccancaccggggaagccgtcagctgctgtgacaataaaacctgccccgttctggaaaaaaaaaaaaaa

SEQ ID NO: 24721 - DNA, 1081 bp, Homo sapiens
gacgtcgtgggtgtttggtgtgaggctgcgagccgccgcgagttctcacggtcccgccggcgccaccaccgcggtcactcaccgccgccgccgccaccactgccaccacggtcgcctgccacaggtgtctgcaattgaactccaaggtgcagaatggtttggaaagtagctgtattcctcagtgtggccctgggcattggtgccgttcctatagatgatcctgaagatggaggcaagcactgggtggtgatcgtggcaggttcaaatggctggtataattataggcaccaggcagacgcgtgccatgcctaccagatcattcaccgcaatgggattcctgacgaacagatcgttgtgatgatgtacgatgacattgcttactctgaagacaatcccactccaggaattgtgatcaacaggcccaatggcacagatgtctatcagggagtcccgaaggactacactggagaggatgttaccccacaaaatttccttgctgtgttgagaggcgatgcagaagcagtgaagggcataggatccggcaaagtcctgaagagtggcccccaggatcacgtgttcatttacttcactgaccatggatctactggaatactggtttttcccaatgaagatcttcatgtaaaggacctgaatgagaccatccattacatgtacaaacacaaaatgtaccgaaagatggtgttctacattgaagcctgtgagtctgggtccatgatgaaccacctgccggataacatcaatgtttatgcaactactgctgccaaccccagagagtcgtcctacgcctgttactatgatgagaagaggtccacgtacctgggggactggtacagcgtcaactggatggaagactcggacgtggaagatctgactaaagagaccctgcacaagcagtaccacctggtaaaatcgcacaccaacaccagccacgtcatgcagtatggaaacaaaacaatctccaccatgaaagtgatgcagtttcagggtatgaaacgcaaagccagttctcccgtccccctacctccagtcacacaccttgacctcacccccagccctgatg

SEQ ID NO: 24722 - DNA, 336 bp, Homo sapiens
gaaaaatccaccccttcaccattttgaatggtgtaaaatttttaggtaagccaagtagtcatccaaacaacagttactgtgtcatttgcaattgcagattgtccggaatattttttgtttttacattgtaatgtttttaagagtttaaatatattattttcattttaataataatttctattcatagttttttttgtagaatgtgagactgcatgaataaatgtagtctctttgaacccataaatttagtacaaaacctactaacattataccatgaatatattttctttgtaaacctggcttatcaaggaaataatttaaatctgtgagtagata

SEQ ID NO: 24723 - DNA, 414 bp, Homo sapiens
gaactggaaggaaacttgtcaaaatattaatagtggttatattttactgatgggaagacaggcaatgtattgtttatgtccatctctgtcacatccagcctaggacctaacacatatcaagttctcaggaaaaacacactaagtgaataattattaaagttttttgtgcttttctatattttccaaattttctgccataaacatgtactccaagaatgaaaaaacacaatacagtttagtagctgccacagtctccttcctatgtcgaaaagagactgaaagcaggaagccttaggcaggaggctttaagggctgcagcatggtgccaaggatctgcatgctcagcagcatagcggctgttggacatctttatttgcagaccacaggccttggctaggaattgagaactaaatg

SEQ ID NO: 24724 - DNA, 415 bp, Homo sapiens
gaactgggtgaacggtggtgactttagctgagaaagggaagattagaagaggagaagattgtggaagtagagaatggagagctgagtgcgggatgcctgttaaacatctgaattgatccatctaatgggcgcctgggtatatgaatctggagcttgggagaaagatctggacagacagtggggagtttatcatgtgcctgcaaatagcattttctcctctaaatccaaataaaaaggaaatgtttcaattcaatttaatctaaaagataatccatttttaaatcgtcctgtatctacacagatacatctttaatccagtgagggagaagatgatctttttcttttgtgtttttgtgggcatggtcatttataactttctaaacacgagtgggccactgtttaactgaggaagatt

SEQ ID NO: 24725 - DNA, 367 bp, Homo sapiens
gagcccagcacttaactcttgggatgaggcctgctttgtaaatgttgataatccagagaaaatgagcttttagattccaaagacagccagatatcttccacttatgcaaaatgcagagaatcatatttaacaaaagatgttctggacaaatatgcttcttgagggatgaatatttaattataagggaaatgataaatcaaacattaatgggaaaatatgtttgccctcaagattcatgattttgatgggtctctggcaaatcttatactatgtttattggggttattttattgctggttattagtttttaattgtttgcttgttttctgctctgatcaatttttgtataagccgtgggtctattcac

SEQ ID NO: 24726 - DNA, 443 bp, Homo sapiens
gcgagagatggggagagccagcatgaccagggcaactggggcacgcgttcctaggtgttggagcagggagcagagcttggcttgaagcaaggaggtggtaggtccctcagttctcttctcctggctcttgctcaagccatccccactttagaacaaccccacctccctccacacgaccgacgggccctgtgcatcagcacccagttgctgtgcccccttctcctccagacaaggctttcattgatttccccatccagagggggctctctttcttccacactcctgaaactcttcctttgccttgccgtgcccttctctagtctcatgttttagaggggagcatagccccctgatttttaaaatgctttctccttgcttggcaaatccttgcttgggatggccgactggggagggaggagtggtttccccatctcacttgtagg

SEQ ID NO: 24727 - DNA, 1054 bp, Homo sapiens
  misc_feature (1)...(1054): n = a,t,c or g
cccggaggacgtccggcctctgtgagccgcaacctttccaagggagtggttgtgtgatcgccatcttagggaaaagatgttctcgtccgtggcgcacctggcgcgggcgaaccccttcaacacgccacatctgcagctggtgcacgatggtctcggggacctccgcagcagctccccagggcccacgggccagccccgccgccctcgcaacctggcagccgccgccgtggaagagtacagttgtgaatttggctccgcgaagtattatgcactgtgtggctttggtggggtcttaagttgtggtctgacacacactgctgtggttcccctggatttagtgaaatgccgtatgcaggtggacccccaaaagtacaagggcatatttaacggattctcagttacacttaaagaggatggtgttcgtggtttggctaaaggatgggctccgactttccttggctactccatgcagggactctgcaagtttggcttttatgaagtctttaaagtcttgtatagcaatatgcttggagaggagaatacttatctctggcgcacatcactatatttggctgcctctgccagtgctgaattctttgctgacattgccctggctcctatggaagctgctaaggttcgaattcaaacccagccaggttatgccaacactttgagggatgcagctcccaaaatgtataaggaagaaggcctaaaagcattctacaagggggttgctcctctctggatgagacagataccatacaccatgatgaagttcgcctgctttgaacgtactgttgaagcactgtacaagtttgtggttcctaagccccgcagtgaatgttcaaagccagagcagctggttgtaacatttgtagcaggttacatagctggagtcttttgtgcaattgtttctcaccctgctgattccgtggtatccgtgttgaataangaaaaacgtagcaatgcntcncnggtcctcaannagacttgggttttaaagggtncgaaaggnngtntnnccgtncaacaagannggnncctggagggaaaa

SEQ ID NO: 24728 - DNA, 406 bp, Homo sapiens
gcacttaacaaattgtgaagtaacaattttctgtaatctctcttgcctcttagctgttatccagagtatagaaactttttttctcccagagccacccaacgtcataaaactggtagtactctaatggtgaaaacctgtggagctgtcagaagacatgaacttgcttttcctctagtccagtttccattcttcagtcagagtatgatgatccctgtgacagtttttgctctgaaatagtatttatcatgtgtttggtacctagtattatgctttctcatgacagtttctcaacaatcctgtgaggcaaattcgcatgtaccctctgtattagtgtgttctcatgctgttgataaagacacacctgagatggtaatttgtaaagaaaaaggtttaatggactcacagt

SEQ ID NO: 24729 - DNA, 345 bp, Homo sapiens
gaggacattggtctgggcaaagattttttgggtaagacttcaacatcataggcaactggctgagcattgtggctcatgcctagaatcccagcactttgggaggccaaggtgggtggatctcttgaagtcaggagttcgagactggcctggccaacatggtgaaatcctgtctctactaaaaatacaaaaattagccggatgttgtggtgggtgcctgtaatcccagctacttgggaggttgaggaaggagagttgcttaaacctgggagggagaggtggcagtgagccgagattgcaccactgcactccagcctgggcgacagagtgagactctgtctcaaaaaa

SEQ ID NO: 24730 - DNA, 341 bp, Homo sapiens
gggctcggcgtggtggtggacgcctgtaatcccagctacttgggaggctgaggcagaagaatcgcttgaacccgggaggcggaggttgcagtgagttgaaattgcaccactgcactccaacctgcatgacagagcaagactctgtctcaaataataataataataatcatcatcccaataaatctaaaaggaccaacttttgcaattaaaagtcatagactttcagagtggtaaagctatacacatcttgtagatacaaagatacactcccaaaacataagggctcaaagaggctaacagtaaaaattggaacaaaagacttcaaatacttatcaacagaa

SEQ ID NO: 24731 - DNA, 431 bp, Homo sapiens
accgctatgacatgattacgaatttaatacgactcactatagggaatttggccctcgaggccaagaattcggcacgagggtggggtagtcagcattgatgctgaggtccctggaaaccctggtgttttatacctgctgtgaccccacggcacctgggatgtgctttgcacataataagcaaatgagcgaatagtagggaacagaggactggaacagcagagattaggaactgaggagccacgtgtgctctgtaggaggagggcaacctgaatttgcaaagcactgggtctgactcgtccccttctgccagccgggtcaggcctgggagcactgcaggtcagctggtcccctggtagggacccacttcgagaggcctgttcagattcttgcaccaactacctttgccatctgaacaagtcacttgtgctcaa

SEQ ID NO: 24732 - DNA, 496 bp, Homo sapiens
ttgacatgattacgaatttaatacgactcactatagggaatttggccctcgaggccaagaattcggcacgagctcatctcagcttcatgtgggctctcacatccctccaggaagccaggccaggcttcatcacatggtgaccagacagggtaccaagagcatgaagagaagcgtgcctgggcttagagccaccatgccttcacttgtgtgacattctgttggctaaagcctggattttcagaatgaagatgcagctccacctctggatggggaacactgtgaaatcatactgtggagcgtgttcatgtagggaggggaagaatagagggctgtctctcccaggaggcagggtgtggcgggcggcagcatcagccgtagagcaggttcttgcgttcagtgacaacactcttccccccagcatggcagcctcattcgtggagcagtcttgtgtccctcacctatgccatgccatgtattgcccagggttcaacctgtc

SEQ ID NO: 24733 - DNA, 431 bp, Homo sapiens
ggacagaggagcagatatgcagcatctctgccatgatataagggctgctgcagtgcacaactgtctcccaagaaggtaccgcaggggtgtaaaacttctccctgcattgtcaacgctggtctccatggatgtctgctggctttttcaaaaattcttgtagaacagtgcttctcatatggtgattttgtcccccttgccccagggggacctttggccatgtcttgagatgtttttggttgccgtgattgaggaggtgctaccagcgtctgctgggcagagaccagggatgctgctccacatcccacaatgcacaggacaatcttctctacagcaatgaattatccagttcacaatctcaatagcaccaatattgagaaaccctgttgaagatggagactatccacggggcattgatcttggggtctccccct

SEQ ID NO: 24734 - DNA, 1413 bp, Homo sapiens
gggggagcacaaggggctgggggaatgatgatcagacatttcagtgctcttgtgaagcccaaatcctggctcaagacccatttacacagagtatccctcagctcctgagatctaaggctttacccttggttcacctggctcctctctgctacagtacaggtatgcctacttgctccagccctctcagttccatggggaaccgtgcaacttctctgacaaggaagtcgaagactgtgttaccaacagaccatgcagaagtcaagtgcgatgtgaaggctttgtgtgtgcacagacaggaaggtgtgtaaaccgcagacttctttgcaatggggacaatgactgtggagaccagtcagatgaagcaaactgtagaaggatttataaaaaatgtcagcatgaaatggaccaatactggggaattggcagtctggccagtgggataaatttgttcacaaacagttttgagggcccagttcttgatcacaggtattatgcaggtggatgctccccgcattacatcctgaacacgaggtttaggaagccctacaatgtggaaagctacacgccacagacccaaggcaaatacgaattcatattaaaagagtatgaatcatactcagattttgaacgcaatgtcacagagaaaatggcaagcaagtctggtttcagttttggttttaaaatacctggaatatttgaacttggcatcagtagtcaaagtgatcgaggcaaacactatattaggagaaccaaacgattctctcatactaaaagcgtatttctgcatgcacgctctgaccttgaagtagcacattacaagctgaaacccagaagcctcatgctccattacgagttccttcagagagttaagcggctgcccctggagtacagctacggggaatacagagatctcttccgtgattttgggacccactacatcacagaggctgtgcttgggggcatttatgaatacaccctcgttatgaacaaagaggccatggagagaggagattatactcttaacaacgtccatgcctgtgccaaaaatgattttaaaattggtggtgccattgaagaggtctacgtcagtctgggtgtgtctgtaggcaaatgcagaggtattctgaatgaaataaaagacagaaacaagagggacaccatggtggaggacttggtggtcctggtacgaggaggggcaagtgagcacatcaccaccctggcataccaggagctgccgacggcggacctgatgcaggagtggggagacgctgtgcagtacaacccagccatcatcaaagttaaggtggagcctctgtatgaactagtgacagccacagattttgcctattccagcacagtgaggcagaacatgaagcaggcactggaggagttcagaaggaagttagttcctgc

SEQ ID NO: 24735 - DNA, 449 bp, Homo sapiens
  misc_feature (1)...(449): n = a,t,c or g
ggtttttaagattttgcctttgttgttgaaaaagggtttcactgtcaccaaggcttagtgcagtgacacaattacagctgattgcagccttgaccttcccagctcaagtgatcctcctacctcagcctcccaagtagttaggaccacaggtgtgcacctcatatccagataattttttcaatttttttttgtagaggtggggggtctccctatgttgcccaggcagatctcanactcctgggctcaagcgatcctcacacctcagcgtcccanagtgctgggattacagttgtgagccactgtgcctggcctttttttttttttaatnttttnannggttccnannccntttacgggcttgccccntttttagnaanggnggtttggggtccaccnnannctttcnctntnttttggctttnacanaaggaaagngggggngttttttt

SEQ ID NO: 24736 - DNA, 521 bp, Homo sapiens
  misc_feature (1)...(521): n = a,t,c or g
gctggaagaagaggtacaagagcctgctgaagtgcagttgtgttgcctttcctctcactctcccttccttgccacctttcaccacttcctgcaggaatactccatttcatcgcagggagaatctgatctttacatcagggcatctgcccagttttttgccgacttctctggcagagtgggttcacttctgccatttggcagcctcggaataaacccagcagcctcttctcctttcatatatcctcttgggctctgtaaagtattttcccttgacccatcgtactccaataacttcgtcaggctttgctttcaaggccaagggcccactccattttcttggtctccactgaatgactgttgctggaccccagcgcttggnggtatcctttttaagggntttggggggttttngttggngnntggtntgannttggtacncaaggatngngngcccnangacnnnnancnancntngnttgnnnntatgnnnnnntanctannnnnnnnnnnnnangaacctt

SEQ ID NO: 24737 - DNA, 422 bp, Homo sapiens
gattagcattccttactgaactgaatctttaaaatacaatgaattacatccaatttttacctttagtaacaccatcttaataacacaaattccaaagaacaagtcagtctggcttatcttctaaaataaagttatatttaagtagactttgggtggcttttgttgacattattgaatgctttaaaccacatttatactatttttattctgttaacatttttaattagttgtcagcttttactcttgatctatcctattttttttctttcctcttaacactgtaacaaaaaatactcctgtttcttctgacatatttgggcatttcaccttttcttttgtttttagtatctctgaggtaagggaaaggtatttcactgaggaataaccaaggcaatgttgatgtgaagactttctctgattat

SEQ ID NO: 24738 - DNA, 427 bp, Homo sapiens
gggatcacataccgtatttagttaccatatctttttaatttcctttaatatggaagagttcctcagcatttgtatttttgtgacattgagatttttgaagagtgcaggccaattatttatcattcgttcatttgttcattccagtattactgaggtatagttgacaaaaattgtatttattcaagttgtacagcatgatgatttcatatacattgtgaaatgattacaacaatcaaattaacacattgtcaccactcttaggagtgtgtgtgtgtgtgtgtgtgtgtgttaagggccagttattttacagaatcttccctactttgggtttgtctcgtgtttcctcatgattagattcaggttatgtattcctgattgtaatattacatacatgaggttatattctttccaagagaccacatttgga

SEQ ID NO: 24739 - DNA, 393 bp, Homo sapiens
  misc_feature (1)...(393): n = a,t,c or g
gaaaagtactgccacagaagtagctcgggaggaagccaagccgggtggagatgcagcccctagtgaggctcttcttgtagatatcaaactggaaccactcacggtcactccagatgctgcaagccagcccctcattgaccttcctctcatcgacttctgcgataccccagaagcacacgtggctgtaggatctgaaagcaggcctctgatcgacctcatgacaaacactccagacatgaataaaaatgtggccaaaccttcaccggtggtgggacagctcatagacctgagctcccctttgatccagctgagccctgaggctgncaaggagaacgtggattccccactcctcaagttctaagccganccaattcctttgccttgaaagaacag

SEQ ID NO: 24740 - DNA, 356 bp, Homo sapiens
gccgatggacaggaaggagtgttacacactgcttaccctgatttattcagtggttttgttttcattctggaaccatactatcaaatggcgacagactgttccgttccacccccgtgaagtaatcatgcaccgtgtgaatagtatcaagcaggattgctttcattgtatggagcatgaccagcgtgtgactcattctgacatttcagatcctaagaattctaagaacactactagaagcatttgttccctcctagtcaatgcttcatactttttcttgggattcttttagcccttgacattcttgtcccccaaacctgtaagtaggtgaattcctaagataagtgtgtattttcatt

SEQ ID NO: 24741 - DNA, 421 bp, Homo sapiens
ggacaaggggccttcctggtgaacacagcccggtgtggcctggaggatgataaggcgctggcccaggccctgaaggagggccggatccgcggcgcggccctggatgtgcacgagtcggaacccttcagctttagccagggccctctgaaggatgcacccaacctcatctgcaccccccatgctgcatggtacagcgagcaggcatccatcgagatggcgagaggaggcggcacgggagatccgcagagccatcacaggccggatcccagacagcctgaagaactgtgtcaacaaggaccatctgacagccgcacccactgggccagcatggaccccgccgtcgtgcaccctgagctcaatggggctgcctatagcaggtaccctccgggcgtggtgggccgtggcccccactggcatccca

SEQ ID NO: 24742 - DNA, 1089 bp, Homo sapiens
gctcaggtggtccacccgagaccccttgagcaccaaccctagtcccccgcgcggccccttattcgctccgacaaggtacaaaaaggctctggacggcggcgtggtaggaggacgggagcgggggcgggaagttccctgaaggagcgagacagggagggacagggcagaggaggagaggaaggcgatgcgacggacaggcgcacccgctcaggctgactctcgggggcgaggtcgagccaggggcggctgccctgggggcgaggcgacgctgtctcaacctccacctcgcggcggaacccgaggacaggagcctcagatgaaagaaacaatcatgaatcaagaaaagttagccaaacttcaggctcaggtccggatagggggcaagggtacagctcgcagaaagaagaaggtggtacatagaacagccacagctgatgacaaaaagcttcagagttctctaaaaaaactggctgtgaataatatagctggtattgaagaggtgaacatgattaaagatgatgggacagttattcatttcaacaatcccaaagtccaagcttccctttctgctaatacctttgcaattactggtcatgcagaagccaaagcagctgacagaaatgctacccagcatcttaaaccagcttggtgcggatagtctgactagtttaaggagactggccgaagctctgcccaaacaatctgtggatggaaaagcaccacttgctactggagaggatgatgatgatgaagttccagatcttgtggagaattttgatgaggcttccaagaatgaggcaaactgaattgagtcaacttctgaagattaaacctgaagaagttactgggagctgctattttatattatgactgctttttaagaaatttttgtttatggatctgataaaatctagatctctaatatttttaagcccaagccccttggacactgcagctcttttcagtttttgcttatacacaattcattctttgcagctaattaagccgaagaagcctgggagtcgacgcggccgcgaattccagatctatgaatcgtagatactgaaaaaccccgcaagttcacttcac

SEQ ID NO: 24743 - DNA, 412 bp, Homo sapiens
  misc_feature (1)...(412): n = a,t,c or g
ggcgtggtggagcacgcctataatcccagctactcaggaggctgaggcaggagaattgcttgaacccaggaggcggaggtgcagtgagctgcaatcacactactgcactccagcctgggtgacagagcaagactctgtctcaaaaataaataaataaaataaataaaaatccctctgacaggggcagggaggccaacatggaggcagcaggaggctgtgttctagaaaggtccctgtagctgccgtgtggcagtggactgatgggtgcaggactggggagaaacaggctaaggaggaggctgccacatgggtttagtggaaagagagtaagggcttgcaccaggacccagcagcagagatggagaagaggggacctcatctgccagcccaaggaaacacgcnttttaatttc

SEQ ID NO: 24744 - DNA, 423 bp, Homo sapiens
  misc_feature (1)...(423): n = a,t,c or g
ggttcactgtaaatccaggaaggtgtttggtgaattcatggctgcaccctggaatcttgttcactgtaaatccaggaaggtgtgatgtgagttcatagctgcaccctggaatctatttcactggaaatccagggagatgtgatctgaattcatggctgcgccctggaatcttgttcactgtaaatccaggaaggtgtttggtgaattcatggctgcaccctggaatcttgttcactgtaaatccaggaaggtgtgatgtgagttcatggctgtgccctggaatcttgtttttaagggtcctgcaaagcccgctgggctgttgtgagatgaggcatgccgtccgtacctggttctgagtggtgaaagggtctgggtgatgtcttcgttaggggcttttgacctcagtggaantgatttttaaca

SEQ ID NO: 24745 - DNA, 389 bp, Homo sapiens
cattaactccgttgttgtggtcttcttcctgtcaggtatcctgagcatgattatcattcggaccctccggaaggacattgccaactacaacaaggaggatgacattgaagacaccatggaggagtctgggtggaagttggtgcacggcgacgtcttcaggcccccccagtaccccatgatcctcagctccctgctgggctcaggcattcagctgttctgtatgatcctcatcgtcatctttgtagccatgcttgggatgctgtcgccctccagccggggagctctcatgaccacagcctgcttcctcttcatgttcatgggggtgtttggcggattttctgctggccgtctgtaccgcactttaaaaggccatcggtggaagaaaggag

SEQ ID NO: 24746 - DNA, 396 bp, Homo sapiens
acttcaaagactcctcctcaagaagaattacctactcgagtgtcatctcctgtatttggagctacctctagtatcaaaagtggtttagatttgaatacaagtttgtccccttctcttttacagcctgggaaaaaaaaacatctgaaaacactcccttttagcaacacttgtatatctagattagaaaaaactagatcaaaatctgaagatagtgcccttttcacacatcacagtcttgggtctgaagtgaacaagatcattatccagtcatctaataaacagatacttataaataaaaatataagtgaatccctaggtgaacagaataggactgagtacggtaaagattctaacactgataaacatttggagcccctgaaatcattgggaggccga

SEQ ID NO: 24747 - DNA, 445 bp, Homo sapiens
aaccgctatgactgattacgaatttaatacgactcactatagggaatttggccctcgaggccaagaattcggcacgaggagaaaaggaaactcatttacatttaccagatgaattctgcagttttgaatttcaacctcatttgcaaatgcttatctagtttgagtgtaaatttttatgtaaatgactacagtggctatgtcattgctttggccaccttgccagacctcattcatgtggaagagactcacatgtttttaggtgacataagcagttctaagtttacactttataattaaggtattacccccttttaaatcacgttggctctatcccttgtcatcagtcaatatttagtgaccccacctgactagttgataacacagaggttctcagacctgggatctgacctgtttactgtgttgacagagccttaagggctttatc

SEQ ID NO: 24748 - DNA, 423 bp, Homo sapiens
gaataagcaatgccaagcaagaagccatagcactgctgacatttagagatagtatttgattcctaaacctatcctgaaacttctggttttgtggtctccctctggacggtagtacagttttgagaaaggctgttctgtcatgaaactgcagaaactgacactggtgagccaccaggacctaaacttgggtctaaattgagaatatgccccgactaagtcctggactctacagttcttgaggttgtttggactgcttagtaccattgatttaatcaaaattgacctatgactagcgcttattttataactgtgcttccctatcaataaggtcatttttaaaaactgctgttggccaggcgtggtggctcacacctgtgatcccagcactttgggaggccgaggcaggcggatcacgaggtcagg

SEQ ID NO: 24749 - DNA, 591 bp, Homo sapiens
gaagccatagttaacaatgaggacactaatactgggaggccttaaagctgctacccgtgtccctgtaacatgtccccatcgtcctctgagctcttacttcctgacagacacattaaggtgttgtaggctcatcttgggtgttcccagccccctgtcttgatcactttatggtttttgatgctgttgtaaaggttttgtttcttaaatttcattttccattttggtttccactgcagtattcatagcacctcagggctggccctgtggccttatcttggcttcctgcttacatcctgtgactgtctccatcctcagagtgtcccctcctagtttgagtaactgcagtgaatctgagaagtcctgcagtctttccagtctgtccttgtcatctaaaacatctccataggtgtcgtgacaaccagatgtttgtaggtatttctttttagttgtcattcattgactgcttatctggttattattattttttaaattataatttttttgagaaggagtctcactctgttgcccaggctggagtgcagaggtgtgatcttggctcactgcaactaccacctcctgggttcgagcagg

SEQ ID NO: 24750 - DNA, 258 bp, Homo sapiens
  misc_feature (1)...(258): n = a,t,c or g
tcccctcccccaantaaccatntnctctcttgccaaatgctnccgntaaatacgactcactatagggaatttggccctcgaggccaagaattcggcacgaggagagctagcaccaataccctgaaatagaatgccgaagaacaattaactatgaaaatcaaaaggctgtaatcgtgatgaactaatggggacagagagaaaactcagatcttcaagtttcattgtttctttttctttgaattgctttttttttttttt

SEQ ID NO: 24751 - DNA, 457 bp, Homo sapiens
  misc_feature (1)...(457): n = a,t,c or g
ggttaggagatggaattttaaaagacaaaatgcactcagctgaatttctaagccttaaagataccaaagccttcaatatttcatgctgtatacgatgcgactcattatctccttgattttcctaaagatacgctactaaaatacatcatacaaagtgaggttatattacgtgtgcaacattgcttccataggcttttcagttttaaaatttgtgagacaaatgattaatatctaaaactaaagtaattttagtactaatgtgtacataaactaatttttaaaggatttatgacattttctttacaagtgatttgtactatttccttagatcacaactgtccgtctcaacggatctgatgccatatttctatttccatttatattttctgatgaaaagcttgaagaatggttaaaaatcngagngggggggnaaannttttcttaaaaccctagaagt

SEQ ID NO: 24752 - DNA, 339 bp, Homo sapiens
aaggacttcccttttgagtagatgctggaaagtggaggttttttttgttggtttgtttgtttggttttgtgtttttttttgagatggggtcttgctctgtcgcccaggctggagtgcagtggcaggatctcggctcactgcaatctaggtggaggtctttttaaataacctcatgttacttcaggcaaatctggtacaggagaagcccaagctaactgagctgggtgaaggcttgtgcatcacctggcttgagttccttgctgtcacagatgataggttcatgtacacaacattaatgtttgataaggtcgacgcggcccgcgaattccagatctatga

SEQ ID NO: 24753 - DNA, 553 bp, Homo sapiens
  misc_feature (1)...(553): n = a,t,c or g
gaaaagtcacataggtgaactccagtgggggtactctaggagggaggcagttgttcattgtgattaggccatctgtgtttgctatttgttcctgatggaagttaggctcccatcctcccaagagactgagagaaaaggatctgtctcttttcttctaagattacatttcaaaaggatggttccaaggtccttgagaaggacattcctggggtgtgaaatcagctgggagaagattttcatcacaaagaggcagattaagaattttcagttgaaatttctttaaaagtaagtgctctaagtaaagggaaatcaggagccttgagtcaggaagctgactgtctaaagtttagtcaaaagtttagtcaagcagaggggaatattaagccctcttggacactagaacatttgattatgtgtctgttttttagcctcattcgtttacctggattcactttccaggtagatatagaattggatttaacccangattgttattttgccaagcgaagatgggtggtgatagagggaattgggcgntgagtgctanggaaag

SEQ ID NO: 24754 - DNA, 393 bp, Homo sapiens
ggcgtggtaattgggcttaggctccaaagcaacttgcagcctggggggatgtcaagctggggggttcaggccagaggtcaaattgggactgtgagatgtgaaagaatagtcaaatctcatagctggttgtaaattaagttccatggtgttttccctgaactttcaataaagtcctaataaaacacatggtttggtctcaactctgtacggggagttaagtgaacttcctaacctaattaggaatgatgggatgaaagacaaagcaggccagaacaatgaaaactgttccagtctgtaagagttgactggagcttcagaaggtaatagacagaggccttggtggggctgcttaacaaggagcctagagcagaagggctggtgagaaatatatca

SEQ ID NO: 24755 - DNA, 482 bp, Homo sapiens
  misc_feature (1)...(482): n = a,t,c or g
tttggccctcgaggccaagaattcggcacgagaccattgatttgttggaacaactgaatcattggacttttaaaatgtcccacattttggatttggcttattgcttccttatggtattattagattcgggttcaattgtgattttgattcaataatgaggactactttctagatgagactgtacttcgtgttaaatcataacatgagagacataatgtctggctattcgacttttattgaggctgaaattgagcagatggagcacaaaaaatatgcccaatccttcacacaatttccatcagtgtttctaatggttttagcatctattgatgattatagcttaaatccatttcactaagtgttggggaaaaggtgttttcagatgcttttattccttctgcatttattggtattttgagacagggtccctctctgcacccaggctggactgcagtggccctatcacatcttaccatnggctt

SEQ ID NO: 24756 - DNA, 360 bp, Homo sapiens
ggaatcatacaacttttgttcttttttgtctgacttcttccacttagcataatgtttttaaggttcatccatgttatagcgttatcagaatttcattcctttttaaggctaagtgatgttctattgtatgtatgtaccacattttgtttttccattcatctgttgatggacatttaaaacgtcacatttttaattctttggtctcctcatctaattaatatgttcccagaaaaatcagggtttttaaaatttacttctatagatctgaaatcagaagggtatcatcattgtcttagagttcaatttcacaccttaattttgtagaaagaggggaatgtgaataatcatacatttttcgtg

SEQ ID NO: 24757 - DNA, 413 bp, Homo sapiens
ggggcctggggctgctgcccttttacccaggctgtgtgctgtgaggaccacatacactgctgtcccgcggggtttacgtgtgacacgcagaagggtacctgtgaacaggggccccaccaggtgctctggatggagaaggccccagctcacctcagcctgccagacccacaagccttgaagagagatgtcccctgtgataatgtcagcagctgtccctcctccgatacctgctgccaactcacgtctggggagtggggctgctgtccaatcccagaggctgtctgctgctcggaccaccagcactgctgcccccagggctacacgtgtgtagctgaggggcagtgtcagcgaggaagcgagatcgtggctggactggagaagatgcctgcccgccgggcttccttatcccaccc

SEQ ID NO: 24758 - DNA, 616 bp, Homo sapiens
gattacgaatttaatacgactcactatagggaatttggccctcgaggccaagaattcggcacgagctgggtgggaaggtaggggcgggagaatgagggggtttgtaatttattaattgcgtattttctaagagttttcaacatagtttggcttcacacacaacttcaggcccctcatttgagagccattatcctcaactccatctaaactgaatcttggggagaacccagatctgaccaattggggtaggagacagcaggctctccaagaacatgggcaaatttatttttttataaaacaaaaagataaaaagagttgaaagacgtgaaagtggtgagagatggaggaaacagaatcaggaagtggtagaaaagagaggaggtggctgggcgcagtggctcacgtttgtaatcccagcactttgggaggccaagttgggcggatcatttgaggtcaggagtttgagaccagcctggccaacatggtgaaaccccgttactactaaaaatacaaaaattagctgggtgtctcgtggcaggcacctgtaatcccagctacttagaaggctgaggcaagagaatcacctgaacccaggagtggagggtgcagtgagcca

SEQ ID NO: 24759 - DNA, 381 bp, Homo sapiens
  misc_feature (1)...(381): n = a,t,c or g
ggacaataactattatcaggacaaacagaaaacttatagtcaactgtcgacatgagctgtcaggtgttcaattaatgataatccagccaagagcacatccaacccagagaagcactgaggtctgaagggtacagttctgctccggctgctctagacagcagccagttcagactagagcaggaaaaggcaggcctccagagggaagcctagagtgaagacaaaagcaaaataaaaacaggatgataacgaggatgcacaattaaggaaatggcaaagacactgaacactgggaaaacacacatgaaaattttatgtaaccnaatacatatttcatactatagattagctatatagaanaaaatgagttttggcaaactagag

SEQ ID NO: 24760 - DNA, 346 bp, Homo sapiens
gcctgatgccaagacccaacgcctgttttttaagtggcagcagggacatcagctggcaattgtaaataggtttccaggatcaaaactaacctttcagcgtattctcagctatgacacagtggtgcaaacaactggagactcgtggcacataccatatgatgaagacttggtagaaagatgttcctgtgaagtaccaaccaaatggctttgcctccaccaaaagacatagagattcttacctctatgctaagtttgtgtttgggtaccctctaggttggcatcagaggctcttgagctggtgtttgtttagggcattgcctctgtcctgaagataaaaggattctat

SEQ ID NO: 24761 - DNA, 502 bp, Homo sapiens
ccatcagctatgacatgattacgaatttaatacgactcactatagggaatttggccctcgaggccaagaattcggcacgagtgggcatgctggatcctccgagaatcgaggtggcctcctccgtgaagctgtgccggcaagcaggcatccgggtcatcatgatcactggggacaacaagggcactgctgtggccatctgtcgccgcatcggcatcttcgggcaggatgaggacgtgacgtcaaaagctttcacaggccgggagtttgatgaactcaacccctccgcccagcgagacgcctgcctgaacgcccgctgttttgctcgagttgaaccctcccacaagtctaaaatcgtagaatttcttcagtcttttgatgagattacagctatgactggcgatggcgtgaacgatgctcctgctctgaagaaagccgagattggcattgctatgggctctggcactgcggtggctaaaaccgcctctgagatggtcctggcggg

SEQ ID NO: 24762 - DNA, 367 bp, Homo sapiens
gggaacatgcgtgaccagcttttacacatgaggaaatggaggctcacagaggcagaatcactaagcaactccccttaaagtcacccacccaggtggagctggaatttgagcctaagcagccaggctgccctgggcagcggtgggtgacaggttggcagagagcaggtttttgtctgtctgggtcttacccctttagccccatagtcaggcaggtggactcgtgaagctgtgggcagctttatcctctgaggcggtgggtctcaagtgtccagctcacctggcactcagctgtggggctcgtgactgcagcttaggactagaccctcatccttcctggggtcagtgtttagtggccaaggctggggga

SEQ ID NO: 24763 - DNA, 328 bp, Homo sapiens
gcccttgaaatgttaactagacggatttccaaggagaccacaggactgtatactgtcttggaatgtcctcagaaggctctgtcattgatcaggtaacagtaaaaaccccagagtcctttctttcaaatggaaaagggaaagcagagggacagaagctattcaaacttcgtcttctttccttgtggcttgtggtcacctcctcctcctctgcattaggtgatcccctgggtccttgcaactccagcctgattgctctgccctcaatttcccttttattacaggaatttaaagcttctttagcgtcttcgaatgaagcaaactctataaa

SEQ ID NO: 24764 - DNA, 421 bp, Homo sapiens
  misc_feature (1)...(421): n = a,t,c or g
ggacaagatctcactctgttgctaagactagtcttgaattcctggcctctagcaatcctcctgcctcagcctcccaaagtgctagttataggcatgagctactgccccagcccaaagcagattctaaatatgtcaatgataaattggtaccccctgtagtagtaggcagatgcttcccctcctgcacccccaacaaagatgtcctcatcctaatcccagagatctttgaatgcgctatcttgcatgacacgactagagagaggcttctaggagaaaagtccagcctctggttcacagtcagcaacaaatatgaaccgtttagtcttacaactgtgaggaagtgaattcagccaacaacccaaaggacaaggaaatgaattcttcccagagctnaccnggtnaatgnccagaaggttgcccg

SEQ ID NO: 24765 - DNA, 553 bp, Homo sapiens
ctaggtacctcacaaaatgtattatggtgccatggctgttagtttttagtgagtgctgtaggattaattcgaaaataggcagaattccattcctcccaaggtggcaaaaattagctatactgatgtaattgtcatttacctgggtatgaattccctgacacacattcatgtcaacatatgtagcaaattttgtgaaaacacaacaatttgaagcttctgtaattttgagcactgctctaacaacaagcataatataaaattagttagattttgcaagtctacaaatgagctcttgcaacagaactcacagcctttttacttttttcccctaactttagcaatgtagtatcttgagccattaatttttgggtttttttaaaatccagaaggtatatagaaaccttttcagatttttcatctgatttgttcttgcagatgttcttctatcaaataccttattttaccttacagatatttgttgcacaggcagatactgctgtatttagacatttctatttcagttcattaaaaactgcaaaaccaatctgtatca

SEQ ID NO: 24766 - DNA, 312 bp, Homo sapiens
cttacatctcctgctatgcagtgaattctgcagcaaaccccactgcactgagggcatacatacatacatacatacggcatacatacacatatgctgaccagaccatatacatatgtctgcatatgcatatatatacatacatagatacagaaatatacggtacatacaggttgggtattcctaatctgaaaacccaaaatctgaaactttttgaactctaacatgacgctcaaaggaaatgctaattggagcatttaatcttggattttcagattagggatgctcaaccaataaatataatgcaaatattcc

SEQ ID NO: 24767 - DNA, 419 bp, Homo sapiens
  misc_feature (1)...(419): n = a,t,c or g
gagaagatgtttgagttctacgagcgagtgtctggagcccgaatgcatgctgcttatatccggccaggaggagtgcaccaggacctaccccttgggcttatggatgacatttatcagttttctaagaacttctctcttcggcttgatgagttggaggagttgctgaccaacaataggatctggcgaaatcggacaattgacattggggttgtaacagcagaagaagcacttaactatggttttagtggagtgatgcttcggggctcaggcatccagtgggacctgcggaagacccagccctatgatgtttacgaccaggttgagtttgatgttcctgttggttctcgaggggactgctatgataggtacctgtgccgggtggaggagatgcgccagtccctganaattatcgcacagtg

SEQ ID NO: 24768 - DNA, 349 bp, Homo sapiens
gcaaaaacctggccaggctaagtacctgctgctaacactctggctggccctgcaggagagggtggctctttctcctggagacaaagacagggtgcctggagactgcgtcaacaaactttctccggtggtgtctgggagccagagtagcaggaggaagagaagctgcgctggggtttgtcgacgcggccgcgaattccagatctatgaatcgtagatactgaaaaaccccgcaagttcacttcaactgtgcatcgtgcaccatctcaatttctttcatttatacatcgttttgccttcttttatgtaactatactcctctaagtttcaatcttggccatgtaacctctga

SEQ ID NO: 24769 - DNA, 1310 bp, Homo sapiens
gtaggaaatttggttatgtggattttgaatctgctgaagacctggagaaagcgttggaactcactggtttgaaagtctttggcaatgaaattaaactagagaaaccaaaaggaaaagacagtaagaaagagcgagatgcgagaacacttttggctaaaaatctcccttacaaagtcactcaggatgaattgaaagaagtgtttgaagatgctgcggagatcagattagtcagcaaggatgggaaaagtaaagggattgcttatattgaatttaagacagaagctgatgcagagaaaacctttgaagaaaagcagggaacagagatcgatgggcgatctatttccctgtactatactggagagaaaggtcaaaatcaagactatagaggtggaaagaatagcacttggagtggtgaatcaaaaactctggttttaagcaacctctcctacagtgcaacagaagaaactcttcaggaagtatttgagaaagcaacttttatcaaagtaccccagaaccaaaatggcaaatctaaagggtatgcatttatagagtttgcttcattcgaagacgctaaagaagctttaaattcctgtaataaaagggaaattgagggcagagcaatcaggctggagttgcaaggacccaggggatcacctaatgccagaagccagccatccaaaactctgtttgtcaaaggcctgtctgaggataccactgaagagacattaaaggagtcatttgacggctccgttcgggcaaggatagttactgaccgggaaactgggtcctccaaagggtttggttttgtagacttcaacagtgaggaggatgccaaagctgccaaggaggccatggaagacggtgaaattgatggaaataaagttaccttggactgggccaaacctaagggtgaaggtggcttcgggggtcgtggtggaggcagaggcggctttggaggacgaggtggtggtagaggaggccgaggaggatttggtggcagaggccggggaggctttggagggcgaggaggcttccgaggaggcagaggaggaggaggtgaccacaagccacaaggaaagaagacgaagtttgaatagcttctgtccctctgctttcccttttccatttgaaagaaaggactctggggtttttactgttacctgatcaatgacagagccttctgaggacattccaagacagtatacagtcctgtggtctccttggaaatccgtctagttaacatttcaagggcaataccgtgttggttttgactggatattcatataaactttttaaagagttgagtgata

SEQ ID NO: 24770 - DNA, 326 bp, Homo sapiens
atttataacttaattacttgtgacacatagctcaaacaaatgtagaagttaatcatgatgtacaaagtctctgacttcttgcttttaaaaaaaacataaagaataagaggaagcctagatttcttttaaaatttagatggcatccgtgtgacaaacagaaaataaaacatttgtttcataaaagaattatgtttctatttgggtcccactttaaattgtgtctggttctatttccccaaaaggatgctattttttccccctcatcattaacccaaatatattaaaccccctagtaataccctcatgggatgaatgaaagagggaac

SEQ ID NO: 24771 - DNA, 397 bp, Homo sapiens
gtgagcccctgagtcctgagttggtggcagctgcatctgctgtggcagattctctcccttttgataagcaaacaaccaagtcagagctgctgagccagctccagcagcatgaggaagagtcaagggcacagagagatgcaaagcgacctaaaattagtttcagtaacataatatcagatatgaaagttgccagatctgctacagctagagttcgttcaagaccagagcttcggattcagtttgatgaaggctatgacaattatcctggccaggagaagaccgatgatcttaaaaaaaggaaaaatatattcacagggaaaagacttaatatttttgacatgatggcagttactaaagaagcacctgaaacagacacatcaccttcctttgggatggg

SEQ ID NO: 24772 - DNA, 408 bp, Homo sapiens
ggagacattgccaaatttataattctgtaatttttcgttgggtgaggggagcattacatcattatataatggtacttcctcaagttgctggtcatcagtttctgtgtcgttgctgccaaaatctaaagatatgattgtgtctccagcggctggggccagcaaagttaaagcatcaggttccttcttaagtttgtcaaagaggctacttgtatcttctgattcaactttggtgaatagctgagtcattttcatatctgaagattcaaccggtttaaggacacattctgtttgttgaagggagaaaatcaagtcgtgctgaataataccactcacaacgtaattcacacatacaatgcactgtggttgagaattcttggtgttatatatgacagttgcttgagtttcaac

SEQ ID NO: 24773 - DNA, 307 bp, Homo sapiens
taggatctgcttaataaaacgttgctttgacattcaaaatttaatgttagagtctctgaaaccaaagaacaaagacatctccatacttagtgggtagattacttgagcccaggaattcaagaccagcctgggcaacatggtgaaaccctgtttctataaaaaataatctgggctttgtagcatatgcctgtggtcccagctactgaggaggctgaggtgggaggattgcttgagcccaggaggcagaggttgcagtgagccaaggtcacgtcactgcactctagcctgggcaacagagtaagacaaa

SEQ ID NO: 24774 - DNA, 493 bp, Homo sapiens
  misc_feature (1)...(493): n = a,t,c or g
cctcgaggccaagaattcggcacgagaggggtcctagtacaccgcaatcatgtctattatgtcctataacggaggggccgtcatggccatgaaggggaagaactgtgtggccatcgctgcagacaggcgcttcgggatccaggcccagatggtgaccacggacttccagaagatctttcccatgggtgaccggctgtacatcggtctggccgggctcgccactgacgtccagacagttgcccagcgcctcaagttccggctgaacctgtatgagttgaaggaaggtcggcagatcaaaccttataccctcatgagcatggtggccaacctcttgtatgagaaacggttttttaagcccttcatttgctctctagacctcatcggctgccccatggtgactgatgactttgtggcagtggcacctgcgccgaacaaatgtccggaatgtgtgantcctctgggagccaacatggatccngatcacctgtttgaa

SEQ ID NO: 24775 - DNA, 476 bp, Homo sapiens
ctatgacatgattacgaatttaatacgactcactatagggaatttggccctcgaggccaagaattcggcacgagccaggctcttctggacaagtacaatgctgagaagcctaagaatgcgattcacacctttgtgcagtccggatctcacttggcggcaagggagaaggcaaatctgtgaggccggggccctgcacctgtgcagcgaagcttagcgttcatccgtgtaacccgctcatcactggatgaagattctcctgtgctagatgtgcaaatgcaagctagtggcttcaaaatagagaatcccactttctatagcagattgtgtaacaattttaatgctatttccccaggggaaaatgaaggttaggatttaacagtcatttaaaaaaaaaatttgttttgacggatgattggattattcatttaaaatgattagaaggcaagtttctagctagaaatatgattttatttgcc

SEQ ID NO: 24776 - DNA, 525 bp, Homo sapiens
agctatgacatgattacgaatttaatacgactcactatagggaatttggccctcgaggccaagaattcggcacgagcggagattcaacactgccaatgatgataacgttactcaggtgcgggcattctatgtgaacgtgctgaatgaggaacagaggaaacgtctgtgtgagaacattgccggccacctgaaggatgcacaaattttcatccagaagaaagcggtcaagaacttcactgaggtccaccctgactacgggagccacatccaggctcttctggacaagtacaatgctgagaagcctaagaatgcgattcacacctttgtgcagtccggatctcacttggcggcaagggagaaggcaaatctgtgaggccggggccctgcacctgtgcagcgaagcttagcgttcatccgtgtaacccgctcatcactggatgaagattctcctgtgctagatgtgcaaatgcaagctagtggcttcaaaatagagaatcccactttctatagcagattgtgtaacac

SEQ ID NO: 24777 - DNA, 432 bp, Homo sapiens
ggcatgacctgttaaaagtaggtcagtagcactccaacccatatgagaaaagcagtaacaagcttgtctgtgctaggacccagcctttggtgatgatgagtcacagccagttattccatgctcagaagtgttactaagttaagcagaatcctttgggcttttatgtgtcttctgaaatttacatggcattttcaatctgcctcaacaaatagccattgtttgggatgctgacgtttaggaactgggggacaggaaagggtgatgcctctgctggaggcccccacatggccatagttcagcaactgatggagcagaaggaagacccagaataacctttgattcagccttaaacatggaattagaaatccttttcacacttggtctgggattcccctgaggccaagagaaagaaagtaatttggaaaggttctg

SEQ ID NO: 24778 - DNA, 438 bp, Homo sapiens
  misc_feature (1)...(438): n = a,t,c or g
gcaaggttagcaccctctcctttgagcctagggccacactgttcattgtcactttaggcaagtgcctgtttggctttaaaggtaagcctgccagctgtgagaagccttggtaactgatggactcatttcctggtccttaaagatgcagcctcttaagggctccttgatggatgccatctctcctagcccccagccctggtgccactggtgggcaggttcccattctttggggctgggagggacagcttgcctgtttctggtcacaaattacagtcttctctcctgtaccattctgtggcttcagccatgggggcagtagcccttcattagtgtagatagtcattccctggtagggtggaagggtaagacataaggtctggaactgtttgggaccttttggggatgtcctgtgcctcccagattnctcgattctgggag

SEQ ID NO: 24779 - DNA, 701 bp, Homo sapiens
gggaaataaaaaaggcaaaactgtagggtttggtaccaataattcagagcacattacctatctggaacacaatccttatgaaaagttctccaaagaagagctgaaaaaggcccaggatgttttggtgcaggagatggaagtggttaaacaaggaatgagccatggagagctctcaagtgaagcttataaccaggtgtgggaagaatgctacagtcaagttttatatcttcctgggcagagccgctacacacgggccaatctggctagtaaaaaggacagaattgaatcacttgaaaagaggctcgagataaacaggggtcacatgacgacagaagccaagagggctgcaaagatggaaaagaagatgaaaattttgcttgggggttaccagtctcgtgctatggggctcatgaaacagttgaatgacttatgggaccaaattgaacaggctcacttggagttacgcacttttgaagaactcaagaaacatgaagattctgctattccccggaggctagagtgtctaaaagaagacgttcagcgacaacaagaaagagaaaaggaacttcaacatagatatgctgatttgctgctggagaaagagactttaaagtcaaaattctgaagtacagtttatattctgtcacaggattaattaattgccggttttcatactctagaaggctgaaactgatggttat

SEQ ID NO: 24780 - DNA, 334 bp, Homo sapiens
gaggacaagtttgaaagtggagagactcagggcttatcttaaagggattcaaagagatcatcataaaacacctagcacactccacatctgtaataggaactccactaatgttaagttgttttatcctaattacacattcttgcaacagaactgagcattttagtactggacaatatcaaagttgtaaaacataaatctcttcagggagataaactcctgcattctttaaaaatgaatgttacaaacattatactcaggaagctgtcccattactctctaaagcctgaaatttaacaagttttcttagtcaaagctagcttgctttttcaaagat

SEQ ID NO: 24781 - DNA, 445 bp, Homo sapiens
  misc_feature (1)...(445): n = a,t,c or g
gggagcagaagccacagcagaggcctgacctggctgttgatgttctagagaggacagcagacaaggccacagtcaatggacttcctgagaaggacagagagacagacacctcggccctggctgcagggagttcccaggaggtgacgtatgctcagctggaccactgggccctcacacagaggacagcccgggctgtgtccccacagtccacaaagcccatggccgagtccatcacgtatgcagccgttgccagacactgaccccatacccacctggcctctgcacctgagggtaagaaagtcactctaggaaaagcctgaagcagccatttggaaggcttcctgttggattcctcttcatctagaaagccagccaggcagctgtcctggagacaagagctggagactggaggtttctaaccagcatccagaanggtcgttagccc

SEQ ID NO: 24782 - DNA, 259 bp, Homo sapiens
ggcattggaaagtgttatgtatattttcttttccttctttatgctaggcacttggtgaaccattttagtcggaagagccagatcctttcatcctgcgagatgtttttccgtggttttttttctgatttttttaatgtaccccctgccccgtgttttctctgttctttgtctttggagctattactgagagttgaaatgatttgagcctctaatcttctttcttttccctatttttaatatttttgtttttttttttttt

SEQ ID NO: 24783 - DNA, 936 bp, Homo sapiens
cgggactcttggcgggtgaaggtgtgtgtcagcttttgcgtcactcgagccctgggcgctgcttgctaaagagccgagcacgcgggtctgtcatcatgtcgcgttacgggcggtacggaggagaaaccaaggtgtatgttggtaacctgggaactggcgctggcaaaggagagttagaaagggctttcagttattatggtcctttaagaactgtatggattgcgagaaatcctccaggatttgcctttgtggaattcgaagatcctagagatgcagaagatgcagtacgaggactggatggaaaggtgatttgtggctcccgagtgagggttgaactatcgacaggcatgcctcggagatcacgttttgatagaccacctgcccgacgtccctttgatccaaatgatagatgctatgagtgtggcgaaaagggacattatgcttatgattgtcatcgttacagccggcgaagaagaagcaggtcacggtctagatcacattctcgatccagaggaaggcgatactctcgctcacgcagcaggagcaggggacgaaggtcaaggtcagcatctcctcgacgatcaagatctatctctcttcgtagatcaagatcagcttcactcagaagatctaggtctggttctataaaaggatcgaggtatttccaatccccgtcgaggtcaagatcaagatccaggtctatttcacgaccaagaagcagccgatcaaagtccagatctccatctccaaaaagaaggagacaggtggctgagcctagccctggactggatcatatcttcacacttccttaagccacagaaaacttgaaccaggtggtgtggtcatactcctcaacaaggctcagcagcacaggagggaagcggggctgattgactgcatcaggccagttctgagtctccaggcagaaaccggagc

SEQ ID NO: 24784 - DNA, 389 bp, Homo sapiens
gatcatcaccatcacaagagacccctggagatgggaagcctccagctttaccacccaaacagtcaaagaaaaacagttggaaccaaattcattattcacattcgcaacaagatctagaaagtcatattaatgaaacatttgatattccatcttctcctgaaaaacccactcctaatggtggtattccacatgataatcttgtcctaatcagaatgaaacctgatgaaaatgggaggtttggattcaatgtaaagggaggatatgatcagaagatgcctgtgattgtgtctcgagtagcaccaggaacacctgctgacctctgtgtccctagactgaatgaaggggaccaagttgtactgatcaatggtcgggacattgcagaacacact

SEQ ID NO: 24785 - DNA, 1048 bp, Homo sapiens
ttatgacatgattacgaatttaatacgactcactatagggaatttggccctcgaggccaagaattcggcacgagggggaggagccttgtcttcttagctgtcacctgccgaggcttctgggccactcaggccagtgcaccccttttcagagccccttaaagctgctgtcactagatgcccatggtccagggcctggtgggcgtgagaggataggtggcagggcagaaactgggcagccctgacttgatagcagcagggggagctcccaagctgctaagcccctgcctccagccttcctgagtttctctctcctgaaccctactctctcctttttgcttcctcagtttttatcaggctttctctgggagacagcagtctctgagcaccagggagcagttgccctcaggcctgtgcccagcatgccctcccctttttatacgaatgttttctaccagtgtgcttgggtttgccatgatgcgaggctgaattgctgtaacggcttgattctctccctgggtctgcgttccctcccctgggcctgactgagcctgctcattgtttttccctttattacacaggacagccaggggaggaggggggcccagccctgggaggctggtgggaggcagggggcaggcctgcggatgcatgaaataatgttggcattattttttaattttttaaaaaataaatggtatcttatttaattgtcctgttccttcccactccccgcctcctaggatgttagcccaagctcagggtaggcccagggggctgggagaaatgaagccacccgtggggactggggaccaggggccttcagcatggcttctaggttccctcctccccctaccccatctcctacctccacagtacagactgtccccaacttaacagtggttcaacttaaaccatgtttcaactttacaattggtctgttggggtattaaatgaatttgtgacttaggatattttcatttatgatgggtttatcaggaagtaaccccatggtaagttgaggcatatctgtatatatttaaacctaatt

SEQ ID NO: 24786 - DNA, 372 bp, Homo sapiens
ctgggagcgacgcggggcgggccctgggggtcctcagcgtggtctgcctgctgcactgctttggtttcatcagctgtttttcccaacaaatatatggtgttgtgtatgggaatgtaactttccatgtaccaagcaatgtgcctttaaaagaggtcctatggaaaaaacaaaaggataaagttgcagaactggaaaattctgaattcagagctttctcatcttttaaaaatagggtttatttagacactgtgtcaggtagcctcactatctacaacttaacatcatcagatgaagatgagtatgaaatggaatcgccaaatattactgataccatgaagttctttctttatgtgcttgagtctcttccatctc

SEQ ID NO: 24787 - DNA, 761 bp, Homo sapiens
  misc_feature (1)...(761): n = a,t,c or g
ggggtaagatttctgaacagataagcacttttccaaagttaaatacaaatactagaaaaagaatatcattttcacagtattttatgatagggataattcaggtcctaattttggtgttatttaaagggaccttattttctgccccttttcaatccccttagtaaattatttttattgtaattttaacttatgctgaatacattttattttttgaggcagagtctctgtcacccagggtggagtgcagtggcacgatctcagttcactgcaacctccacctcccgggttcaagcaattctcctgcctcagcctcccaagtaacttagactacaggcacccgccaccacgcccggctaatttttgtatttttagtataggtaggatttcaccatgttggccaggctggtcttgaactcctgacctcaaatgatccacccaccttggcctcccaaagtgctgggattacaggcgtgagccaccacacccagcctgaatacattttagagtgcctagcctattaaactttttttccagcccatgaagctgagtcttgaancancttgctnaaaaacnagagccccnaaanaantgcttnaaaaggctttaaaagaacaccaccttncgtaaatngcnnaaanaaactgccccaaatgaactntangagaccgnaggccaatnnntgcaactggacgttgcagaaaggtanccttnaaaatcggagacaagatcaanacctgttacagataactgctatttttgga

SEQ ID NO: 24788 - DNA, 470 bp, Homo sapiens
accagctatgacatgattacgaatttaatacgactcactatagggaatttggccctcgaggccaagaattcggcacgaggcgcgatcttggttactgcatcactgcaacctccgcctccccggttcaagtgattctcctgcctcagcctcctgagtggctggaattacaggcatgcaccaccacgcccagctaattttgtatttttggtagagacagggtttctccacgtttgtcaggctggtctcgaactcccaacctcaggtgatccacccgcctcggcctcccaaagtgctgggattacaggcatgagccaccgctcccagccaaatgctagttttttatgattttatgtggaaacctctgtggtatatacttcacagctctgtgcacctagcctgtggcacacacataattccctcctgcttgcctttgttcagctcattcccttagtctagaacactattctctg

SEQ ID NO: 24789 - DNA, 414 bp, Homo sapiens
gggcaggagaatggcttgaactcgggtgggggaggttgcaatgagccgagatcgcgccgctgcactccagcctgggcgacagagcgagactctgtctctgaaaaaaaacaaaacaaaacgagaaggctttcaaaattactctgcggtacactaatttaacagattagatcactttccaggctttaagttggcctttgttctaccctttttttagtgtatgataaaagttgtgttggttcgttgatcagcatgcaatgaactctggctcttgttaatcaggtgactacagttttgtccttacatttgtatgtatgtcatgagtggttttgtatgggcaggaggtaaacaacgcacatttaaatatacttaatgatttatcattccaatgttttctggttgttttagtctttcatt

SEQ ID NO: 24790 - DNA, 373 bp, Homo sapiens
  misc_feature (1)...(373): n = a,t,c or g
ttggnnacntctatgacatgattacgaatttaatacgactcactatagggaatttggccctcgaggccaagaattcggcacgaggaaggactttcgtaacggaagtaattcaagatcaagagtaattaccaacttaatgtttttgcattggactttgagttaagattattttttaaatcctgaggactagcattaattgacagctgacccaggtgctacacagaagtggattcagtgaatctaggaagacagcagcagacaggattccaggaaccagtgtttgatgaagctaggactgaggagcaagcgagcaagcagcagttcgtggtgaagataggaaaagagtccaggagccagtgcgatttggtgaagg

SEQ ID NO: 24791 - DNA, 352 bp, Homo sapiens
ggaattatttccactcatacctgttcagggctccagacagccaatagccttcatcccacagtttgggcttcagctattaacacataaagataaccagttgcagctaggctcggtggctcacacctgtaatcccagcactttgggaggccaaggcgggtggatcacctgagggcaggagtttgagacaggcctggccaacatggtgaaactccatctctactaaaaatacaaaaattatccgggtgtggtggcccatgcctgtaattccagctactcgggaggctgaggcaggagaatcacttaaacctgggaggcggaggttgtggtgagcagagatcacgccattgcactt

SEQ ID NO: 24792 - DNA, 432 bp, Homo sapiens
agtttatgttcacacactgaaaacttagtttttttgttggtagatccatgtgcatgctagaatttgggacaggcactatttgcataaagtattaaagtcaatttttaaactaagcaaaggtacacgttgtaacggtggggcatctgtgaaaaagatgtccctttcataatatatgcaatatattccagatgttttgagagattacagaagaggaggcctgcttcacttgcagctgtcggaaaaggtaacagaagatggaactcgaaatcccaatgaaaaacctacccagcaaagaagcatagcttttagctctaataattctgtagcaaagccaatacaaaaatcagctaaagctgccacagaagaggcatcttcaagatcaccaaaaatagatcagaaaaaaagtccatatggactgtggatacctatcta

SEQ ID NO: 24793 - DNA, 477 bp, Homo sapiens
  misc_feature (1)...(477): n = a,t,c or g
gcgcacactgtgcctccctcctcaccgcccatcgtaatgaattattttgaaaattaattccaccatcctttcagattctggatggaaagactgaatctttgactcagaattgtttgccgaaaagaatgatgtgactttcttagtcatttaggatgatttaaggatatagtattcctggtcatttaagaatgttcattcattgaagccggagctgtctctgccacaggagagccacatggtcggtagtaaccagggcctctccaagcccagctgtgagtcactgcccagtgagtcccgcgcttcctttaaggtgctgggagcaaagagagggtgactgaggcagaccccaacccctgctctgcaccatctgggccctcgccgtgtttgaacctggctgaatgagtggagggcgctgtgttctcaatcagcgcctccgaggacccgggggtccttncgnaattnagncacgggttttga

SEQ ID NO: 24794 - DNA, 443 bp, Homo sapiens
ttcggcacgaggctttggccgtttgccatggacctctggaccactatgattttctgatcaaagctcatgagctaaaggatgatgaacatcaaagaagagtcatacagtgtttgcagaaattacacgaggaccttaaaggatacaatatagaggcagaaggcctttttttcaaagcttttttcaaggagcaaacctccaaggggcctgtatgtttatggagatgttggtacaggaaaaacaatggtgatggacatgttttatgcttatgtggaaatgaagaggaaaaaacgggttcattttcatggtttcatgctagatgtgcacaaaagaatacatcgccttaaacagagtttgccaaaaaggaaaccaggattcatggctaaatcatatgacccaatagctcccatagccgaagaaatcagcgaagaagcatgtctcctatg

SEQ ID NO: 24795 - DNA, 463 bp, Homo sapiens
ttggatgacctgattacgaatttaatacgactcactatagggaatttggccctcgaggccaagaattcggcacgaggtgaatttttgaatggagaacggtacttttgtgtattttcatcctcatataggaataaagaattcacagaaatactggtttaagatatataacaaatcctttcagatggtttctcaaaataatagctttcgtagagtgcctgctatgtaccagatacctagaccaagtgttttacatttatctcatactgaatgtgctgcttggctttagctgagcttttactttatttatttatttattttagaggcggagtctcactatattgcccaggctggtctctaactcttgggctcaagtgattctctcacctcagccttccaaagtgctaggattataggcgtaagccaccgcacccagcccttttttatttttaacatgtgaacttac

SEQ ID NO: 24796 - DNA, 732 bp, Homo sapiens
cttagaagaaaattggaagatagaaacaagatagaaaatgaaaatattgtcaagagtttcagatagaaaatgaaaaccaagctaagacaagtattggagaagtatagaagatagaaaaatataaagccaaaaattggataaaatagcactgaaaaaatgaggaaattattggtaaccaatttattttaaaagcccatcaatttaatttctggtggtgcagaagttagaaggtaaagcttgagaagatgagggtgtttacgtagaccagaaccaatttagaagaatacttgaagctagaaggggaagttggttaaaaatcacatcaaaaagctactaaaaggactggtgtaatttaaaaaaaactaaggcagaaggcttttggaagagttagaagaatttggaaggccttaaatatagtagcttagtttgaaaaatgtgaaggactttcgtaacggaagtaattcaagatcaagagtaattaccaacttaatgtttttgcattggactttgagttaagattattttttaaatcctgaggactagcattaattgacagctgacccaggtgctacacagaagtggattcagtgaatctaggaagacagcagcagacaggattccaggaaccagtgtttgatgaagctaggactgaggagcaagcgagcaagcagcagttcgtggtgaagataggaaaagagtccaggagccagtgcgatttggtgaaggaagcta

SEQ ID NO: 24797 - DNA, 388 bp, Homo sapiens
  misc_feature (1)...(388): n = a,t,c or g
gtttgtaaggaactaaaacattacatctggtgaacagcaaagatttcactacacctcaaatgcagaacacctatgaagcagaggaatgttggctttttaaacagaagcagataaaaaaaaaangangcaggactccttcagttcttcactagnnttaaaaaaactttccaaaanacngcttnanactgttcngcagcaaanacngggcattcngnatcnggncctgggtcccngnaanggnaagganccnatcttngganccttctaanggctcatcaatttngancgaagctcccgactcatgacggattngntaaanccgctgaccaccttngccaanaanananccagccaaatctttgggaanagnnacntgggnantaaaaaa

SEQ ID NO: 24798 - DNA, 412 bp, Homo sapiens
gcggcacgagccctgaggggaaggtcatgtagagagaataactgctgtaaggagtggcgctgtggccagggcaggaatagagagctgcaggaaactgactcctgcctcttcccatcaccgatctcatcaatagtgtgcctgctcacccccgctcccctgccccctgcagcaactgagacctctgtccctgtgtcctcaagactgaaactggggttggacttgtggggcctagagaaaaacatgggaggctgactgactttgggcagctgtttcctcacccttccccagccaaacccccatgctggagaatgatgacccagagtccatcttttcttcctgctgctcctctctggagggcgaggagtgaagtgctgacctgacaggctgttttgtgagatgagtcgctgaagct

SEQ ID NO: 24799 - DNA, 604 bp, Homo sapiens
  misc_feature (1)...(604): n = a,t,c or g
ggtgnnnnnnntttgnaacncctatgacatgattacgaatttaatacgactcactatagggaatttggccctcgaggcctgnaactangnacnancactcactattngaattngtacctcgangncaagaattcggcacgaggcttaaataataagcagtttctggaacttgttaccacagatagttctcccaaaatgaggaccaaactgtgtaagaataatgagaacgtcaagtcaatataaataaagcttgcatttcaaagaatcatgtctaacaaaagcagatatttgactaagaaaggctgagccccaagaaaaacattcctggttactctgtaaactttgcctcaaatgctctgtttatataagcctatgaagagcaaatgagagaattggattttatagtntaaaatgtttctnaaacatattgcttttttttttngccnnncctaaaaatattgaaaaatagcctttgntaggancttgtgaatgaagggtacggcctacccatattcccaaaataccctcccaanncctggncaaaaaannngggnangggncntcagncncnntttttaanaatttatnnanggnccccnttttt

SEQ ID NO: 24800 - DNA, 333 bp, Homo sapiens
gaatttttgaaagtatatgcattggtttgaaagacagttaatcattcaataaaggttgagcacctgattgtataaggcaaaaggtgctttgtgaacacagtggcctttctgagaaatactagagttagacttatgtgtagtattagataaatagatttggtgtacaggagagtacatattttcaagaagcaaaggggcaatattggtaattgtacagttagtaaattgggtatgatttaggacttttaaatttatatattaagtattttactggcaaaaattagtccttaacagccaaattgtaaaatgcttactctttatttcattgtctaa

SEQ ID NO: 24801 - DNA, 205 bp, Homo sapiens
ggtggtggaggaggaggagaacggggctgaggaggaagaagaagaaactgccgaggatggagaggaggaagatgaaggggaagaagaagatgaggaagaagaagaagaggatgatgaagggcccgcgctgaagagagctgccgaagaggaggatgaagcggatcccaaacggcagaagacagaaaatggggcatcggcgtgagcc

SEQ ID NO: 24802 - DNA, 440 bp, Homo sapiens
gaacagtttggaactgcagaggaaaggtcttgggggctgtaaataatgctgtccttttgtattagttatgaactcggcattagaacatggttggaagtgtgaatagaggttggtcagtgcagtcagtagcccatcaaagtcaggatgcctgattcacttagttgtcaacatttctatttaggaaatgacaagtgaggtgaaagtcataacaataaattgaagcacgcggagagcgctctgttacctgccacgggaggtcctgtagatccggtgcacgcttctcagaggtcagcaccccgcaggcacactggtcgtggggcacacactgtttgtggtcctcaccaagcctgtagccctgagcacagctgcacgtgtaggattcctgtcctgggaggcagaagtgttgacacccatcagtccgctctgggtgacattcattc

SEQ ID NO: 24803 - DNA, 531 bp, Homo sapiens
  misc_feature (1)...(531): n = a,t,c or g
gacgctgtaaaaaaggacagaggctgttccctatggcagaaggcaaccacagaaaaaagccacttaaggtgttggaatccctgggcaaagatttcctcactggtgttttggataacttggtggaacaaaatgtactgaactggaaggaagaggaaaaaaagaaatattacgatgctaaaactgaagacaaagttcgggtcatggcagactctatgcaagagaagcaacgtatggcaggacaaatgcttcttcaaaccttttttaacatagaccaaatatcccccaataaaaaagctcatccgaatatggaggctggaccacctgagtcaggagaatctacagatgccctcaagctttgtcctcatgaagaattcctgagactatgtaaagaaagagctgaagagatctatccaataaaggagagaaacaaccgcacacgcctggctctcatcatatgcaatacagagtttgggcatctgcctccgangaatggngctgactttacatccagggatgaaggagcnccttgag

SEQ ID NO: 24804 - DNA, 1152 bp, Homo sapiens
tatgacatgattacgaatttaatacgactcactatagggaatttggccctcgaggccaagaattcggcacgagtttaaatccagctccatacaacgctccgccgccgctgctgccgcgacccggactgcgcgccagcacccccctgccgacagctccgtcactatggaggatatgaacgagtacagcaatatagaggaattcgcagagggatccaagatcaacgcgagcaagaatcagcaggatgacggtaaaatgtttattggaggcttgagctgggatacaagcaaaaaagatctgacagagtacttgtctcgatttggggaagttgtagactgcacaattaaaacagatccagtcactgggagatcaagaggatttggatttgtgcttttcaaagatgctgctagtgttgataaggttttggaactgaaagaacacaaactggatggcaaattgatagatcccaaaagggccaaagccatgaaaacaaaagagccggttaaaaaaatttttgttggtggcctttctccagatacacctgaagagaaaataagggagtactttggtggttttggtgaggtggaatccatagagctccccatggacaacaagaccaataagaggcgtgggttctgctttattacctttaaggaagaagaaccagtgaagaagataatggaaaagaaataccacaatgttggtcttagtaaatgtgaaataaaagtagccatgtcgaaggaacaatatcagcaacagcaacagtggggatctagaggaggatttgcaggaagagctcgtggaagaggtggtgaccagcagagtggttatgggaaggtatccaggcgaggtggtcatcaaaatagctacaaaccatactaaattattccatttgcaacttatccccaacaggtggtgaagcagtattttccaatttgaagattcatttgaaggtggctcctgccacctgctaatagcagttcaaactaaattttttgtatcaagtccctgaatggaagtatgacgttgggtccctctgaagtttaattctgagttctcattaaaagaaatttgctttcattgttttatttcttaattgctatgcttcagaatcaatttgtgttttatgccctttcccccagtattgtagagca

SEQ ID NO: 24805 - DNA, 578 bp, Homo sapiens
ctttgaagaaccgttatgacatgattacgaatttaatacgactcactatagggaatttggccctcgaggccaagaattcggcacgagggggtgccagcaaaaacctctgccttcgttttcacagatagaacatactggcaaaatattttggtgttgtattttgggctgtggtccagtagatggcgcttaagagtgttagcagatagactcttggcggcatggctctttgtgctctgtggtagcaggggagagagatgacaccctcacctaatctgctcctgggtcttggaagagccccctccaatcactggctttatgcctgcatttcttttcttgggtgttctggtccagagaggtccctcaggcagggaccacgtttggcagacaggtaatatacttgcccagctggcccttcggagggaggtacaccccatgcctccactggcctgtggcatctcatctctctcagtgatccaagagtgagggctccttcctgcttgggcaccacccaagccagcaagtctcacttggcgatgagcagcaggagtgggtggagcccacctaatctgctatccaag

SEQ ID NO: 24806 - DNA, 367 bp, Homo sapiens
gggtggcttagaaagaaaaccaaagcaaacattgatattcaggcctcatctgatgacagctaagtgctcgtcaggaaccactccccggagtgcagggtgagacacagaggaggagtcaggagataagctagaagcaaatctcagagcatcttggctgttgcactaaggatttgcggttttatggaactcactagaggtctgttggggagtctgtgtgcatgaatttcacagggcagacctgcagtgagaagaaactggaggcagagacaccagccaggggcctggagcagccagcccagggcagttatctgggacagtgccacccctgcaaaggtgtgggcattgccactatgataagtgcaggtca

SEQ ID NO: 24807 - DNA, 349 bp, Homo sapiens
gaaattaacagaatgaaagtgctaaattaaaattgcaacattgatttcctttttagctcagctgtgcattatataaaagggtcaggagaaggatttattactggcgatgaggctctgtcgtccgctaagagactggtatataaaataaagttgtccatttcagacaccctttgtcttcaaggaaagctgtctaggtggcccatgggtggcaaaggcgctgaaaggaaatggaaattgataatcggtcctgttaggctgattctctgcatgttcaattcatatccttttgaaaagaagagattaagatgaaacctcattgaggaatacacattttgaagaaaatagaaac

SEQ ID NO: 24808 - DNA, 444 bp, Homo sapiens
  misc_feature (1)...(444): n = a,t,c or g
acccntnnntttganacngctatgacatgattacgaatttaatacgactcactatagggaatttggccctcgaggccaagaattcggcacgaggccaagcttgtgaggcctcctgttcaggtatacggtattgaaggtcgctatgccacagctctttattctgctgcatcaaaacagaataagctggagcaagtagaaaaggagttgttgagagtagcacaaatcctgaaggaacccaaagtggctgcttctgttttgaatccctatgtgaagcgttccattaaagtgaaaagcctaaatgacatcacagcaaaagagaggttctctcccctcactaccaacctgatcaatttgcttgctgaaaatggtcgattaagcaatacccaaggagtcgtttctgccttttctaccatgatgagtgtccatcgcgganaggtaccttgc

SEQ ID NO: 24809 - DNA, 410 bp, Homo sapiens
ccaacatctatgacatgattacgaatttaatacgactcactatagggaatttggccctcgaggccaagaattcggcacgagaacatggcgaaaccccatctctaccaaaaatacaaaaattagccgagtgtggtggcaggcacctgtaatcccagctactcaagaggctgaggcaggagagtcgcttgaaccctggaggtgaaggttacagtgaacggagattgcaccactgcactccagcctggacaacagagcaagactctatctcaaaaaaaaaacaaaaacaaaaacaaaaaggccaaaagagaaagggactctgtagaagagttaggaagtgtcccttgagaaggctaggggaggggagaggcatacagcacagcattgtatctttgacccgatggtaggaaggc

SEQ ID NO: 24810 - DNA, 497 bp, Homo sapiens
  misc_feature (1)...(497): n = a,t,c or g
gaagacctatttataatatttagcgaactcggtctccctcagatcccccgcgagggaggctgctggacccaccccgctgtcccccatgatanaagtctgtaaataccttggtgaccaatgcccacttcccctcctgggtcacctctgatggctgctgtccactgagaacgtgggcagtgtccaaattcctgtactgtaaagactaaaaggcgtttgctctgagactgacaaggcggaaacttccatgtgtctcctgccaggctctgtccccctacgccatcccgacacgtccccgttcccccgaaacctggctcagtgcaatactcccattgccatggggtccttcaccatggtactgtctccacagccctcagtccccaccccaggagaggcgcctgccacctcctcctcatctccggtggttcaatcgctccgcctgtccccaacccagtcccatttttatggccaaactgattctgaaacaaaatgaaactgca

SEQ ID NO: 24811 - DNA, 814 bp, Homo sapiens
  misc_feature (1)...(814): n = a,t,c or g
gcggcacgagggaatttattagcacaaaatcattctttgcaactcaaaattcagaagggactctaccatatcttagctcagagcacagaggagtgccttatccccacacttgactgggctgtggaggtgggcatgtgggcccctgggcccaggctggggacagagcccttgttttgtgacttaggattttgatgtggttcccatgttctctaacagggccagctgagcagcacaggccaggaggccacagtgtaagcaataacagatctgccacatgcagaagcaaatatcaggcctgtcgcacacgggcggcatttaaataggaatttctatttttgaataagggatggtctatgagcatacagtagatttgatgtgaccttttntccntcccttccataatggatcgtggtctgtgtgactgaacccacacagagtgtcatgggtgacagtttctggttgaagtagctccacgcctggcttctgtggacagcagattcttttccttctcacaaggggctcatttaaaatttggaggctgggtgctgtggctcacgcctgcaatcccagcactttgggagactgaggcgggcggatcatgaggtcaggagatcgcgaccatcctggctaacagtgaaaccctgtctccactaaaaatacaaaaaattagccgggcgtggtggcgggcgcctgtagtcccagctactctgaagactgaggcaggagaatggcgtgaacccaggaggcggagcttgcagtgagctgagatcacgccantgcactccagcctgggcaacagagtgagactctgtcc

SEQ ID NO: 24812 - DNA, 430 bp, Homo sapiens
ggagcagagtcagccagcatgaccgaacgccgcgtccccttctcgctcctgcggggccccagctgggaccccttccgcgactggtacccgcatagccgcctcttcgaccaggccttcgggctgccccggctgccggaggagtggtcgcagtggttaggcggcagcagctggccaggctacgtgcgccccctgccccccgccgccatcgagagccccgcagtggccgcgcccgcctacagccgcgcgctcagccggcaactcagcagcggggtctcggagatccggcacactgcggaccgctggcgcgtgtccctggatgtcaaccacttcgccccggacgagctgacggtcaagaccaaggatggcgtggtggagatcaccggcaagcacgaggagcggcaggacgagcatggctacatctccggtgctt

SEQ ID NO: 24813 - DNA, 526 bp, Homo sapiens
gcctacagccgcccgggagaagatggctgccccagcagtgtccgggctctcccggcaggtgcgatgcttcagtacctctgtggtcagaccatttgccaagcttgtgaggcctcctgttcaggtatacggtattgaaggtcgctatgccacagctctttattctgctgcatcaaaacagaataagctggagcaagtagaaaaggagttgttgagagtagcacaaatcctgaaggaacccaaagtggctgcttctgttttgaatccctatgtgaagcgttccattaaagtgaaaagcctaaatgacatcacagcaaaagagaggttctctcccctcactaccaacctgatcaatttgcttgctgaaaatggtcgattaagcaatacccaagggagtcgtttctgccttttctaccatgatgagtgtccatcgcggagaggtaccttgcacagtgacctctgcatctcctttagaagaagccacactctctgaattaaaaactgtcctcaagagcttcctaagtcaagg

SEQ ID NO: 24814 - DNA, 356 bp, Homo sapiens
ggagccatggagatatggcagaattcctcctcagttcctcaacttccttcttctcccactactgactgctattttgggccctgcctgggtcaaagcatagggtgggagcaggagacagaagataggaatgttaatgttattacttggctgggcagatttgccctctctggtcctgtagatggctaaagcaaattctttaaagggtgcctttcattggagaatccatctaaatgaatggtccagcctggtccctcagcgtggtccatgttcctatcaactgtgacgtctcacaggtagagctgccatgggatatatacaccagtggagatgtgagtaaaccatcagagtgtaactca

SEQ ID NO: 24815 - DNA, 303 bp, Homo sapiens
agaacacattattttcaaagactaaatctaaaacccagagtaaacatcaatgctcagagttagcataatttggagctattcaggaattgcagagaaatgcattttcacagaaatcaagatgttatttttgtatactatatcacttagacaactgtgtttcatttgctgtaatcagtttttaaaagtcagatggaaagagcaactgaagtcctagaaaatagaaatgtaattttaaactattccaataaagctggagtcgacgcggccgcgaattccagatctatgaatcgtagatactgaaaa

SEQ ID NO: 24816 - DNA, 429 bp, Homo sapiens
  misc_feature (1)...(429): n = a,t,c or g
gagcttcaataccctggtttttcttctcctgcacaccccttctaacctcctaactaatctacttattatgtctgtctgtctgcatcctttctctccccagaatgagtgcccacaaggccaggatctttgtctgttttgttcattgatttatcccacatgcctggaacagtgtcatgtacaaaacaggcacttggtaaatatctgttgactgagcaattgaatagatgaatgaatccaggagtggacattctgtgaaggctctcccccctgttgggaagggtatgttctcttcacctccttttttctccttcatacaagttgaaaaaacagacctgtctaagctcagcaaatacccagcacgtacaccacaagttctgtgacctgcatgtggagccgacccaggtgacagctcaatgntntcgccactgg

SEQ ID NO: 24817 - DNA, 163 bp, Homo sapiens
gattgccttttgtccagccccacctcccaaccccccaaccctgttgtaatgtgtgatctgttttcttccagtctcgtttcctctcagtccatccacccttcatggggccagagccctctccagcctgggtgaaggagcgagactgtctcaaaaaaaaaaaaaa

SEQ ID NO: 24818 - DNA, 455 bp, Homo sapiens
  misc_feature (1)...(455): n = a,t,c or g
gagcacatgcattctgagaaattgaatatactggtatgtctagagcagaagggccatctgaaagtagtttgaaaataaatttgaagagccaatagcttaagagtatagaaggatttgcatgctttctgatggtttagaatctgctcttgaatagactagatttacttgaaagctttttggggaaaagtacaatattatcaacaactatatcaagaacactattaaaatcggtattagtctgtcagaagtgcaggataatcgaatgtttgaacgatatttttccaaagagacatcctaagtcaataaatatattaagcattctcatccttattttaactgagaaatgccagttaaaaccaaaacgatacatctctacacaccaaaatggctaaaagtgtaaaagctaaacaattccaagagttagcgaggatgtggagcangagaactttncagac

SEQ ID NO: 24819 - DNA, 324 bp, Homo sapiens
atttcttctcatctttgtttactatttctgttctattataatctgctctgtattcattgagagtttaatttgaattatatttttccatttctaaatgttctatttgggacttctgaaacgtttggtcattctcattcctccatattttcaagcttctactttacttcctgttaccaaaaaagcacactttaaatatattctatctctaaaaattacagtaggtgctatctctacagatcttattctattttctacattggctgtttctgaaaatggtatcttatttccctgtgtgttttgtgattttgactatcagcttgtgtt

SEQ ID NO: 24820 - DNA, 364 bp, Homo sapiens
ggttttttactcaagcagaacatttggctgtagtatcttgaaactagaagctggtatggaataattgttgcacagatttaaaatgatggatggaatgaaaatagagttgccagctactttttagctaagaaatatggtagaactctacccttagttgttttcaaggacacatgatctactctaggaaacttgtcagtacttttgtatgctagttgcatacggacctaggccgaaattatgaggaaaagcagcaggaccctggtaaatattcctggtgggataatttatgcatatacctttggagaaaaactccaatatgctgtgtatgtgacatatagggtgttatgctctatgaattgggtga

SEQ ID NO: 24821 - DNA, 413 bp, Homo sapiens
  misc_feature (1)...(413): n = a,t,c or g
gggagaggagaacccagccagcaagcccacgccggtgcaggacgtacagggcgacgggcgctggatgtccctgcaccatcggttcgtggctgacagcaaagataaggaacccgaagtcgtcttcatcggggactccttggtccagctcatgcaccagtgcgagatctggcgcgagctcttctctcctctgcatgcacttaactttggcattggtggtgacggcacacagcatgtactgtggcggctggagaatggggagctggaacacatccggcccaagattgtggtggtctgggtgggcaccaacaaccacggacacacagcagaacaggtgactggtggcatcaaggccattgtgcaactggtgaatgagcgacagccccangcccggttgtggtgcttggcctgcttcc

SEQ ID NO: 24822 - DNA, 455 bp, Homo sapiens
ggaaatatgccaaatccaagtatgactttgtagcaaggaacaacagtgagctctcggttctaaaggatgatattttagagatacttgatgatcggaagcaatggtggaaagttcgaaatgcaagtggagactctggatttgtgccaaataacattttggatattgtgagacctccagaatctggattggggcgtgctgatccaccttatactcatactatacagaaacaaaggatggagtatggcccaagaccagctgatactccccctgctccatcacctcctccaacaccagctcctgttcctgttccccttcccccttccactccagcacctgttcctgtgtcaaaggtcccagcaaatataacacgtcaaaacagcagctccagtgacagtggtggcagtatcgtgcgagacagccagagacacaaacaacttcggtggaccgaaggaaat

SEQ ID NO: 24823 - DNA, 441 bp, Homo sapiens
  misc_feature (1)...(441): n = a,t,c or g
cctatgaagnccaacngctatgacatgattacgaatttaatacgactcactatagggaatttggccctcgaggccaagaattcggcacgagccgcctgcactccctgttaggagattactaccaggccatcaaggtgctggagaacatcgaactgaacaagaagagtatgtattcccgtgtgccagagtgccaggtcaccacatactattatgttgggtttgcatatttgatgatgcgtcgttaccaggatgccatccgggtcttcgccaacatcctcctctacatccagaggaccaagagcatgttccagaggaccacgtacaagtatgagatgattaacaagcagaatgagcagatgcatgcgctgctggccattgcctcacgatgtaccccatgcgtatcgatgagagcattcacctccagctgcgggagaaatatgg

SEQ ID NO: 24824 - DNA, 437 bp, Homo sapiens
gatttatacagttgaaaacttgtaatcttccccaggaggagaagaaggtttctggagcagtggactgccacaagccaccatgtaacccctctcacctgccgtgcgtattggctgtggaccagtaggactcaaggtggacgtgcgttctgccttccttgttaattttgtaataattggagaagatttatgtcagcacacacttacagagcacaaatgcagtatataggtgctggatgtatgtaaatatattcaaattatgtataaatatatattatatatttacaaggagttattttttgtattgattttaaatggatgtcccaatgcacctagaaaattggtctctctttttttaatagctatttgctaaatgctgttcttacacataatttcttaattttcaccgagcagaggtggaaaaatacttttgctttcag

SEQ ID NO: 24825 - DNA, 394 bp, Homo sapiens
cggacgcgtgggcggagaaccagtcgctgctgcggatgccgccctggatgaacccctggctgctggtggctgtggccatgtccatggccctgcacttcctcatcctgctcgtgccgcccctgcctgtgagtcaccccgcctgccccactgccctggtccctggacatcacaggccctgggctggtcactggacctctctggcccccctgcaatggaaactacctggaggagagggagctcattttccaggtgaccccactgagcgggcgccagtgggtggtggtgctccagatatctctgcctgtcatcctgctggatgaggccctcaagtacctgtcccggaaccacatgcacgaagaaatgagccagaagtgagcgctgggaacagagtgga

SEQ ID NO: 24826 - DNA, 459 bp, Homo sapiens
  misc_feature (1)...(459): n = a,t,c or g
gcacaaagctgatcttgcagagtggctagtgtgaagcacactggactccaggattcagatgtgggttaggagaccctcctctctcattagctcatgcaggttaagtgctctatctccactctgtaaaatgagagtgccagaccagctcaaaggcttccttccagcctcagtgttctgtggtgactggactgaatttattaggttagcaggagccttcctactcagcataaagtgtggtttctcttttccctttcacttaccaacatatttgcctggcaaggattcctgaaaggatggaaccctacccccacccccaaagaccatggattatgggagttgggaactttaaagagagccttttaaaaatatatattaatgtttgggacttggggtgggccagangttaaactaaataaagaaaaaccncanggcgggcncnggtggctccccccgttattc

SEQ ID NO: 24827 - DNA, 1272 bp, Homo sapiens
tcgtaatatattttcatgaagaatttaggtccaaaaaaaagatgggcattaattctagtcatttaaaaaattctatagatcagaggttacatggccaagattgaaacttagaggagtatagttacataaaagaaggcaaaacgatgtataaatgaaagaaattgagatggtgcacgatgcacagttgaagtgaacttgcggggtttttcagtatctacgattcatagatctggaattcgcggccgcgtcgacctcagttaggacccagagggaaccatggaaaccccagcgcagcttctcttcctcctgctactctggctcccagatatcaccggagaaattgtgttgacgcagtctccaggcaccctgtctttgtctccaggggaaagagccaccctctcctgcagggccagtcagagtgttagcagcacctacttagcctggtatcagcagaaacctggccaggctcccaggctcctcatctatggtgcatccaccagggccactggcgtcccatcaaggttcagtggcagtggatctgggacagacttcactctcaccatcagcagcctggagcctgaagattttgcaacttattactgtcagcagtataatcactgggctccgatcactttcggccaagggaccaaggtggaaatcaaacgaactgtggctgcaccatctgtcttcatcttcccgccatctgatgagcagttgaaatctggaactgcctctgttgtgtgcctgctgaataacttctatcccagagaggccaaagtacagtggaaggtggataacgccctccaatcgggtaactcccaggagagtgtcacagagcaggacagcaaggacagcacctacagcctcagcagcaccctgacgctgagcaaagcagactacgagaaacacaaagtctacgcctgcgaagtcacccatcagggcctgagctcgcccgtcacaaagagcttcaacaggggagagtgttagagggagaagtgcccccacctgctcctcagttccagcctgaccccctcccatcctttggcctctgaccctttttccacaggggacctacccctattgcggtcctccagctcatctttcacctcacccccctcctcctccttggctttaattatgctaatgttggaggagaatgaataaataaagtgaatgtcgacgcggccgcgaattccagatctatgaatcgtagatactgaaaaaccccgcaagttcacttcaactgtgcatcgtgcaccatctcaatttctt

SEQ ID NO: 24828 - DNA, 417 bp, Homo sapiens
  misc_feature (1)...(417): n = a,t,c or g
naaccgctatgacatgantacgaatttantacgactcactatagggaatttggccctcgaggccaagaattcggcacgaggatgagttcatctaccagtttcagtcattcagtcagtaccgctgaaagactgccaagaagtcagaggaggagattgactttcttcgttccaatcccaaaatctggaatgttcatagtgtcctcaatgtccttcattccctggtagacaaatccaacatcaaccgacagttggaggtatacacaagcggaggtgaccctgagagtgtggctggggagtatgggcggcactccctctacaaaatgcttggttacttcagcctggtcgggcttctccgcctgcactccctgttaggagattactaccaggccatcaaggtgctggagaacatcgaactga

SEQ ID NO: 24829 - DNA, 665 bp, Homo sapiens
ctaaagattcatttttgttgagtccttatgagaaacagcagtatgaatcttgacggtttctgcccgtcctaatggcagagctctctgacttgggtgtatgctgccaggctgggtactttcatactttgttttcttgttttgctttaaaactacgactcagcatacattttcccacatacatttttacattgtaccttaggactcagtcatctccacttaaattgatgacacaagcagctaataaccatttctgggtttctgcctaaccccctaattgtctgttaaagccaattctctgggtgtcccagtgagtgggtggctttttttctttccacattggcacattcacttctcccactcttggcatgtaagaaataagcatttacataattggaaaaatctggatttctgatgccaaagggttaaagcttcttggatttcatttcattgatatacagccactattttatttttgatcagtggcctttgggccactgttcagggtactgaccatcagtgtcagcattagggttttggtttttgtttcttttgggtctttcttttttggcacatgtgaatcttgttttgtgtaaaatgaaattactttctcttgttctctgatgatgggtttaaaattaaaagagcatccggttttggtatgggga

SEQ ID NO: 24830 - DNA, 349 bp, Homo sapiens
cggtgagccaagatcatgccactgcactccagcctgggcaacgagtgaaactccacctcaaaaataaataaataaataaaaattaaaccttggagtgagctcatcttcaatctggtatttaacattatgacttcaaactggatcttgtattccagaatgatagtcccattatgaagcatcttcacttgtcttttgctcacagtgccatttggttctgaaggtaaccatgaagcaggcgtggcccatcattactaagacaggctgacatagtggtaactgctgagggctgaatgctctgcctctgcctctctgtgactgcctggctgccccatgggctcaggcaggcact

SEQ ID NO: 24831 - DNA, 505 bp, Homo sapiens
accgctatgacatgattacgaatttaatacgactcactatagggaatttggccctcgaggccaagaattcggcacgagctggatgatgtaattaatacagtgttttcaaaagataattctggtagcatggtgaaataagaattggagcaagatttccaagcacagttccatggatgaatgccaaatggcaaagtttgtttgtttgtttgtttgtttgtttgttttttgagatggagtctcattctgtcacccaggctggagtgtagtggcgtgatcttggctcactgcaacctctgcttcctgggttcaagcaattctcctgcctcagcctcccaagtagctgggactacaggcacctgccaccacgcctggtaatttttttgtatttttagtagaggcagggtttcgccatgttggccaggatggtcttgaactactgacctcaagtgatccgccacctcagcctccaaagtgctaggattacaggcgtgaggcctccaaatgg

SEQ ID NO: 24832 - DNA, 1735 bp, Homo sapiens; identical to SEQ ID NO: 16191

SEQ ID NO: 24833 - DNA, 366 bp, Homo sapiens
ggaggaactgtcttcccagatgtccagctttaacgaagccatgactcagatcagggagctggaggagaaggctatggaagagctcaaggagatcatacagcaaggaccagactggcttgagctctctgagatgaccgagcagccagactatgacctggagacctttgtgaacaaagcggaatctgctctggcccagcaagccaagcatttctcagccctgcgagatgtcatcaaggccttgcgcctggccatgcagctggaagagcaggctagcagacaaataagcagcaagaaacggccccagtgacgactgcaaataaaaatctgtttggtttgacacccagcctcttccctggccctccccag

SEQ ID NO: 24834 - DNA, 335 bp, Homo sapiens
gagaggactcagcgggccccgtctctataatgcagctgtgctctggagtcctcaacccggggctcatttcaaacttattttctagccactcctcccagctcttctgtgctgtccacttgggaagctaaggctctcaaaacgggcatcacccagttgacccatctctcagcctctctgagcttggaagaagcctgttctgagcctcaccctatcagtcagtagagagagatgtccagaaaaaatatctttcaggaaagttctcccctgcagaattttttttccttgttaaatatcaggaatataggccgggtgcggtggctcacacctgtaatccc

SEQ ID NO: 24835 - DNA, 421 bp, Homo sapiens
  misc_feature (1)...(421): n = a,t,c or g
gaacagggctggacccactgccctgggtctgaaggaggtctgaaggaggcaccaggagggggcaccgcagctgagtggggtctgtgtgcccatctctctgctgtgcccatctagtgggacctccaccccggcccgtgggagcagagggtctttcagggtccttctagcccagggttgagtgatctgacagggacagggcacctggcagggtgactggatgttgtgttggaaactgtgacataactcgctcccttccctgctcgtcctacactgagaagccacctgcagcggaaaccagcgtctgcacacagtgaaaaggcttgcgagttccgagtcgggatgagctcgtcagcccgccccgcatggcccaccaggggcactgctnccccatggggcttggananntccnaaaaatntgtgc

SEQ ID NO: 24836 - DNA, 369 bp, Homo sapiens
gactgagaatcactgatctcgtgaagagatgacttgtgcagagttaactaaaatacaaggcaagctgtgttgaatctgataccaaagcagtatacaaaagcatgaatgaacaatagggttagctctaccaggagatatttgaaagaggagcttgtttatcaaaatgagtatgtaattggtataatatatgtaggggagtaagaaatgtaagggcttccctggtattcctttattgtattggagaccttgctttctttcttcagaatagttgagaatagacagaagagacagaaaatttccatttgtatgtagttttgaatttttttttcatatattgaattctcagaatagccctgtgaggtaagtaaa

SEQ ID NO: 24837 - DNA, 393 bp, Homo sapiens
attgtacatagtggagtagttagttacctgataacagtcttgttatttgggtctcttagaccttacctctcaactccctcaagagtaccagtctctgaagttataatgctttggtctctacattaggggcaagatccagtctgagagaagtctcctttgagaagggccaagaggctctttcctgagtgtttgctttcggtttgttggtatgcctgtattgctgggctgtgctgctgctcgaagcagatggttttgactgtctttttgctctttcctatataatgaatagatgagtgaaaggagttttctttttctctttagtacttacgtattgggattcctgtgtcttacagctctccctctccaaataatacacagaatcctgcaactttt

SEQ ID NO: 24838 - DNA, 382 bp, Homo sapiens
gcaggagtccagtcactcgagtcattttccatcctgtgttcagtgttatggtctctgcttcagaggatgctacaattaaggtgtgggattatgagactggagattttgaacgaactcttaaaggacatacagactctgtacaggacatttcattcgaccacagcggcaagcttctggcttcctgttctgcagatatgaccattaaactatgggattttcagggctttgaatgcatcagaaccatgcacggccatgaccacaatgtttcttcagtagccatcatgcccaatggagatcatatagtgtctgcctcaagggataaaactataaaaatgtgggaagtgcaaactggctactgtgtgaagacattcacaggacacag

SEQ ID NO: 24839 - DNA, 433 bp, Homo sapiens
  misc_feature (1)...(433): n = a,t,c or g
tnnttttgttncctcgtnagcccttctatgacatgattacgaatttaatacgactcactatagggaatttggccctcgaggccaagaattcggcacgagccagcaagtgaagatttacaagatttacaaaagaagctctgtcgaaagagatgtataaatcaattactctgtaaattgcccacagattcagagttggctcctaggagctgatgctgccattgtcgacatctgatatttgaaaaaacagggtctgcaatcacctgacagtgtaaagaaaacctcccatctttatgtagctgacagggacttcgggcagaggagaacataactgaatcttgtcagtgacgtttgcctccagctgcctgacaaataagtcagcagcttatacccacagaagccagtgccagttgacgctgaaagaatcaggcaaaaa

SEQ ID NO: 24840 - DNA, 411 bp, Homo sapiens
gctcactgcaacctcaaaggttgcaaaggacactccaggcctgtctaccttagtggcctctctctccacaggtgtataaatccatctatttccttggccacatcttcttcctgagcctactattcatattgccttatattcacaaagcaatggtgccaaggaaagagaagttaaagaagatggagtaatccatttccctggtggcctgtgcgggactggtgcagaaactactcgtctcccttttcacagcactcctttgccccagagcagagaatggaaaagccagggaggtggaagatcgatgcttccagctgtgcctctgctgccagccaagtcttcatttggggccaaaggggaaacttttttttggagaaggcgtcttgctttgtcacccacgctggaatgcagtgg

SEQ ID NO: 24841 - DNA, 338 bp, Homo sapiens
tctatgacatgattacgaatttaatacgactcactatagggaatttggccctcgaggccaagaattcggcacgagggaaatgcagctctagctgagcttgatcagttactggcagtcgcagactttggaccccgggatgaaagagacaactttgtacaaaatgatttcagggaccctgatgccccacaaccctgcggcaccacagagccgaccacaagctccagtctgtgtgggatcgatcatgaggcgctccacaagcagattatggagtacaaaaggaggaaagataaagggctcgggggcctggtgtggcaggggcaggtggctgagctgacaac

SEQ ID NO: 24842 - DNA, 353 bp, Homo sapiens
gggatgcttatggtggaatgaaggagcactatttaggcaatatcattggagttgctttgaaatactcaattaactagtaattctgttgctaatgttctgtacagatacataagcatctccatttttacttacctgtaagaagcaggaaacaaatcattgttgagtaccaaatccataggttaatgtggtcttaatagttaactattatatgcagtataaatgaaagagtctttctctttctgtaagttgccctcttcttctcttctacgtctcttatctctccccctgtatttagctgacatatttattttgacatatttagttgatctgcctgcctcagcctcccaaagtgc

SEQ ID NO: 24843 - DNA, 407 bp, Homo sapiens
gccatcttccttttggatgaagccatacagtatttgagcaagataaagattcagcaaattgagaaggatcgaggtgaatgggatagtctgactccagaagcccgccgagaaaaggaggctggcctacagatgtttggacagctggcacgtttccataacatcatgtccaatgaaacaatcggtacccttgcctttctcacatcagagatcaagtcactctttgtgcatcccttcctggctgagcgcatcatctccatgttgaactacttcctgcaacacctggttggccccaagatgggtgccttaaaagtcaaggacttcagcgaatttgacttcaaaccccagcagcttgtatcagatatctgcactatctacttaaatcttggggatgaggagaatttctgtgc

SEQ ID NO: 24844 - DNA, 364 bp, Homo sapiens
gtcgtagactcgcattgacttaatttttttaaatcttattgcatattttgactagataataaatgcatatggttaaaaaattcacatggttcaaaaaagtacacctcccactcatcttccatgtgatatttcctttctgcttagcaattctgtatttatcttgctaaacatgaatgacagttgtttgctgaaattacattaaatgtgacgtaataaaatcattgtaagtttacattttttaactttaataatttttaatgttttaatgaagagtatgaagagtagtagtactgctcttcaaagtactactactttaccttaccttttactgttttgttaagaaaattaggccgggcgcagtggc

SEQ ID NO: 24845 - DNA, 594 bp, Homo sapiens
atgacaggcctcggacccaaggacttggacttcgcccagcagaagctgaccgataagaacctgggcttccagatgctgcagaagatgggctggaaggagggccatggcctgggctccctcggaaagggcatcagggagccggtcagcgtgggaaccccctcggaaggggaagggttgggtgctgacgggcaggagcacaaagaagacacattcgatgtgttccgacagaggatgatgcagatgtacagacacaagcgggccaacaaatagatcaaaaccactgatgtgaaagataagccttgaagcagcaattgcccttaaaacatcatccctgccctggatcggcctggagccagtgcccaagtacggtttggtgtgtacatgaaaacaaacgtctctgcagtctctggggcggaggtttcgctggcttttctttctctcaaagaaaaaaacatgcaccattttcaatgtgcttttgcctctcctctctgttcacatgcttttagcagcaagtcccctccaaatctgtcttggttccccttcagaaggtggcgctgcccccgaaaggcacctcagcctgtgagtgctgaggaa

SEQ ID NO: 24846 - DNA, 446 bp, Homo sapiens
ggaagattgaagataagaagaaaaagaacaaaacaccttttctgaaaaaagaaagcagagagaaatgcagcattgctgttgatattagtgagaatctgaaggagaagaaaacagatgctaagcagcaagtgtcagggtggacgcctgcacacgtcaggaagcagcttgccattggcgttaacgaagttaccagagccctggaaaggagggaactgctgttagttctggtgtgtaaatcagtcaagcctgccatgatcacctcacacttgattcagttaagcctaagcagaagtgtccctgcctgtcaggtcccccggctcagtgagagaatcgcccccgtcattggcttaaaatgtgttctagccttggggttcaaaaagaacaccactgactttgtggacgaagtaagagccatcatccccagagtcccagttaagtgaccatgg

SEQ ID NO: 24847 - DNA, 390 bp, Homo sapiens
  misc_feature (1)...(390): n = a,t,c or g
cctcgtgccaggccagcatacgctcatcgtggctgacactgagaacctgctgaaggcccccaaccatcgttgggaaatcatctctaaatcccatcctctttcgaggtgttgggatggtggccgatcctgataaccctttggtgctggacatcctgacgggctcttccacctcttactccttcttcccggacaagcctatcacccagtatccacatgcggtggggaagaacaccctcctcattgctgggctccaggccaggaacaatgcccgcgtcatcttcagcggctccccnncagcgactccttnttnaactcannangncaaaagngggcccggttccaaaagnattnccagacanggcaactatgaactagctgnggccctctccg

SEQ ID NO: 24848 - DNA, 356 bp, Homo sapiens
  misc_feature (1)...(356): n = a,t,c or g
gatagatgcaatgtaacactttttctaattacatagttttaaatattagagcactcaaatgaaatgtaataagacaagaaagtccatgattccaataattttgcagttttaggcacaaatggagatttcattctaccttgaagcttgttcaatttctgtatttttagacatacattttcgaagatgctaatttgatgtttgaaagttccccatagtatatttctggtgtcccagaaaacatgtttgtgaattttttttttttaaaccaacgcatgttcttcagtacactgattaaagaagtaacattcacatgctgtttgccatttttacttataaaaatgtctntngattcctta

SEQ ID NO: 24849 - DNA, 440 bp, Homo sapiens
taccagctatgacatgattacgaatttaatacgactcactatagggaatttggccctcgaggccaagaattcggcacgaggagagagccagcaccatgagcttcaataccctgaaatgtaaagcacagagcaactacaggccagtcttcttccccatcctcttctcaccactcttttctttctttgattcttggcccacacatggctgggataaagacacacactcctatgcagatgctgggaaggaaaggtacattaacatggcctttattgtttaaccatctagtgatggtttaaatatttggcatttcttaaaagaaacagatcttccccaatgggcagccttgcagtgtgagcatgaggctacaactcctaaaccaggacagaacaaaagccaacttccctaagccctgatgttggcaagcgactagaccatctca

SEQ ID NO: 24850 - DNA, 805 bp, Homo sapiens
  misc_feature (1)...(805): n = a,t,c or g
ggaaaaatctagctgttttccatacgtgcaaaatcatggacatcagcaccttggcagcagtgagctttcagagaatcagcaaccaggagcaccaaatgctcctactcatcctgctcctccaggccttcatcaccaccataagcacaagggtcagcataggcagggtcacccagagaaccgagatatgccagcaagtgaagatttacaagatttacaaaagaagctctgtcgaaagagatgtataaatcaattactctgtaaattgcccacagattcagagttggctcctaggagctgatgctgccattgtcgacatctgatatttgaaaaaacagggtctgcaatcacctgacagtgtaaagaaaacctcccatctttatgtagctgacagggacttcgggcagaggagaacataactgaatcttgtcagtgacgtttgcctccagctgcctgacaaataagtcagcagcttatacccacagaagccagtgccagttgacgctgaaagaatcaggcaaaaaagtgagaatgaccttcaaactaaatatttaaaatagaacatactccccaatttagtctagacacaatttcatttccagcatttttataaactaccaaattagtgaaccaaaaatagaaattagatttgtgcaaacatggagaaatctactgaattggcttccanattttaaatttaagtcataagaatatggccccaaccatatttttatgatggnccaatgaaagggnnttgcagcnttgggnnaanaaggccttttttccnttttccaagggtcnaatgggt

SEQ ID NO: 24851 - DNA, 492 bp, Homo sapiens
acagctatgactgattacgaatttaatacgactcactatagggaatttggccctcgaggccaagaattcggcacgagggtatattcattcaatgtctttgggtcacatggatataaaacctagtaatattttcatatctcgaacctcaatcccaaatgctgcctctgaagaaggagacgaagatgattgggcatccaacaaagttatgtttaaaataggtgatcttgggcatgtaacaaggatctccagtccacaagttgaagagggcgatagtcgttttcttgcaaatgaagttttacaggagaattatacccatctaccaaaagcagatatttttgcgcttgccctcacagtggtatgtgctgctggtgctgaacctcttccgagaaatggagatcaatggcatgaaatcagacagggtagattacctcggataccacaagtgctttcccaagaatttacagagttgctaaaagttatgattcatccaga

SEQ ID NO: 24852 - DNA, 342 bp, Homo sapiens
gttacagactatttcaccttcaaacaggaatgtcgaatcaaatattcggaacaggtgtatgatgcctgtatggagacatttgactgtcttcctcttgctgccctcttaaaccagcagtttctctgtgtacatggaggaatgtcacctgaaattacttctttagatgacattaggaaattagacaggtttactgaacctcccgtctttggacctgtgtgtgacctgctttggtctgatccctcagaggattatggcaatgagaagaccttggagcactatatccataacactgtccgagggtgcttttatttctacagttaccctgcagttttgtgaattttt

SEQ ID NO: 24853 - DNA, 359 bp, Homo sapiens
gtatttcagcaattcaaggtgatttttgaggaagctaagaaatgactagatttaccagaacatttgaaactcaaagaagataatttcttccaggtttctaaaagcaaaataatgaatggccactgatgaaaaatcatattatttattcattcactgtcttccagtatttcagtgttttgttttgtttttattttattttattttaagtttttgagatggagtctcgctctctctcccaggctggagtgcagtggcgtgatcttggctcactgtgacctctgcctcccaggttcaagtgattctgctgcctcagcctcctgagtagctggaattacaggcgcacaccaccacgcctggct

SEQ ID NO: 24854 - DNA, 355 bp, Homo sapiens
ttttttcattttttccatttttatttgatgtttccaaatataaaaaagtcaggattcttacatcaattatctcaaatgagaccatgcaaagcaattcagtgtatacaacaatcatttttccccttcagttctgctgctttatacaacagtgtgattgacagaaaattggatggcatgtgcctggtcagaaaatgtcatctgtttacaaaataacatcatgcagcacagtttctactttgtctgcaagtcaattcacaaaaactacttattttctgttttttatttgggaggcacatggaactgaaaaatttagctgcccaattttattcaactaccccaccaaaaaaaaaaaaaa

SEQ ID NO: 24855 - DNA, 357 bp, Homo sapiens
gaattgcacagaacactaagaccgaaaggctggactcttgtttctccttgaaagctttgcctttgttttgaacttcctttcccacttggtagaaagagcccagaagcagccctggccctgtaagatggactctttcatccttcagttgtatttagctttgagtttctctgcatctgtccaccccatgtgtatataacccagcccctggctctggggtggtcacctcgtcagtgccttttgttctggaggagaggaccccccccgcctgccgagaggctctcttcctgttctgcacccctctccccatgggaccttggagaaaactgaactgttacaaacccctgcacagtgcctgtc

SEQ ID NO: 24856 - DNA, 561 bp, Homo sapiens
gtataattaatggatttgccttaccactaaaagaagagcacaagattttcttattgaaggtgttactacctttgcacaaagtgaaatctctgagtgtctaccatccccagctggcatactgtgtagtgcagtttttagaaaaggacagcaccctcacggaaccagtggtgatggcacttctcaaatactggccaaagactcacagtccaaaagaagtaatgttcttaaacgaattagaagagattttagatgtcattgaaccatcagaatttgtgaagatcatggaacccctcttccggcagttggccaaatgtgtctccagcccacacttccaggtggcagagcgagctctctattactggaataatgaatacatcatgagtttaatcagtgacaacgcagcgaagattctgcccatcatgtttccttccttgtaccgcaactcaaagacccattggaacaagacaatacatggcttgatatacaacgccctgaagctcttcatggagatgaaccaaaagctatttgatgactgtacacaacagttcaaagcagagaaac

SEQ ID NO: 24857 - DNA, 428 bp, Homo sapiens
  misc_feature (1)...(428): n = a,t,c or g
ggtaccagtttgtccatcttgagatggtgaggctgtcagtgtatggggcaagcttccagcgggatgttgaactggtcattaatgggtcccctgagttggagctcattctgtctcttttctcttttgctttctgtttcttaagggcacacgtgcgtgcgagcacacacacacatacgtgcacagggtccccgagtgcctaggttttggaaagtttgcctgttctatgcctttagtcaggaatggctgcacctttttgcatgatatcttcaagcctgggccgtacagagcacatttgtcagtatttttgccggctggtgaattcaaacaacctgcccaaagattgatttgtgtgtttgtgtgtgtgtgtgtgtgtgtgtgtgngtgagaaatggaanactnannnntnatnnnntttnnnantttnataa

SEQ ID NO: 24858 - DNA, 369 bp, Homo sapiens
  misc_feature (1)...(369): n = a,t,c or g
gcggcacgagttattgaggaaggccgtcttcttactgcttaagcctgcaagactgattaggagacctacttttctcctgaaaagctggcttgctctttttatccccaagttcagccacctactgtttttttttcctcccaggngccctntgctatgtcttctntgcagttgnatgctgagnccttttnactgttaaaggctgtnactactatngaccatgaaactgtaaatanaangggcaacaaacatntggggngccagggtgaggctatngttctaggaagtattatcccttgtngccaaaaggcaaaaacagttgagggctacattactataccctttctgatnttttttnaaaccttggnggga

SEQ ID NO: 24859 - DNA, 356 bp, Homo sapiens
  misc_feature (1)...(356): n = a,t,c or g
gcggcacgagttattgaggaaggccgtcttcttactgcttaagcctgcaagactgattaggagacctacttttctcctgaaaagctggcttgctctttttatccccaagttcagccacctactgtttttttttttcttttaggatcatttttccctgaacacactgncatancctcccaggggccctntgctatgtcttctntgcagttgnatgctgagnccttttnactgttaaaggctgtnactactatngaccntgaaactgtaaatanaangggcaacaaacatnnggggngccagggtgaggctattgttctaggaagtnttatcccttgnngccaaaaaggcaaaaacag

SEQ ID NO: 24860 - DNA, 439 bp, Homo sapiens
  misc_feature (1)...(439): n = a,t,c or g
gnnnnnnnntttganncccnnnnnnnttggannaccagctatgacatgattacgaatttaatacgactcactatagggaatttggccctcgaggccaagaattcggcacgagggaattgctagtaataaaacgtattcctttcttatcacgctggatgtggatatcggcgagctgatcatgatcaagttcaagtgggaaaacagtgcagtgtgggccaatgtctgggacacggtccagaccatcatcccatggagcacagggccgcgccactcaggcctcgttctgaagacgatcagagtcaaagcaggagaaacccagcaaagaatgacattttgttcagaaaacacagatgacctactacttcgcccaacccaggaaaaaatcttcgtgaaatgtgaaataaagtctaaaacatcaaagcgaaagatcagatgagat

SEQ ID NO: 24861 - DNA, 418 bp, Homo sapiens
ggagaaaatgcagaaaattcccatcactctgggcaaaggaattgctagtaataaaacgtattcctttcttatcacgctggatgtggatatcggcgagctgatcatgatcaagttcaagtgggaaaacagtgcagtgtgggccaatgtctgggacacggtccagaccatcatcccatggagcacagggccgcgccactcaggcctcgttctgaagacgatcagagtcaaagcaggagaaacccagcaaagaatgacattttgttcagaaaacacagatgacctactacttcgcccaacccaggaaaaaatcttcgtgaaatgtgaaataaagtctaaaacatcaaagcgaaagatcagatgagatttaatgaagacccagtgtaaggaataaatgaatcttactccttatctggaaggc

SEQ ID NO: 24862 - DNA, 1009 bp, Homo sapiens
  misc_feature (1)...(1009): n = a,t,c or g
acttaaagcctggaatgatatcaaaaaggtctatgcctctcagcgaatgagagctggcaaaggcaaaatgagaaaccgtcgccgtatccagcgcaggggcccgtgcatcatctataatgaggataatggtatcatcaaggccttcagaaacatccctggaattactctgcttaatgtaagcaagctgaacattttgaagcttgctcctggtgggcatgtgggacgtttctgcatttggactgaaagtgctttccggaagttagatgaattgtacggcacttggcgtaaagccgcttccctcaagagtaactacaatcttcccatgcacaagatgattaatacagatcttagcagaatcttgaaaagcccagagatccaaagagcccttcgagcaccacgcaagaagatccatcgcagagtcctaaagaagaacccactgaaaaacttgagaatcatgttgaagctaaacccatatgcaaagaccatgcgccggaacaccattcttcgccaggccaggaatcacaagctccgggtggataaggcagctgctgcagcagcggcactacaagccaaatcagatgagaaggcggcggttgcaggcaagaagcctgtggtaggtaagaaaggaaagaaggctgctgttggtgttaagaagcagaagaagcctctggtgggaaaaaaggcagcagctaccaagaaaccagcccctgaaaagaagcctgcagagaagaaacctactacagaggagaagaagcctgctgcataaactcttaaatttgattattccataaaggtcaaatcattttggacagctgcagacgggcacgaggtcttctacgggatcatgtttgatgcaggaagcactgacacccgagtacacgtcttccagttcacccggccccccagagaaactcccacgttaacccacgaaaccttcaaagcactgaagccaggtctttctgcctatgctgatgatgttgaaaagagcgctcagggaatccggaancta

SEQ ID NO: 24863 - DNA, 615 bp, Homo sapiens
cttcaggtctgtttcccagacccagaaagctttacagaaaatcattgtaagacaatttattaatttgagaaagtcaccttgacagttctttgcacacaagttttacacctctctggattcgaagtttgtattgtattcatagttaaagggaatcgggtactttgcttgttgaataatgcactttaaaacaaggaaccgtatcaggccagcatggtggctcatgcctgtaatcccagcattttgggaggctcaggcagacaaatcgctctagctcagaagttgcagagcagcctgggcaacatggtgaaacccgtctctaccaaacagacaaaaagcagccaggcgtggtggcacatctgtggtcccagctacttgagaggctgagccaggaggatcgcttgagcccaggaggcggaggttgcagtgagctgagatggcaccacttattgcactccagcccgacagagcgagactccatctaccagatccttatgacgcagctgatgcctgccttggttcctaccactctggtgtagacagaggactttgtccaagtctcacactaaacatgcccgggcttcgatgtgcctggaggatttcccacagggacccacg

SEQ ID NO: 24864 - DNA, 496 bp, Homo sapiens
gctatgacatgattacgaatttaatacgactcactatagggaatttggccctcgaggccaagaattcggcacgagactgcatagggctcggcgtggctgtttttcattttttgtagagaaggggtctagctttgttgccccagctggtctcgaacccctggctccaagctatcctcctactttggcctcccagagtgttgcagttacaggcatgagccaccatgtccagcgcaaatccacaggtttcttactggtaaaggcatatcaggcttgtttttagtttcattttcagaaaacttctggccattactgtgacttttatttgaaccagtctcatttaatgattcataaggccgggcgcagccggctcacgcctataatcccagcactttgggaggctaaggcaggcggatcacaatgtcaggagttcaagaccagcctggccaatacagcaaaaccccgctctactaaaaatacaaaaattagctgggcgtgg

SEQ ID NO: 24865 - DNA, 418 bp, Homo sapiens
gcacactggccacgggactttgtatgtgtctggggggctttgcccatttgtatagtctgaattcagcccagcagtttgcagtgtcctatacacatgggtccccagtgtcacttgcagaatgcaaactagacagagcccacccacgccaaacagcttgtccatgattacctgggtgatttggaggtggtcaggatttgattcaagcacagacttcactctatgttcaaagctgtctgggctgtgaccaactttgtctgtgtgggctataagagtagggggttcttggctggacatggtggcttacgcctgtaatcccagcattttgggaggctgaggtgggcggatcacgaggtcaagagatcgagaccatccttggccaacatggtgaaaccccatctctactgaaaatacaaaaact

SEQ ID NO: 24866 - DNA, 576 bp, Homo sapiens
gctgaatagatgacaatgggaaaaggacttgaacctcaagctctctctaaggagctgttttcctcaaacgagaagaattgaagtgtttagttctatcatgttttctgccaattaccatgcatagaccctcagtagaattggatttccatgtcagcccccactccaggaaggcagcccaatccctaggtgatggggaacccctctcacggttgaaaatttattacctttttacgccctgccacgaactgtgtagacattgtttttattaatcttttgtttggccgggcgtggtggctcacgcctgtaatcctagcactttgggaggccgaggtgggtagatcgcttgagctcaggagttcaagacgagcctgggcaacatggcaaatgccgtctctgcaaaaaaatactaaaattagctggtcgcggtggcttctgcctgtgattccggctacttgggaggctgaggtgggagggattgcttaagcctgggaggcagaggttgcagtgagccgagattgcgccattgcactctagcctgtgtgacagagcaagaccctgtctcaaaaaaaaaaaaaa

SEQ ID NO: 24867 - DNA, 1212 bp, Homo sapiens
catgattacgaatttaatatcgactcactatagggaatttggccctcgaggccaagaattcggcacgagagggtcaggagcccgggagcgcgaccctcccccggcccggcctggcccggcctggccagtccccgcggtctctgcccgggctgacgcccaggaatgtggtcgacgagaagccccaacagcacggcgtggcctctcagcctcgagcctgatccggggatggcctctgcctccaccacaatgcatactaccaccattgcagagcctgatccagggatgtctggatggccggatggcagaatggagacctccacccccaccataatggacattgtcgtcattgcaggtgtgattgctgctgtggccatcgtcctagtctccctcctcttcgtcatgctgcgctacatgtaccggcacaagggcacgtaccacaccaatgaggccaagggcacggagtttgctgagagtgcagatgcagccctgcagggcgaccctgccctccaagatgctggtgatagcagcagaaaggagtactttatttgagggacaacagacttcacttccctgaatgcctcccccatctccatcaggaaaaatacaccccatcgcccagcacccctgctgataccaccagacagagagagagagcacttgattcttcccgagatagccacctggaaacactaggtgcctgcccagggaggaacggaggaggactcgcgctacaagaggccactcccagggacccagggaggcgatggccaccccagaggccaccttttgctccacggaggtgggagaaaatctgggcacatggggccccctgggcagtgcaggacaacatcagctcactggcaggaaagtccttgttgagggtgagggggtgctggggtacccgggggctggggaagcaaggaaataagtcatctgtatgctgactggggataatggcatcaaatgtcagtccttgacatttggggggaacagcaggtgccagagctaaaaggtacctttgtctgccattgatccagctcagaacgattggaagtcgacgcggccgcgaattccagatctatgaatcgtagatactgaaaaaccccgcaagttcacttcaactgtgcatcgtgcaccatctcaatttctttcatttatacatcgttttgccttcttttatgtaactatactcctctaagtttcaatcttggc

SEQ ID NO: 24868 - DNA, 349 bp, Homo sapiens
gcctgctgacttgctgaaaagatgcagtatctaacccaagtagtttactttccgcaaagaaagaaacagagtgaaaactctgcccaaaagtttgaaggcaagacagagaagaggtgttatttaccaggaaggggaaccaatattgtgtatgccacatgctttacattggttgtttcattttatccttaaaagaaccacatgagataggtattcttttacagatatggaaactgagactaagataaaattaagtaatttgtccaagaccacaaacttagcgagaagggaagcctggattaagaataaggtccataggctgggcgtggtggctcatgcctgtaatcccagc

SEQ ID NO: 24869 - DNA, 230 bp, Homo sapiens
  misc_feature (1)...(230): n = a,t,c or g
attggantcaacagctatgacatgattacgaatttaatacgactcactatagggaatttggccctcgaggccaagaattcggcacgagcagtcagggaggtcccggcaccagaagcgcgcccgcgcccaggcgcagctccgcaacctcgaggcctatgccgcgaacccgcactcgttcgtgttcacgcgaggctgcacgggtcgcaacatccggcagctnnnnntggacg

SEQ ID NO: 24870 - DNA, 575 bp, Homo sapiens
  misc_feature (1)...(575): n = a,t,c or g
tttggatnatcctggaaaaccgttatgacatgattacgaatttaatacgactcactatagggaatttggccctcgaggccaagaattcggcacgagggcttgtcttattgtaatgtttcttccagaaaagaaagacacaggtgtgtttgcagtggtgaacagccattccttgtctttgctggggaagctgaccatcagtgctgcctttaacattgtttatatctacacctctgagctttaccctacagtcatcaggaatgttgggcttggaacttgttccatgttctcccgagttggtgggattattgctcccttcatcccctcactgaaatatgtgcaatggtctttaccattcattgtcttcggagccacgggtctgacctccggcctcctgagtttgttattgccggagacccttaacagtccgctgctagaaacattctccgaccttcaggtgtattcgtatcgcaggctgggagaagaagcattatctttacaggctttggacccccaacagtgtgtggacaaggagagctctttagggagtgagaatgaggaagaagaagaaatttatt

SEQ ID NO: 24871 - DNA, 350 bp, Homo sapiens
gcaacctgcaagccaagaagtacgagaagggccaggcgcggtggctcacgcctgtaatcccagcactttgggaggccgagacgggtggatcacctgagctcaggagttcgagaccagcctgaccaacgccgagacgcatccagagctttcgtgaccggggactgttctgaagcaggcctcgtggatgacgtatccgacctgtcagccgctgagatgctgacacttcacaattggctttcattctatgagaagaattatgtgtgtgttgggagggtgacaggacggttctacggagaggatgggctgcccaccccggcactgacccaggtagaagctgcgatcaccagagg

SEQ ID NO: 24872 - DNA, 345 bp, Homo sapiens
gagatggcagtcactttgtaaatatgctgtagtcacttatcatcttttcaaagggtaacaagagaatctaagatgtagtaagaatgtaaaccagtacactatgagacctaaaagagagtattaaatgtgaacttttagcagagcgtggtggctcacacctataatcccagcgctttggaggctgaggttggaggattgcttaagtccaggagttcaagaccagcctgggtaacatggggtggaacaagcctgtagtcccagatactcaggaggctgaggtgaaaggattgcttgagccagggaggtcaaggctgcagtgagccgtgaaaggccactgcactccag

SEQ ID NO: 24873 - DNA, 426 bp, Homo sapiens
gccgcctggatggccacaccatctcagacctgagccggagcagccggggcgagctgatccccatctcccccagcactgaagtcgggggctctggcattggcacaccgccctctgtgctcaagcggcagaggaagaggcgtgtggctctgtcccctgtcactgagaatagcaccagtctgtccttcctggattcctgtaacagcctcacgcccaagagcacacctgttaagaccctgcccttctcgccctcccagtttctgaacttctggaacaaacaggacacattggagctggagagcccctcgctgacatccaccccagtgtgcagccagaaggtggtggtcaccacaccactgcaccgggacaagacacccctgcaccagaaacatgctgcgtttgtaaccccagatcagaagtactccggac

SEQ ID NO: 24874 - DNA, 441 bp, Homo sapiens
  misc_feature (1)...(441): n = a,t,c or g
ttganatcngctatgacatgattacgaatttaataccgactcactatagggaatttggccctcgaggccaagaattcggcacgagaggagctacaggccgagcaggaggaccgggctttaaggagttttaagctgagtgtcactgtagaccccaaataccatcccaagattatcgggagaaagggggcagtaattacccaaatccggttggagcatgacgtgaacatccagtttcctgataaggacgatgggaaccagccccaggaccaaattaccatcacagggtacgaatagaacacagatgctgccagggatgctatactgagaattgtgggtgaacttgagcagatggtttctgaggacgtcccgctggaccaccgcgttcacgcccgcatcattggtgcccgcggcanagccattnncanaatcatggaccgaatt

SEQ ID NO: 24875 - DNA, 493 bp, Homo sapiens
  misc_feature (1)...(493): n = a,t,c or g
tttganatccnttnnnnnnnntttgnnnaacagctatgacatgattacgaatttaatacgactcactatagggaatttggccctcgaggccaagaattcggcacgaggaaatgagtaattctcaaagaggtagctttaaatttcaggttatagatcaccttcaacaaagaatagtaatttttttaattgtattttttttaaagatgtgacaagacaaagtaaaaggactttgaatctctagtggcagcaacatctgggaaagccaaataaatgagagatgacagctagttagtaaggcttgtttatataaattcctctgctaccatttctaggccaataagtgtctaaagttgtctttagtggttaacctttttaacctttgttctccctggtagaaaaggggtgtgggttgggataccttcgtctttgtaaatctatgntctgcttttaggcanatanagggagggcananagctttnctgnacctgctgct

SEQ ID NO: 24876 - DNA, 447 bp, Homo sapiens
  misc_feature (1)...(447): n = a,t,c or g
gagagacatgaagatggcagagaatgacagggaagggagcatgcacaaggcggccagagccctggggctgggcacctcggtccaacccctgagccccaacccgagccccagcccaggccaagctcccaggcggttcctgcagggcgctgggagccagcccaagagcaacacgccatccgcatccacgcctctccccagcttccaggccactcgggagcccacctgcgcccctcgtgagaagcagcccaggaagatgtcgccttcatgagcacaccatctggagctccacggtagggacgtctgtggagccggcccatccctcggccgcctcaggcacctctagagcctgggacagtcacttcctcagtgaggctacagcagcctcacatgcacaccccagcaagaaaatgcccgatcccttcaagaaaaacggnaagttcacattca

SEQ ID NO: 24877 - DNA, 473 bp, Homo sapiens
  misc_feature (1)...(473): n = a,t,c or g
aattcactttttaaagcacctgttagtatcctgcagggcagttcttttctccctgatataattactggtggtatccactttctctcttggaacatacacatttcagtgactgagtgtctcataattcataacaatgagttgaagaatgtgtgcagttgcttactctttcttcagttacccctgtgtttataaatatggtcaatatagttacacagaagtgcgtatacatttttatggtaaccattttttgtaaaagttttttatgagaaacataaactcatcagttttcacagtgttttaatttgttagagtgatggaatctttcttcaatttttttgtttgccatcaattgccacccccaatcgcaattaagaaatatttaaatcaattattgacagaaaaatatttgatgactccaatcaatattttctgaaatatgtacttggagcaattggatccagagatcnatttgt

SEQ ID NO: 24878 - DNA, 427 bp, Homo sapiens
gctggaagttgatgatggtctagctctattaggtttcataaaactaaaacaaaaaaaaagaagatcattatttcaggctggcacagtggctcacacctgtactcccaaaagtctgggaagcctaggtaggcagatcacttgagctcaggggttcaggaccagcctgtgcaacatggcgaaaccctgcctctacagaaaaaaatacaaagactagccaggtgtggaggcacacacctgtaatcccagccactcaggaggctgaggtgggaggatggcttgagcccagggaggtcaaggctacaatgagccatgattgacccactgcactccagcctgggtgacagagtgagaccctatctcaaaaattaaataactaaataaatcaatcaattaatttaaaaaagatgatcattacttcaacatattc

SEQ ID NO: 24879 - DNA, 502 bp, Homo sapiens
cgattacgaatttaatacgactcactatagggaatttggccctcgaggccaagaattcggcacgagaggagggcctcccagatgtgaggttttgggggtggagtatttgagtttggtagactacctctttgccttcagagtttcttcttttctttcttccccatcacacagctagcctattacctcatattttgggggtgcagggagcaggtagacaaacttgctaaggattgggttgttactagggcctaagaatggctggatggggccgggcgtggtggctcatgcctgtaatcccagcactttgggaggccgaggtgggtgtatcacctgaggtcaggaattcaagaccagcctggccaacatggtgaaaccccgtctctactaaaaatacaaaaattagccgggcgtcgtggcacatgcctgtaatcccagctgcttgggcggctgaggcaggagaatcgcttgaacccagaagcggaggttgcaatgagccaagatc

SEQ ID NO: 24880 - DNA, 433 bp, Homo sapiens
aaacaccttgacatgattacgaatttaatacgactcactatagggaatttggccctcgaggccaagaattcggcacgagcgtgcacccactgcctcttcccttctcgcttgggaactccagcatcccctttgctcgaaatggaccccaactgctcttgcgccactggtggctcctgcacgtgcgccggctcctgcaagtgcaaagagtgcaaatgcacctcctgcaagaagagctgctgttcctgctgccccgtgggctgtgccaagtgtgcccagggctgcgtctgcaaaggggcatcggagaagtgcagctgctgtgcctgatgtgggaacagctcttctcccagatgtaaatagaacaacctgcacaacctggattttttttaaaaatacaacactgagccatttgctgcatttctttttataaaaaaaa

SEQ ID NO: 24881 - DNA, 516 bp, Homo sapiens
  misc_feature (1)...(516): n = a,t,c or g
tnntntnttatattttgaanccctttgaatgncctngattacgaatttaatacgactcactatagggaatttggccctcgaggccaagaattcggcacgagactggaagaattcaaggtggacattcgcttcccacagagcggagccccagaccccaactgcgtcactgtgacggggctcccagagaatgtggaggaagccatcgaccacatcctcaatctggaggaggaatacctagctgacgtggtggacagtgaggcgctgcaggtatacatgaaacccccagcacacgaagaggccaaggcaccttccaaaggctttgtggtgcgggacgcaccctggaccgccagcagcagtgagaaggctcctgacatgagcagctctgaggaatttcccagctttggggctcaggtggctcccaagaccctcccttggggccccaaacgataatgatcaaaaagaacagaaccctctccagcctgctgacccaaacccaaccacacaatggtttgtctc

SEQ ID NO: 24882 - DNA, 403 bp, Homo sapiens
ggttaattgtttgttaaaaattcagcagtaaagccatccagtcctgagattttctttgttgggaaatgttttattactgattcaaacttattacttgttattggtctgttcagatttttctatttcttccaggctcaaatttggtaggttgtatatatccagaaatttatacatttcctgtagggtttccaatttgttaacatataggtgttcataattgccaccgtgcccgccgaccttatttaatctttataagcctcacttttcacatctagaagacagacacaaataatacctattcctcttgcttatgggtttctttgggttgcatttatctgtgaaatgctattaaaatagctagtgtgtactcactactttctaagcactttaatcctcacagcag

SEQ ID NO: 24883 - DNA, 396 bp, Homo sapiens
ggtagcatcaagaaacatctgcacattttcccagcagcctgagtaactagtagtgatttgtacagacttctctgcatctgctttttccccccttccttttttcagcacatctagatgattaatagactgaacaggcccttatatatgcattctgacagcctttaggacggtcttggttgacaatacacacataagccagtgttgttatcatgaaacacttcatttgaatgactattacaggctgaacaggatgtcctatgccaagaggttgtgacattttgagagggtggtgctgggagccatgtgggactcttttcccatcacagccaagttgacattttctcaggttgtaggatcattagggctgcaaagggagaaactttgtcagtggctggg

SEQ ID NO: 24884 - DNA, 1055 bp, Homo sapiens
cgaatttaatacgactcctatagggaatttggccctcgaggccaagaattcggcacgagccatcacgggcctcgctgcaaatttggaccgggccaaggctggactgctggagcgtgtgaaggagctacaggccgagcaggaggaccgggctttaaggagttttaagctgagtgtcactgtagaccccaaataccatcccaagattatcgggagaaagggggcagtaattacccaaatccggttggagcatgacgtgaacatccagtttcctgataaggacgatgggaaccagccccaggaccaaattaccatcacagggtactgaaaagaacacagaagctgccagggatgctatactgagaattgtgggtgaacttgagcagatggtttctgaggacgtcccgctggaccaccgcgttcacgcccgcatcattggtgcccgcggcaaagccattcgcaaaatcatggacgaattcaaggtggacattcgcttcccacagagcggagccccagaccccaactgcgtcactgtgacggggctcccagagaatgtggaggaagccatcgaccacatcctcaatctggaggaggaatacctagctgacgtggtggacagtgaggcgctgcaggtatacatgaaacccccagcacacgaagaggccaaggcaccttccagaggctttgtggtgcgggacgcaccctggaccgccagcagcagtgagaaggctcctgacatgagcagctctgaggaatttcccagctttggggctcaggtggctcccaagaccctcccttggggccccaaacgataatgatcaaaaagaacagaaccctctccagcctgctgacccaaacccaaccacacaatggtttgtctcaatctgacccagcggctggaccctccgtaaattgttgacgctcttcccccttcccgaggtcccgcagggagcctagcgcctggctgtgtgtgcggccgctcctccaggcctggccgtgcccgctcaggacctgctccactgtttaacactaaaccaaggtcatgagcattcgtgcta

SEQ ID NO: 24885 - DNA, 392 bp, Homo sapiens
caaatgagaaagctcttgaaacagtatttggcaaatatggacgaatagtggaagtactcttgataaaagaccgtgaaaccaacaaatcaagaggatttgcttttgtcacctttgaaagcccagcagacgctaaggatgcagccagagacatgaatggaaagtcattagatggaaaagccatcaaggtggaacaagccaccaaaccatcatttgaaagaggtagacatggaccgcccccacctccaagaagtagaggccctccaagaggtcttagaggtggaagaggaggaagtggaggaaccaggggacctccctcacggggaggacacatggatgacggtggatattccatgaattttaacatgagttcttccaggggaccactcccagta

SEQ ID NO: 24886 - DNA, 367 bp, Homo sapiens
  misc_feature (1)...(367): n = a,t,c or g
ggattgggggtagatattcaacattcttaaagaaaagacattccaacacataatttctttttctttctttcttatttttttttgagatggagtcttcctctgtcccccaggctggagtacagtggtgtgatctcggttcactgcaactctgtctcctgggttcaagcaattcttgtgcctcggcctcccaagtagctgggattacaggtatgcatcaccatgcctggctaatttttggatttttagtagagacgaggttttgccatgttggccaggctggtcttgaacttctagcctcaggtgatccacttgccttggnctcccaaagtgctggaattacaggcacgagccactgccctggccccca

SEQ ID NO: 24887 - DNA, 423 bp, Homo sapiens
  misc_feature (1)...(423): n = a,t,c or g
gagtatatataggtttttcttctttgactctttccatgtaagagatttccccaaaatgtccatctcagctaatctcttgctatgctctgcaccccgtaattttaactcatgtctttatgacttccagactatttgctctgctgaactccagcgtcacttgcctggtggacagcttcaggttcaaggcccacttgctcctactcctcctcactgtcgttgaccttggcttgacttgagtcctcatcagctctcccttcctatggcttcctaactggtcttgtctgtcctcttccatcagtaaactgtcttattcacagggtgatatggtttggctgtgtccccacccaaatctcatcttgagttgtagctcccacaattcccacatgttgngggaaggacctggtgggaaggaaattngggacc

SEQ ID NO: 24888 - DNA, 551 bp, Homo sapiens
ggtaatatggaagaaaacaaaaagttagaagaaaacaatcacaaaactgaagcctaagagagaaactgtcctagttgtccagagataaaaatcatatagaccaattgaagcatgaacgtggattgtatttaagacataaacaaagacattgacagcaattcatggttcaagtattaagcagttcattctaccaagctgtcacaggttttcagagaattatctcaagtaaaacaaatgaaatttaattacaaacaataagaacaagttttggcagccatgataataggtcatatgttgtgtttggttcaattttttttccgtaaatgtctgcactgaggatttctttttggtttgccttttatgtaaattttttacgtagctatttttatacactgtaagctttgttctgggagttgctgttaatctgatgtataatgtaatgtttttatttcaattgtttatatggataatctgagcaggtacatttctgattctgattgctatcagcaatgccccaaactttctcataagcacctaaaacccaaaggtgg

SEQ ID NO: 24889 - DNA, 476 bp, Homo sapiens
ggtggccatccgagaggcctatgaggcaggtctgattggcaagaatgcttgtggctctggctatgattttgacgtgtttgtggtgcgcggggctggggcctacatctgtggagaggagacagcgctcatcgagtccattgagggcaagcagggcaagccccgcctgaagccccccttccccgcagacgtgggagtgtttggctgccccacaactgtggccaacgtggagacagtggcagtgtcccccacaatctgccgccgtggaggtacctggtttgctggctttggcagagaacgcaactcaggcaccaaactattcaacatctctggccatgtcaaccacccttgcactgtggaggaggagatgtctgtgcccttgaaagaactgattgagaagcatgctgggggtgtcacgggcggctgggacaacctccttgctgtgatccctggcggctcgtctaccccactgatcccca

SEQ ID NO: 24890 - DNA, 470 bp, Homo sapiens
  misc_feature (1)...(470): n = a,t,c or g
tggannccactggtatgncatgattacganttgaatacgactcactatagggaatttggccctcgaggccaagaattcggcacgagtttttttttaaaaagtataacattttattttaaaatacagacgtatagattgtaattagctaaacccgtatagtgattttgaacagaggtactttagtggctggaagacaagaaaaacacaaacttttcaattactgtctatttttctattacacatattattgcagagttgtaagacttgggcaaaacctgtttgttaagaatctgttttgttttgaatatctggtttgagcagtaatgtacagaaataacattggaagtgtaaatattttgagaaaagacattctgcagcagatgctaaaatagagtttacctctctcaatgattggcttaaatttgtttgaacagcacaaattatgttaatagattacagagattttatgt

SEQ ID NO: 24891 - DNA, 239 bp, Homo sapiens
ggggaatcacctgaagtgttttttattttattttgtttattatgtatttatgcatgtatggtactttttgagacagggtctcattctgctgcccacgctggagtggagtggcgtggtaatagctcgctgcaactttgaactcctaggctcaagggatcctctcacctcagcctcctgagtagctgggactacaggcacgtgccactacactcagctaatttttgatttttttttttttt

SEQ ID NO: 24892 - DNA, 395 bp, Homo sapiens
gctcagagaaaggagacctcattccaagttccaggattaattctgatgaaagtattctgtctcatgcatctaatactttacttgtgaatgaagattcattatgaggtgctatacgtggatgacctgcttagttttaatttttggagaaatacattttataaaacattttcatcagattgctaaaattgtgccacttgaagaatggatgatgatgattttggtggttttgaggctgcggaaacttttgatggtggaagtggtgaaacccaaacaacatctcctgctattccttgggctgcctttcctgcagtatctggagtccatctttcaccatcttctcctgagattgtactggaccgtgaccactcttcttccattggctgcctctcttctga

SEQ ID NO: 24893 - DNA, 573 bp, Homo sapiens
  misc_feature (1)...(573): n = a,t,c or g
gatactctgatttgttaaatgtatccgtttcattatttggaactctgccaataagttagttttcagcagaattttgtatttatgtagtattttcccatctcttagcacagtgccttgcacatgactctaaatgaatgcttgttgaattgaattgcaactttaaaaatatctcagatatcacaataaccagcatagtgctttacattttacaaagtccttttgcacatactatttcacaaggtacatcacatcagctttcatatagctttatattattttacatcagttttacactgatggagaagctaaggttcagaaaagtgaccaactcaaagtcgtaaagtgtagtaggatttggcctcagatctttgactccgttgtgtgcagattctgctgtattagtgttccttctaaatattgtatgcagttttcccagtgttacgagattggtgttgctatccattgttgtgaatgaagacttgtcctatagtacatgacagggctgagagtggactgtagttcttagctgaaccctttctactggttaaaacaatcatnangcctatcctctgc

SEQ ID NO: 24894 - DNA, 392 bp, Homo sapiens
ctactacactggcgttaaatagcaattggtcttcttgcataaatattaactgctattttatatgatactcaagtcaaagtgggtaactatgttgtctgttaagattcagtttcactttaagagcaaaggataactattttctaacatgtgtaaatgccagggcttactgatttgtctacatttattttactgcttttattttcctggtattctctttgaaattccagatctatgaatcgtagatactgaaaaaccccgcaagttcacttcaactgtgcatcgtgcaccatctcaatttctttcatttatacatcgttttgccttcttttatgtaactatactcctctaagtttcaatcttggccatgtaacctctgatctatagaatttttt

SEQ ID NO: 24895 - DNA, 410 bp, Homo sapiens
  misc_feature (1)...(410): n = a,t,c or g
gtccattactggacatcacggtttctcatcatcaatgctatgttactctcagttctggaattattctccttttggagaatctggtcgagaagtgaactgaagaccgtgcctcagaggatgtggagccatttctggaaagtatcaacgcaggggctttttgtggccatgttctggcccctcatccctcagtttgtttgcaactgtttgttttactgggccctgtactttaacccaattattaacattgatcttgtggtcaaggaactccggcggctggaaacccaggtgttgtgactggcactgcccaggctgagactcttcaagtcccgctgacgtctgagctttgatgcttaagaggggtgaggcagggagcggacttcctattttctaccctcagtaaaacaangtgg

SEQ ID NO: 24896 - DNA, 327 bp, Homo sapiens
gttctctctgacgtgggagccgccgtcgctgccgccacccggaggctcttgtcaggatggtgaagctgttcatcggaaacctgccccgggaggctacagagcaggagattcgctcactcttcgagcagtatgggaaggtgctggaatgtgacatcattaagaattacggctttgtgcacatagaagacaagacggcagctgaggatgccatacgcaacctgcaccattacaagcttcatggggtgaacatcaacgtggaagccagcaagaataagagcaaaacctcaacaaagttgcatgtgggcaacatcagtcccacctgcacca

SEQ ID NO: 24897 - DNA, 514 bp, Homo sapiens
  misc_feature (1)...(514): n = a,t,c or g
accaatttaatacgactcactatagggaatttggccctcgaggccaagaattcggcacgagcaaagaacacataattaaactacaccaaagcagagacaataaaaattagatccctaaggaaatcagcattagaatttctagatacaaatgtaaaataattagatataaaatgttcaaagatattttttaaaatggaattataatagcgagcaacaaaaggctatcaaaaataaccagaaagatttgaaaaacaatgttaaacaacagctataaaagagttaatgaaagatgaatctgaagaaataacagaatttcacacagaggagcaaggggatggaacatatgagagcttgagatgttgaagacactgagaaagtcaaacatgcccattgcaatcccagtaggaaagaatggaggaattgcaataatctgaagagatggtaactgaaattgatttagaattggtggtcagcccatcatgacaggaaatttataatgnataacaaacagaat

SEQ ID NO: 24898 - DNA, 407 bp, Homo sapiens
gatcttttcttttatttttctaatgaggtcctgggcagagagtgaaaaggcctctcctgattcctactgtcctaagctgcttttcttgaaatcatgacttgtttctaattctaccctcaggggcctgtagatgttgctttccagccaggaatctaaagctttgggttttctgagggggggaggagggaactggaggttattggggttaggatggaagggaactctgcacaaaacctttgctttgctagtgctgctttgtgtgtatgtgtggcaaataatttgggggtgatttgcaatgaaattttgggacccaaagagtatccactggggatgttttttggccaaaactcttccttttggaaccacatgaaagtcttgatgctgctgccatgatccctttgagaggg

SEQ ID NO: 24899 - DNA, 444 bp, Homo sapiens
  misc_feature (1)...(444): n = a,t,c or g
gttagtttctcccttctatttcctcttgattaatagttaactttttaacattgctaggaattgtgtatttccaaaaaaagataagcagacacaggtgttgtcgagtacatgtaatgggataactgtgtggcattaggtggggaatcgccttagcaaatgtcactgtgggagatgcggtccctacaagaagagtccttcaggacgggtaaattctatggggcgtagtttttatgtataaatttaatttatcacatactaggcagtagccttaggataacatccaatttttgtctagcagatcactggtattaaatacttggaattgggctacggtaattgacatgaaactgatagcagctgagactctgagaagagattttaagtcagcacccaagtggagagtgagtggtgctccanaagtgctctactcaatactagttctgg

SEQ ID NO: 24900 - DNA, 387 bp, Homo sapiens
gcttaaaagatgcttttgccgggggagtcaagccttttgaactgcacccgcgtctggaatcccccaacagtggaagttgcagcttacctgagaggcacctggggcttgtttcatgtttctttcaagaaggctgggtgctgagttggaatgaatatagtatctatctcctagacacagtcaaccaggccacaattgctggtttggaaggatccggtgatattgtgtctgtttcgtgcacagaaaatgaaatatttttcttgaaaggagataggaacattataagaatttcaagcaggcctgaaggattaacatcaacagtgagagatggtctggagatgtctggatgctcagagcgtgtccacgtgcagcaagcggagaagctgccag

SEQ ID NO: 24901 - DNA, 366 bp, Homo sapiens
  misc_feature (1)...(366): n = a,t,c or g
gctctttgagtcaaaagcttgtcttcgtccatctgttgacaaatgacagatcttttttttttcccccnntttagggnaagtaaancagtcatnnanaattcnctgngttttgtttcantttgncattngggnancnggggggcagtcnaaccatggngaantccacctccgnggaanaaangganattcancgngggtgttgaatccagcncgtntgtgtgagnancggnacagnaaacnntccncattcttcagtttttcnnttnnacctacanatttgaangtttttctgtanaacagccttttccttcnggntnnaactgcngttaaaattaananatccttaactttgnggggaaatgcccc

SEQ ID NO: 24902 - DNA, 461 bp, Homo sapiens
  misc_feature (1)...(461): n = a,t,c or g
aaaccgntatgacatgattacgaatttaatacgactcactatagggaatttggccctcgaggccaagaattcggcacgagcggcacgagcaggccacctctgttgggacccacaggaaagagtgtggcagcaactgcctggctgacctttctatcttctctaggctcaggtactgctcctccatgcccatggctgggccgtggggagaagaagctctcatacgccttcccactccctctggtttataggacttcactccctagccaacaggagaggaggcctcctggggtttccccagggcagtaggtcaaacgacctcatcacagtcttccttcctcttcaagcgtttcatgttgaacacagctctctccgctcccttgngatttctganggtcaccactgcacctcangcancatanagagcctcctgtnctttctatgcttggnctgactgacctaaa

SEQ ID NO: 24903 - DNA, 757 bp, Homo sapiens
accgctatgacatgattacgaatttaatacgactcactatagggaatttggccctcgaggccaagaattcggcacgaggaagctgctggcatctgacctcctggacaacaaccgcatcatcgaacggctaaatagagtcccagcacctcctgatgtctgagctccatggggcacatgaggcatcctgaagcattagaatgattccaacactgctcttctgcaccatgagaccaacccagggcaagatcccatcccatcacatcagcctacctccctcctggctgctggccaggatgtcgccagcattaccttccactgcctttctccctgggaagcagcacagctgagactgggcaccaggccacctctgttgggacccacaggaaagagtgtggcagcaactgcctggctgacctttctatcttctctaggctcaggtactgctcctccatgcccatggctgggccgtggggagaagaagctctcatacgccttcccactccctctggtttataggacttcactccctagccaacaggagaggaggcctcctggggtttccccagggcagtaggtcaaacgacctcatcacagtcttccttcctcttcaagcgtttcatgttgaacacagctctctccgctcccttgtgatttctgagggtcaccactgccagcctcaggcaacatagagagcctcctgttctttctatgcttggtctgactgagcctaaagttgagaaaatgggtggccaaggcc

SEQ ID NO: 24904 - DNA, 339 bp, Homo sapiens
caagtagtctgtgtttagtagctgcagctcatggaagagttcaataagaaaatgtggacgagattcattttgagaaattaatgtagctacttcagaataaatagtatctcgcaaagcttcaaacatggaaaaatcactcccagtttctgaagatatttctgtagacctattacattttattattttttccagttgctcatgattctttctgctgaatacttttgcttgaacaggctcttcagtctgggctgaatgtctgttcctacttttgcaaggttcacatgtgctagacatactggcactttcatacccttgagtaaaaaaagtgacaactgttat

SEQ ID NO: 24905 - DNA, 320 bp, Homo sapiens
ctcactatagggaatttggccctcgaggccaagaattcggcacgaggtaaatatttattttgtggtcaccatatgtaagacactatcaaccatgaagatgaccttgaggaactcacagtggaggaaaaatatatacatagatgctgtattacaaggtggaaggcatagagctcattataaaaggaatccctggagtgctttcagcatagaagacaagcaaactaagttactggtttactcagaatacagtgtatgataaaattattttcaaggggtaggcatccatttatttaaataggcggttactttttttttttttt

SEQ ID NO: 24906 - DNA, 346 bp, Homo sapiens
gagaaaaggagaatccgaagggaaaggaataagatggctgcagccaaatgccgcaaccggaggagggagctgactgatacactccaagcggagacagaccaactagaagatgagaagtctgctttgcagaccgagattgccaacctgctgaaggagaaggaaaaactagagttcatcctggcagctcaccgacctgcctgcaagatccctgatgacctgggcttcccagaagagatgtctgtggcttcccttgatctgactgggggcctgccagaggttgccaccccggagtctgaggaggccttcaccctgcctctcctcaatgaccctgagcccaagccctcag

SEQ ID NO: 24907 - DNA, 580 bp, Homo sapiens
agaattcggcacgagggagaatccgaagggaaaggaataagatggctgcagccaaatgccgcaaccggaggagggagctgactgatacactccaagcggtaggtactctgtgggttgctcctttttaaaacttaaggggaaagttggagattgagcataagggcccttgagtaagactgtgtcttatgctttcctttatccctctgtatacaggagacagaccaactagaagatgagaagtctgctttgcagaccgagattgccaacctgctgaaggagaaggaaaaactagagttcatcctggcagctcaccgacctgcctgcaagatccctgatgacctgggcttcccagaagagatgtctgtggcttcccttgatctgactgggggcctgccagaggttgccaccccggagtctgaggaggccttcaccctgcctctcctcaatgaccctgagcccaagccctcagtggaacctgtcaagagcatcagcagcatggagctgaagaccgagccctttgatgacttcctgttcccagcatcatccaggcccagtggctctgagacagcccgctccgtgc

SEQ ID NO: 24908 - DNA, 347 bp, Homo sapiens
ggaaatgccatcacatgggtacaaaagaaagaaaacagtcatcattcctccatgacagtgtttgacgctgagggtaatgatgaatgatgtacgtagtggggacatcaaattatgagtgcctgtccacattggggcctcctgcccctcgcatttcacatcagtctccccaatgctgcccgcagtcccctgatatggtgggagacaggaagggagatggaagcatcccagagaatctgtaagaagagaggctcaaaccacctgtccaaatgaagagttgctttctccctggggcaggctgcgttctcctcccttctgcttgtctgttttcaaatcaatgactatataaa

SEQ ID NO: 24909 - DNA, 1163 bp, Homo sapiens
  misc_feature (1)...(1163): n = a,t,c or g
attctgggaaagaaagatgccatgtggatagggttcctcactagaacagttctggaaaatagcacaagttatgaagaagccaagaatttattgaccaagaccaagatattggccccagcctactttatcctgggaggcaaccagtctggggaaggttgtgtgattacacgagacagaaaggaatcattggatgtatatgaactcgatgctaagcagggtagatggtatgtggtacaaacaaattatgaccgttggaaacatcccttcttccttgatgatcgcagaacgcctgcaaagatgtgtctgaaccgcaccagccaagagaatatctcatttgaaaccatgtatgatgtcctgtcaacaaaacctgtcctcaacaagctgaccgtatacacaaccttgatagatgttaccaaaggtcaattcgaaacttacctgcgggactgccctgacccttgtataggttggtgagcacacgtctggcctacagaatgcggcctctgagacatgaagacaccatctccatgtgaccgaacactgcagctgtctgaccttccaaagactaagactcgcggcaggttctctttgagtcaatagcttgtcttcgtccatctgttgacaaatgacagatcttttttttttccccctatcagttgatttttcttatttacagataacttctttaggggaagtaaaacagtcatctagaattcactgagttttgtttcactttgacatttggggatctggtgggcagtcgaaccatggtgaactccacctccgtggaataaatggagattcagcgtgggtgttgaatccagcacgtctgtgtgagtaacgggacagtaaacactccacattcttcagtttttcacttctacctacatatttgtatgtttttctgtataacagccttttccttctggttctaactgctgttaaaattaatatatcattatctttgctgttattgacagcgatataattttattacatatgattagagggatgagacagacattcacctgtatatttcttttaatgggcacaaaatgggcccttgcctttaaatagcctttttggggttcaagaagtaatcagtatgcaaagcaatcttttatncataattgaantggtcccttttctaattactgacttnccag

SEQ ID NO: 24910 - DNA, 334 bp, Homo sapiens
  misc_feature (1)...(334): n = a,t,c or g
ggtgagcctaggatgttttgatgtgtcagaaagcgaggaaactaatatggtcttgtcaaaaggactcagaagttggccaggcgtggtggctcactcctgtaatctcagcactttgggaggccaaggtgggctgatggcttgaggcctgaagttcaagagcagcctggccaacatggtgaaaccctaactctattaagaatacaaaatttgccggccgtggtggcacatgcctgtaattccagctacttgggaggctgaggcaggagaattgcttgaacctgggatgggcgggttcaatgagccgctattgcaccnctgcacctnanncnggatg

SEQ ID NO: 24911 - DNA, 343 bp, Homo sapiens
gcgccatctaaggccagatatttggccaatctctgaatgttcctggtctctggagggatggagagagagaaaaaaaacaaacagctcctggagcagggagagcgctggcctcttcctctccggctccctccattgccctccggtttctccccaggctcccggacgtccctgctcctggcttttgccctgctctgcctgccctggcttcaagaggctggtgccgtccaaaccgttccgttatccaggctttttgaccacgctatgctccaagcccatcgcgcgcaccagctggccattgacacctaccaggagtttgtaagttcttggggaatgggtgcgggtc

SEQ ID NO: 24912 - DNA, 423 bp, Homo sapiens
gctcatcttccttgtcaagtacgaccttaacaacccggccaagcacgccaagctggacttcctcaacaacctggccacgggcctggtgttcatcatcgtggtagtcaacatcttcatcacggccttcggggtccagaagcccttgatggacatggcaccccagcagtaggacacccaggaccctggatgctgcctgccctgcaactcagctgcccgaccccaggagtcgccatacctgtgaggtgtccacctccctgcacatggcactacccagactgccagagcccaggctggcctcatctgcaccatgtccccggaccagcccttgctctgactgcggccaagcaccacgcaggaggccactcttgtctctcagcagctgttcccaggaggcagctccctcctggcacatgggggctggcc

SEQ ID NO: 24913 - DNA, 645 bp, Homo sapiens
  misc_feature (1)...(645): n = a,t,c or g
gctggaagaagcggaagaagatggcgctcaccagctttttacctgcacctactcagctatctcaggaccagcttgaggctgaagaaaaggcaagatcccagagatcacggcagacctcactggtctcctcccgaagagaacctcccccgtacggataccggaaaggctggatacctcggttattagaggattttggagatggaggtgcttttccagagatccatgtggcccagtatccactggatatgggacgaaagaaaaaaatgtcgaatgcgctggccattcaggtggattctgaaggaaaaattaaatatgatgcaattgctcgacaaggacagtcaaaagacaaggtcatttatagcaaatacactgacctggttccaaaggaggttatgaatgcagatgatccagacctgcaaaggcccgatgaagaagctattaaagagataacagaaaagacaagagtagccttagaaaaatcctgttatcacagaaagtcgccgcaaccatgccaatttcgagcaacttgacaaattggctcctgctcaattatacccgatacacacatctcagcaaggattggaatcaactccnggagctaaacaaaggttattccggtggtaaaaatgcnnaaagaccaaaggg

SEQ ID NO: 24914 - DNA, 301 bp, Homo sapiens
  misc_feature (1)...(301): n = a,t,c or g
ggaagaaatcatcgttacagacatggacaccattgagaagtcaaatctgaatcgacagtttcttttccggccctgggatgtcacgaagttaaagtctgacacggctgctgcagctgtgcgccaaatgaatccacatatccgggtgacaagccaccagaaccgtgtgggtcctgacacggagcgcatctatgatgacgattttttccaaaacctagatggcgtggccaatgccctggacaacgtggatgcccgcatgtacatggaccgccgctgtgtctactaccggagccctgntggagtc

SEQ ID NO: 24915 - DNA, 537 bp, Homo sapiens
  misc_feature (1)...(537): n = a,t,c or g
gnttttganacccttntnnnnnntttgganaacngntatgacatgattacgaatttaatacgactcactatagggaatttggccctcgaggccaagaattcggcacgagggtggcctatgtctcctttggacctcatgccggaaaattggtcgcgattgtagatgttattgatcagaacagggctttggtcgatggaccttgcactcaagtgaggagacaggccatgcctttcaagtgcatgcagctcactgatttcatcctcaagtttccgcacagtgcccaccagaagtatgtccgacaagcctggcagaaggcagacatcaatacaaaatgggcagccacacgatgggccaagaagattgaagccagagaaaggaaagccaagatgacagattttgatcgttttaaagttatgaaggcaaagaaaatgaggaacagaataatcaagaatgaagttaagaagcttcaaaaggcagctctcctgaaagcttctcccaaaaaagcacctggtactaagggtgctgctgctgctgctg

SEQ ID NO: 24916 - DNA, 387 bp, Homo sapiens
ggctagctgagcttcaataccctgctcagcagctgcaatccccaccgtactccggcaagaaacttaatttcccaggtctcttcctagcacaagtttcacagccagcagcaaaacaaaaacaaataaggaggggaaaataattaattttcaagttttactttgaaacctcagaggcccatagaattagacaatctcgttgcaaaagtacacagacaagcctaaaaccatttagagaactcacccccaacaagtctccaggcttccctaactctctattagtcaatttacaaaaacaataccaactccaagaatttccagtctcaatggcttgcggcaagacagctcccaaatttaagaacttctgggaaaaccaattaccctctggca

SEQ ID NO: 24917 - DNA, 320 bp, Homo sapiens
ggaacagatcagtgccaatataactaagtttaacattcagggccttgtcatcattgggggctttgaggcttacacagggggcctggaactgatggagggcaggaagcagtttgatgagctctgcatcccatttgtggtcattcctgctacagtctccaacaatgtccctggctcagacttcagcgttggggctgacacagcactcaatactatctgcacaacctgtgaccgcatcaagcagtcagcagctggcaccaagcgtcgggtgtttatcattgagactatgggtggctctgtggctacctggctaccatggctgg

SEQ ID NO: 24918 - DNA, 766 bp, Homo sapiens
tatgacatgattacgaatttaataccgactcactatagggaatttggccctcgaggccaagaattcggcacgaggtggaggttggccgggtggcctatgtctcctttggacctcatgccggaaaattggtcgcgattgtagatgttattgatcagaacagggctttggtcgatggaccttgcactcaagtgaggagacaggccatgcctttcaagtgcatgcagctcactgatttcatcctcaagtttccgcacagtgcccaccagaagtatgtccgacaagcctggcagaaggcagacatcaatacaaaatgggcagccacacgatgggccaagaagattgaagccagagaaaggaaagccaagatgacagattttgatcgttttaaagttatgaaggcaaagaaaatgaggaacagaataatcaagaatgaagttaagaagcttcaaaaggcagctctcctgaaagcttctcccaaaaaagcacctggtactaagggtactgctgctgctgctgctgctgctgctgctgctgctgctgctgctgctaaagttccagcaaaaaagatcaccgccgcgagtaaaaaggctccagcccagaaggttcctgcccagaaagccacaggccagaaagcagcgcctgctccaaaagctcagaagggtcaaaaagctccagcccagaaagcacctgctccaaaggcatctggcaagaaagcataagtggcaatcataaaaagtaataaaggttctttttgacctgttgaaaa

SEQ ID NO: 24919 - DNA, 297 bp, Homo sapiens
attgaattcccttccaggatcataatttattatgtcactttgaatttagctggacttttggccagacctactgacttgcatctgtgatgaataactttgaatatatgttatctcacacatgtgcaagtatagctattggatgaatttggccatttattcctggggccagggttgtgtgtttttaattttggtaattattgttgaataaatggatctttcaagactgttaagatattgcattgctaataactggtgcagaaattaatggtgatttctgttcaagatgccagattgtta

SEQ ID NO: 24920 - DNA, 450 bp, Homo sapiens
  misc_feature (1)...(450): n = a,t,c or g
nttgganncttcagctatgacatgattacgaatttaatacgactcactatagggaatttggccctcgaggccaagaattcggcacgagtggaagagaagctagctgactggaagaagatggcctgtctgctctgccggcgccagttcccgaacaaagatgccctagtcaggcaccagcaactctcagaccttcacaagcaaaacatggacatctatcgacgatccaggctgagcgagcaggagctggaagccttggagctaagggagagagagatgaaataccgagaccgagctgcagaaagacgggagaagtacggcattccagaacctccagagcccaagcgcaagaagcagtttgatgccggcactgtgtatgtgatgtgcacattttccagttcgtaagctggggccctggctgttttaagtaactgtgtgtttgccactggcagg

SEQ ID NO: 24921 - DNA, 438 bp, Homo sapiens
tctgataccgtttgactgatacgaatttaatacgactcactatagggaatttggccctcgaggccaagaattcggcacgaggagctggtggagagacttgagagtgaggaagagaagctagctgactggaagaagatggcctgtctgctctgccggcgccagttcccgaacaaagatgccctagtcaggcaccagcaactctcagaccttcacaagcaaaacatggacatctatcgacgatccaggctgagcgagcaggagctggaagccttggagctaagggagagagagatgaaataccgagaccgagctgcagaaagacgggagaagtacggcattccagaacctccagagcccaagcgcaagaagcagtttgatgccggcactgtgtatgtgatgtgcacattttccagttcgtaagctggggccctggctgtt

SEQ ID NO: 24922 - DNA, 444 bp, Homo sapiens
gacaggaaagaccgtccccagtgattcaatcatctcccaccgagtctctcccacaacacgggaatgatgggagctacaagatgagattcaggtggggacacagagccaaaccatatcactgtcccctcttcaaaccatttatagaccttgtttgttcaaagttaggaatgaagatgccttttgcagcacagtagagaaagggtgctggagacacattccctccgtatttcccttttctttcacttgctcacccctacccattcctattccttgggcaacaggaatggccccctttaaaagcacctcttctgtcatttctcccatttttgtgcctatcctaaagcagtagagggagatctcaagggaaaagccctcccatagactgcagttgcctatcaacttgagaaaaaaacaaggccctttcttggcttgcttatttaatta

SEQ ID NO: 24923 - DNA, 464 bp, Homo sapiens
gctcaaagatcacttcttacaatctcagtagacatccttcttggaagacggctcacactctgagatgccaatcagggttcatttcatgattctttaaaggaagctgttttgggaaagcccaaaaaagggtttggaaaatgtcatttacttttattcagctataattaaaatagccaaattaaagaaattagactcatacaaatcccaaacaatgcaagttcactatcagaccccaccctttagaagcgtattgcccaagaataggaaaggctgtcacccatttggagatctttgctcaacaaaaatgaggcaacatttgaggaagaaacaagtaaaactgagaaagaagaggagaggtcagtgcttttcaaggttcactgtagttctgtggaatttagcttattctttcaaatgtagactcttctcagtcacatgtgatgtgcacagcctggctttcttgctat

SEQ ID NO: 24924 - DNA, 434 bp, Homo sapiens
gctgggagactccgctggggccgcctgttatggtgctagctgccgtcccggtgcgtactttcccaaggtgaatttgaccttctttgcgacagctaggccctgactaaggtcgacccaccaaacactggatcgtccccaggcgaaagagagcttgttcccctcagcctgtcgcggaggagcggagccaatcgagggtctggtgtccccgtcgcctctccaggggcaacctgcggactaggccaaggtctgtaacaggataacgtaccagcgcctggcccaggcgttcctgccgccacctccccgcatatccggaccgccgggactgcacgcagctggcaagcgtccccctgttaactctgcaagggtggggcggcaccatttctcagaccaggtaaggcaagaaaacatgcaagagagaagagagggaagcctac

SEQ ID NO: 24925 - DNA, 589 bp, Homo sapiens
  misc_feature (1)...(589): n = a,t,c or g
gnntcgnnnnttnntnttttganntcntgaaaacccttttgacatgatnacgaatttaatacgactcactatagggaatttggccctcgaggccaagaattcggcacgagcagagggtgagaacgtggagcctggcggacagttgaaagcactgggatctttctgcccctaacggggaaagttgcacatttatatcctagagggaagcgacagcagtgcttctccctgtgctgaggtacaggagccatgtggctagaaatcctcctcacttcagtgctgggctttgccatctactggttcatctcccgggacaaagaggaaactttgccacttgaagatgggtggtggaggccaggcacgaggtccgcagccagggaggacgacagcatccggcctttcaaggtggaaacgtcagatgaggagatccacgacttacaccagaggatcgataanttccgtttcaccccacctttggaggacagctgcttccactatggcttcaactccaactacctgaagaaagtcatctcctactggcngaatgaatttgactggaaaaacaggtggagattntcaacagatccttcac

SEQ ID NO: 24926 - DNA, 581 bp, Homo sapiens
  misc_feature (1)...(581): n = a,t,c or g
agnnnagnnnntnntnnttgaanntctaaaacccttttgaatgatcacgaatttaatacnactcactatagggnatttggccctcgaggccaagaattcggcacgagggcccttatagcattgccaggtgcagagctccacagctctctttcccaaggagtaatcagagggtgagaacgctgagcctggtggacaggtgaaagcactgggatctttctggccataaaggggaaagttgcacatttatatcctatagggaannnnnnnnnagtgcttctccctgtgctgaggnacaggagcaatgtggctaaaaatcttcctnacttcanngctggcctttgccatctactggttnatctnccgggacnaagaggaatntttgcgacttgaattatgggtggcgcgggccagncacgangnccnaacccnnggntgacgacaacnttngccctttaanngnggaancgnctnaccncnacatccnnnacttacatnnnaggatnnatnnnttccgtnnaccccacctttggnggacagangcttcactatngcttnactncnantcctgnnnangtntcttc

SEQ ID NO: 24927 - DNA, 444 bp, Homo sapiens
  misc_feature (1)...(444): n = a,t,c or g
ggaagtccttgctcctgactgtcagtcagtacaaagccgtgaagtcagaggcgaacgccactcagcttttgcggcacttggaggtaatttctggacagaaactcacacgactatttacatcaaatcagatattaacaagtgaatgcttgagttgccttgtagagctacttgaagaccccaacataagtgcttcactgatcttaagtattatcggtttgctgtctcaactagcagtagacattgaaaccagagattgtcttcagaatacatataatctgaatagtgtgctggcgggagtggtttgtcggagcagccacactgattcggtgtttttgcagtgcattcaacttctacagaagttaacatataatgncaaaattttctattctgggccaatatagatgaattaattaccgttcctgatagatcacattcaatcttttg

SEQ ID NO: 24928 - DNA, 615 bp, Homo sapiens
gctggaagatttttctattagtagcagaaaccaatcaagcagtagttacttaaagaaggtagaagattgcttcttcatcataaaattccagagtggtttgatgactctgctccttgaagtccccacagactcagttactccagctcaatactttgccatcactggtggtaggtctcagacacatatggtccaaggtggttctgtgtctcaggcaaaaaaatggagaaaaagatggcttttataaggaatagaatgtttttctgatgaaatgtattgatttggaaacagcttaatcctagattcaggattaaattcaatcaagccttctatgtctgtaaatttcaaaaagtatgataaagtaaatgtggttcataaattttaaaaagataatcacagcatcttgaccatttacaaagcaaagcattctgaattagggcatttgacctcataacatccccccagactagatagattaagaggtgagaacctgagaaaaaaagcagatcagagtagaggcagacaatttgcttaattactgcagcaaaaccggaagttgcagagtggcagagtctgctgtcctttggcaaacaagggacagcccacacacactacaga

SEQ ID NO: 24929 - DNA, 374 bp, Homo sapiens
  misc_feature (1)...(374): n = a,t,c or g
ggcagcggatgcgggaagccggactctgggcgtcatgtactacaagtttagtggcttcacgcagaagttggcaggagcatgggcttcggaggcctatagcccgcagggattaaagcctgtggtttccacagaagcaccacctatcatatttgccacaccaactaaactgacctccgattccacagtgtatgattatgctgggaaaaacaaagttccagagctacaaaagtttttccagaaagctgatggtgtgcccgtctacctgaaacgaggcctgcctgaccaaatgctttaccggaccaccatggcgctgactgtgggaggctgatcggcctntacatggnttcgcagccaaaaacaaatgagttaggctg

SEQ ID NO: 24930 - DNA, 321 bp, Homo sapiens
gttttagcagagatggggtttcaccatgattgccaggctggtctcagactcttgacctcaggtgatccacccgcctcggcctcccagagtgctgggattacagacgtgagccactgcacccagcaagaaaagatacttttaaaatgactttggaatgaatggtaagcctttctatgtacaatgcaaacctgaacacccagaaaaaaaaattaatatatgttaatagttcaaaaatgtacagcacatttgaagttaaaaagcaagtgacaaaaagagaaaaaaatttgcaatgtatctgacaagaatccaacctttgtaata

SEQ ID NO: 24931 - DNA, 343 bp, Homo sapiens
ggcgttccgagcggcggcggaggaaagggaacatcacagaaaggtgaagaaatttgccctaaatcataaaactttgtaagtggcagaacaaggatttgaagctggcagtctggttccaggtatcgttcttaaaacactaaatttatactgtcctatttagcctgaaagtttcatggtgcagacttatactgtggactccatagcccttttcctcatgctgggttagaagtaactttttcaggctcactatttttattaggaaaaaatagtcactgagcagaacttccgaggagacccctccagctaactgaagagaaagggacaaccagcctaccatgtttag

SEQ ID NO: 24932 - DNA, 358 bp, Homo sapiens
gaaaaaatctcagtcaacctaacagggaacttcagagcacatattgcctgttagaggaggcctgcatgggcagaaatggccagattttagtacacccaccatgtttagtcactggctagagctgcccaaggagagcatggtcatgactgggaagctgagatgaattctgaacatgctgcagctggaggctgttagctaaccaaactccttggacctgaatggcaattcttttttgaaggaagatccaagtgattgctacagtccattcctcatgatgcacagatccatatcttcacagtttctgagagcagctcctccaagggaggaaatgtagaaagagattagtgagacaggcctc

SEQ ID NO: 24933 - DNA, 497 bp, Homo sapiens
gtgtaactaatgtttttattttccttaaaaaaaatatttcgcttaggcacaatttgctggtggctttagaagaataagccaggtttccacagcatcccccttgagtgatatgtttccatttctccgctttttatagttaaggcatttttttcttctctgacaaagtgtatgttttgttgcttgctttcaggttttgtttactttcacatgtgcccggcggggttgtgggcttcgctcaggcctgggtggggagctgaaagcaccatctgggggtctccaaccacacctgacaccttttcctcttctcgccgtttcaaacaggctgctttgggattcaggttccgctctcgcacctgctgctccagccccaggatgacctgcacggcctgctgcaggatgagcagcttggtctgcgctttgccgacttgaggggcatctggcacatgcgccccactccggaaggcctcgtaatatccggacgcgcaccgttccggggc

SEQ ID NO: 24934 - DNA, 450 bp, Homo sapiens
  misc_feature (1)...(450): n = a,t,c or g
tttganaccntttgacatgacattnatttncnacgactcactatagggaatttggccctcgaggccaagaattcggcacgagtcgcgttcagcaaccgtgcagaggacttccgcaagctgggctgtgaagtgctgggcgtctcggtggactctcagttcacccacctggcttggatcaacaccccccggaaagagggaggcttgggccccctgaacatccccctgcttgctgacgtgaccagacgcttgtctgaggattacggcgtgctgaaaacagatgagggcattgcctacaggggcctctttatcatcgatggcaagggtgtccttcgccagatcactgttaatgatttgcctgtgggacgctccgtggatgaggctctgcggctggtccaggccttccagtacacagacgagcatggggaagtttgtcccgctggctggaacctg

SEQ ID NO: 24935 - DNA, 1000 bp, Homo sapiens
gcgttggcagcggatgcgggaagccggactctgggcgtcatgtactacaagtttagtggcttcacgcagaagttggcaggagcatgggcttcggaggcctatagcccgcagggattaaagcctgtggtttccacagaagcaccacctatcatatttgccacaccaactaaactgacctccgattccacagtgtatgattatgctgggaaaaacaaagttccagagctacaaaagtttttccagaaagctgatggtgtgcccgtctacctgaaacgaggcctgcctgaccaaatgctttaccggaccaccatggcgctgactgtgggagggaccatctactgcctgatcgccctctacatggcttcgcagcccaaaaacaaatgagttaggctgcagaggactggtttgttttttggcataaaccctttgaagttcctttttcattgttaaattaaaatttttttttttacttggatggcttaacatttttgcaagaaaaataggaagatatgaagatgatgttttggtttgtttatgaaatgcatatggcttgtcagagctcattcgacagttaaagccattgtttaaagaaacggtgccttgctctgtgtttgtgctcctgatttccctggaggttctggatgaaggctgaacacaggcttgttaatgtcagtctgtgctgaggacctcagggacttgaggttgcatttttgagcatggggtgcaggagcctttctggatttggatgtggctatggaaagaacacagaagccaaggtcatgtgcatgaaatgaggagtttgagttagtcacctcggggattttttccattttgcagtaaaatgttaaattaatgtagcctgcctctatttgttgggcaggtaatttcaaagggttatttgcctcatctcctatctttagtgaaatcttatgtgtaattgtgtgtatttattccaccgtgggaacagagaatacctgtttagtgttgcactttaactggg

SEQ ID NO: 24936 - DNA, 463 bp, Homo sapiens
cgaggccaagaattcggcacgaggttgggcatgtgaacttttactcctgtttccctgcatgttggcattttcgtgccgggtcctagtgaaatctgcagctgactacagttttccccctgcatggacacctttcttactgtgtctttgcctgtagtttggttctttgtgggagatggttgctcccttcagtggcaggagatgatctgggacttggtacctcccaagctcacttggcaccctgtacagcacaggtgccaaacaactgtgagtggcaagtggagttttgtttctgcctctgtccctatgatataacaggtccttgtcagtggctttgacccctgtctgtggctctgtgtggctggttctgagctcgtgcctgtcgccagcccaggtcttacctgcctctcagtgtgggctcatggctctggactctgcagacagtgtcccagggttttcctcttta

SEQ ID NO: 24937 - DNA, 567 bp, Homo sapiens
cggggtttttcagtatctacgattcatagatctggaattcgcggccgcgtcgactttaaaagctgtgaaagtctgaaacctataagccaaggtgttccctgcctaaacttattgctgttcccacaaaggactaagcctgttcataagttaccaaagttgccattttggagatggaaattgacgaggagggaaggtcttttattggagagtatacagtacaagcagatcattctgccttagaggtgctaattcccgaaattagaagaccctttcttttccagtaacgaagttataaatatcagcttgttcatccaagccactggctgaggtgttaggaagaggaagagggtggtagaggaggtaagacagtagggaaagacaagggcccatgctcttagtggggaaaactcttggagccgtttactttgagctttgaacactgaaaccattgttggcagggttcagtcactgacagcacaagtttcactgaattgatccaagagtttagtgatttcaaaagccttggtctcaggagaagattaaactttcatattgggcagtggttca

SEQ ID NO: 24938 - DNA, 397 bp, Homo sapiens
aattcggcacgaggccttggagagtactcgggttcgtgaacttcccggaggcgcaatgagctgcattaacctgcccactgtgctgcccggctcccccagcaagacccgggggcagatccaggtgattctcgggccgatgttctcaggaaaaagcacagagttgatgagacgcgtccgtcgcttccaaattgctcaatacaagtgcctggtgatcaagtatgccaaagacactcgctacagcagcagcttctgcacacatgaccggaacaccatggaggcgctgcccgcctgcctgctccgagacgtggcccaggaggccctgggcgtggctgtcataggcatcgacgaggggcagtttttccctgacatcgtggagttctgcgaggccatggccaac

SEQ ID NO: 24939 - DNA, 408 bp, Homo sapiens
gactgtattgaacgccgttgaagggctttaagcagaggagtagcacattgagattttctttgtagaaagatcacgatagctgcaaggaggagggattggattgaagatcaaagaccagttcagaaatccttgaatgataagagcctgagccaggacagtgacagaaaaataaaaggaagagatgtatttaagttatattaaagattctgtcctggtttctaggaacttcttgataatgcaggcttattaaggactgtggaagctttcaggggggaatgcaatcccacataaaggccctgttcctgtccttctgggcagctccaccttcacctttgacttagtgggagataatgtgtgttccaccctccctgtggtgactcctacttcacttttctgggcttgcctctt

SEQ ID NO: 24940 - DNA, 428 bp, Homo sapiens
gataggtttctgaaagagataactatataacagctttttaactatccagtcaactttcagcttttctacatttaggtaaaatggttaggatataactcatggtgtggctaatctacatttatcaataaaatgtaaattatctgaaaggacagaatataagatttaaccatgtttgacgtattttaatttagttaatgaagcaaaattcagtttatatttcactagaactgtgtacttgattgattttcagagaaatatcacaaattagaaatattaaatctaaggatgaaaggtatatataaaacaatttgggggccaggcacgatggctcaaacctgtaatcccagcactttgggagaccaaggcgggtggatcacttgaggtcaggagttcaagaccacctgggcaacatggcgaaccctgtttta

SEQ ID NO: 24941 - DNA, 385 bp, Homo sapiens
gtgcttatcaaaagacaccattaagaaatcaactggcaagctgtagaataagaggacatattcgcaaaccatatatctgacaaaggacatatccagaatgtatagagaacccataaaactcagtaataaaaagaagaacctaactaaaagacagaaaaaagacttgaagaaacgccggacaaaagatggcccaatacatacatgaaaaagtatacatcatggatcatcagaaaaatgcagtttgagactataataagatactactacgcatacccattagaacagctaaaagtagaagattgacaacacaatgaaaagattggcaagtgctggtgaggatgtgaagcaacccaaactctcatacattattggtgggggtgtaagg

SEQ ID NO: 24942 - DNA, 415 bp, Homo sapiens
gggtggggagcgagtggaggcaggaagggcctccgggaagctgggcatgggtggaatgacgggtccctcgatgtgtctgtctgaagaaggcctggtgggtcttgccaacagcgttggggcttcattcctgagagaccgggggactcggaagaggcccgcaggaaagcagaagctgtgggccaacaaatggaccctgggactccctggcgtggatgatggagatggggtgtggagttgcatttagggcaaagggcatctcagcattgttgcctcttatccctaccactgggacagcctctctctggcctcctggattgcagcccctcccttcttgaggcagccagggcgtgaaactagactgtcaccttcaggctgggaccttcacagcagacccctcgttactacctttatggcc

SEQ ID NO: 24943 - DNA, 442 bp, Homo sapiens
  misc_feature (1)...(442): n = a,t,c or g
ggccaggtactctcgcctccgccagtggaacaccctctatctgtgtgggacagatgagtatggtacagcaacagagaccaaggctctggaggagggactaaccccccaggagatctgcgacaagtaccacatcatccatgctgacatctaccgctggtttaacatttcgtttgatatttttggtcgcaccaccactccacagcagaccaaaatcacccaggacattttccagcagttgctgaaacgaggttttgtgctgcaagatactgtggagcaactgcgatgtgagcactgtgctcgcttcctggctgaccgcttcgtggagggcgtgtgtcccttctgtggctatgaggaggctcggggtgaccagtgtgacaagtgtggcaagctcatcaatgctgtcgagcttaagaagcctcaatgtaaagnctgccgatcatgc

SEQ ID NO: 24944 - DNA, 424 bp, Homo sapiens
  misc_feature (1)...(424): n = a,t,c or g
gaaataaagcttcaatagcaaacttcggagatgagaagtttcaagaaaattaaatcgttcaactttgtagtatgcattttgaaacagaaagggaagctttatgataatttttggaatgatgtatatcacaaagtagacaagaagtacctcattttgctactagattgctctgttagtgttatgaaaattttatgcagagaatggtatcataactccacaatcagggctgggtgtggtggctcatgcctgtgataccagaaatttgggaggccgaggtaggaggatctcttgagcccaggagtgcaagaccagcctgagcaacatagaccctgtctctaccaaaaattaaagagattagctgggcatggtatatgcctgtggcccagctgctcaagaagttgaggtgggaggatncncttgagtc

SEQ ID NO: 24945 - DNA, 451 bp, Homo sapiens
ccctatgacatgattacgaatttaatacgacaataccgactcactatagggaatttggccctcgaggccaagaattcggcacgagaccctgctccacgttacccaaggctttctcacacatttcgaactgcaactgaccttccccctcatggcctacaaggtcctacttcatcgcctagccacctgcaaaccatctcctacatctcctacccctttctctcactcactgtgctccagccacaccagctcttccttgagctggccaagagcacacctcgcccaggaccctcgcatttgctgttccaggaatgtccttccccaaacggctccctccctccattaagatcgctgctcatatatcacctcctcaatgaggcctggcctgaccacccttatctaaaatagcatcccagtcactctgtccccttagcctgcttccttccctaaaggg

SEQ ID NO: 24946 - DNA, 424 bp, Homo sapiens
tatgacatgattacgaatttaatacgactcactatagggaatttggccctcgaggccaagaattcggcacgagcagaagtcaccaaagccaagatcattggatttggttctgcacttcttgaagaagttgatcctaatcctgcgaatttcgtgggagctggaatcatccacacgaaaaccacccagattggatgcctgctgcgcttggagccgaacctgcaagcccagatgtaccggctcacgctgcgcacaagtaaggaagccgtttctcagagattatgtgaattgctctcagcgcagttttagtcctgaggatggaagaccaggctcgtgtgtcttgtgttgtcttcgtctgtgccgtttgtcttcgtggccatcctgcagatgagcaccgtgtccagtgccacagcacaaggcgcctcct

SEQ ID NO: 24947 - DNA, 558 bp, Homo sapiens
  misc_feature (1)...(558): n = a,t,c or g
ggtggttgggaaaaagcaatgtggccctatggtggttttaggtgttgatttaaagatttgttaagctaaccttgtgcattatttgggtgtcagtttaaaggctgggtccttagggtggacttccctgacatatttcccaggctaagctaggcctctggtttcatgttatagtaccctgctgctttcccagtagtctgcatacttgtatctatttgtaattgtaaatgtaatgttggccttttccattagatgacaagttccatgaaaatgggaccattantttcatccactgtattcttagctcctggcacatggcangcactcagggaaagtatgtagccttatgaactgactgatctganggaggcacttctgtaagccatagtattggtcactggcatgaagccacctactggatccctgccatccagccctgggagtancatgaagcacatggactggcttccggaagctggagaagagtctnnccaancttgccctaacattaacttccaatgggcactaanttggctgcaaacntgcctgtcatcttcctgg

SEQ ID NO: 24948 - DNA, 427 bp, Homo sapiens
gaaacaacctttgggcctccaatcatccatgagcaggagggacggtgctcagcccccagagagggcaggctctgccactctcatttcagctgtagccagagaggatgatggaaaaggaggaatctcccagagagaagagccagggccaatgtggagagtggataaggagagtgtctcccggcaagcagcaccggggtgtaatgaacgggtacccctgagtcctgtccctgctccaccactgtgtggcacagggttaggggagcaacttgcttgtctttttggtcatggcttactggactgagaagagccacattggatgagaagtgactactgcacatcaccagagaccctgggctttgagccagatatcgggactagataggactttgggtcccttgggaagagggtgtgttccctgagtgaaaaa

SEQ ID NO: 24949 - DNA, 318 bp, Homo sapiens
gatgagaaccagcacagataacaggtaacagatcagcagtggttaccagaggcttggggtggggaggctggacagggaaaggggaaacgttggtcaacaggcacagtttcagtgagacaggaggaataagttctggtgatctattgcacagcataatgactatagctaataatgtatatttcaaaatagctaaaagaaaggattttaaatgttctcaccgcaaagaaatgataaatactagtggtagatatgctaattagcctgatttgatctttccacaatgcatatacatcttaaaatagcgtgttgttctccatc

SEQ ID NO: 24950 - DNA, 407 bp, Homo sapiens
ggagctttgggagtttatgtctaaaaactggctgaatttcagcaggcagtttgtagtgataagttcctagggcattcgttatgtatggcttttataaacagcgtttgtgtcatcctccctacggagacctctgggtggccccatggaacaataggctcatttatgagtcagcatgtgaccagctctgaagcaagggtggatagacatagtcagtgatgaattgtttaattcttctggacttcatctttaagaagactgaaaaatttggaagtgagctccaagcttcacctactcatattggaaaatgagtgatgggatcagaatattcagtaaaggaagactttggaattcagaataggtcaaacaatttaaaagacataacaaagatgatatgtatggaagacaaa

SEQ ID NO: 24951 - DNA, 593 bp, Homo sapiens
tctggaattcgcggccgcgtcgacggatattcccaataagactttagaagtatatgtaaatgtctgtttttcataattgctctttatattgtgtgttatctgacaagatagttatttaagaaacatgggaattgcagaaatgactgcagtgcagcagtaattatggtgcactttttcgctatttaagttggatatttctctacattcctgaaacaatttttaggttttttttgtactagaaaatgcaggcagtgttttcacaaaagtaaatgtacagtgatttgaaatacaataaatgaaggcaatgcatggccttccaataaaaaatatttgaagacgggggggtgcccggcggcagaggctgagaggtgcaggggtgaggtggacagtcccctgagccatccctgtggggcacacgggccacctgtccagcacttgcgctccacgctgaccatctcacaggcgctccaggagagggttgaggccccccaaacctggcctgcagccatcctgggtctggcctccgaggagctggcggcgggcgcaccgtgtgccctgcctgcagggatggcgcttaccctcagcagcctgtc

SEQ ID NO: 24952 - DNA, 440 bp, Homo sapiens
  misc_feature (1)...(440): n = a,t,c or g
tatgacatgattacgaatttaataccgactcactatagggaatttggccctcgaggccaagaattcggcacgagctgcaggacgaaaccatgaagagcctgatccttcttgccatcctggccgccttagcggtagtaactttgtgttatgaatcacatgaaagcatggaatcttatgaacttaatcccttcattaacaggagaaatgcaaataccttcatatcccctcagcagagatggagagctaaagtccaagagaggatccgagaacgctctaagcctgtccacgagctcaatagggaagcctgtgatgactacagactttgcgaacgctacgccatggtttatggatacaatgctgcctataatcgctacttcaggaagcgccgagggaccaaatgagactgagggaanaaaaaaaatctctttttttctggaggg

SEQ ID NO: 24953 - DNA, 536 bp, Homo sapiens
acatgattacgaatttaatacgactcactatagggaatttggccctcgaggccaagaattcggcacgaggctacacaagaccctgagactgacctgcaggacgaaaccatgaagagcctgatccttcttgccatcctggccgccttagcggtagtaactttgtgttatgaatcacatgaaagcatggaatcttatgaacttaatcccttcattaacaggagaaatgcaaataccttcatatcccctcagcagagatggagagctaaagtccaagagaggatccgagaacgctctaagcctgtccacgagctcaatagggaagcctgtgatgactacagactttgcgaacgctacgccatggtttatggatacaatgctgcctataatcgctacttcaggaagcgccgagggaccaaatgagactgagggaagaaaaaaaatctctttttttctggaggctggcacctgattttgtatccccctgtagcagcattactgaaatacataggcttatatacaatgcttcttttctggta

SEQ ID NO: 24954 - DNA, 372 bp, Homo sapiens
  misc_feature (1)...(372): n = a,t,c or g
gtgnnnnnnnnntttgnaaaccttttgaacagctatgactgattacgaatttaatacgactcactatagggaatttggccctcgaggccaagaattcggcacgagcgaaaccaaggtggctatggcggttccagcagcagcagtagctatggcagtggcagaagattttaattaggaaacaaagcttagcaggagaggagagccagagaagtgacagggaagctacaggttacaacagatttgtgaactcagccaagcacagtggtggcagggcctagctgctacaaagaagacatgttttagacaaatactcatgtgtatgggcaaaaaactcgaggactgtatttgtgactaattgtataacaggttatt

SEQ ID NO: 24955 - DNA, 380 bp, Homo sapiens
gaaatccttatgacaacttctcatattagtgttccaacgggaaatttatgattctaatttaaaatgtaaagttgaatcaattaaacgaaacttgtgattttagattgaaatctcactagctgtataaatattattaggatatttaagataacttgaggttcaacatattataagttttttagccaggtgtagtggcgtgtgcctatagtcctagctgcttgggaagctgagatgggaggactaattgagcccaggaggtcaaggctacagtcaacagtgattgcaccactgcactccagcccaggcaacagagcaagaccctgtctcaaaaataaaaaataaaatactacaagcttaatttgtaaaagtagttgaaaatg

SEQ ID NO: 24956 - DNA, 478 bp, Homo sapiens
gctagacttggtatgaaagttcgtgttcactccgtgccagcactgtcctccctgccaatgcttcaccccgtccaagcttgctgggcacgcacacacctgggaggcgctcgcgtggggctgtgagcaaggctcccattcctaattggcaagggcctgtatccagggtactaagagcttacgagaaaaaatatttgtgagactgtattaatttctgctttacaaaaatgggaatgcttctgtggcaagggctatggaaaggatttggttttaactggcatcctctgtcagtagttgggtgaagatgatgtctctttcttagctgtgccctgtgtctgaggcagctctaccctggtcaaccccttacttggctttaggagagaaatttaggttcctgctccctcaagggactcccttacccacccctatttttttggcagaaggagctgctgggagttgttttaccacagtgctagtggaa

SEQ ID NO: 24957 - DNA, 345 bp, Homo sapiens
  misc_feature (1)...(345): n = a,t,c or g
gggctacctagtagagagtcctggggacatggctctgggagcaagcttttccagtgagcatcgatgagtcagtaatgacatgctatgttggtaaaagccacccaacatcttaagtacatttttcctgtgccatataaatgcatgtattgagccatactgtgtacaaagcactttggggattaaaagttaagaacactaggccagatctctcatgagtttacaatctcttaggagaaattaagaacataaagcaagccacaagtgaaatgccaaaaaaaaaaagggcaaaanncaatttttcggtncaaaacaattcaaaanaaanatttctnccaactgaggcaa

SEQ ID NO: 24958 - DNA, 876 bp, Homo sapiens
  misc_feature (1)...(876): n = a,t,c or g
ccgaatttaatacgactcactatagggaatttggccctcgaggccaagaattcggcacgagggcgactcccgctcgtgccccggagtcaccgccgtccgcggatccggcgctagtagcggggcctgccgaggaagccgagtgcccgccgccgcgccagcctcagcccgcgcagaatgtgctcgctgccccgcggcttcgagccccaagctcccgaggacttggcgcagcggagtttgttggagctgcggtaattgttgaagcgccaggagagacttttgcgcaacgaaaaattcatttgcaaattgcccgacaaaggtaaaaagatctttgactcttttgccaaactgaaagctgccattgcagaatgtgaagaagttagaagaaaaagtgaactgtttaaccctgttagtttagactgtaagctaaggcaaaaagcaattgcagaagttgatgtgggtacagataaggcccagaattctgacccgatacttgatacttcatcactagttcctggatgttcctctgtagataacatcaagtcatctcaaacctcacaaaaccagggacttgaccgtcctactcttgaaggtgatgaagagacttcggaggttgagtacacagtgaataagggcccagcttccagcaatagagacagggtaccaccttcatctgaagctagtgagcatcacccgcggcatcgtgtttcaagtcaagcggaagatacttccagcagctttgacaacctgtttattgcaggttacagaggatcaccattgcggaccaaggtgaacaacagtcagaagaaanccangtactaagaacttgcaggctttccagtgggactganaanaacctnttacntganngctnnaaac

SEQ ID NO: 24959 - DNA, 455 bp, Homo sapiens
gaaagataaattttgatcttcgtggaggagttcactgtccttgaatctcacctgttataaacaacataaatgggtggacattttctgcatgcctggatctttctgcctgtgtttgtggtggtagcaggtgaagggattgtgctgattcctttaaaggcatattcccaagatgcaggtgtgacttgtccagagaatatcacctgagaagaaatcctagaggaggatgatgaagagaaaaatggctctttctcaggtgactgtgtctcagatcaggcgctgtgttcactttgcctcctggaatgccgtatgtttagaacttacaaacctgtacttcttgactttatgctgtttctccctatatgtttatttaaacattttttcttctcatgatagtcaaggaactctgaaaaaatattttttttctatatactagagccttctcgacattctcttct

SEQ ID NO: 24960 - DNA, 934 bp, Homo sapiens
ggtggatggaagagttgtggaaccaaagagagctgtctccagagaagattctcaaagaccaggtgcccacttaactgtgaaaaagatatttgttggtggcattaaagaagacactgaagaacatcacctaagagattattttgaacagtatggaaaaattgaagtgattgaaatcatgactgaccgaggcagtggcaagaaaaggggctttgcctttgtaacctttgacgaccatgactccgtggataagattgtcattcagaaataccatactgtgaatggccacaactgtgaagttagaaaagccctgtcaaagcaagagatggctagtgcttcatccagccaaagaggtcgaagtggttctggaaactttggtggtggtcgtggaggtggtttcggtgggaatgacaacttcggtcgtggaggaaacttcagtggtcgtggtggctttggtggcagccgtggtggtggtggatatggtggcagtggggatggctataatggatttggtaatgatggaagcaattttggaggtggtggaagctacaatgattttgggaattacaacaatcagtcttcaaattttggacccatgaagggaggaaattttggaggcagaagctctggcccctatggcggtggaggccaatactttgcaaaaccacgaaaccaaggtggctatggcggttccagcagcagcagtagctatggcagtggcagaagattttaattaggaaacaaagcttagcaggagaggagagccagagaagtgacagggaagctacaggttacaacagatttgtgaactcagccaagcacagtggtggcagggcctagctgctacaaagaagacatgttttagacaaatactcatgtgtatgggcaaaaaactcgaggactgtatttgtgactaattgtataacaggttatttta

SEQ ID NO: 24961 - DNA, 302 bp, Homo sapiens
ggcgactgaggcacagagtgaaggggaggtgccagcccgcgaatccggccggagtgatgccatctgcagttttgtgatctgcaatgattcttcccttcgaggtcagcccattatctttaatcctgacttttttgtggagaaactccgacatgagaaacctgagattttcactgagttggtggtcagcaatatcacaaggctcatcgatttacctggaactgagttggctcagctgatgggggaagtggaccttaagttgcctggcggggctggcccagcatcaggattcttccggtctctca

SEQ ID NO: 24962 - DNA, 283 bp, Homo sapiens
tcctacagggccagcagaaagtacatatgtaaagaaaacggcagagctataaattctacaactatcctgaggggaggggagaattttagatagcacttaaacttaagaagtgagaggagccaggcgcagtggctcacgcagtggctcaggcctgtaatcccaacactttgtggcaggctgaggtgggcagatcacctgagactaaaaatacaaaaaacttagccaggcatggtggtgggcacctgtaatcccagctattcgggaggctgaggcaggagaatcc

SEQ ID NO: 24963 - DNA, 339 bp, Homo sapiens
ggttagtgcctgcagagtacagagccccaaaagatgagacctagaaggtgtggatgaggggaatggcaggaagagacaggggtgctggctgggccctgccccttcaatcctggaccagacatggggacacactccactcagcagtgctcacccccgcaccgcccagccccgctcaaagccaagggacatccatggctttctcattcctcagatgcatgtgtcacccacttcctcactcaggctaggaatgtctttcctgagggcagggagcaccaattctccatcttacccttggccgcggcatctagctcagggccaggcgctccatggggcgttctg

SEQ ID NO: 24964 - DNA, 328 bp, Homo sapiens
gaactggataggcatacacagaagaatgaaagtgggcccctactttttgtcctatacaaaaattaactcaagatgaattaaagacattagactataaaatcctagaagaaaacccaggaaacactcttccagacatcagcattggcaaagaatttatggctaagtccccaaaaacaattgcaaaaaaaacaaaaattgacaagcaggacgtaatgaaactaaagagcttctgcatggcaaaagaaattatcaagagtatacagacagccttcagaatgggagaaaagatttgcaaactatgcattccaccaagggactaatattcaga

SEQ ID NO: 24965 - DNA, 350 bp, Homo sapiens
gaccctggagagggaggtctccctttttttttatttaaaatgcaagttgaacacctttagggtacttttttcctatatcagttcctctcctttagctgactggagtggcttctccctgcaggactgacacacgttggcttttactagaattaatggtggcacgaactcactctgcaagtaaggagctcagaaaacatgctgcccgggaagctattcctgtgaaaacatctggaccagtctggcctgtgtagcttcctggcagccatgtgctcacagccacgtgtggactgtgattttactttacctggatgtagcatgtggtacagcccagcccgtaactgggaagatta

SEQ ID NO: 24966 - DNA, 393 bp, Homo sapiens
gtggtccccttgatgggactaggcagaagactgcctattaaataagaagactcccagtctcagctccagcttcctggtaaagaactctggcccatctttggttaggtgcccagccttaaagcatttgactctggccagcaggttcagaatatacaaacccaggaattctcagctcccaaacaaggaataggtttctcattgggagtggggggccatcagcttttcttcttccctccagctccaaattgaagagactaagttctcggtgagtatggcaaagaggtcagaggcttccttcctccacccagctccatactgtactcacggtgtggaagctctatcccacatacttgaggccaagaattctatggctctgatcacctttgccctact

SEQ ID NO: 24967 - DNA, 459 bp, Homo sapiens
  misc_feature (1)...(459): n = a,t,c or g
gcaagtgtctttaatgcgctagagtgaaggcagttgtggtgcagtaggaaaatatttcaagcagaaataagatgtatcagattcagcttctcgcctctctgatttacctggttttataaaaacaaacaaaccccaaaaccttgttttatggaaaatttcaagcatacacaggtagagagaatcatataataaatgccatttacccatcacccagtttcaatgttaccagcatcttgccgggcctgacacagtggcttatgcccgtaatcccagcactttgggaggccaagtggggaggatggcttgaggccaggagtttgagaccagcctgggcaacgtggtaagaccctgtctctaaaaaacaaaacaaactcttgccaatatttttatcagttgtacccacttttttctttctggggattaaagcagaattcangnatcttggtaatttggtgacaa

SEQ ID NO: 24968 - DNA, 334 bp, Homo sapiens
gagtcctcctgagagagcagtctggctgggcctcatccccccacctctcacacctgtgccacacactggaagaaggccaggcatggttagggccctgagaccacagcatggcagggctggggcccgtgtggcatcagcagctgtcatggacactcctgggtgctcagtggtcgtcacccctctgcaggcagaaccacctttacgaggacctattccgcgcccgctacaaccctgggcaccatccactggcgcgcgggccagcactcccaggctatgcgctgcttggagggtgcccgggagtgtgcgcacaccatgaggaaacggttcatggaga

SEQ ID NO: 24969 - DNA, 439 bp, Homo sapiens
gcagaaatcaagaacttattggtcaacactctatacaccgtcagagtggctgcggtgactagtcgtggaataggaaactggagcgattctaaatccattaccaccataaaaggaaaagtgatcccaccaccagatatccacattgacagctatggtgaaaattatctaagcttcaccctgaccatggagagtgatatcaaggtgaatggctatgtggtgaaccttttctgggcatttgacacccacaagcaagagaggagaactttgaacttccgaggaagcatattgtcacacaaagttggcaatctgacagctcatacatcctatgagatttctgcctgggccaagactgacttgggggatagccctctggcatttgagcatgttatgaccagaggggttcgcccacctgcacctacctcaaggccaaagccatcat

SEQ ID NO: 24970 - DNA, 410 bp, Homo sapiens
atcccctgagaaagagaagatgaacccgctggaacagtatgagcgaaaggtgaatgcgtctgttccaaggggtttccctttccactcatcggagattcagagggatgagctggcaccagctgggacaggggtgtcccgtgaggctgtgtcgggtctgctgatcatgggagcgggcggaggctccctcatcgtcctctccatgctgctcctgcgcaggaagaagccctacggggctatcagccatggcgtggtggaggtggaccccatgctgaccctggaggagcagcagctccgcgaactgcagcggcacggctatgagaaccccacttaccgcttcctggaggaacgaccctgacccggcccccttcaccccttcagccgagcccagacctcccctcttcctggagccc

SEQ ID NO: 24971 - DNA, 946 bp, Homo sapiens
ggtgtcgtatcacatgattacgaatttaatacgactcactatagggaatttggccctcgaggccaagaattcggcacgagtccagattgctttctctgtagctatggctagtgagccccatttagctcttagtcctggcaagccttgaatccagaaatctgcctccagtttccccttaccactcccagccctggtgtccccggcctgggccacgtctgaccccagtttgctcctatcatcttttccagctcttttatgcctttggcctgaggcctcctctgtctcttcccccagccatcccaacatcctgcgtctctacaactatttttatgaccggaggaggatctacttgattctagagtatgccccccgcggggagctctacaaggagctgcagaagagctgcacatttgacgagcagcgaacagccacgatcatggaggagttggcagatgctctaatgtactgccatgggaagaaggtgattcacagagacataaagccagaaaatctgctcttagggctcaagggagagctgaagattgctgacttcggctggtctgtgcatgcgccctccctgaggaggaagacaatgtgtggcaccctggactacctgcccccagagatgattgaggggcgcatgcacaatgagaaggtggatctgtggtgcattggagtgctttgctatgaatttttagttgggaagcctccttttgaggcaaacacataccaagagacctacaaaagaatatcacgggttgaattcacattccctgactttgtaacagagggagccagggacctcatttcaagactgttgaagcataatcccagccagaggccaatgctcagagaagtacttgaacacccctggatcacagcaaattcatcaaaaccatcaaattgccaaaacaaagaatcagctagcaaacagtcttaggaatcg

SEQ ID NO: 24972 - DNA, 712 bp, Homo sapiens
aattcggcacgagggtaacctgagtgtccaaggggaggtgtccaccttcacagggaaactctacattgagtttgtcaaggggtactatgacaatcccaaggtctgtgcactctacatcatggctgggacagtggatgatgtaccaaagcttcagcctcatccgggattggagaagaaagaagaggaagaagaagaagatcaatatgatgaagggtctaatctcaaaaaacagaccaataagaaccgggtgcagtctggcccccgcacacccaacccctatgcctcggacaacagcagcctcatgtttcccatcctggtggccttcggagtcttcattccaaccctcttctgcctctgccggttgtgagaacaaatgactatcctgaacagggtggaggggtgtgggaaagaaaccagccatattggttttggtttctgtatttttcacaatgattaatgaacaaaaacaaagagaaaaaaacacacatcaattaaaggagacaaaaagaggcagagcgagtagagagcagccctcattcaccacctggtcccagacgtgcttcagtcctcgtcctctctttgtggctggctcccagccttctctttcctcttgaggatacttagggtaaactggatccttcctgctcaaggatcctcatttgtatacctagtggaaaggactctgaactcagaggagtcactgtcctttttt

SEQ ID NO: 24973 - DNA, 337 bp, Homo sapiens
gctgagtagctggaactacatgcgcgtgccaccacgcacagctaatttttataattttagtagagatggggtttcactgcgttggccaggatgatctcgatctcttgaccttgggatccacccgccttggcctcccaaagtgctgggattacaggtgtgagccaccatgcctggccctaatttttgtgtttttattagaaacagagtttcaccatgttggccaggctggaaaattgctgtaatagttttccaactggcccctgtccttcctctctcttgctctcctcccatctcatctgcacctagcagccagagtgatcctgatactctcggcctt

SEQ ID NO: 24974 - DNA, 365 bp, Homo sapiens
gcctgcctcggctccccaccctctgggggcagcagctcctcttggggtcagcccctgcaccacgggatgcgtgactgaggagcatggatatcatcaggatatgactcgggttgctgggtaacttttggttttttttgagacggagtctcgctctgtcgtgcaggctgcagtgcagtggcgcgatctttggctcactgcgagctctgcctcccaggttcacgccattctcctgtttcagcctcctgagtagctgggactgcagatgcccgtctctactaaaagtataaaaaattagctcggcgtgggtcagttttcgatggcctctgccacactgggctctggggaccaagatttggcctggcctg

SEQ ID NO: 24975 - DNA, 1065 bp, Homo sapiens
aattcggcacgaggatgccaccgcagaagaggaggaggatttcggtgaggaggccgaagaggaggcctaaggcagagcccccatcacctcaggcttctcagttcccttagccgtcttactcaactgcccctttcctctccctcagaatttgtgtttgctgcctctatcttgttttttgttttttcttctggggggggtctagaacagtgcctggcacatagtaggcgctcaataaatacttgtttgttgaatgtctcctctctctttccactctgggaaacctaggtttctgccattctgggtgaccctgtatttctttctggtgcccattccatttgtccagttaatacttcctcttaaaaatctccaagaagctgggtctccagatcccatttagaaccaaccaggtgctgaaaacacatgtagataatggccatcatcctaagcccaaagtagaaaatggtagaaggtagtgggtagaagtcactatataaggaaggggatgggattttccattctaaaagttttggagagggaaatccaggctattaaagtcactaaatttctaagtatgtccatttcccatctcagcttcaagggaggtgtcagcagtattatctccactttcaatctccctccaagctctactctttggaggagtctgtcccactctgtcaagtggaatccttccctttccaactctacctccctcactcgagctcctttcccctgatcagagaaagggatcaagggggttgggaggggggaaagagaccagccttggtccctaagcctccagaaacgtcttcttaatccccaccttttcttactcccaaaaaagaatgaacacccctgactctggagtggtgtatactgccacatcagtgtttgagtcagtccccagaggagaggggaaccctcctccatcttttttgcaacatctcatttcttccttttgctgttgcttcccccctcacacacttggttttgttctatcctacatttgagatttctattttatgttgaacttgctgctttttttcatattgaaaagatgacatcgcc

SEQ ID NO: 24976 - DNA, 349 bp, Homo sapiens
gcgctcaaatctcctcccacctctctccctgcttttgccttgctctgttcctctttggtcccaagagcagcagccgcagcctcctcgtgatcctccctagcataaatttcccaaacagtccacaggtcccatgcccactttgcgtctgcactgtgatcgtgacaaatcttccctcctcaccagctagtctggggtttcctctccctgccccaggccagaactgccttcttcatttccacccacgctcccagcctcttagctgaaagcacaaatggtgaaatcagtagtctcgctccatctctaatagactaaacctaaatgcctctaggacggactgttgctatccaag

SEQ ID NO: 24977 - DNA, 343 bp, Homo sapiens
  misc_feature (1)...(343): n = a,t,c or g
gcggaaactctacttcctttaaaagaagtgcagggatggtaaggtaattcactgttcagcaaagtagaaattactctcctagcctctaaactaaaactcttcgctgtgataaaagaaatgaacatcttcagtactggttctaccaagtggaaaatgaattagtgagatgtaggtggtaaanncatanttgtancaactatnctgtatgccgtnnncntnntnnnttnttggntgnnngcattnnntttnnnncnntttngnnntggttttcnaatgnnnnntngagtntttnnagctngnntttannnntgntntgtnntttnttnngngantttcnntttgg

SEQ ID NO: 24978 - DNA, 253 bp, Homo sapiens
tatgacatgattacgaatttaatacgactcactatagggaatttggccctcgaggccaagactggcctgagccgcacacggctcttcagcagggcttggcagccagcggggcctcgggaggaggcaaacagctgatcaaatccgggcttctccagaggaagaaggggaagggcaggtctggggaggtcagagcgtgggtgagaaccgtggccatgggtgggatccacatcccagcctgcagggcctcctggtg

SEQ ID NO: 24979 - DNA, 472 bp, Homo sapiens
gcccatatttttgggtgttctccaaaaatttgcctcttgagagttggctttatgtctttgaaacagatgtgtacttctagctgtgcctcaagatgaaatgcaaggtgattgaatgtgacctaaaagacttgccttttctgaatcagtgctggtcgctcatcagacaaatttaaaaatggtaaaagaggccgggcatggtggttcatgcctgtaatcgcaatactttgggaggctgaggcgggcatatcacgtgagctcaggagttggagaccagcgtggacaacgtggtgacacctgtctctaccaaaaatacaaaaaattagccgggcgtggtggcacacacttgtagttacagctcctcaggaggctgaagcgggaggatcgcttgaggttgggaggtgggcgtttgcagtgagctgagattgagccctgacttcagcttgggtgacagagtgagacctgtttcaaataa

SEQ ID NO: 24980 - DNA, 389 bp, Homo sapiens
gcgccaagggacgtgtttctgcgctcgcgtggtcatggaggcgctgccgctgctagccgcgacaactccggaccacggccgccaccgaaggctgcttctgctgccgctactgctgttcctgctgccggctggagctgtgcagggctgggagacagaggagaggccccggactcgcgaagaggagtgccacttctacgcgggtggacaagtgtacccgggagaggcatcccggtttccaagccagcgccctactgggaaggaacagctgtgatcgatggagaatttaaggagctgaagttaactgattatcgtgggaaatacttggttttcttcttctacccacttgatttcacatttgtgtgtccaactgaaattatcgcttttggcga

SEQ ID NO: 24981 - DNA, 460 bp, Homo sapiens
  misc_feature (1)...(460): n = a,t,c or g
nnnnnnnnnnnnntttgaaaaccntttgactgattacgaatttaatacgactcactatagggaatttggccctcgaggccaagaattcggcacgagctggaagaattactgtcgtaaccccgatagggagctgcggccttggtgtttcaccaccgaccccaacaagcgctgggaactttgcgacatcccccgctgcacaacacctccaccatcttctggtcccacctaccagtgtctgaagggaacaggtgaaaactatcgcgggaatgtggctgttaccgtgtccgggcacacctgtcagcactggagtgcacagacccctcacacacataacaggacaccagaaaactttccctgcaaaaatttggatgaaaactactgccgcaatcctgacggaaaaagggccccatggtgccatacaaccaacagccaagtgcggtgggagtactgtaagataccg

SEQ ID NO: 24982 - DNA, 437 bp, Homo sapiens
gcattacattacatagatattttttgtccatgaccatagtcttacatgtaaggcacaagatagtcacaaaataatttaatgacaggtgataaatacagtcattgatgaaaggaaattgtcttcaaatgttgtgctgtcattgctcacatgagctattgtaataattgtggccattgtaatgagacttggtactgttttagtgtagctcagtatcagttcggggactcaggcactggttgaaattagtggaaattgtattttcaactgagaagagtttctcctgggaggagctcatcctgctgaagcgggaggggtagtgtggttttctggctgctgtccgcagtggtgctggtcctcttggtcagcttctcttacagttccaaggtggtggctgccattcaggaattgcggccatcagcagtgactagaatcagaaa

SEQ ID NO: 24983 - DNA, 416 bp, Homo sapiens
gcatttccaatcatcctgctcctgagtattggtgttccattgcttactttgaaatggatgttcaggtaggagagacatttaaggttccttcaagctgccctattgttactgttgatggatacgtggacccttctggaggagatcgcttttgtttgggtcaactctccaatgtccacaggacagaagccattgagagagcaaggttgcacataggcaaaggtgtgcagttggaatgtaaaggtgaaggtgatgtttgggtcaggtgccttagtgaccacgcggtctttgtacagagttactacttagacagagaagctgggcgtgcacctggagatgctgttcataagatctacccaagtgcatatataaaggtctttgatttgcgtcagtgtcatcgacagatgcagcagcaggcg

SEQ ID NO: 24984 - DNA, 497 bp, Homo sapiens
  misc_feature (1)...(497): n = a,t,c or g
acgagcatcaatctggatagcctttgctagtagtgatacaactgtgcacatgtatgtgaattctcttcacttatactagatgctaaaagacaagcttctgtaaagtacggagagataagtattgtccacctataattctattcccagccaaagtatcagtcaggtataaagttaaaaataaacaagggggccgggcgcagtggctcacacctgtaatcccagcactttgggaggctgaggcggacggatcacgaggtcaggagatcgagaccatcctggctaacacggtgaaaccctgtctctagtaaaaatacagaaaattagccgggcgaggtggcgggcgcctgtagtcccagctacgcaggaggctgaggcaggagaatggcgtgaaccctggggggcggagcctgcagtgagtcnagattgcgccactgcactccaacctgggtgaaagancgagacccgtctcaaaaaataatatanaaattaacaaggat

SEQ ID NO: 24985 - DNA, 401 bp, Homo sapiens
  misc_feature (1)...(401): n = a,t,c or g
gagaccagactgggcagggtggcgggaccccatctctactaggggttcaaaaataagctgggtgtagtggtgggtgcctgtaatcctagctacttgggaggctaaggcacaagaatcgcttgaacctgggaggcagagattgtagtgagccaagattgcaccactgaactccagcctgggtgacagagcgagactccatctcaaaaaaaaaagggaaaaagaaaaacccaggcctaccactgaattggtgtctggctaccggatgttaaaatcaaggccttgctgcctatctttgttttataggtctgggccttcaacanatcttttttggcttctanaacacctnttggtcatgcagtgagggataccctcaagttaactatgggaaaagaagacgcatt

SEQ ID NO: 24986 - DNA, 353 bp, Homo sapiens
gccaaaattgaaaggcctttgtctatcattccatgaaacaaaaaaagattatcttactttttatcatggcttaaccttaatacccactggatttcggagaacagtggccactgcatggttctcatgcttacagtacgatcctgtagctagatttgttttgtaagaaggaagaggaatgagatgaaataccctatgtataatgttttatgttgctttggaaaagtacaacaatgtagaaaaaggtaaaatcatgataaagtaagaaattaaagactgtttggactgatttacaaggaaaaagatgatgctatgatggttcagttaaaggaacctatgactcaccccccttcact

SEQ ID NO: 24987 - DNA, 519 bp, Homo sapiens
aattcggcacgaagctactgcgaacccacaccacatcagccagcgcccgtgcgctctaccgccttgcccagaagaagcccttcactccggtcaagtacttctccatcgaccgcgtattccggaatgagaccctggacgccacgcacctggctgagttccaccagatcgagggcgtggtggcggatcatggtctcaccttgggccacctcatgggcgttctgcgggagttcttcaccaagctgggtatcacgcaactccgcttcaagccagcctacaacccatacacagagcccagcatggaggtgttcagctaccaccaaggcctgaagaagtgggtggaggtcggaaactcgggggtcttccgtccagagatgctgctgcccatggggcttcccgagaacgtgtcggtcattgcctggggcctctccctggagcgcccaacgatgatcaaatatggcatcaacaatatccgggagctggtggccacaaggtgaacctgcagatggtgtatgacagtcc

SEQ ID NO: 24988 - DNA, 968 bp, Homo sapiens
  misc_feature (1)...(968): n = a,t,c or g
ggatggccaagcctctggctgcactgtgccccgtgtgtccccagcatcctggtggggctcaatacacagagagctcataagtagcatttgaatacatgaatcaaagtatggaatggcccagtttactgcagcctttttgcaggtgcaaaagatgatcttttagaaagcagaaacagggggtctggtgcatgagatctttttctcaatgtgactgtgctgtgcaaaccttcacgtggtgtcttgtgaaagactttgaccactgtgtggactttccttcagtgtatctttcagagtgcaagactgggaatggaaagaactacagagggacgatgtccaaaacaaaaaatggcatcacctgtcaaaaatggagttccacttctccccacagacctagattctcacctgctacacacccctcagagggactggaggagaactactgcaggaatccagacaacgatccgcaggggccctggtgctatactactgatccagaaaagagatatgactactgcgacattcttgagtgtgaagaggaatgtatgcattgcagtggagaaaactatgacggcaaaatttccaagaccatgtctggactggaatgccaggcctgggactctcagagcccacacgctcatggatacattccttccaaatttccaaacaagaacctgaagaagaattactgtcgtaaccccgatagggagctgcggccttggtgtttcaccaccgaccccaacaagcgctgggaactttgcgacatcccccgctgcacaacacctccaccatcttctggtcccacctacaattgtctgaagggaacaggtgaaaactatcgcggggaatgtggctgttaccgtgtccgggcacacctgtcancactggaattgcacagaccctcncaccncataacaggacaccagaaaaactcccctngccaaaaaatttggatgaaaaactacnggccg

SEQ ID NO: 24989 - DNA, 405 bp, Homo sapiens
gctatgacatgattacgaatttaatacgactcactatagggaatttggccctcgaggccaagaattcggcacgaggtaattgatagattcaaaagagttgtgcaagaataatgttcattatttgactaatcactgaatgtggtgtttcaaggaagacaatgaatcaaagttgacttgaaaggtaagcccagggccagacgtggtggctcatttctgtaatcccagcactttgggaggccgagatcagtggatcccttgacaccaggagtttgagaccagcctaggcaacacagtgaaaacctgtctctacaacaaatacaaaaattagccgggtgtggtggtatgcatctgtagttccagctactcaggaggctgaggtgggaggatcgcttgaactcaggaggg

SEQ ID NO: 24990 - DNA, 402 bp, Homo sapiens
aagggaagggagcatattgctaagagagcaatggaaaatatgtaagctgctttcattaattaccctactttcattcctcccaccccaagcaaatcccaacatttctcttcagtgtgttgacttctatcctgttaacactgtaatatctttaaatgatgtacaggcagatgaaaccaggtcactggggagtctgcttcatttcctctgagctgttatcttgtgtatggatatgtgtaaatgttatgactccttgataaaaaatttattatgtccattattcaagaaagatatctatgactgtgtttaatagtatatctaatggctgtggcattgttgatgctcacatatgataaaaaagtgtcctataattctattgaaagtttttaatatttattgaattat

SEQ ID NO: 24991 - DNA, 353 bp, Homo sapiens
  misc_feature (1)...(353): n = a,t,c or g
cggacgcgtgggggtcagatagcccttgtctcccgccgccaatctctggcccctagcagcacggagcagacggcggcagcagcagcagcaggcgaggaggaagatggcgggacggctgccggcctgtgtggtggactgtggcacggggtatacaaaactaggatatgctggaaatacagaaccacagtttatcatcccttcctgtattgctattaaggagtcagcaaaagtgggtgatcaagctcaaaggagggtgatgaaaggtgttgatgacctagacttcttcattggtgatgaagcaatagaaaaacctacatatgcancaaagtgccaatccgcatggtatanttgaa

SEQ ID NO: 24992 - DNA, 348 bp, Homo sapiens
gtcaatgtgaggctcaagaaccttcttaggctgggctcggtggctcatttctgtaatccctgcactttggaaggctgaggcaggaggatctcttgaggccaggagttcaagacaagcctgggcaacatagccagacctctgtttctatcccccccaaaaagaaccttcttaaaccggaattgagtcctacaacctcgataactcacaaataagcccgtgtggcctctcgcagacttgggaagttctccaagtgtccagggagatgtgccaggcgctttcctgccgtgaccaccgtcctctgcctgctccatttcttggtggccttcctttagacctgggcctcactct

SEQ ID NO: 24993 - DNA, 307 bp, Homo sapiens
cttactcatcacctgcagtggccagaattagggactcagaatcaaaccagtgtaaggcagtgctggctgccattgcctggtcacattgaaattggtggcttcattctagatgtagcttgtgcagatgtagcaggaaaataggaaaacctaccatctcagtgagcaccagctgcctcccaaaggaggggcagccgtgcttatatttttatggttacaatggcacaaaattattatcaacctaactaaaacattccttttctcttttttcctgaattatcatggagttttctaattctctcttttggaa

SEQ ID NO: 24994 - DNA, 364 bp, Homo sapiens
gccaattaataggaattccaatagaatggctgaaacaaattgagtagaacaattactaactcctttagacattattatgttaggctgaactattttctacactggctctatctatgggtcattgcatctggctatttagatggcaaggaaatgtaattgaactaaaaatcctagtcattgagcaacgggctgtttttgttttgctttttacctgccagctggttcctcatctttgaggtttgccctgacagctctgaagcttgggtaatatacaacaatatagacaaagtaaggaaataattaggttgtatgatagtaatacattcccatcctgaaaaccacagttttaaaatattcctattgt

SEQ ID NO: 24995 - DNA, 352 bp, Homo sapiens
gcggcaaccgtatctcagttctcgcgaggtttcgtcttcccggaagcgttggaggacattccctgttgactgcgtcgcgatgtgtggcgactgtgtggagaaggaatatcccaaccggggtaatacctgcctggagaatggatctttcttactgaactttacaggctgtgcagtgtgcagtaagcgggattttatgctgatcacaaacaaatccttgaaagaagaagatggagaagaaatagttacctatgatccagatttgtgtaagaattgtcatcatgtaatagccagacatgagtatacattcagtatcatggatgaatttcaggagtataccatgctgtgtctgtta

SEQ ID NO: 24996 - DNA, 446 bp, Homo sapiens
gcggtagtgacggtggccgtttccttgaggaagagtgagggttccaacttttctgcttatctgggaggtgttgggcgcggacagtcgagatgtcagagaaaaagcagccggtagacttaggtctgttagaggaagacgacgagtttgaagagttccctgccgaagactgggctggcttagatgaagatgaagatgcacatgtctgggaggataattgggatgatgacaatgtagaggatgacttctctaatcagttacgagctgaactagagaaacatggttataagatggagacttcatagcatccagaagaagtgttgaagtaacctaaacttgacctgcttaatacattctagggcagagaacccaggatgggacactaaaaaaatgtgtttatttcattatctgcttggatttatttgtgtttttgtaacacaaaaaataaa

SEQ ID NO: 24997 - DNA, 446 bp, Homo sapiens
  misc_feature (1)...(446): n = a,t,c or g
gctttttttcagtcatggcggaaggtaaagaggtagcagccaagtcatatggggatagcaggagcaagagagagaggaggtggcaggctctctgtggggaaagcacccaggcactcgtggggatctgcccccatgatccaaacacctcccacaaggccccacctccaacattggggattacatttcaacatgagatttggaggggacaaaacatccaaaccatatcaattatatacattcatttctagttaatttgtctagaattatatgaaagacatcatcagcaagacatacatcattttggtgaaatctcctgaagattaaacaaagaaatttcaaatggtaacaaattcctcgtgccgaattcttggcctcgagggccaaattccctatagtgagtcgtattaaattcgtaatcatgtcataacggtntccaaatnttcaaa

SEQ ID NO: 24998 - DNA, 424 bp, Homo sapiens
tttcatatagttaggccccgagttacaatttgagataagttgattcctaaacagaatgtgctttacagaatgtgaccaattttattactcccaaggaccttgtttcagattatcttaaaaccagagttcactgatctcacattttaaaaagaaaaaaagtttgttaactgttttaatcaatatgagtagtaccaaacatccctaattggattctagagaggaagcagggaaggccaggtgcggtggctcatgcctgtaatcccagcactttgggaggccaaggcgggtggatcacgaggtcaggagttcaagaccagcctagccaacatagtgaaacccctgtctctactaaaaatacaaaaaattagccaggcatggtggcaggtgcctgtaatcccaactacttgggaggctgaggcagagc

SEQ ID NO: 24999 - DNA, 439 bp, Homo sapiens
atttgataccgttatgactgattacgaatttaatacgactcactatagggaatttggccctcgaggccaagaattcggcacgagcaggggtagtaataaatgtgcctatctgtctatgaccatagacagattatgatcaaagaaaggaggattaaactaacatttcgaatcataattgacgacaccaaaaagattcattcaaaacatgtatcaagaaaatttagaggagatactgtttctcagttgtaaataatgccagaaaaactcataaggctacaagagacagagatccaaagctacatttgctaaaaagaaatttgtgtcactgtcaacatagtaagaaagacgcttactctcaacaaacacacattctagatcctgtagtataagaacggccggccgggcgcggtggctcatgcctataatcccagcaccttgg

SEQ ID NO: 25000 - DNA, 675 bp, Homo sapiens
gctcagcgcgctccgcggtcatggagatccccgggagcttgtgcaagaaagtcaagctgagcaataacgcgcagaactggggaatgcagagagcaaccaatgtcacctaccaagcccatcatgtcagcaggaacaagagaggtcaggtggtggggaccagaggtggctttcgtggttgcacagtttggctaacaggcttgtctggagcgggaaagactactgtgagcatggccttggaggagtacctggtttgtcatggtattccatgctacactctggatggtgacaatattcgtcaaggtctcaataaaaatcttggctttagtcctgaagacagagaagagaatgttcgacgcatcgcagaagttgctaaactgtttgcagatgctggcttagtgtgcatcacaagtttcatatcaccttacactcaggatcgcaacaatgcaaggcaaattcatgaaggtgcaagtttaccgttttttgaagtatttgttgatgctcctctgcatgtttgtgaacagagggatgtcaaaggactctacaaaaaagcccgggcaggagaaattaaaggtttcactgggatcgattctgaatatgaaaagccagaggcccctgagttggtgctgaaaacagactcctgtgatgtaaatgactgtgtccagcaagttgtggaac

SEQ ID NO: 25001 - DNA, 392 bp, Homo sapiens
ggaagcatttatatccagatgcctacccttacactccctagcttactttctacataatttagttttaagagcaggaaatgcataacatggtttttagtcttaacaagcacttaaattcattagacgcatagaaaagaaccatttattattttattatttttatttttattttgagaggaagtctctgtcacccaggctggagtgcagtggcgcaatctcagttcactgcaacctccgcctcccaggttcaagtgattcccctgcctcagcctcccaagtagctgggactacaggcacccgccaccacgcccggctaatttttgtattttagtagagatggggttttaccatgttggcaatatggctcgatctcctgacctcgtgatctaccc

SEQ ID NO: 25002 - DNA, 486 bp, Homo sapiens
cgaaacctcggggaggtcaggcgctggctttccttgcctccctgctcggcggatgcaccacagttgcaacctgcagaggcccggagaacacaaccctcccgagaagcccaggtccagagccaaacccgtcactgaccccccagcccaggccgcccagccactccccaccgctaccatggccgaagacgcagacatgcgcaatgagctggaggagatgcagcgaagggctgaccagttggctgatgagtcgctggaaagcacccgtcgtatgctgcaactggttgaagagagtaaagatgctggtatcaggactttggttatgttggatgaacaaggagaacaactcgatcgtgtcgaagaaggcatgaaccatatcaaccaagacatgaaagaagcagaaaagaatttgacggacctaggaaaattctgcgggctttgtgtgtgtccctgtaacaagcttaaatcaagtgatgcttacaaaaaagg

SEQ ID NO: 25003 - DNA, 202 bp, Homo sapiens
ggtggccttaagctggaggtcaacaagtaccagtacctgctgacaggtcgcgtctatgatggcaagatgtacacggggctgtgcaacttcgtggagaggtgggaccagctcaccctctcccagcgcaaggggctgaactatcggtatcacctgggttgtaactgcaagatcaagtcctgctactacctgccttgctttgtga

SEQ ID NO: 25004 - DNA, 147 bp, Homo sapiens
ggagatgttcgtttgttttctgttggtcttcaggagtcttacatgattgcggttgcctccagattgaaatagactacattggattaggggtcagaggaagaaacctcttcattttgtttgtttgtttggttggttttttggttcttg

SEQ ID NO: 25005 - DNA, 242 bp, Homo sapiens
cccaaatttaattgtgcttaaggctttaattaaatttgggggttcccttcttagagccttaagcacaattaattaaaagtgaaacgtaattgtacaagcagttaatcacccaccatagggcatgattaacaaagcaacctttcccttcccccgagtgattttgcgaaacccccttttcccttcagcttgcttagatgttccaaatttagaaagcttaaggcggcctacaaaaaaaaaaaaaa

SEQ ID NO: 25006 - DNA, 392 bp, Homo sapiens
gacagatcgcatgtcctgcaatggggcactctttagcacagcaaagccatgagctactggtgacccgacagcaacaacatggagaaatctcaaaagcattatgccaagtggacgaagccttccccgagagggcacatgctgtgtgatttcatttacgatattctacaaaagggaaatctacactacagggacaggaaacagttcagtggttgcctgggtctgggtgtgggggcaggagattaattgcaaaggggaatgaaggaatcttccggacaacggaaatgttccagacttcactgtagcagtggttacatggccaaataattttccaaagctcattcaactgtgctattttctgggtgcatttgattgtatgtaaagtatactgcaat

SEQ ID NO: 25007 - DNA, 1115 bp, Homo sapiens
  misc_feature (1)...(1115): n = a,t,c or g
ctatgacatgattacgaatttaatacgactcactatagggaatttggccctcgaggccaagaattcggcacgaggagaggttgactgcatgaaatatgagcacacaggcacatacctgtggaagataggttagacttgagagaggaaagatatgcagttaagcctacaaaccaattctcttatggcaaagaaaggccttcgatgtcagtcacgttgtctgtgatttggggttttaggaacgggagcaggagctgcaaaaggaagaggcaagacaggtcaagaactttgagatgtgtcaggagtttgaacagaatgccagtaccttccttcaatggatcctggaaaccagggcttactttctggatggatcattgctcaaagaaacaggaactctggaatctcagctggaagcatataaaagaaaacagaaggagatccaggcgatgaagcgtcaactaaccaagattgtggacctgggggacaacttggaagacgctctgatccttgatatcaaatacagcaccattggattggctcagcagtgggaccagctctaccagcttgggttgcggatgcaacacaacctggagcaacagatccaggccaaggacatccaacgtgttgagtgaagagactctaaaggaatttagcacaatctataaacactttgatgagaatttgacagggcgcctgactcacaaagagttccggtcctgcctgagaggactcaattactacttgcccatggtggaggaggatgaacatgagcccanttttganaanttcctggatgctgtggatccagggaggaagggctatgtctcactggaggactatactgctttcctgattgacaaggagtcagaaaacatcaagtccagtgatgaaatagagaatgccttccaagccctggcagagggcaagtcatatattaccaaagaagacatgaagcaggtccgattctggttgcttcccctactacactgtcatcctaatttgaattctggtcatctcaggcccggtggcctactttgaaaaaacccacccacttgtttttttttttcaaacctcccntttcacaanatgtcatttgctttggtaaccacttcattttg

SEQ ID NO: 25008 - DNA, 182 bp, Homo sapiens
gctcaaagatgagagcatagaaatgtgtctggcattcttccaaatacttgagcagtttcccaagcatcagttcaccttttgaagactggtgggaatgagaaagtctgacttattctgatttatattttgtgtataaatacacacaaagggctggggtttaggttttaatttttttttttttt

SEQ ID NO: 25009 - DNA, 383 bp, Homo sapiens
ggcttggagtccttcttttgtctaaagtatatatttagaatctatgtatttttgtcaaactttaatctctttgaatatgtacatggactctggatgctgctcccactatgtcagcctcagatgggaatggagggtggtgagaagctgtctttgagaacaaatccacttccgtattcattgagaagttgcgggagaggatgaattgatgagggtctgtaaatgtccatatacttcaaccctgtattatgcaatttctaatcttaatttcttccttccctttactctctccttgtaatgttagttccttttttaagaaatcctttgtagctaggtcaggtgatgcacacctgtgatcccagcaacttaggaggctgaggtaggag

SEQ ID NO: 25010 - DNA, 316 bp, Homo sapiens
ttgttcctttaggtgggtctggattttaggcgcataaaggaatttaagctttactgtatgctttggaagagaaggtttgtgtggatggagtgaggtgtcagagataccttgaggcttctttggttagcatagccatatttgggggtattgatttcttttgtttctttcgtttgtttgtttgtttttgagacggagtaagctccgtctcccaggttcacaccattctcctgcctcagcctcccaagtagctgggactacaggtgcccaccaccacgcccagctaattttttgtgtttttagtagagacagggtattc

SEQ ID NO: 25011 - DNA, 363 bp, Homo sapiens
tcttaaggaaatgttcccctatgaagcatctacaccaacaggaattagtgctagttgccgcagaccaatcaaaggggctgcaggccggccattagaactcagtgatttcaggatggaggagtctttttcatctaaatatgttcctaagtatgttcccttggcagatgtcaagtcagaaaagacaaaaaagggacgctccattcccgtatggataaaaattttgctgtttgttgttgtggcagtttttttgtttttggtctatcaagctatggaaaccaaccaagtaaatcccttctctaattttcttcatgttgaccctagaaaatccaactgaatggtatctctttggcaccgttcaacttg

SEQ ID NO: 25012 - DNA, 419 bp, Homo sapiens
  misc_feature (1)...(419): n = a,t,c or g
ggacagatatgagctgtcacttcctgctttgtgagttggatattgtttctaggccctgttttatttatgttatttttcctgttcatgtgttagaacaactgactgtttgtagagttgatgacaattagataataagaccaccaattcagtccaaacaaaaatgaattcattatcttgccaggcaagggagacccacatattcagatcagtctccccatacttttgtgcgttttcatgtaagcatggagatttccgattagttttaatagcacagtgattggctcctagacacctaaatgaggatttcctttttgaaaaacctactcagcattctgatctgccctgcttaaacctatttagtctggncttatagtccctgcttgagcccaaagagcaaggtttctcaaggnctctgtgca

SEQ ID NO: 25013 - DNA, 546 bp, Homo sapiens
  misc_feature (1)...(546): n = a,t,c or g
gggcttgaatacaagctggctgcttaccaggtgctcaggcgagcttcaccaaaattggaggaaatactgttttgaaccttttgagaacccatatgtttgtttcctaagcaagtttttggataatcttgaattatacaggatattttccctacatacttgctgtagatccacccctccaccactgtatctgttgatgacgcattcagctttttgcctctgttgctgtgtgaactgggatttggctgggctgtggccgcctgtctggaagggctacatagcctcattttggcaatgtgcttatgaattggctgtccggctattcctggtttgttgaatgagagttcagaggcaaagctggtaccaccacgaggttccaattcctcagagtcacgtttcttaccagtgcctattctcttttgttccaaagaggccacttttgctatgacctcaccctcggcatcctcttgataacctgagcgttagtagtggggatcattgcgttcccagagagccctgccaggaggagtancancttaggaatctgtg

SEQ ID NO: 25014 - DNA, 484 bp, Homo sapiens
  misc_feature (1)...(484): n = a,t,c or g
gcatgccctgaagtgtgttttgaagggatgttagctggattgcaaagaacagttagaaggctaacaaagtgattttatatgaggaatgctggttccactggttaatattgtgcatggggccagtgtggtggctcacgcatgtaatccaagccctaaagcagtggaagacagaaggcaagaggagactgacatgagagattaaggagttagaaccgcagaactcagtggtatctcattatagaagcatggctcaaaattgggtaattgtggctaagaaatgagtatctgaatgaaggaagtgaatgtggactgtcctggaccgcatttcttctgtagaatgtaattcttcctcagactcatcttctccattttcgaaggtgactggtttcacctgaactggggacattgtttgaatccagtagcagtaaaagcccttaagcaatattggagtnnaaaacccctgggannggcaaagtngggggtt

SEQ ID NO: 25015 - DNA, 448 bp, Homo sapiens
cggacgcgtgggcggacgcgtgggtagcgccatttttttggaaacctctgcgccatgagagccaagtggaggaagaagcgaatgcgcaggctgaagcgcaaaagaagaaagatgaggcagaggtccaagtaaaccgctagcttgttgcaccgtggaggccacaggagcagaaacatggaatgccagacgctggggatgctggtacaagttgtgggactgcatgctactgtctagagcttgtctcaatggatctagaacttcatcgccctctgatcgccgatcacctctgagacccaccttgctcataaacaaaatgcccatgttggtcctctgccctggacctgtgacattctggactatttctgtgtttatttgtggccgagtgtaacaaccatataataaatcacctcttccgctgttttagctgaagaattaaaaaaaaaaaaaa

SEQ ID NO: 25016 - DNA, 394 bp, Homo sapiens
  misc_feature (1)...(394): n = a,t,c or g
cccattcaggcaaacaagggcagtggttttgtttgtggttttggttgttcctaaagcttgccctttgagtattatctggagaacccaagctgtctctggattggcacccttaaagacagatacattggctggggagtgggaacagggaggggcagaaaaccaccaaaaggccagtgcctcaactcttgattctgatgaggtttctgggaagagatcaaaatggagtctccttaccatggacaatacatgcaaagcaatatcttgttcaggttaagtacccgcaaaacgggacatagtatgtgacaatctgcatcgatcatggactactaaatgcctttacatanaagggctctgatttgcacaatttgttgaaanatcacaaacccatagaaaa

SEQ ID NO: 25017 - DNA, 485 bp, Homo sapiens
  misc_feature (1)...(485): n = a,t,c or g
ggacatggtggtgggctcctgtaatcccagctacttgggaggcaggggcaggaaaattgcttgagcctgggagacagaggttgcagtgagccaagactgcgctgttgcactccagcctgggcgacaagagcaaaactgtctcanaaataaaaaataaatcacaaaaatgttttgttaaaattagcagtaattttactggctcttcaagacattttctttcctattaaattcatcttactgagtagataaatgagataaggcttataaagatcttgaaatatggccaggcacgatggctcacacctgtattcccaagcactttgggaggccaaggcggtggatcacttgaggtcaggagttgcagaccaccctggccaatgtggcaaaaccccatctctactaaaaatacaaaaattagctgggtatggtggcgtgcacctgtaatcccagttacttgggaggctgaggcaggagaatggcttgaa

SEQ ID NO: 25018 - DNA, 455 bp, Homo sapiens
ggaattaaccagtccggtattgatgaacgtaagagttgtttttccagtcctctgctatggaaggacatgccatagtgaatatccttgtatataaaccattttacacagaagtacatctggaggataaattcctgaaagtggagtttctggatcaagtgacacatgcatttatacttttgataagatattgccaaattgctttccccactggctgcggggctgtagcatgtcacacttcccatcaatgcccagggtgtctgctttcccacatcccccaaccccagggcacagtactatgactgaggcaagctgggaggagcctggagaggggcatcatcacaacacagtgacttggaggatccaggaccagtgccagactttgtccacagcgtgactggaaagctcttcatgtacattctaccctggctggactgtccccgaagggagggcctctt

SEQ ID NO: 25019 - DNA, 513 bp, Homo sapiens
tgattacgaatttaatacgactcactatagggaatttggccctcgaggccaagaattcggcacgagcgtggtttggctctccagagacagaaagctctgtccaatgctgcaaacttacaacgattcaaaagggatgtgactgaagccatccagtggatcaaggagaaggaacctgtactcacctctgaggactatggcaaagaccttgttgcctctgaaggactgtttcacagtcacaagggacttgagagaaatcttgcagtcatgagtgacaaggtgaaggagttatgtgctaaagcagagaagctgacactttcccatccttcagatgcacctcagatccaggagatgaaagaagatctggtctccagctgggagcatattcgtgccctggccaccagcagatatgaaaaactgcaggctacttattggtaccatcgattttcatctgactttgatgaactctcaggctggatgaacgagaacactgctgcgatcaatgctgatgaactg

SEQ ID NO: 25020 - DNA, 473 bp, Homo sapiens
  misc_feature (1)...(473): n = a,t,c or g
gnnnnnnnnnnnntttgnnnnccnnntttgganancctttgactgattacgaatttaatacgactcactatagggaatttggccctcgaggccaagaattcggcacgagccaccatgccgccgaagttcgaccccaacgagatcaaagtcgtatacctgaggtgcaccggaggtgaagtcggtgccacttctgccctggcccccaagatcggccccctgggtctgtctccaaaaaaagttggtgatgacattgccaaggcaacgggtgactggaagggcctgaggattacagtgaaactgaccattcagaacagacaggcccagattgaggtggtgccttctgcctctgccctgatcatcaaagccctcaaggaaccaccaagagacagaaagaaacagaaaaacattaaacacagtgggaatatcacttttgatgagattgtcaacattgctcgacagatgcggcaccgatc

SEQ ID NO: 25021 - DNA, 549 bp, Homo sapiens
  misc_feature (1)...(549): n = a,t,c or g
gcaagacttccttgatcataaggaaatgaaacctattcaaaccagttcatataaaagagtttctgatgccacatgcagggttgaaaaaaacataagccaggggagatttatctaaaggaaaaaggaaatagctgttgcagaatctaaggaaaagctgaacaaccaaacctcagaaaaggctggaaccaaaacagtagcagggtcttccgcaagagtttatggactctagtgttctgctgtaaataggctttagtctccatgaggcataattcagattcctgggggagatctgatatggtcagttgaaaggttgattttcctccgggccagatacctgccccaggttcaacttcagttgcgggtgaggaagtgggagattttggtacaaacagagcagttttgggagtggctggaatcaggcgtatttttcttagacagtgattctcactgcgtctcangagttttacactggnaaanctttgaggaccctaagacttttgttatgtgggtatataantgatattacaaattagatttaaatggaagact

SEQ ID NO: 25022 - DNA, 343 bp, Homo sapiens
cggggagcccctgccttaccagggcgttctctccgcccgccggtggatgctccgcgcctgccctccgcagcctcgctcagcagtcctgcgttggggtctgcgccctaggatgcactgagatggtacatcaggataactgctcgtatcaggcacagaaaaatgagagagagtctatcagacagaagttggcacttggaagcttctttgatgatggcccaggaatttataccagctgtagcaaaagtgggaagccaagcctttcctcccgactgcagagtgggatgaacttgcagatatgctttgtcaacgacagtggcagtgataaggacagtgatgctgatga

SEQ ID NO: 25023 - DNA, 460 bp, Homo sapiens
ggctagcaccatgagcttcagggactgggaggacacagtgcagcctctgctccaggagcaggagcagcatgtgccctttgacatccacacctatggggaccagctggtctcacggttcccccagctcaatgagtggtgtccctttgcggagctggtggctggccagccggccttcgaggtgtgtcgttccatgctggcctccctgcagctggccaatgactacacagtggagataacccagcagcccgggctggagatggccgtggacaccatgtccctgagactgctcacgcaccagcgagcgcacaagcgcttccagacctacgctgcccctccatggcccagccctgagtggggagcaccgaggcaagggtgggggaatgtgtactgaggagccgtgtgtctgctcctggctggcccggcctaataaagcagtggtgcatctcaaaaaaaaaaaaaa

SEQ ID NO: 25024 - DNA, 485 bp, Homo sapiens
tttgacatgattacgaatttaatacgactcactatagggaatttggccctcgaggccaagaattcggcacgaggcatttgcttgtctgtaaaggattttatttctccttcacttatgaagctaagtttggctggatatgaaattctggattgaaaattcttttctttaagaatgttgaatatcggcccccactctcttctggcttgtagagtttctgccaagagatccgctgttagtctgatgggcttccctttgtgggtaacccgacctttctctctggctgcccttaaaaatgttattttcaaaatgttcaaaagtttatttaatttttagcctttcaattttgtgaacaaagaggctgttcttgaagtttaggctctgtgttggcttgatgaaaggatatcactattttaaaagggctgaaagtttgcctgtacatactggtgagaatttctgcatgaaacacaagaatgtaaaataactat

SEQ ID NO: 25025 - DNA, 427 bp, Homo sapiens
  misc_feature (1)...(427): n = a,t,c or g
ntttggnnacagctatgacatgattacgaatttaatacgactcactatagggaatttggccctcgaggccaagaattcggcacgagggaagggcctgaggattacagtgaaactgaccattcagaacagacaggcccagattgaggtggtgccttctgcctctgccctgatcatcaaagccctcaaggaaccaccaagagacagaaagaaacagaaaaacattaaacacagtgggaatatcacttttgatgagattgtcaacattgctcgacagatgcggcaccgatccttagccagagaactctctggaaccattaaagagatcctggggactgcccagtcagtgggctgtaatgttgatggccgccatcctcatgacatcatcgatgacatcaacagtggtgctgtggaatgcccagccagttaa

SEQ ID NO: 25026 - DNA, 347 bp, Homo sapiens
ggattgactgattgacaggctagacaacacagtagtacctgcagcgaggtaagtcactgcaacctcaaactccagggcaccagcaatcttccaccttagccttctgagtagctgtactacaggcacgcactaccaagcccagatacttttttttgctttgagtagaaacagggcctcactatgttgccgaggctggtctcaaactcttgggctcaggctcaagcaatcctcccacctcagcctcccaaagtcctgggattacaggcatgcactatcatccctggcctcttgttttaatttatgttcttatgcttactaatgagttgaaatatcttttgttaagttta

SEQ ID NO: 25027 - DNA, 366 bp, Homo sapiens
gcggtgcagactgaagacgccctccgtcagcgacgccgtcgcaatggccatttgtcaattcttccttcaaggccggtgccgctttggagatcggtgctggaacgaacatcccggtgctaggggtgcaggaggaggacggcagcaaccgcagcagcagccttcaggtaataatagacgtggatggaatacaactagccagagatattccaatgtcatccagccatccagtttctccaaatccacaccatgggggggcagcagagatcaagaaaagccatatttcagttcttttgattctggagcttcaactaacaggaaggaaggctttggattgtctgagaacccatttgcttcacttagtcctga

SEQ ID NO: 25028 - DNA, 346 bp, Homo sapiens
gctccatctcaaaaaaaagaaaaagaaaaagaaaatcctaccaactccatacccgaggaacccttgaattgaatgattttaggaattccatttctcctaccagatgtttgtttgttttggaaactctgcatacttctcttttgttgctccttacttcattttggaaagagggtaatttatgccatgagaaactccagatgtttagagctgggaagtaggaatgtttgggcaagaaaaaagggaaaacataaataatcagaaatatgcttgttttagcatctaaaatgattattggatactgttcataatcatcatgggagctacaatttttaattgcttcaactca

SEQ ID NO: 25029 - DNA, 308 bp, Homo sapiens
tttggctcataactggaggaaggcaccacttttggttcttgccaaatctgactgctgatgtgggcttcattgactccttcaggcctctgtacacacatgaatacaaaggaccaaaagcagacttaaagaaagatgagaagtctgaaaccaaaaagcaacagaagtccgacagtgaggaaaagtcagacagtgagaaaaaggaagatgaggaggggaaagtaggaccaggaaatcatggaacagaaggctcggggggagaacggcattcagacacggacagtgacaggagggaagatgatcgatcccag

SEQ ID NO: 25030 - DNA, 707 bp, Homo sapiens
accgctatgacatgattacgaatttaatacgactcactatagggaatttggccctcgaggccaagaattcggcacgagtcggaggaggccaaggtgcaacttccttcggtcgtcccgaatccgggttcatccgacaccagccgcctccaccatgccgccgaagttcgaccccaacgagatcaaagtcgtatacctgaggtgcaccggaggtgaagtcggtgccacttctgccctggcccccaagatcggccccctgggtctgtctccaaaaaaagttggtgatgacattgccaaggcaacgggtgactggaagggcctgaggattacagtgaaactgaccattcagaacagacaggcccagattgaggtggtgccttctgcctctgccctgatcatcaaagccctcaaggaaccaccaagagacagaaagaaacagaaaaacattaaacacagtgggaatatcacttttgatgagattgtcaacattgctcgacagatgcggcaccgatccttagccagagaactctctggaaccattaaagagatcctggggactgcccagtcagtgggctgtaatgttgatggccgccatcctcatgacatcatcgatgacatcaacagtggtgctgtggaatgcccagccagttaagcacaaaggaaaacatttcaataaaggatcatttgacaactgagaaaaaaaaaaaaaa

SEQ ID NO: 25031 - DNA, 408 bp, Homo sapiens
gggtcgatatgactcttgagttggttataatctataggcttctcttcctcacctcatttaggtgaggaagcaggatttgggttttgtatgttcctctgttagccttttcctggaatttggaagttctgtctagagccatgctgtgcagtgtggaagccactggccacatgtggcaattaacatttaagctaattaaaatgaaaaattcagcttatctgtcacattacaagtgattaatagccacaaatggctaatgactaccaattggattgtgcagataagaaaatttgtattgtcacagaaaattcccttggacagtactaacctagaggcttgatccaatttggtctttccaaggagctctggttccttttagtaggaaatggtgttagagacacaattcgaggc

SEQ ID NO: 25032 - DNA, 467 bp, Homo sapiens
cgaggccaagaattcggcacgagggaaaacagtggtgctgactcgtgtctgaggccttcaccgctgcctggccaaccaccctactttgttctccatcagcccacagggctgatcagacagacaggagaggccacgttggcgtctgtaggaaacaaggaggccgccctgcctgatgttggcgtctgtaggaagcaaggaggccgccctgcctgagaactggagcccacccatgcatgtgggtgttgtgggctgatggcctggcctgggtcccaaaggcagacctgagagctaatctggctgctttcttttctccctaaaatactcctgtgagtgtttgctttccctcagtcttcccacagcatgtgaaccaatgctgcagggagtcaggggttggttctctcttaatcacatttgcttacctacagaacaagccctacattgtcagcaggggcacgttcccatccgga

SEQ ID NO: 25033 - DNA, 379 bp, Homo sapiens
ggttgtttttcatttcatctatctcaattcttataatcatgttatagaatgtaaatgttttcttctctctcctgctcttgttggaagatcctgccttgatttagaatactaggccatatgtcatataaatattttttctggatatggagtatgttttgctatgtaataatgggaagcatatgtcattccccatatgtgttggagaatgacatttaaataaatagcaaagctgggtgtggtgttgcaccgctatactcccagctgttggggaggctgagacagaaggatcgcttcggcccgggagattgaggctgcggtgagctatgatcacaccactgcactccaggctgggcagcagagtgagaccctgtcttgaaaa

SEQ ID NO: 25034 - DNA, 431 bp, Homo sapiens
gaatttaatacgactcactatagggaatttggccctcgaggccaagaattcccgactacgtagtcggctcaaccacctaggcaatgaagaatataccatttcaaatatttacagtacttgtcttcaccaacactgtcccaaggtgaaatgaagcaacagagaggaaattgtacataagcacctcagcatttaatccaaacaggggttcttagtctcagcactatgacattttgggctgactacttatttgttaggcgggagctctcctgtgcattgtaggataattagcagtatccctggtggctacccaatagacgccagtagcaccccgaatttacaacccaaactctccacacatcaccaactgtcccctgcgaggagaaatcactcctgggggagaaccactgacccaaatgaattctaaaccaatc

SEQ ID NO: 25035 - DNA, 501 bp, Homo sapiens
ggggtcgaatgtgaagatccctttgacttgagactagtaggaggagacaacctctgctctgggcgactggaggtgctgcacaagggcgtatggggctctgtctgtgatgacaactggggagaaaaggaggaccaggtggtatgcaagcaactgggctgtgggaagtccctctctccctccttcagagaccggaaatgctatggccctggggttggccgcatctggctggataatgttcgttgctcaggggaggagcagtccctggagcagtgccagcacagattttgggggtttcacgactgcacccaccaggaagatgtggctgtcatctgctcaggatagtatcctggtgttgcttgacctggcccccctggccccgcctgccctctgcttgttctcctgagccctgattatcctcatactcattctggggctcaggcttgagccactactccctcatcccctcaggagtctgaacactgggcttatgccttactctca

SEQ ID NO: 25036 - DNA, 472 bp, Homo sapiens
  misc_feature (1)...(472): n = a,t,c or g
gtgaaatggtgggtccttggaaacctcctttccgttcagctctgcctctgttctttcaactcctttgaggctcaaaaaaaacacaaagatcagaagccttcagatagagggtggtattctggtaaagaagaaagagataagggacgctaccttgcttttctggcacaggaagcacatgataaagcatgctcagaggagctggaacagatatagctacctggttcgtgtaaataagaataatcaaggccccagagtgtgtatgcttccaggtggaggagaaaggggaatctcccaaaatttaaaaacaaattggaagaataaccaggacagccaagtgaagcagccacagggacccaagcagtcgaggtctttaatgtgcctggagatgactctctgctattcatgaatcttgctattgccaaaccctatcaagagctgntgcttccttccagccnnaaaagtggtagcggag

SEQ ID NO: 25037 - DNA, 895 bp, Homo sapiens
tttggaaacactttgacatgattacgaatttaatacgactcactatagggaatttggccctcgaggccaagaattcggcacgaggaacgcgggtccacgcgtgtgatcgtccgtgcgtctagcctttgcccacgcagctttcagtcatggcctccggtaacgcgcgcatcggaaagccagcccctgacttcaaggccacagcggtggttgatggcgccttcaaagaggtgaagctgtcggactacaaagggaagtacgtggtcctctttttctaccctctggacttcacttttgtgtgccccaccgagatcatcgcgttcagcaaccgtgcagaggacttccgcaagctgggctgtgaagtgctgggcgtctcggtggactctcagttcacccacctggcttggatcaacaccccccggaaagagggaggcttgggccccctgaacatccccctgcttgctgacgtgaccagacgcttgtctgaggacctctttatcatcgatggcaagggtgtccttcggcagatcactgttaatgacctccctgtgggacgctccgtggatgaggctctgcggctggtccaggccttccagtacacagacgagcatggggaagtttgtcccgctggctggaagcctggcagtgacacgattaagcccaacgtggatgacagcaaggaatatttctccaaacacaattaggctggctaacggatagtgagcttgtgcccctgcctaggtgcctgtgctgggtgtccacctgtgcccccacctgggtgccctatgctgacccaggaaaggccagacctgcccctccaaactccacagtatgggaccctggagggctaggccaaggccttctcatgcctccacctagaagctgaatagtgacgccc

SEQ ID NO: 25038 - DNA, 979 bp, Homo sapiens
gccacaatcagccactgcgggcgaggagggcacgaggccaggttcccaagagctcaggaacatggagctgatccaggacacctcccgcccgccactggagtacgtgaagggggtcccgctcatcaagtactttgcagaggcactggggcccctgcagagcttccaggcccggcctgatgacctgctcatcaacacctaccccaagtctggcaccacctgggtgagccagatactggacatgatctaccagggcggcgacctagagaagtgtaaccgggctcccatctacgtacgggtgcccttccttgaggtcaatgatccaggggaaccctcagggctggagactctgaaagacacaccgcccccacggctcatcaagtcacacctgcccctggctctgctccctcagactctgttggatcagaaggtcaaggtggtctatgttgcccgaaacccaaaggacgtggcggtctcctactaccatttccaccgtatggaaaaggcgcaccctgagcctgggacctgggacagcttcctggaaaagttcatggctggagaagtgtcctacgggtcctggtaccagcacgtgcaggagtggtgggagctgagccgcacccaccctgttctctacctcttctatgaagacatgaaggagaaccccaaaagggagattcaaaagatcctggagtttgtggggcgctccctgccagaggagaccatggacttcatggttcagcacacgtcgttcaaggagatgaagaagaaccctatgaccaactacaccaccgtcccccaggagctcatggaccacagcatctcccccttcatgaggaaaggcatggctggggactggaagaccaccttcaccgtggcgcagaatgagcgcttcgatgcggactatgcggagaagatggcaggctgcaacctcagcttccgctctgagctgtgaaaagggctcctggatcactgcaaagggagt

SEQ ID NO: 25039 - DNA, 305 bp, Homo sapiens
  misc_feature (1)...(305): n = a,t,c or g
ctttttctgtgcttgaaaattatccaatagaggaaaatgatgattaaaataaagatgatcgtaccaagtaaagtgccaactataagagcatcatgtgaaccagcaccaacaggaagttcacagcgaggggcagggctgctccaaaccccattcccatgaggttcacttgtgcggcggatggtgctctccccaatgaggttgaaggtcatccctctgtctgggtgggggtcacatgtgtaagatacttcttttccatagggaatatctccaaggggattcctggggggctnccattaaggatagct

SEQ ID NO: 25040 - DNA, 437 bp, Homo sapiens
gccagtgtcactgccataagtaaaaataaatgcagtgaacagcaaccaatgtgaataaaatcccgctaaacgccaatgcccacaccctcttcattaaaagggaagatgagcaggtgttgaggaaatgctaaaatcggaaggcctcaagtggagactcgctgcaagaacaactgaaaggccttcaagggaatttcaaaaaggagtagctttcacagtgtgtgattcagcattatttaatgctatggcctgctactgtctgaaatcattttccatttaacctgcaataataatctcatgtgcaagagagagaagtcgctcagtgggagctggaggaagacagagactgcgagtatcagcaaagtagcaggaagtgagaagggaagaacccgacctctgccttccaccttttcacagccttccgttggctgacctaacaa

SEQ ID NO: 25041 - DNA, 400 bp, Homo sapiens
cttccatttcagtgaaggaaagggatccaattaacacctgctagcagcttggctaagaacggacattaaaatcagacaaaacactgaaaatataaagtacttttctccaaatgtgtatacaaagttttggaacaaaatcactgcctgctccacaggacagacaatttgaatttcaaaaatgctccaggccaggaattgcataaccctgtgtaacaatacttataatacagcttaacaatattgtatcgaagactttttcatttgagatttttaaaaaactgaagtaaaagaaaaacagtagccaaggaactgcacaaccaaaaaatgaaaattatataaaatatttccaccactatttaaatgccaaatttaatcaagcaatagtaaaaaaacaaaacaa

SEQ ID NO: 25042 - DNA, 382 bp, Homo sapiens
ggccatcatgtaacccagaaaatcctaagagttttaatactgtagatacctttgagatctggcttgtttgtttgtgttggttttgttttgataccctttttttaaacctttaaatgagtaataagatgttgcagtgtgtacggtgtatttagaaaacaaaggtaaatgagttaaactttgcattcatatcaacttgagatcctttttgaaatgccttcattaaattccttcttatgtgagatgtaagattgactttttaagctagtttaatctgtagttcctgaaagtacatttcatttagcattgtagtgttcagtcttaagttctctctttgtattttatatgactagatggaatatttatttgatgcatttaattttat

SEQ ID NO: 25043 - DNA, 397 bp, Homo sapiens
  misc_feature (1)...(397): n = a,t,c or g
gggaaataatcttcatggggctggcccgtgaaaggcatggccccagcttctccctttcacctcagaattgtcttcggatggtagccactcagcccattcctaaaggccatgagattttcaacacttatgggcaaatggctaactggcaactgattcatatgtacggttttgttgaaccatatcctgacaacacagatgacacagctgacattcagatggtgacagttcgtgaggcagcattacagggaacaaaaactgaagctgaaaggcacctagtgtacgagcgctgggatttcctatgcaaactggagatggtaggggaagagggagcctttgtgatagggaggnnaaagnctgactgaanaggagctgaccaccacactaaaggtactgtgct

SEQ ID NO: 25044 - DNA, 415 bp, Homo sapiens
gggagtgtgaaccctattgtgaactgcgcatgcgagggatctaggttgcgtattccttatgagaatctattgcctgatgatatgaagtggaacagtttcatcccgaaacacctccctcaaccccagtccatggaaaaattctcttccatgaaaccactccttggtgccaaaagcgttgactgctgcgctagagaacagcaccaaactttggcatatacatttgcaccacgtcttggtacacaaaatctgatgttttacctggagcctttgataatgacattttaaagaaataccattatttaatctaaatcatcactagaataaaaaattgagaattgcttcatgttgactaggcaatacttttctgaaagatttcctggtatttgaagcactcatgaccaagggtaaaccccaa

SEQ ID NO: 25045 - DNA, 450 bp, Homo sapiens
atgacatgattacgaatttaatacgactcactatagggaatttggccctcgaggccaagaattcggcacgagagctagcacctgagcttcaataccctggatgtgtgagtttctcttttctttttaatcatcttcagcaggaagctgtaccactaatctgactggcacacatctctgcagtgattgccttcacattaatatccgttttctaacatgtttctgcccatgcagtataattaaatattttgcatttcttcaacatgcagattagtgtacatggaaggagaaaatcaaatgttagaagatgtagtttgtggccagacactatggctgatgcctgtaatcccagcactttgggaggctggcaggttgagatggaagaatcacttgagcccaggagttcaagaccagcctgggcaacatagggagaccccaatctctacaaaaaaa

SEQ ID NO: 25046 - DNA, 624 bp, Homo sapiens
gcagtgtgactcatccacaatgatttctccagtgctcatcttgttctcgatgatttaccattttccacagtggtcccgttaaaaacattctatgagccaggagaagagattacgtattcctgcaagccgggctatgtgtcccgaggagggatgagaaagtttatctgccctctcacaggactgtggcccatcaacactctgaaatgtacacccagagtatgtccttttgctggaatcttagaaaatggagccgtacgctatacgacttttgaatatcccaacacgatcagtttttcttgtaacactgggttttatctgaatggcgctgattctgccaagtgcactgaggaaggaaaatggagcccggagcttcctgtctgtgctcccatcatctgccctccaccatccatacctacgtttgcaacacttcgggtttataagccatcagctggaaacaattccctctatcgggacacagcagtttttgaatgtttgccacaacatgcgatgtttggaaatgatacaattacctgcacgacacatggaaattggactaaattaccagaatgcaggggtaagtgcaatgatcagacaaaatacgtatggtagggcaagatcccattt

SEQ ID NO: 25047 - DNA, 369 bp, Homo sapiens
atgaggatgcctgtcctgtgggaacccgtcagtgcggccccatggggctccagttccatcttgcccatttcctgggcttatatcaagatgatgggaggcaagggtcttaaacaagccacggaaactgcgatattaaatgccaactacatggccaagcgattagaaacacactacagaattcttttcaggggtgcaagaggttatgtgggtcatgaatttattttggacacgagacccttcaaaaagtctgcaaatattgaggctgtggatgtggccaagagactccaggattatggatttcacgcccctaccatgtcctggcctgtggcagggaccctcatggtggagcccactgagtcggaggacaag

SEQ ID NO: 25048 - DNA, 404 bp, Homo sapiens
caacaacatgtcggaagaggatgaggacttcaagggtcagccaggcatctgtggcctcaccaatctgggcaacacgtgcttcatgaactcggccctgcagtgcctcagcaatgtgccacagctcaccgagtacttcctcaacaactgctacctggaggagcctaactttccgcaacccactgggcatgaagggtgagatcgcagaggcctatgcagacctggtgaagcaggcgtggtctggccaccaccgctccattgtgccacatgtgttcaagaacaaggttggccattttgcatcccaatttctgggctaccagcagcatgactctcaggagctgctgtcattcctcctggacgggctgcatgaggaccttaatcgggtgaagaagaaggagtatgtggag

SEQ ID NO: 25049 - DNA, 626 bp, Homo sapiens
gaatgagtgtgatgacttgaacgggcctgctgtgctctgtgtccatggttactgcgagaacacagagggctcctaccgctgccactgctccccgggatatgtggctgaggcagggcccccccactgcactgccaaggagtagcagtcaggggtcagtgtggcaactacctggaaatggcctccagtcacaggcaggggccttgaggatgatttcctagctgggaagacaccgtgacatcaggccagaggtttccaatcagccttgcctgctttcatctctcccagcttagcctctggctgtaagcttcggtcattgcctccatgcccttgcttggctcaagcaccaccaatcgctttaatgcttcagccaccgcatgaggccctgtccaccacctttcctggccttgctatgggatgcttaccaaaggatggccctcatccaccctcccaagctgtgcgagcatgcaaggccccatggcctcacactgcagacacccctttccagccacaatccaccatcatcctgacgatcccacaactgggacagaggctacatctgccctagggaggtccttcagaatctgtggagcaagaaaggatttggggaagcttggggactgactcca

SEQ ID NO: 25050 - DNA, 327 bp, Homo sapiens
gcggtaattccagctccaatagcgtatattaaagttgcaacggcctggccggctacttcaaaggcatccaggcgcgtgtcatctaccagatgccctccaccgccatttcttggtctgtctatgagttcttcaagtactttctcaccaagcgccagctggaaaatcgagctccatactaaaggaagggatcatagaatcttttcttaaagtcattctctgcctgcatccagccccttgccctctcctcacacgtagatcattttttttttgcagggtgctgcctatgggccctctgctccccaatgccttagagagaggaggggacgg

SEQ ID NO: 25051 - DNA, 449 bp, Homo sapiens
  misc_feature (1)...(449): n = a,t,c or g
gnnttnaacngctatgacatgattacgaatttaatacgactcactatagggaatttggccctcgaggccaagaattcggcacgagagccaacatgccagtggcccggagctgggtttgtcgcaaaacttatgtgaccccgcggagacccttcgagaaatctcgtctcgaccaagagctgaagctgatcggcgagtatgggctccggaacaaacgtgaggtctggagggtcaaatttaccctggccaagatccgcaaggccgcccgggaactgctgacgcttgatgagaaggacccacggcgtctgttcgaaggcaacgccctgctgcggcggctggtccgcattggggtgctggatgagggcaagatgaagctggattacatcctgggcctgaagatagaggatttcttagagagacgcctgcagacccaggtcttcaagctgggcttg

SEQ ID NO: 25052 - DNA, 428 bp, Homo sapiens
cccacgcgtccgccacgcactgcgcttacactgggttgagttccagaataaattctacagcgggaccggtttcaagttcttacccttctccttcgagcatattcgggaagggaagtttgaagagtgagtccctgtgagggccgtgtgccccatgctaccctccccgcctccctccacagtgatcagctgtgcctctctgcctgttggttgtgatctgtgggcaccagctcattcgtgtcaccctgtctgtgagtcatttagatagaatagtcctccttgggtctcccaccacccctagctttgtgtgtagtgtagtgattttctggctgtcactcatactcactgggcaccagccttgccctcttagcctccatccatccagacagcccttcccacctcctggtggtgagccagtctgcattcccacg

SEQ ID NO: 25053 - DNA, 354 bp, Homo sapiens
gctggaacagctggaaaaggccatcacctatgagaagctgaatgagtggaccagtgcagacatgatggagttgtatgaagtgcagctacaccttcccaagttcaagctggaagacagttatgatctcaagtcaaccctgagcagtatggggatgagtgatgccttcagccaaagcaaagctgatttctcaggaatgtcttcagcaagaaacctatttttgtccaatgttttccataaggcttttgtggaaataaatgaacaaggtactgaagctgcagctggcagtgggagtgagatagatatacgaattagagtcccatccattgaattcaatgcaaatcacccattcctctt

SEQ ID NO: 25054 - DNA, 364 bp, Homo sapiens
tgtttttcttggccttgatgaccttgatgaagctgtgacttccacacaccagtttcagcttgcggtcaactgttctcagttgaaggcagaagagtcgaagtttatctcctttctcacacttgatattgtgccattttccactccccactacatccatggatcctgtattatcctgtatttcataaattgtgttcttcttgtgtacgcttttcttttgtaacataaacaacccatacaccattgttccagatgcttgcttgtaaagttgactgatcttgggagttttatttgctatttcgataattctgtttgggacctcaaaattttgattaaagtcagacacagatgatgcttcctttatttc

SEQ ID NO: 25055 - DNA, 526 bp, Homo sapiens
  misc_feature (1)...(526): n = a,t,c or g
gccctgtccaataccatagccactaatcacatgtggctactcagtattaatgttgcactactgccaatgaaacatagaattttaagttgtatttacttttaattgaacagctgaggccaggtgtggtggcccatgcctgtaataccagcactttgggaggccgaggtgggcggatcacctgaggtcagcagttcaagaccagcatgcccaacatggtgaaaccccgtctctgagaaaaataccaaaattagccaggcatggtggcatacacctgtagtcccagctactcaggaggatgatgcaagagaatcagttgaacctgggaggcagaggttgcagtgagctgaggtcatgccactgcactccaacctgggtgacaaaatgagactctgtctcaaaacaaaacaaaacaanccaacaactttgtcaacattancaaacctgatncntnnnttaggnaaaattggcccccacccannttttgggaaacntttanaattgggaaaacttggggangngaacccct

SEQ ID NO: 25056 - DNA, 396 bp, Homo sapiens
tttgcttaggcgcagacggggaagcggagccaacatgccagtggcccggagctgggtttgtcgcaaaacttatgtgaccccgcggagacccttcgagaaatctcgtctcgaccaagagtatgggctccggaacaaacgtgaggtctggagggtcaaatttaccctggccaagatccgcaaggccgcccgggaactgctgacgcttgatgagaaggacccacggcgtctgttcgaaggcaacgccctgctgcggcggctggtccgcattggggtgctggatgagggcaagatgaagctggattacatcctgggcctgaagatagaggatttcttagagagacgcctgcagacccaggtcttcaagctgggcttggctaagtccatccaccacgctcg

SEQ ID NO: 25057 - DNA, 530 bp, Homo sapiens
  misc_feature (1)...(530): n = a,t,c or g
gagagtgaagcgtgacaagtactcagtcttcaactttctgacgctcccagagacagcttccttgcccaccactcaagcatcaagtgaaaaagtatcacagcaccgaggtcccgacaaatcaagaaaaccatccagatgggatacctctaaacacgaaaagaaagaagattccattagtgaatttttaagtttggctagatcaaaagccgagccacctaaacaacagtccagccccttagtaaacaaagaggaagagcgtgcaccagaatcatccgcaaatcagacagtcaacaaagatgtggacgcacaggctgaaggagaagggagccgcccatccatggacttattcagggccatctttgccagttcctcagatgaaaagtcctcatcctccgaggatgagcaaggtgacagtgaagatgatcaggcaggctctggggaaggcaacttccaaagctcccaagacactgacttgggggaaaaatcactgnggtcaaggtcctgtgcaangacccaagggccggcacctt

SEQ ID NO: 25058 - DNA, 555 bp, Homo sapiens
gagagctgctaagagcgctgggtcctgcttgttgctcagctccagctcactggctggccaccgagacttctggacaggaaactggcgccatcctcttctcccagcaagggggctccagagactgcacccaggaagtctggtggcctggggatttggacagtgccttggtaatgaccagggctccaggaagagatgtccttgtggctgggggcccctgtgcctgacattcctcctgactctgcggtggagctgtggaagccaggcgcacaggatgcaagcagccaggcccagggaggcagcagctgcatcctcagagaggaagccaggatgccccactctgctgggggtactgcaggggtggggctggaggctgcagagcccacagccctgctcaccagggcagagcccccttcagaacccacagagatccgtccacaaaagcggaaaaaggggccagcccccaaaatgctggggaacgagctatgcatcgtgtgtggggacaaggcctcgggcttcactacaatgttctgagctgcgagggctgcaagggattct

SEQ ID NO: 25059 - DNA, 479 bp, Homo sapiens
acccgctatgacatgattacgaatttaatacgactcactatagggaatttggccctcgaggccaagaattcggcacgagcggcacgagcggcacgagtttgagactgcatagggctcggcgtgggcagcatgaagagaaggcaggctttagcaaggctctattttatcttggctgtgtaacaaccctttctctgggggagctgaccttcactgcatccaaccttagggttctatagcagctgccagtcatgtttcttgtttccctggctcagaggacttcccagaggttttgcacatttttccagcctcatggaggaaggtctaagagaataaagctgacccagagagagaagcttagggcaaagtgggaggaagtgcctggatccctgattctagtaatttctggagcctggtgtacccagccctttccagagtttggtttgttacctaactaaattaagctgggtttctttcacttg

SEQ ID NO: 25060 - DNA, 719 bp, Homo sapiens
tcagctatgacatgattacgaatttaatacgactcactatagggaatttggccctcgaggccaagaattcggcacgagcggtttgttcggacagtgttaccattttctcaggaatttcaaagagataagcagcctaatgcacagcctcagtatctgcatggatccaaggctttgaacttggcctactccagcatttacggcagctaccggaacttcgtgggacctccacactttcaagtcatctgccggcttctcggctaccagggtatcgccgtggtcatggaggaactgctaaagattgtgaagagcttgctccaaggaaccattctccagtatgtgaaaacactgatagaggtgatgcccaagatatgccgcttgccccgacatgagtatggctccccagggatcctggagttcttccaccaccagctgaaggacatcattgagtacgcagagctcaaaacagacgtgttccagagcctgagggaagtgggcaatgccatcctcttctgcctcctcatagagcaagctctgtctcaggaggaggtctgcgatttgctccatgccgcacccttccaaaacatcttgcctagagtctacatcaaagagggggagcgcctggaggtccggatgaaacgtctggaagccaagtatgccccgctccacctggtccctctgatcgagcggctggggacccctcagcaaatcgccattgctcg

SEQ ID NO: 25061 - DNA, 372 bp, Homo sapiens
gcgagaaggagagggtaccctacactgatgacggcctagaagccatcatcttcacggcccagggagacatgaggcaggcgctgaacaacctgcagtccaccttctcaggatttggcttcattaacagtgagaacgtgttcaaggtctgtgacgagccccacccactgctggtaaaggagatgatccagcactgtgtgaatgccaacattgacgaagcctacaagattcttgctcacttgtggcatctgggctactcaccagaagatatcattggcaacatctttcgagtgtgtaaaactttccaaatggcagaatacctgaaactggagtttatcaaggaaattggatacactcacatgaaaatagcggaag

SEQ ID NO: 25062 - DNA, 404 bp, Homo sapiens
agcggctgccggaaagcggccggcacctcattcatttctaccggtctctagtagtgcagcttcggctggtgtcatcggtgtccttcctccgctgccgcccccgcaaggcttcggccgtcatcgaggccatttccagcgacttgtcgcacgcttttctatatacttcgttccccgccaaccgcaaccattgacgccatgtcgggttattcgagtgaccgagaccgcggccgggaccgagggtttggtgcacctcgatttggaggaagtagggcagggcccttatctggaaagaagtttggaaaccctggggagaaattagttaaaaagaagtggaatcttgatgagctgcctaaatttgagaagaatttttatcaagagcaccctgatttggctaggcgcacaag

SEQ ID NO: 25063 - DNA, 447 bp, Homo sapiens
gctatgacatgattacgaatttaatacgactcactatagggaatttggccctcgaggccaagaattcggcacgagtccggggtgacaatgaagaacaagaaaaattactgaagaaaagctgtacgttatatgttggaaatctttctttttacacaactgaagaacaaatctatgaactcttcagcaaaagtggtgacataaagaaaatcattatgggtctggataaaatgaagaaaacagcatgtggattctgttttgtggaatattactcacgcgcagatgcggaaaacgccatgcggtacataaatgggacgcgtctggatgaccgaatcattcgcacagactgggacgcaggctttaaggagggcaggcaatacggccgtgggcgatctgggggccaggttcgggatgagtatcggcaggactacgatgctgggagaggaggct

SEQ ID NO: 25064 - DNA, 535 bp, Homo sapiens
  misc_feature (1)...(535): n = a,t,c or g
tttaatacgactcactatagggaatttggccctcgaggccaagaattcggcacgaggggtggtttgcttaggcgcagacggggaagcggagccaacatgccagtggcccggagctgggtttgtcgcaaaacttatgtgaccccgcggagacccttcgagaaatctcgtctcgaccaagagctgaagctgatcggcgagtatgggctccggaacaaacgtgaggtctggagggtcaaatttaccctggccaagatccgcaaggccgcccgggaactgctgacgcttgatgagaaggacccacggcgtctgttcgaaggcaacgccctgctgcggcggctggtccgcattggggtgctggatgagggcaagatgaagctggattacatcctgggcctgaagatagaggatttcttagagagacgcctgcagacccaggtcttcaagctgggcttggccaagtccatccaccacgctcgcgtgctgatccgccagcgccatatcagggtccgcaagcangtgggtgaacatcccctcc

SEQ ID NO: 25065 - DNA, 408 bp, Homo sapiens
  misc_feature (1)...(408): n = a,t,c or g
gatgtatgagtccattttcataatgctgataaagatatacctgacactgggtaatttataaagaaaaagaggtttaatggactcacagttccatgtggctggggaggcctcacaatcaaggtggaaggtgaaaggtacatcttacatggcagcagacaaaagaaaataagagccaagcaaaagaggtttccccttataaaaccatcagatctcatgagacttagtcactaccacgagaacagtatgggggaaaccacccccatgattcagttatttttcaccaggtccctcccacaacacatgggaatgatgggagctacaattcaagatgagatttgggtggggacacagccaaaccatatcaccgcatttttattactcanaaaatgcaaaacatggttcagttat

SEQ ID NO: 25066 - DNA, 390 bp, Homo sapiens
ggaaaaaaaaacaaaaatctgatatttatttcaaaacgtattgaagcaacaaaatattaatattgtgccatatgacaacaaagtctttcctaaatactccatctgtttagtactgtattgtggaatatttgagttctatttccatacttgaaaacatggaggattttagagatgcctgaacaatattatttaagtagtatgtgaccgagctataaatttttgtttttgttctaagtagatttaatttgggaactgacaggacaatgtttttaggtttagcattttgtttaaaaacctttaaagaaacctttagaaggacttagacctcacatattaatgttgagaagttctgcttaattttaaaatggtttctataaagggttttattgt

SEQ ID NO: 25067 - DNA, 614 bp, Homo sapiens
  misc_feature (1)...(614): n = a,t,c or g
ggctgtttgtaatttggcttccctggccctgaatatgtatgtcacatcagaacacacatacgactttaagaagttggctgaagtcactaaagtcgttgtccgaaacttgaataaaattattgatataaactactatcctgtaccagaggcatgcctatcaaataaacgccatcgccccattggaattggggtacaaggtctggcagatgcttttatcctgatgagatacccttttgagagtgcagaagcccagttactgaataagcagatctttgaaactatttattatggtgctctggaagccagctgtgaccttgccaaggagcaaggcccatacgaaacctatgagggctctccagttaacaaagggaattcctcagttatgatatgttggatggttactcctacagacctaaggggactgggaaggttccaaggagaaagattgcaaagtatggtataaagaaacagtttacttattgccccgatcctaaangcttcaactgctcaaatcccggggaaaaaatgnntccattgaacctnacncagcaacatctatacccccaaatcctgtcnagganaatttanattgtaaanccccctnttgnaaagac

SEQ ID NO: 25068 - DNA, 493 bp, Homo sapiens
ttgaataccgttatgactgattacgaatttaatacgactcctatagggaatttggccctcgaggccaagaattcggcacgaggtatttcctgtaaattggtgattgaatctagaggtgtgcttagcatataatatatatgcacatggtaaaatttaaaacagttcaaaagtctgtgtaatgaaatgtcggtcattttcccacacagtattttaggtatcttccccagaaggaattattctgtctagaatgaatgatgtgtttttattaagccttatatcccaatgagcatactaaatgttcttgtaattctgaatatactaaggttattcttttgtgaattttagaatttgatttaaatactacaaaagcacatggtgccagtcactaaggtgtggtgttttctttttggtaaaggagaatttgtaaggtgaaatgacagtgaattagaagttgtaaaccaaattccttgttactacagtggactacttttca

SEQ ID NO: 25069 - DNA, 342 bp, Homo sapiens
ggaattattgataataacaaatagtgtaaaaagagtggaaaatctaaaccttttctttttccataatgtctaaatctgttatattcttcctggggaaaagagattaaggcccaaaagactcatttatgaatagaaatgtggggtcaaaatctgagatactatatttgaggacatttcagctttccataaggtatctggaaaccagctgtctttgtgtcttatgaaacctcaagtcaaaatgagaccgcatttaattattctgctttgctctttttttggggtgggggggaagaaagagtttcactctgtcacccaggctggagtgcagtggcacaatctttg

SEQ ID NO: 25070 - DNA, 405 bp, Homo sapiens
ggagtaagacaggccgggcaaggtggctcatgcctgtaatctcagcactttgggaggctgaggtgggtggatcacttgaggtcaggagttcaagaccagcctggccaacatggcaaaaccccgtctctactaaaaatacaaaaattagctgggtgtagtggcgggtgcctgtaatcccagctactcaggaggctgaggcaggagaatcgcttgaacccaggaggcggaggttgcatgagctgagattgtgccactgtcctccagcctgggcaacagagtgagactccatctcaaaaaaaagtaagacagcttaggtttgcctgctgtctgctgctttttgtgtggccctgcacctgtcacttttgtgtgctttagcttccgcatctgtaaaataaggttagcccc

SEQ ID NO: 25071 - DNA, 354 bp, Homo sapiens
gtggttttgtagcctggatgtgtctgctagtagccgaatggtggtcacaggagacaacgtggggaacgtgatcctgctgaacatggacggcaaagagctttggaatctcagaatgcacaaaaagaaagtgacgcatgtggccctgaacccatgctgtgattggttcctggccacagcctccgtagatcaaacagtgaaaatttgggacctgcgccaggttagagggaaagccagcttcctctactcgctgccgcacaggcatcctgtcaacgcagcttgtttcagtcccgatggagcccggctcctgaccacggaccagaagagcgagatccgagtttactctgcttccagtgg

SEQ ID NO: 25072 - DNA, 436 bp, Homo sapiens
ggtttaaagttggaacagactattttttaggatcacctaaacgtgtcgttacatggccctttttccgtgggtgagtggggaaaattctgcccatctcaacttaacatacgctgtggtctggtgaacttttcctgccttattgcatcttgacagcttcctgacttccctttagggactaactcctaatgtagatagtccaggttctagaggagcaaatattgtctcccatctccagaaagtattattccaccaacatctgattctccttagactttgacagactttatccctctgcctcttttgctgcaactgagtcctgccttctagtctccttttgaattgaccagaccctgcagattcttctgatccttctctgagcatcaactgatggtgtagaatggggcagcctaaaaaggctctgtacctttggaaaagg

SEQ ID NO: 25073 - DNA, 455 bp, Homo sapiens
gggggatttgttcacatatgggctcagcaacgcacaagtgaggtcagccatggcactaggtcatttccattttagccaaggtgcctctataggggtcagacatcatgtgcccagacctaaggtcaggaatgtcatatttttctgttaaaatcattttatttctgtgtatcttacctttaaatcattgtggtttactctgagattctgtagtcctaatattgtatcattgtgctgtctgcaaaacaacttgaatctattttgtttgcatcttttgttacatgtaacgcagctgtactttatgttctttgcaactgtttccattatgagaacgctgtgctatttacaaggttacatttttcttggccaggcgaggtggtcatgcctgtaatcccagcactttgggaggccaaggtgggcggatcacttgaggtaaagagttgagaccagcctggcta

SEQ ID NO: 25074 - DNA, 339 bp, Homo sapiens
gaaggcactagctaagtgtgagaagtacatgctgacccaccaggaactagcctccgatggggagattgaaactaaactaattaagggtgatatttataaaacaaggggtggtggacaatctgttcagtttactgatattgagactttaaagcaagaatcaccaaatggtagtcgaaaacgaagatcttccacagtagcacctgcccaaccagatggtgcagagtctgaatggaccgatgtagaaacaaggtgttctgtggctgtggagatgagagcaggatcccagctgggacctggatatcagcatcacgcacaacccaagcgcaaaaagccatgaac

SEQ ID NO: 25075 - DNA, 1244 bp, Homo sapiens
aaccatccccattgacggagacttcttcagctacacacgccatgaacctgtgggggtgtgcgggcagatcattccgtggaatttcccgctcctgatgcaagcatggaagctgggcccagccttggcaactggaaacgtggttgtgatgaaggtagctgagcagacacccctcaccgccctctatgtggccaacctgatcaaggaggctggctttccccctggtgtggtcaacattgtgcctggatttggccccacggctggggccgccattgcctcccatgaggatgtggacaaagtggcattcacaggatcaacagaggttggcaagttgatcaaagaagctgccgggaaaagcaatctgaagagggtgaccctggagcttggaggaaagagcccttgcattgtgttagctgatgccgacttggacaatgctgttgaatttgcacaccatggggtattctaccaccagggccagtgttgtatagccgcatccaggatttttgtggaagaatcaatttatgatgagtttgttcgaaggagtgttgagcgggctaagaagtatatccttggaaatcctctgaccccaggagtcactcaaggccctcagattgacaaggaacaatatgataaaatacttgacctcattgagagtgggaagaaagaaggggccaaactggaatgtggaggaggcccgtgggggaataaaggctactttgtccagcccacagtgttctctaatgttacagatgagatgcgcattgccaaagaggagatttttggaccagtgcagcaaatcatgaagtttaaatctttagatgacgtgatcaaaagagcaaacaatactttctatggcttatcagcaggagtgtttaccaaagacattgataaagccataacaatctcctctgctctgcaggcaggaacagtgtgggtgaattgctatggcgtggtaagtgcccagtgcccctttggtggattcaagatgtctggaaatggaagagaactgggagagtacggtttccatgaatatacagaggtcaaaacagtcacagtgaaaatctctcagaagaactcataaagaaaatacaagagtggagagaagctcttcaatagctaagcatctccttacagtcactaatatagtagattttaaagacaaaatttttcttttcttgatttttttaaacataagctaaatcatattagtattaatactacccatagaaaacttgcatgtagcttct

SEQ ID NO: 25076 - DNA, 512 bp, Homo sapiens
  misc_feature (1)...(512): n = a,t,c or g
ggaagctattcaggcacagaaaatttggaagaaagccatcatgcttgtatggagagctgcagctaatcataggtatgccaatgtcttcctgcagcctgttacagatgacatagcacctggctaccacagcattgtgcagaggcctatggatttgtcaactattaagaaaaacatagaaaatggactgatccgaagcacagctgaatttcagcgtgacattatgctgatgtttcagaatgctgtaatgtacaatagctcagaccatgatgtctatcacatggcagtggagatgcagcgagatgtcttggaacagatccagcaattcttggccacgcagttgattatgcaaacatccgagtctgggatcagtgctaaaagtctcgagggagagattctacccgcaaacaggatgcttcagagaaggatggaggaaccaggggacncgctgtgccattgaagcagatngaagatgaaaagtgancccagagntacctctttgagccgaacctaaa

SEQ ID NO: 25077 - DNA, 331 bp, Homo sapiens
  misc_feature (1)...(331): n = a,t,c or g
gctgatccgaagcacagctgaatttcagcgtgacattatgctgatgtttcagaatgctgtaatgtacaatagctcagaccatgatgtctatcacatggcagtggagatgcagcgagatgtcttggaacagatccagcaattcttggccacgcagttgattatgcaaacatccgagtctgggatcagtgctaaaagtcttcgagggagagattctacccgcaaacaggatgcttcagagaaggacagtgtcccaatgggctctcctgccttccttctctctctctttgatggaggaaccaggggacgcnctgngccattgaagcanatatga

SEQ ID NO: 25078 - DNA, 442 bp, Homo sapiens
ggacaggcatctcaaatcggctgattctgcatctggaaactgccttcatcttgaaagaaaagctccaggtcccttctccagccacccagccccaagatggtgatgctgctgctgctgctttccgcactggctggcctcttcggtgcggcagagggacaagcatttcatcttgggaagtgccccaatcctccggtgcaggagaattttgacgtgaataagtatctcggaagatggtacgaaattgagaagatcccaacaacctttgagaatggacgctgcatccaggccaactactcactaatggaaaacggaaagatcaaagtgttaaaccaggagttgagagctgatggaactgtgaatcaaatcgaaggtgaagccaccccagttaacctcacagagcctgccaagctggaagttaaagttttcctgggttatgccatcg

SEQ ID NO: 25079 - DNA, 347 bp, Homo sapiens
ggcctcccctccactccttcccaaatctgtctccccagaagacacaggaaacaatgtattgtctgcccagcaatcaaaggcaatgctcaaacacccaagtggcccccaccctcagcccgctcctgcccgcccagcacccccaggccctgggggacctggggttctcagactgccaaagaagccttgccatctggcgctcccatggctcttgcaacatctccccttcgtttttgagggggtcatgccgggggagccaccagcccctcactgggttcggaggagagtcaggaagggccaagcacgacaaagcagaaacatcggatttggggaacgccgtgtcaatccct

SEQ ID NO: 25080 - DNA, 431 bp, Homo sapiens
  misc_feature (1)...(431): n = a,t,c or g
annaccntttgaacaccattacnaattncatacgactnactatagggaatttggccctcgaggccaagaattcggcacgaggaatggccccagcaccatccaagttgacacagctaaaggaataaaaacatttcttaccacttgatttgttttccaagcaagtgctagaatttgctggactgcagaggatcgctgagtggggtactgtgtctcatagacatgcgccacctccacgtgagaacaagggtgaaggtgagggaagcccctcaccttgggtcttttgctgtgcctcctatgtatgtctggtttgctggaagagtgattaatacatctttaatttattaaaaaacaatgtagacctttaaacttcagtcttattggtaataaaagggaacttaattcatacaggtacttgatacagttatacattt

SEQ ID NO: 25081 - DNA, 361 bp, Homo sapiens
gggactttcacaggaagtttgccccaagatgctcagtgtgcggtggggccataatgcctgagccaggtcaggaggagactgtgagaattgttgctctggatcgaagttttcacattggctgttacaagtgcgaggagtgtgggctgctgctctcctctgagggcgagtgtcagggctgctacccgctggatgggcacatcttgtgcaaggcctgcagcgcctggcgcatccaggagctctcagccaccgtcaccactgactgctgagtcttcctagaagtacctgctgggttctcagttccagttcccatcctttgattgatcactctccctgacatccacctgtatgactttgtcaccaa

SEQ ID NO: 25082 - DNA, 352 bp, Homo sapiens
ggggttagaatagagaatgtacagagtcagaacaaaagagatgaactagtgaagagcaagaggcaaacatcaacaattacctgatctgaaggtaacagcaggtaaaaattagcagtaatatagtgacataatcaaagcagtgaagtggaaaataaagtttagatctagcctttgaaacattttatgtgaaggataaatactaagaactaggaagagacaaggatgtaacctgaaaatttagagcagaggttctgcaacctccacctcctgggttcaagcaattctcgtgcctcagcctcttgagtagctgggattacaggcatgcaccaccacaccaggctaatttttgtat

SEQ ID NO: 25083 - DNA, 448 bp, Homo sapiens
gcatctctaacagtacaccaatttggcattttccttggtggaaatgtggcttaggctctggccaggggctgctagacctgtcacttgggcaaggcatcactttctgctgcagaggttgtatgggctgtgaagggaaacacctcaggcaggtacaaacaaactcaagtgagaggcctggggaggatggggcttttagtacttcagaggggcctggtccttgtggtgacagctaccctgagtccacttcaaaagcccctatgccctggggactcagagagttgacatcaatgcagcacttctgcccccgtcctccctgcccaaatccctccgttcaacagaggctctcggggcccctctcctcccaggttccccactccccaccaaggtactgggacccatggcaggaaaagaatgtttacttaaaggctgacagttcaaaaggagtggg

SEQ ID NO: 25084 - DNA, 685 bp, Homo sapiens
cctaagtgctgtaagtggtgaagacactcaggatcgtactgacagattacttttaactccatgggttaaattcctgtgggagtcttacaggcagtgtttggaccttcttagaaacaattctagagtagagcgcctgtaccatgatattgcccagcaagctttcaaattctgcctccaatacacgcgtaaggctgaattccgtaaactgtgtgacaatttgagaatgcacttatcgcagattcagcgccaccataaccaaagtacggcaatcaatcttaataatccagagagccagtccatgcatttggaaaccagacttgttcagctggacagtgctatcagcatggaattgtggcaggaagcattcaaagctgtggaagatattcacgggctattctccttgtctaaaaaaccacctaaacctcagttgatggcaaattactataacaaagtctcaactgtgttttggaaatctggaaatgctctttttcatgcatctacactccatcgtctttaccatctctctagagaaatgagaaagaatctcacacaagacgagatgcaaagaatgtctactagagtccttttagccactctttccatccctattactcctgagcgtacggatattgctcgacttctggatatggatggcattatagttgaaaaacagcgtcccttgcaa

SEQ ID NO: 25085 - DNA, 710 bp, Homo sapiens
gcaggatgaaggactcctttctgatgtggtacccttcaaagtaccaggaaaagatacagttaccaaagataatggcatccgtccttcctcactggagcagatggccaaactaaaacctgcattcatcaagccctacggcacagtgacagctgcaaattcttctttcttgactgatggtgcatctgcaatgttaatcatggcggaggaaaaggctctggccatgggttataagccgaaggcatatttgagggattttatgtatgtgtctcaggatccaaaagatcaactattacttggaccaacatatgctactccaaaagttctagaaaaggcaggattgaccatgaatgatattgatgcttttgaatttcatgaagctttctcgggtcagattttggcaaattttaaagccatggattctgattggtttgcagaaaactacatgggtagaaaaaccaaggttggattgcctcctttggagaagtttaataactggggtggatctctgtccctgggacacccatttggagccactggctgcaggttggtcatggctgctgccaacagattacggaaagaaggaggccagtatggcttagtggctgcgtgtgcagctggagggcagggccatgctatgatagtggaagcttatccaaaataatagatccagaagaagtgacctgaagtttctgtgcacactccactaggca

SEQ ID NO: 25086 - DNA, 499 bp, Homo sapiens
  misc_feature (1)...(499): n = a,t,c or g
gggactggatataacataattgttaaaacttgtctgggttcaaatcttggcttaaccatttgttagccatgtggtcttgggtaagctatttaacctctcagtgtccttgcctataacaggaataatactagtatccacctcatgttgtcatgacgaaataagaaaatattaaatagtagatactgttaaagtatactagttttattaactacaaatgattttttctttttattttagtttttattgttattttttgagacagagtcttgctgtgttgcccagactagtgtgcagtgtcatgatctcgtctcactgcagcctccacctcccagattcaagtgattcttgtgccttagcctcctgagtagttgggactacaggtgtgcgccaccacacccggctaagttttgtacttttagtaaagatggggtttgccatgttaggcaagctggtctggaacttctgacctcaaagtgattcaccaactcangctcctaaa

SEQ ID NO: 25087 - DNA, 393 bp, Homo sapiens
gcggcacgagataagttgtgtgctttttattaatcatgccaaacataatgtaactgggcagagaatggtcctaaccaaggtacctatgaaaagcgctagctatcatgtgtagtagatgcatcattttggctcttcttacatttgtaaaaatgtacagattaggtcatcttaattcatattagtgacacagaacagcacctccactatttgtatgttcaaataagctttcagactaatagcttttttggtgtctaaaatgtaagcaaaaaattcctgctgaaacattccagtcctttcatttaagtataaaagaaatactgaacaagccagtgggatggaattgaaagaactaatcatgaggactctgtcctgacacaggtcctcaaagctagc

SEQ ID NO: 25088 - DNA, 1283 bp, Homo sapiens
gaaactgattgcaggcattgacatcacttgttagaagagcaactctgaaagaaaacgagcaaattccaaaatatgaaaagattcacaatttcaaggtgcatacattcagagggccacactggtgtgaatactgtgccaactttatgtggggtctcattgctcagggagtgaaatgtgcagattgtggtttgaatgttcataagcagtgttccaagatggtcccaaatgactgtaagccagacttgaagcatgtcaaaaaggtgtacagctgtgaccttacgacgctcgtgaaagcacataccactaagcggccaatggtggtagacatgtgcatcagggagattgagtctagaggtcttaattctgaaggactataccgagtatcaggatttagtgacctaattgaagatgtcaagatggctttcgacagagatggtgagaaggcagatatttctgtgaacatgtatgaagatatcaacattatcactggtgcacttaaactgtacttcagggatttgccaattccactcattacatatgatgcctaccctaagtttatagaatctgccaaaattatggatccggatgagcaattggaaacccttcatgaagcactgaaactactgccacctgctcactgcgaaaccctccggtacctaatgatccacctcaaaaaggttactatgaatgaaaaagacaatttcatgaacgcagaaaatctggggatcgtgtttgggcccactctgatgaggccccctgaggacagcaccctgaccaccctgcatgatatgcggtaccaaaagctgattgtgcagattttaatagaaaacgaagacgttttattctaatccatcagggaaatgagctgaatggccccagcaccatccaagttgacacagctaaaggaataaaaacatttcttaccacttgatttgttttccaagcaagtgctagaatttgctggactgcagaggatcgctgagtggggtactgtgtctcatagacatgcgccacctccacgtgagaacaagggtgaaggtgagggaagcccctcaccttgggtcttttgctgtgcctcctatgtatgtatggtttgctggaagagtgattaatacatctttaatttattaaaaaacaatgtagacctttaaacttcagtcttattggcaataaaagggaacttaattcatacaggtacttgatacagttatacattttccacttacaaaaagaagacaattctgttaaatgaaacctgtatcgtaaaatgtatttttattttc

SEQ ID NO: 25089 - DNA, 420 bp, Homo sapiens
gggcagtaaactcattcttggcagctgccagcactggtctgattctttcttttaaaagcatgagattctttaataacacatattggaaagattgatgccaagtgattccaggtcatcctagaggaggcttgggaacattgttgaatagatttaaatgattcagttaagtgagtgatttaacccaaggtttgtgtctaatttaaacaggacctataaaatatagaacaattggtttgtttcttttttagaatattgaagattagattttaatttgagaattttactaatttgagggttttattttttgtttttaagcgttcaaaatgttgaattgtagatatgctgagttttataatgagcacaatgaaggtttttcaactggcccgttaaagccaacccactaatgaaatgaaaatatga

SEQ ID NO: 25090 - DNA, 446 bp, Homo sapiens
  misc_feature (1)...(446): n = a,t,c or g
ggtctgagcattaaatgggacaatctgggtaaaatttttattacaagtctagcacatggtaaatggtctgtgttagtgattagcagcatcaccatcaccttcatcattagtgttagaccatcaggacactcctggacttgggagttcaccattccactagacatcacagttccaatattgtgtgcctgtggcatgtgaagaggaagcagaaatgccacttcctagttggctgatctgtgagtttctgacanagaaatnagccttanagcttggaannggcgnnnttnttgnngcnntancatnnantgaccnttannatcccacgaatgctnnngncantaagnnnagccnncctgagagcatngnagnnagncattatanattgggaacatctgcnggatgnncctgtgnccgaggcncnanctggnaangcanccggngatttc

SEQ ID NO: 25091 - DNA, 447 bp, Homo sapiens
accttatgactgattacgaatttaatacgactcactatagggaatttggccctcgaggccaagaattcggcacgaggtctgagcattaaatgggacaatctgggtaaaatttttattacaagtctagcacatggtaaatggtctgtgttagtgattagcagcatcaccatcaccttcatcattagtgttagaccatcaggacactcctggacttgggagttcaccattccactagacatcacagttccaatattgtgtgcctgtggcatgtgaagaggaagcagaaatgccacttcctagttggctgatctgtgagtttctagccatgagctgagagagaaatcagccttagagttggaagtggtgaactttctgtagcgatagtagaagctgaccttgtcactcccaggaatgcacctgccactcaaatcaaacctccctgtgagg

SEQ ID NO: 25092 - DNA, 502 bp, Homo sapiens
  misc_feature (1)...(502): n = a,t,c or g
gcggcacgagggccttgcaggctctgccggccacggtgctgggcgcgctgggcagcgagttcttgcgggagtgggaggcgcaggacatgcgcgtgaccctcttcaagctgctgctgctgtggttggtgttaagtctcctgggcatccagctggcgtgggggttctacgggaatacagtgaccgggttgtatcaccgtccaggtctgggtggtcagaatggatccacgcctgatggctccacgcatttcccttcgtgggaaatggcagcaaacnaacctctcaaaacccacagagaataagggaaggcagcagagggtctccaagggcatcactgggtctgctggcttctacactgggttctgctactccccagacctcaaggacaactgccgggggttcagggttggtacaaggagtaccaatgcctacagggctgggctctctgcctcttaanctgtccctcacccangaactggcaaatcaaaagttgccgtnncctact

SEQ ID NO: 25093 - DNA, 805 bp, Homo sapiens
ggagtgacggtgccaccgcggcgcgtgagtttcgccctgtcttgtattaagtctgctcttccaggttcctggcgcttctgtacctgggacttgggatccccacaaacctggaaattctcagccgtcttccttcactcagagcaaattgagacgaccccgtgagaggccgtggagaggagtctgcaatgccgagtggaggaaggaggaaccggagtgtgagcagtagctgggtgggcagcatggctgggatcaccaccatcgaggcagtgaagcgcaagatccaggttctgcagcaccaggcagatgatgcagaggagtgagctgagcgcctccagcgagaagttgagggagaaaggcgggcccgggaacaggctgaggctgaggtggcctccttgaaccgtaggatccagctggttgaagaagagctggaccgtgctcaggagcgcctggccactgccctgcaaaagctggaagaagctgaaaaagctgctgatgagagtgagagaggtatgaaggttattgaaaaccgggccttaaaagatgaagaaaagatggaactccaggaaatccaactcaaagaagctaagcacattgcagaagaggcagataggaagtatgaagaggtggctcgtaagttggtgatcattgaaggagacttggaacgcacagaggaacgagctgagctggcagagtctaagtgttctgagctggaggaggagctgaagaatgtcaccaacaacctcaagtctcttgaggctcaggcggagaagtactctcaaaaagaagataaatatgaggaagaaat

SEQ ID NO: 25094 - DNA, 694 bp, Homo sapiens
gcaaaaagcaaccctgcagcaaagtgaatttctgtccggctgcaatttaaaaatgaaaacttaggtagattgactcttctgcatgtttctcatagagcagaaaagtgctaatcatttagccacttagtgatgtaagcaagaagcataggagataaaacccccactgagatgcctctcatgcctcagctgggacccaccgtgtagacacacgacatgcaagagttgcagcggctgctccaactcactgctcaccctcttctgtgagcaggaaaagaaccctactgacatgcatggtttaacttcctcatcagaactctgcccttccttctgttcttttgtgctttcaaataactaacacgaacttccagaaaattaacatttgaacttagctgtaattctaaactgacctttccccgtactaacgtttgggttccccgtgtggatgttttctgagcgtcctactttaaagcatggaacatgcaggtgatttgggaagtgtagaaagacctgagaaaacgagcctgtttcagaggaacatcgtcacaacgaatacttctggaagcttaacaaaactaaccctgctgtcctttttattgtttttaattaatatttttgttttaattgatagcaaaatagtttatgggtttggaaacttgcatgaaaatattttagccccctcagatgttcctgcagg

SEQ ID NO: 25095 - DNA, 377 bp, Homo sapiens
ggtagggagagtgtagaatgagaaggtgctcattgaaggactcctatagtgcattggtctcagacattagtgttcattgtaaacattcagaggatttggtaaaacagaagtgctgagcctggtccccaacttttgattatgtctgagtgaggcccactctttcagtgatacagatgctgccggttcaggaaccacgtcttgagtaccgagtaccactgatttcgagcgggcgaagaagactaagaagaaggtgctagagaggtatgaggaataccaggacactctgatacctggaaacttgagagtatttcaagaaggggagggagtgagcagttgtgttgctgcaaagtcatcttacttgatcacattttttcgcc

SEQ ID NO: 25096 - DNA, 524 bp, Homo sapiens
  misc_feature (1)...(524): n = a,t,c or g
ggacaggcaggacgcagcgggctggcctgcggggctcactgctgccccccggggccgagcacgaaagggagagttggagggcgcttcctcgccgggtgttgcggtgtgagcggggactggtgagtgtgtgctgtcttcagagagagaagagcagttttcaggaatctatctaccgccggggagccagaagatggaggaagctgtaccgtgccaacggccacctcttccaagccaagcgctttaacaggagagcgtactgcggtcagtgcagcgagaggatatggggcctcgcgaggcaaggctacaggtgcatcaactgcaaactgctggtccataagcgctgccacggcctcgtcccgctgacctgcaggaagcatatggattctgtcatgccttcccaagagcctccagtatacgacaagaacgaggacgccgaccttccttccgaggagacaaatggaattgctncaattccncaacccgggagcntgggancatttaagaccatccggggaccttaacca

SEQ ID NO: 25097 - DNA, 368 bp, Homo sapiens
gagcttgacatggtttatatgatttgagttgtatttttaaagaatgcatagatatcctcattattttaaaaacaagcctgctcttatgtttactttgcctaatgtaatctcaaaactaaacaaaataggcaagttaaaggtggaaaatagggacagaatattgttgtttttgagtgcatttaaaatgaacacgagttaaccatgaaaccttagtgactgaatgtactacacattttaatggcttgaaaacatgagctaagtcagttttggctttgttactaatgaacccttgatagataagcattgtttaaaaaacaaagtaggatactcttgttctcgctaaaaaatcatgctcatttttcacatgt

SEQ ID NO: 25098 - DNA, 556 bp, Homo sapiens
  misc_feature (1)...(556): n = a,t,c or g
gagagntnnattgaaatcctntgattgaaaccctttaatacgactcactatagggaatttggccctcgaggccaagaattcggcacgagccatgttatatatagaatcatatacctcccacaagcagaaactataactttaagaaaaatggtttttcaaactaatttaaggttggcgcgtcaatgaaattgggggggatccatttttgaaattagttaaaataaatcctctttctctgtgggcagcaatatggcttttgtaaggcaacactcagtgagaagcttggtggggcagaggttgcagtgacctgcacgttgttccaaacacagcccgtgacctcacagccccaaccagaaggtgccaatgaagcagtccccacccccgtggtggacccatatgcacctccgtcccctccacttggcgcacctggactccctccagctggctcacccccanactcccatgtgttactggcagctcctccaggacaccagttgcaccggncgcactacgacctgcgccanaccttcatgggtgnggctnattggggtcaccg

SEQ ID NO: 25099 - DNA, 774 bp, Homo sapiens
  misc_feature (1)...(774): n = a,t,c or g
aaccttatgacatgattacgaatttaatacgactcactatagggaatttggccctcgaggccaagaattcggcacgagcggcacgagcctcatcactgttcctgtgctcacagtcatcaattatagaccccacaacatgcgccctgaagacagaatgttccatatcagagctgtgatcttgagagccctctccttggctttcctgctgagtctccgaggagctggggccatcaaggcggaccatgtgtcaacttatgccgcgtttgtacagacgcatagaccaacaggggagtttatgtttgaatttgatgaagatgagatgttctatgtggatctggacaagaaggagaccgtctggcatctggaggagtttggccaagccttttcctttgaggctcagggcgggctggctaacattgctatattgaacaacaacttgaataccttgatccagcgttccaaccacactcaggccaccaacgatccccctgaggtgaccgtgtttcccaaggagcctgtggagctgggccagcccaacaccctcatctgccacattgacaagttcttcccaccagtgctcaacgtcacgtggctgtgcaacggggagctggtcactgagggngtcgctgaaagcctcttcctgcccagaacagattacagcttccacaagttccaatacctgaccttttgtgncctcancaaaaggactccatgactgcaaggtggnacaatgggggtttggncaaccgnccnnaannatnggnggccaaaacc

SEQ ID NO: 25100 - DNA, 435 bp, Homo sapiens
  misc_feature (1)...(435): n = a,t,c or g
ggagaaagcagcagctgccaacatagatgaagtgcagaagtcagatgtatcctctacagggcagggtgtcatcgacaaggatgcgctggggcctatgatgcttgaggtagcacatcttcattttagtgctgtattttaaaatcttgttgatcttcacattattacatttaatttcaggtgaatataatttaaggagaatccacactagtactagtactatggacctcttgagcttgctgatatgcctgtgtgtctctatgtatgttttggctcctgctgccagtatatgtgtgtttgaaattaacatagaattaaattaactagattagagtagacattggcaagttgtaattgccagttgagcatttatttgagaaactgtattccaagtcctactaaattctgggtggattttagcttgaaanggtctcaaaa

SEQ ID NO: 25101 - DNA, 450 bp, Homo sapiens
  misc_feature (1)...(450): n = a,t,c or g
gtaaaaagttaaatatttaagtcacatacatggtaaagatctaagtttcattttccacatggatgaccaggaacctggtcttgttggagctggcataggaggttctactgtcttgtcgtccactcttgtccctcccttctgttatcaaagttaaagcgcctcttcactcaaaagggcttcaaaatgtaaatggctctagagttagagtgactgtttgctcttctgctttctggaatgcagatgacagtatggaaagaaagaataatgattcgatctaataggaaaggatttcttttttttttttnaaaaanngggggnattttccccntttggtttggctttaatttcaangctncnancnnnttttcaaagggaatnggcacctagtaaatcantaattttccnaaaccnaaccntgcaaaatttgaggaatgcaattttattcccttt

SEQ ID NO: 25102 - DNA, 341 bp, Homo sapiens
gaactggggactgcaccacagggggccaatgggactgtgcaggagacagcggatgacacagaaccttatcagggaagccagtaaaggtggtagatcatgtgacccttggccctctagggctgaaatgccagtaagaagatattgaacctcaccattctgtctcttcactttcacggcagtttctatagataaactacatcataaagtgaaccaaaataacagacacataaataaacaggtaaattcacacaggaccccaaaggtgttatagagaccagacacacatctacatttcagctcctcaatcaatttgtctgtttcacccgcctatcgtctgccag

SEQ ID NO: 25103 - DNA, 440 bp, Homo sapiens
gagaatgcttctaaatctgaatttaatttattcacagcacagcatgtaaccagatgatgatggcaagttaatggcctttgccttaatgagataactgtttgcctcccaggtttgaaggtttacgctagttttatttgtcagccttacctaagcagatacaggaagaaattgtaactttatgccaacatattatccattctatttgcagagagggatagctgtaatggcttcctcctcctgctctgttctttgggccattttaaggcctccgtcccaatcttggcaattaaatgcaatatcctctggggctcacacatgtgatttagatgaagaggctattcaaggtgcctgtactccatggagtcacatctgaattccaatatgctgttatcaaacagggcctgtgagtgtactgggtctgctctctgacaaatctctct

SEQ ID NO: 25104 - DNA, 446 bp, Homo sapiens
gggggttctgagagggaccgtgcgctgcctggggaagcaatgcaagtctccatagcctgcacagagcacaatttgaagagtcggaatggtgaggaccgacttctgagcaagcagagctccaccgcccccaatgtggtgaacgcagcccgggccaaattccgcacggtcgctatcatcgcgcgcagcctggggacgttcacgcctcagcatcacatttctctcaaagagtccaccgcaaagcagactggcatgaaatataggaatcttggaaaatcaggactcagagtttcttgcttgggtcttggaacatgggtgacatttggaggtcaaatttcagatgaggttgctgaacggctgatgaccatcgcctatgaaagtggtgttaacctctttgatactgccgaagtctatgctgctggaaaggctgaagtgattctggggagcat

SEQ ID NO: 25105 - DNA, 441 bp, Homo sapiens
gaaagaagcagtgctgcaagatgagaaaatgtcagaatctacaatggatgccttccaaagcctacctgcagaagcaagctaaagctgtgaaaaagaaagagaaaaagtctaagaccagtgaaaagaaagacagcaaagagagcagtgttgtgaagaacgtggtggactctagtcagaaacctaccccatcagcaagagaggatcctgccccaaagaaaagcagtagtgagcctcctccacgaaagcccgtcgaggaaaagagtgaagaagggaatgtctcggcccctgggcctgaatccaaacaggccaccactccagcttccaggaagtcaagcaagcaggtctcccagccagcactggtcatcccgcctcagccacctactacaggaccgccaagaaaagaagttcccaaaaccactcctagtgagcccaagaaaaaag

SEQ ID NO: 25106 - DNA, 506 bp, Homo sapiens
  misc_feature (1)...(506): n = a,t,c or g
gctcctgcctcagcctcccaagtagctgggattacaggcgcgcgcctacacgcccagctaatttttgtatttttagtacagacgggatttcaccatgttgggcaggctggtctcaaactcctgacctcgggtgatctgcccacccgcctcggcctcccaaagttctgggattacaggtgtgagccaccacgcccagccctaaaaaaaaacattttaaacagcttcatgagcttgtttaactagcagacttctagatcagcctaagctggaatgctacaggacagggagagggggccagagtgatcaggggaagactccggatgaagtgcactgttgtctcttcacgantggtnctctganatgcgccccaaacctctccattcagattcagctccagtaantcncaactctgtcctgttctccaatcttgnnantngnccnaganagaangggannntaancntgncaaaaatnntggttccccggaanttngttanttnatttgg

SEQ ID NO: 25107 - DNA, 433 bp, Homo sapiens
  misc_feature (1)...(433): n = a,t,c or g
gaattactgatagctgtttttattgtgttattttctccaagtttaataataattgcacaagaacaagggccctttcttctctttcttttgctttccccttgccattgtggcccttccccttcccaaactctgctgccagcaagaccttagcgtggtgctctgctgatgggactcgagtgctcactttgattgcttcactgtttattttgattggcgacagagaggcctggagttctggctggagccacctggagtgccacaggtgcttctccacttgccacgcagctgttctcccagtcccttgaggaccctggcgcctctccagatcttggcacttggtttctttccatgggtcaccggtgagagtccgtgttctttcctttgggccccctgcagccccttgcacagaagcctctgtgcctntgcctgggga

SEQ ID NO: 25108 - DNA, 397 bp, Homo sapiens
gtagggctcggcgtggccccaggaggaccgcccagggcgggttgggcagagcccaaggccttactgcaggtgtgtggcctcctctgacacggtcctgccttcatgctccgcaggccgccagctgcacagccaggccagcgtgctccttggctagcgcctccttctcccgggccactcgccccagcgtctccacctgtcactgggcctcccaccgggcctgctccagctcctgctcccgcctgctcagctgccaggagagctggctcccacccagagactgagtagcactcccagcatcccccagcttgttcatcgtgcagcaccccaactctgggcctaacccagtcctggcagaaggcctgggttcgagcccagggtctgcctgatgtgctatatg

SEQ ID NO: 25109 - DNA, 439 bp, Homo sapiens
gaaaatataaacttttccaccatgcctggcctacaacactttctaaatgttaaaacaatttttagcttttggtctgtacaaaaacaagacacgtgccagatttggaatgcaagctgtagttggcctacagtttacctagcaagatctcagtctggatgaacccagctcttcggttctgcgtacgtgcatgctgctaagtattgtgaaggaaatcagtaactggtaaccgtgcagattggtgtacatcagcttcataagctgtacgacattagagggcaagtttttgtagtattcttgctcattgtatttgacaaaatggcttctttacacctttttctcctcaaacctatttctctctaccacccatatattttagagataggattgagtgactggctgggccagttatgatcagcacaggctcaaacagaaaccctgg

SEQ ID NO: 25110 - DNA, 357 bp, Homo sapiens
gatttaaagagtttacagcaatggtagaatggcagccccagttgtcattttttttaccactgtcatttccatagagaggggctgtcatcataatgtatgtgcatgcagcctgggtccctctgttaatctatcagggaaaagcagcagccctagtgtcctgtggccctgaatcaggccacaaatatatattcatacagcacatggttgggaagggaagtttatcagttgggcagggcacagctcaggtaatatttccactttgggatggtaggtctgttacacagggtggaacatatttttgtagtaactaaaaaatgggagggcagtgtgtctgtccctggaaaaagaagtatttgt

SEQ ID NO: 25111 - DNA, 482 bp, Homo sapiens
  misc_feature (1)...(482): n = a,t,c or g
gggacccatcagctatgtggtggtaatgcctaaaaagagacaagcactggtggagtttgaagatgtgttgggggcttgcaacgcagtgaactacgcagccgacaaccaaatatacattgctggtcacccagcttttgtcaactactctaccagccagaagatctcccgccctggggactcggatgactcccggagcgtgaacagtgtgcttctctttaccatcctgaaccccatttattcgatcaccacggatgttctttacactatctgtaatccttgtggccctgtccagagaattgtcattttcaggaagaatggagttcaggcgatggtggaatttgactcagttcaaagtgcccagcgggccaaggcctctctcaatggggctgatatctattctggctggtgcacttctgaagatcgaatacgcaaagcctacaccttgatgngtcaagaatgacagggatcttnggactacccaa

SEQ ID NO: 25112 - DNA, 556 bp, Homo sapiens
  misc_feature (1)...(556): n = a,t,c or g
ggtnnttnnnnccntttganncccagnttgaatgattacgaatttaatacgactcactatagggaatttggccctcgaggccaagaattcggcacgagcggcacgagcaacccggagccctggaaccgcctgagccccaatgaccaatacaagttccttgcagtttccactgactataagaagctgaagaaggaccggccagacttctaagccaggctgggctgccagtgccatgcaagccacagccagccagcccatccacttcttccactcctccccgcaggccccaaggcatcactccggccaccctgtcccgctactgcttacacaggccgggttcccacgcagaggggaggctgctccacccctactctcctcccttgctcccagcagcggaagcgcctctgacccttggcttgagtcccacgtggggggaaggagaggcaggcagcaccancangggtccaccaagaagcccagaacaaccccttctgncttctacccggccctttaaaaggtgtggnacaaaggttacggnttacggnggcctactgaa

SEQ ID NO: 25113 - DNA, 429 bp, Homo sapiens
tatgacatgattacgaatttaatacgactcactatagggaatttggccctcgaggccaagaattcggcacgagaaaagacatccggggatcatcccgatgatcggcttaatctgcctgggcatgggcagcgctgcgctttacttgctgcgactcgcccttcgcagccccgacgtctgctgggacagaaagaacaacccggagccctggaaccgcctgagccccaatgaccaatacaagttccttgcagtttccactgactataagaagctgaagaaggaccggccagacttctaagccaggctgggctgccagtgccatgcaagccacagccagccagcccatccacttcttccactcctccccgcaggccccaaggcatcactccggcaccctgtcccgctactgcttacacaggccgggttcccacg

SEQ ID NO: 25114 - DNA, 609 bp, Homo sapiens
gaagagattgggatttgttctgagaacagtagaatccaaccaaatgttttaagcaggattgtgatatggccatatttatcttacagaaagatagctctgattacagcacagagcatctattagacaggggcagggagacctggctataacaggaggctagtacagcaatccaggtgagaagtaaagctggcttggccgagaagagtagaaatggagaaaagtaagtagatttgagatccatttagatttgagatccatttagaacatggaattaaaaggtcatagtaatgaattagaagaaagaagagagaagcaggaataaaggaattctctcaggtttcaagtttgggcagctgggtgaagagtggtgttgttcgttaaggtgggaaatccagaaagaggttctgggtgtgtgtgagggtgatgaagatgaactctagggggtgtggtttaggttttaagtgtctgtaggacaccgaactggagctgtccaggaagcagctggatatacacatgtggagctcagccaggcacagcagctcacacctgtaatcccagcattttgggaggccaaggcaggtggatcatgaggtcaggagttcgagactg

SEQ ID NO: 25115 - DNA, 159 bp, Homo sapiens
gtcctcctctcccaagcaatggaaacttttacccatgtaattcgtagctgaactcaggaaaaagaagggggaaaggactctgtccccttggggctcatcacccttccacatcctcctcctcgttgccccctggtcaggcagcttctttttttttttttt

SEQ ID NO: 25116 - DNA, 377 bp, Homo sapiens
  misc_feature (1)...(377): n = a,t,c or g
gaagtttaagagcgagggtcttctcttgctctgccattaactgggccctgtccctctccatcttctcagtcaattgtttcacatgttcctgataactcttctctttctgttccatcatctcctcattcttcttttgtatttcctccaacattttctttgcagcttctgcagattcagcctttatacgttccacttcaatcgctttttccttttctgagagtgactgatcagtctgtagaagtgcatcagccacatcctccttggactccaaatattttttcagcacctctttggctgtatccccttccttggcacctggtagtacttattcttcagctcctgcagcttctgagtaaagagacggnaacctcctgggt

SEQ ID NO: 25117 - DNA, 572 bp, Homo sapiens
gcgaaggcaggtggatcatctgagcccaggagtttgagaccagcctaggcaacgtggcaagagcctgtctctccaaaacctacaaaatttagccaagcttggtggtgtgagcctgtagtcccagctacttgggagactcacgctggaggatctctcgagcccaggaggcagaagatgaataaataaatggaagcaactgaatgggatgaggtctctcttgaaggagagagcaaaagagatttaaatagtaacaattataataaggctgggcgctgtggctcacgcttgtaatcccagaactttgggaggccaaggcaggcggatcggttgaggtcaggagttcaagaccagcatggccaacacggtgaaaccctgtctctattaaaaatacaaaattagccggacatggtagtgcgtgcctgtggtctcggctactcaggtggctgagacaggagaatcgcttgaacctggtaggcacaggttgtagtgagccgataaatataaaaagtattagagtactaacagaggaaagtttccactgatcaccttttagctttaaataatgcagaagc

SEQ ID NO: 25118 - DNA, 433 bp, Homo sapiens
  misc_feature (1)...(433): n = a,t,c or g
ggaggccatttcattttagaacatactggttttgccccaccagggtcggtctcttggctcagagataaatgattgggaatctctgctcacggacctcaaagtctacaggtgagcagatgagcaggtgatgacagtcaccacatacaaagtgtaaccacagaggtgggtcccatctcaacagggcagacagtgggaaacctaccttggacacttcaaggaaggaattcagaagtctaacttccttcagtgaattgggcataatgagctacaaggctgttgcattaattccaaagtgggaagggaatggctggtgtccggaagtgttcacatctgctaggggaggctgaggactcctggcactttgcatctataggtgttttctacagcttcatagtgggccacctggtgttgggtcacttgnatatttggcttc

SEQ ID NO: 25119 - DNA, 441 bp, Homo sapiens
  misc_feature (1)...(441): n = a,t,c or g
gggcagatcatcaggatggctgtttcaggtggtcatgactgcttttgcagaagcagcatgttgtgcttgaggagtgggatgaaatgctgtctagatgactatggagtgggaggcagtaagctggggagggggcgggagccaaaggtagaacctgtttgccttgtctccagtttaatgataaattccaacaagcctgtacaccacattctcaacttgttaaatccttcagctgcaattatcactctctggcctccattaaatgcttattgatgagaagccttccccaatagcagaagtctccctcacttgctccgtctcactagatattattagatgataagggcagatgggacacttttatagcatgcatcttgccttgggctgatgagaattgcctcaaattagagccngttattggcctgggggatcctggagggattc

SEQ ID NO: 25120 - DNA, 530 bp, Homo sapiens
accagctatgacatgattacgaatttaatacgactcactatagggaatttggccctcgaggccaagaattcggcacgagacaggataaatatcctttaaaataaaagcatatttatcagggccccagcaggaagacagatggcacattcaactcagggtaattaaaagaagattgaataaagggactgtttgccaaggcatgggcagggtatgaggaaactaccagtgacagcatggtacctcacagtaataacagcacaacttaggtttttcgacctcagtattgttgacattttagattggagaattctttgttttgggtgctgtcctatgatgtgcacaatgtttagcagcattcctggccactatctactaatgtacccctctcagtcatgacaataaaaaatgtctgcagacactgccagatgtcatttgtggggaaaaatcacccccggttgagaaccattggcataactgttaccatcctatgcctgaagggatgaagggaaggagtggttaacagaattcag

SEQ ID NO: 25121 - DNA, 463 bp, Homo sapiens
gggagacaaccgcctctagttgtaccccagcctcgttggagagcagcaggtgctgtgcgccttgtagaatgccgcgaactgggttctttggaagcagccccctgtggcggccttccgggtctcgcagcctgaagcctggattccagcagtgaatgctagacagaaaccaagccattaatgagatgttattactgttttgggcctccatgccccagctctggatgaaggcaaaaactgtactgtgtttcgcattaagcacacacatctggccctgacttctggagatggatccttccatcttgtggggccaggaccatggccgaagccccttggagagagaggctgcctcagccagtggcacaggagactccaaggagctactgacattcctaagagtggaggaggaggaggagccttgctgggccagggaaacaaagtttacattgcctgtagctttaaaacc

SEQ ID NO: 25122 - DNA, 397 bp, Homo sapiens
ggggagtcgaagcgagggtctgaagttcacgactactagaaggggaggggagtggaaaggctctcagtgaaaaaggtatggaacccttcagatcaaagcttaccaataaattcagtatgtagaacagattaacgtagttgaaatgaggaagaatgagagttatctcaaccagccagcaccccctatccccattcccacactttccctcatgggaggctgtcgggagcacttcgaaaaccactggaaaggccgggcaccggtggctcatgcctgtaatcccagcactttgggaggccaaggcaggcagatcacctgaggtcaggagttcgaaaccagcctggccaacatggcgaaaccccatctttactaaaaatacgaaaattagccaggtgcggtg

SEQ ID NO: 25123 - DNA, 411 bp, Homo sapiens
ggtggagtggaggtggagggagcgaggaaccatgaatgaactcgcaggcagtgccgggcggccccctggctctctgcgttttgcctttaacactaactgtactgttttttctattcacgtgtgtctagctgcaggatgtaacatggaaaacagtaactaaagattaaattcaaaggactttcagaagttaaggttaagtttttacgtttaatctgctgtttacctaaacttgtatgtataatttttgggtgggtatggggaattgctttgctaaaaataagctcccagggtgtttcaaacttagagaagaccaagggacagtattttttatcaaaggaatactattttttcacactacgtcaacttggttgctctgataccccaaaacctgattgggggctcccggcctgg

SEQ ID NO: 25124 - DNA, 428 bp, Homo sapiens
  misc_feature (1)...(428): n = a,t,c or g
gnnnnntnnnttntnnntntganncctcttgactgattacgaatttaatacgactcactatagggaatttggccctcgaggccaagaattcggcacgagcggcacgaggtgtctgaggctggccctacgggcaccggtgaatccaagtgtcctctgatggtcaaagttctagatgctgtccgaggcagtcctgccatcaatgtggccgtgcatgtgttcagaaaggctgctgatgacacctgggagccatttgcctctgggaaaaccagtgagtctggagagctgcatgggctcacaactgaggaggaatttgtagaagggatatacaaagtggaaatagacaccaaatcttactggaaggcacttggcatctccccattccatgagcatgcagaggtgggtattcacagccaacgactccggccccc

SEQ ID NO: 25125 - DNA, 320 bp, Homo sapiens
gattttgaaatgctctggtgttgtgaaatacggaacttggcgagttcttgcggccatcccttttgttccctgctgtgactgactggcaggaacctgggcttgtcaagtcagtctgtagtgcacgccgttagattggttgtcattggccaagccagctccgggcaccctgaggttccctcacagcgaatccaccgaagagcgctcccatccacagccggctctttgaatacttaaagaaatgtaggaaaagcaaaactcacaagacaatccttccagccactggtcacaggatggccgatgctgaacttcaacattggcca

SEQ ID NO: 25126 - DNA, 399 bp, Homo sapiens
  misc_feature (1)...(399): n = a,t,c or g
tatgacatgattacgaatttaatacgactcactatagggaatttggccctcgaggccaagaattcggcacgagcctccatttaactcctgttgaatgatagctgttttaaaaattgtactcctgggtaagtatctcatattttttacaattctttctgacctttgtacctttcttcttctctcctttattctccccattttttgaccttgttagatattccttatcttgaatttgctatttctctcttctgtgcattcattcagtgacttttttttttttcaaatttcannnngagactcaccctgtcccccaggctgaagggcangggcacaatcttgggaaactgcannctttgcctcccggcnnanngcgnctntngagcctnagcctcnngagaa

SEQ ID NO: 25127 - DNA, 411 bp, Homo sapiens
ggtcagtgcatggaccccaaggcccaaagaatggcaaaaagtagcaggttttcatgttaagacccttagaatgtaagataggggtgggtggagaagagaggccaaggacagggggctggggccagctcctccagtgctaccacttgttagtataaaattctgaggaatccaagaattctctattgaacttgaccttctacgtcattaggaagttacatttctcaatgtaggagggaggattggagaatgttttatttaataatttatcttgatgtatgatttttaaatatttagaaatatggtatttgaactccattcatactcttcctcccctggactctataaatgttaggggtttgcctgacagtgagcttggggtactttggggtcaagatgaaactatatttctgt

SEQ ID NO: 25128 - DNA, 438 bp, Homo sapiens
gacatcattacgaatttaatacgactcactatagggaatttggccctcgaggccaagaattcggcacgaggattttgttcctgttttataaatggattaaactgaggctcagagaggtgaaaaaactcatccaagatctcacagccagtaaatggcaaggctcggacctgaccccagtgcctgcctctgcaacatcccctacccccagcactgtctcaggagcctctatcttccaacacaagggctgtcaggggtgttgcagcaacaaagcccccagaagtcatagaactcttggtaggacagacatcaggatcatttgatacagtgactttcatcctgggaatcaggaagaactattagagcaggaaacaaagttttattgtgaatatgcatggtgaaatcacagcttcacacaaaccattaaaaaagccgacgtcc

SEQ ID NO: 25129 - DNA, 395 bp, Homo sapiens
ggctatttacaagcatggagcaagttttggacacatagtgagttcctggcacacagtgagcacccaagatataatattttccctcttttcatcatttagttaatttcaagcactcccagatcagatgtcctgacctgtctgaagatcaacaatgagccaggaggtgtgagctcacgcttctggcttcgccagtcctgacctgtggggacccattcttctcttgcttttccctcctgttcacagctcatcttgcattcctttctccagcttctcaagtccaaatctcatttggggcttgtagcctctgatgggagcccctctgtctctggacctttttgggtgcacatattctctcacaaggccccctactcttgccagtgtccttcgcattcctc

SEQ ID NO: 25130 - DNA, 337 bp, Homo sapiens
ctccaacattctttctagcaggaagcagaaagggtgaagaagggccttctttctttcttttagaacatatctcagaagtcatacaggacacctgtagcccattggccatgtagcccattggccaaaacctagtcagatggccaactcagtaataagagcagctgagaaatgtgagctttattcaagatgttcatctgtgcaggttaaaatctgggttctatcaccgaaggggtaaatagatttggggtgatagcagtttctgtcacaaagatacaatcaggttctgctgcagtttgtttattgatgggtatttattgagcacttattacctgccaga

SEQ ID NO: 25131 - DNA, 387 bp, Homo sapiens
cccacgcgtccggtttgacaatgcaggtgccatgatgagtgtggatgaaacactaatgtgttcttttcagattttaaagcctgcagagaaaaagaagccaaatgccacgagacctgtaacgcctccaaggggtatgatcacaaagcaagcaaagaaatagatgtcgttttgacactgcctagtcgggacttgtaacatagagtatataaccttcatttttaagactgtaatgtgtactggtcagcttgctcagatagatctgtgtttgtgggggcccttccttccatttttgatttaccaaaaagaaaagtgttttgttttttaattctctgttccttttgcaaacaattttaatgatggtgttaaagctgtacaccccaggacagt

SEQ ID NO: 25132 - DNA, 231 bp, Homo sapiens
gaaaaaagttggcattaatcctaaaattaataatttaatgccaggatatgaagttgcaaagtatgatcttatatggatttgtgatagtggaataagagtaattccagatacgcttactgacatggtgaatcaaatgacagaaaaagtaggcttggttcacgggctgccttacgtagcagacagacagggctttgctgccaccttagagcagatggagtctcgctctgtcgc

SEQ ID NO: 25133 - DNA, 695 bp, Homo sapiens
ctcctatgacatgattacgaatttaatacgactcactatagggaatttggccctcgaggccaagaattcggcacgagctcattcttggcaggatggcttctcatcgtctgctcctcctctgccttgctggactggtatttgtgtctgaggctggccctacgggcaccggtgaatccaagtgtcctctgatggtcaaagttctagatgctgtccgaggcagtcctgccatcaatgtggccgtgcatgtgttcagaaaggctgctgatgacacctgggagccatttgcctctgggaaaaccagtgagtctggagagctgcatgggctcacaactgaggaggaatttgtagaagggatatacaaagtggaaatagacaccaaatcttactggaaggcacttggcatctccccattccatgagcatgcagaggtggtattcacagccaacgactccggcccccgccgctacaccattgccgccctgctgagcccctactcctattccaccacggctgtcgtcaccaatcccaaggaatgagggacttctcctccagtggaactgaaggacgagggatgggatttcatgtaaccaagagtattccatttttactaaagcagtgttttcacctcatatgctatgttagaagtccaggcagagacaataaaacattcctgtgaaaggcaaaaaaaaaaaaaa

SEQ ID NO: 25134 - DNA, 438 bp, Homo sapiens
gatctgaacttctccatcacagatgacatgataccgcctgactctaatatccgactgaccaccaagtccttccgacccttcgtcccacggttagccaggctctacctcaacatgaacctggaactccagggatcagtgccctctgctccgctcctgaacttcagccctgggaatctgtctgtggacccctatatggagatagatgcctttgtgctcctgcccagctccagcaaggagcctgtcttccggctcagtgtggccactaatgtgtccgccaccttgaccttcaataccagcaagatcactgggttcctgaagccaggaaaggtaaaagtggaactgaaagaatccaaagttggactattcaatgcagagctgttggaagcgctcctcaactattacatccttaacaccttctaccccaagttcaatgataag

SEQ ID NO: 25135 - DNA, 460 bp, Homo sapiens
  misc_feature (1)...(460): n = a,t,c or g
agctatgacatgattacgaatttaatacgactcactatagggaatttggccctcgaggccaagaattcggcacgagctagagaaaatggagccaaaggagctcacgagggtccaagaagcagttaagagtaccatgatagaagtgccagggatcaagtcagggaggtaaggtaatatggtttcgttgtgtccccatccaaatctcatcttgaactgtagctcctgcaattcctacatgtcactggagggacccagtgggaggcaattgaatcatgggggtgagtcttttccatgctgtactcataatagtgaataactttcaccagatctgatggttttataaagaagagttcccaagcacaagttctctcttgtcttccgccatgtaatacgtgccttctgcttctgccttctgccatgattgtgaggcctcccaggcncttaaactgngagtccatta

SEQ ID NO: 25136 - DNA, 434 bp, Homo sapiens
gctagaaacaggaactcctgttttgtgtcctgtttctaatggccttgggaagttatttaaaataagatataacctatcttctagagtaggggcataggttaatgagatcatataagtaaggcaattagcatagagcatggcacatagagggtactaaatatgttagtttctccctttcctgtgttcatatcttcctcagatgttcctaaccatctcaagttctccatctctaaatgtccccaagcttgtctgaagacctgactttattctacctgtggattttgaaattcgataatattagtttctagagaagaagccgacttgatgttgttttgtttattctctcatggttgataagtactaggtgaatgttttagacacttgggtctttatacatttcatttccccagagcttattgtgacttgaaaactaa

SEQ ID NO: 25137 - DNA, 568 bp, Homo sapiens
ggagaaagaccttgacgaaaagaagaaagaacctgcaattacatcgcagaacagccctgaggcaagagaagaaagtacttccagcggcaatgtaagcaacagaaaggatgagacaaatgctcgagatacttatgtttcatcctttcctcgggcaccaagcacttctgattctgtgcggttgaagtgtagggagatgcttgctgcagctcttcgaacaggggatgactacattgcaattggagctgatgaggaagaattaggatctcaaattgaagaagctatatatcaagaaataaggaatacagacatgaaatacaaaaatagagtacgaagtaggatatcaaatcttaaagatgcaaaaaatccaaatttaaggaaaaatgtcctctgtgggaatattcctcctgacttatttgctagaatgacagcagaggaaatggctagtgatgagctgaaagagatgcggaaaaacttgaccaaagaagccatcagagagcatcagatggccaagactggtgggacccagactgacttgttcacatgtggcaaatgtaaaaagaagaattgc

SEQ ID NO: 25138 - DNA, 419 bp, Homo sapiens
ggagttcttcgaggaggaggaccgcttctacctggtgtttgagaagatgcggtgaggctccatcctgagccacatccacaagcgccggcacttcaacgagctggaggccagcgtggtggtgcaggacgtggccagcgccttggactttctgcataacaaaggcatcgcccacagggacctaaagccggaaaacatcctctgtgagcaccccaaccaggtctcccccgtgaagatctgtgacttcgacctgggcagcggcatcaaactcaacggggactgctcccctatctccaccccggagctgctcactccgtgcggctcggcggagtacatggccccggaggtagtggaggccttcagcgaggaggctagcatctacgacaagcgctgcgacctgtggagcctgggcgtcatcttgt

SEQ ID NO: 25139 - DNA, 335 bp, Homo sapiens
ggtaaaatttcacggcaggatcctgttacatacatttcagaaacagatgaagaagatgactttatgtgtaagaaggcggcctctaaatcaaaagagaatggaagatctacaaatagtcatcttggaacatcaaacatgaaaaagaatgaagaaaacactaagaccaagaataagcctttatcaccaataaaacttacacccacatcagtacttgattattttggaactggaagtgtccaaagatctaataagaagatggtggcaagcaaaagaaaagagctttcacaaaatacagatgagtctggattaaatgatgaagccatcgccaagcaatt

SEQ ID NO: 25140 - DNA, 581 bp, Homo sapiens
ggtgagttatgattgtgcaactgcactctactacagggtgagtgacagaacaagactctgagatcctgtctgttttttagaaaaagggagagaggaaaaattagttgcaaaagcagaagtagattgaagcagtcaagaaacataaggaaatattttcaaatgggtgtcattattagaaactatgtattaattcctggagattgaattggatgacttctggaatcccttccaactttaagattctaggtgtattatcctgagtactgctttaggctttgtgtttctctttatggccaaatggttctcctttgagggactaaggattgttttaaaaggcatcagataaatttagaaatacatggatataatttaggtatacaagtaaataaaacttacttttgcttctggtcatgataaaggaaacaagatttaccctttcaacttaactagaaaattagacaaaagatgaaacaacaattttcagacattggataacaggtagtaccaggcagtgatccctgaggaagggaaataaaaggtatgtatgctataatatccccagctttctagggtggggtgtg

SEQ ID NO: 25141 - DNA, 330 bp, Homo sapiens
cctgacttcaggtgaactgcctgcctcggcctcccaaagtgctgggagtataggcgtgagccaccacacctggccacatttgctgaataattgaatgaatgtcttcacttccttcctctggaattcctcattgtctctcatctcctcctgtaccatatttatcccacatttttctagtggcccctgcaaatctctaaactcttctcccaaatcttcagttcttcctcttctttcaggggaagcaggattaaaacaaacaaaaaacatttttacagggtatacatgtctttctagttgagaaatggaaactagaatattcttagaaataag

SEQ ID NO: 25142 - DNA, 615 bp, Homo sapiens
  misc_feature (1)...(615): n = a,t,c or g
gtgnnnnnntttgaanncccnnnntntggaacccctnngacatgattacgaatttaatacgactcactatagggaatttggccctcgaggccaagaattcggcacgagactagatttccttcagctgatgattgactcccagaattcgaaagaaactgagtcccacaaagctctgtctgatctggagctcgcagcccagtcaataatcttcatttttgctggctatgaaaccaccagcagtgttctttccttcactttatatgaactggccactcaccctgatgtccagcagaaactgcaaaaggagattgatgcagttttgcccaataaggtgaggggatgacccctggagatgaagggaagaggtgaagccttagcaaaaatgcctcctcaccactccccaggagaatttttataaaaagcataatcactgattccttcactgacataatgtaggaagcctctgaggagaaaaacaaagggagaaacatagagaacggttgctactggcagaagcataagatctttgtcaatattgctgccctggttcacctgnttactgntatcacaataatgctaagtaaaaaaaaaaaaannnnnaaaaannatnttttt

SEQ ID NO: 25143 - DNA, 449 bp, Homo sapiens
gccatgagcttcaataccctgttctactaaaaatacaacaattcgctgggcatggtggtgcatgcctgtaatcccagttactcaggaggctgaggtaggagaatcacttgaacccgggaggcagaggttgtagtgagctgatggccccactgcactccagcctaggtaacacagcaagactgtcaaaaaaacaaaaaacctatgaggcacggggtaatggtggggcagcctaacgctcagcaacaggaaagatgaataagagttgggctaagagctaagtccaagttaaatccagcccatatttgtcggtagtctgggagcctgtgaaactgtgagtactttgccaggtgctgaggtgggaaaggcaaaggcatggccaagataaacagggcagaggtgctgtcagtgtcagccccgaaggtgtcaacttactttatgtaaaaatctgg

SEQ ID NO: 25144 - DNA, 348 bp, Homo sapiens
gggttggcccctgctggaggagctgacaacctgatcaatgaggagtctgacgttgatgtccagctcatcaacagacacatgatgatccgaggagaaaacatgtccaaaatcctaaaagcacgatccatggtcaccaggtgctttatagatcacttctttgatagggggtactatgaagttactcctccaacattagtgcatacacaagtagaaggtggtgccacactcttcaagcttgactattttggggatgaggcatttttgactcaatcctctcagttgtacttggagacctgcctcccagccctgggagatgttttttgtattgctcagtcataccgggcagag

SEQ ID NO: 25145 - DNA, 519 bp, Homo sapiens
  misc_feature (1)...(519): n = a,t,c or g
ggacagagcgagagcagtttgttgagtttcgggataagaaccgtgatgggaagatggacaaggaagagaccaaagactggatccttccctcagactatgatcatgcagaggcagaagccaggcacctggtctatgaatcagaccaaaacaaggatggcaagcttaccaaggaggagatcgttgacaagtatgacttatttgttggcagccaggccacagattttggggaggccttagtacggcatgatgagttctgagctgcggaggaaccctcatttcctcaaaagtaatttatttttacagcttctggtttcacatgaaattgtttgcgctactgagactgttactacaaactttttaagacatgaaaaggcgtaatgaaaaccatcccgtccccattcctcctcctctctgagggactggagggaagccgtgcttctgaggaacaactctaattagtacacttgngtttgtagatttacactttggattatgnattaacatggcgggntatttttg

SEQ ID NO: 25146 - DNA, 416 bp, Homo sapiens
tgattacgaatttaatacgactcactatagggaatttggccctcgaggccaagaattcggcacgaggattgcaccactgcactctagcctggagctcaggagttcgagagcagcctaggcaacatggcgaaacctaatctctattaaaaaaaattagctgggtatggtagtgcatgcctgtagctgcagctactcgagaggttgaggtgggagaatcacctgagcctgggaggtcaaagatgcactgagccttgatcatgtcactgtactccagcctaagtgacagagtgaggccctgtctcaaaaaataatactaataataaattttgagaagctgtgaagcccatgtacaagttttccaaagcatttgatttttttatgaaagcccaaattttagcattggcaacaaatactgt

SEQ ID NO: 25147 - DNA, 496 bp, Homo sapiens
gggctgagggggaaggattgcttgagcccaggaattcagggtctatgattgcaccactgcactctagcctggagctcaggagttcgagagcagcctaggcaacatggcgaaacctaatctctattaaaaaaaaattagctgggtatggtagtgcatgcctgtagctgcagctactcgagaggttgaggtgggagaatcacctgagcctgggaggtcaaagatgcactgagccttgatcatgtcactgtactccagcctaagtgacagagtgaggccctgtctcaaaaaataatactaataataaattttgagaagctgtgaagcccatgtacaagttttccaaagcatttgatttttttatgaaagcccaaattttagcattggcaacaaatactgtcaagttgtccttgaagtaactgggccctctttgttcatttctgagaaaatgtctgacatataaccagagcttagtaactatagctttatctctcaatca

SEQ ID NO: 25148 - DNA, 450 bp, Homo sapiens
  misc_feature (1)...(450): n = a,t,c or g
tgganacngcttgactgattacgaatttaatacgactcactatagggaatttggccctcgaggccaagaattcggcacgagcagatgatcgactcccagaattccaaagaaacaaagtcccataaagctctgtctgatctggagcttgtggcccagtcaattatcatcatttttgctgcctatgacacaactagcaccactctccccttcattatgtatgaactggccactcaccctgatgtccagcagaaactgcaggaggagattgacgcagttttagccaataaggcacctgtcacctacgatgccctggtacagatggagtaccttgacatggtggtgaatgaaacgctcagattattcccagttgttagtagagttacgagagtctgcaagaaagatattgaaatcaatggagtgttcattcccaaagggttagcagtgatggtt

SEQ ID NO: 25149 - DNA, 794 bp, Homo sapiens
  misc_feature (1)...(794): n = a,t,c or g
ttgactgattacgaattaatacgactactatagggaatttggccctcgaggccaagaattcggcacgaggagtgtcccttcagccagtctcagagctctttggcaattcaactgacccttgtccttcagtccagacaatgccccagggcccacctgcattcaaactcggactgttctccttcccacccctattatcttttcaactttatggacagtacatgcaattttctcattcattttctcatttaacatctaacagcttcatgatatccccattttacagataaggaaaccaaggctttaagaggatagggaccctaatcggctaaggcagaattaggatttgaacccagatccccatgatgccagaatctaagccttgaccaaatatgtgttactattacttttgttgttgttgttgttctgggtaactccaaccctctgctcgttggccttgtcacctcagtgctgattttgcagatgaagagactaaggttccgaggtgctagagcacagtggttaggaacacacactctagagccagagtgcctgggtttgagcctcgttctgccgtttactanccgtatggccttgggcaacttgcttaacttctctttgcctcagttcctcttctcttgggttgttangagaatgaatgaggtgatatccacagtgtccancaccctgcaagcggcacgtgtggtggatcacacctgcnatcccagnacnttgnnangccnangaagtggncacttgangcaggagtcnngaccagtntggcaaaangngnaacc

SEQ ID NO: 25150 - DNA, 422 bp, Homo sapiens
gtggcatcagaaccaatgtggtgaccatgcccactgcccacccaagaatagcccccaaagccagcatggctggggccagcagcagcaaggagtccagtcggatatcagatggcaagaaacaggagggaccagccactcaggttgacagtgctgtgggaacactccctgcaacaagtccccagagcacctccgtccaggccaaagggaccaacaagctcagaaaacctaagcttcctgaggtccagcaggccaccaaagcccctgagagctcagatgacagtgaggacagcagcgacagttcttcagggagtgaggaagatggtgaagggccccagggggccaagtcagcccacacgctggtaggtcccaccccctccaggacagagaccctggtggaggaaaccgcagcagatccaacgagg

SEQ ID NO: 25151 - DNA, 323 bp, Homo sapiens
tgcccctcttggaggaatgtcctggccccagcctatggagggcccttgccaagccatccctggtccctctatccccaaagcccccagaccagcagcctattgattcctgcagtcccagagaaggatccctcatctttgcagcctcagatcaccagtcagcacccaatatatgttcataaacagatagattaaatcattaattctatagtttctgatcgtgtgccttgcctttttcaagcctaactcaatgttgcagaaaacgtctgagagtttctaagaaataacaaacacgaacccccactgttttccctgtaccttgagga

SEQ ID NO: 25152 - DNA, 574 bp, Homo sapiens
cacagaagtagtggtttgctttgatggaaatagctacagctgtgtcccttcctgctttttacttatcttttgctttttctcggcacgtggtatctccaccatttcttctgcacaaagatgtcttctgttcatcctgaacatttttaaaaaatgcagaattttatgtgactgcttttttgcctcacaattatgctgtgaattttacaaaaatttattttcttttttgataatttattgtaccaaagctgtttttatagcacatagatgtctgtaaccaataatgtagcagttctgcactttgacacaaggtgtaactagaccatttttaaatgtcagttgaaaattatggctgtactattgcttaaacaaaactggaactgttgttgaatccatagccaatacatttacagcaatctgtgtactgaacatagtagattgacatctaattcaagattacaacatctgttacattctaagtgtgttcaggcttctgaaggtaaagggacactggatccagaagctatggaaccagcagttgattcttggattcctgattaacctacttgtaaacttg

SEQ ID NO: 25153 - DNA, 368 bp, Homo sapiens
gcgtgcgcaccagctactcaggaggctgaagcgggaggattgcttgagcccaggtcgaaacttcagtgagctatgatcgtgccactgcactccagcctaagaaattgagcaagaccctatctcgaaaaaataaaataataacataaagaaatgatcacaggcagaaactgtatgcacacaccgagtgtggaaaagccctcttgtggaagtcagttatttgtgtacatcagaaaattctggaagaagagaaaccttgtgaaggtactaaatatgacaacatcttcagtaacagaggatgtccccctgtacccagaatggtgcatgctgtggagatacccttgcaagtagaccgaatgtgagaaagcccc

SEQ ID NO: 25154 - DNA, 424 bp, Homo sapiens
gttgaactgagacctgaacggtgaaaaggcgtgaactatgccgagatctgggtgaagaagaggccaaataaagggcccaggccctcagcttggaagcagcttgttggagatgagagaggggccagtatggctggagtggagttagcaagggggagagtggtgggaggtgcgattggtcattgagggttggatcacgtggggccctgcggagtaagaagttgtttcttggcatttctttacatttctgtgttcttatctagtgattaaaagagctgaccctaaattctgaagacttggggagtccctgtttgctaacaacggagaattggttctataaggagaaatgcgaatagttccactggcaagggaagtagaaactagattactagagtggatatttgggctctaatcccaaccatccata

SEQ ID NO: 25155 - DNA, 329 bp, Homo sapiens
  misc_feature (1)...(329): n = a,t,c or g
caaaggtgtatttcgagtcttccacagcttctatttcctgttctgtggtaaattttattttaaataaggtctacagcttaaaccgagtttaacaaaaggtcacgaagaaaaagagattccttcagtgtttttataacattgcttgctttcccaatttagaaagctagatactttctgattttttggtagtaggaaagtagttttaaaaccccctacattttttacttaaaaagtcaaattagtggcatttttaattgaaatgattaaacttttgtcaatatcaaaaaaaaaaaacccaaaaaaattntttcccanaaaaaaaaaaaaaa

SEQ ID NO: 25156 - DNA, 475 bp, Homo sapiens
ggcaggctcaagttgggaaaccacaaagctgggataactgacctcactttgacctgaggcacaagtaaatggatgtgcaataaataaatgattggttttgaggacgattaatagtagctgtactaagaaagtcaccatctaatgtcctgatcatccatctggcacattcagaagatttttctgttttacaggttgttttgcttcattccctcctccagcaggtattccctgcagcagggctgacctgagtacctagatgtcagttccctgatctcgccacacatacattaaagtcaaggttcggcagggcacggtggctcacgcctgtaatcccagcactttcagaggccaaggcgggaggatcacctgaggtcaggagttcgagaccagcctggccaacatggtgaaaccccgtctctactaaaaatacaaaaattaaccgggtgtgggtggcacatgcctgtatccagctatt

SEQ ID NO: 25157 - DNA, 333 bp, Homo sapiens
ggcaggtcctgggccctcgggaaagagtggagccaggagcggtttggggaacacccctaggagaggaggggctggcttgggcagggtgccctggagtctgtgctactaggagggggtggagtctggacgccctgagggggcggggccaggaacatctccaggggtgggttttattggggcatatcatgggaggggcgtgactaaggtgggcgggcttcctggagccaagcctgcggggtgtggtcagaccccaagagtcctggtgagccggtggaacctatcccgggaggctcttggcccccacaaagggaaccctgacctgtacgatgtttg

SEQ ID NO: 25158 - DNA, 379 bp, Homo sapiens
cttggctaattttgtatttttagttgagacggggtttctccatgttggtcaggctagtctcaaactcccgacctcaggtgatcacccgcctcggcctcccaaagtgctgggattacaggcgtgagccactgggcccggctgagaaccattgttttaaagaactgacttgaggagaagcagcaggatgccaggagaaagtcatgagatacaagaaggaatgctaagcaaggaaaatggtaaatgactaaaactgaaacaaacatggactgtataaaatgataaaaatgattataaaatcgagagtagaggtaaaaatgatatctacttgttcttgtttattagaaaatgtgtaacaatgtttagctgaagtaacatgtaa

SEQ ID NO: 25159 - DNA, 449 bp, Homo sapiens
gatgaaaaacctcgcacagtatcgcaggaattatttgttcgcagtgtcatgttctcttgcagccttctaagccagctgaggtgcaaaatcaaaagtttcataacagagtggttctgtaaataccaaagactgtaaaacagccctgctagattaccacttgtcatcaggtaagcagtgccagaggatgacatgccatccacaggccaggccactgctggcaacccagagcaagcagagggaggggtgctggttatgcacttgctggccattcgagaacagcttttagttgagagttgttatgtggccttccttctacacccaggtttagggaggacctgccttctgactcttggaacacctgtaaaagcatgaatcctaaagtaggtaaagtgaaacttgctggtgatgaagaaaaagtccttcctccatcaggagtgaccacaggactg

SEQ ID NO: 25160 - DNA, 554 bp, Homo sapiens
  misc_feature (1)...(554): n = a,t,c or g
tnnnnctttgganntntngaatacccgttatgacatgactacgaatttaatacgactcactatagggaatttggccctcgaggccaagaattcggcacgaggctgccctggccgccttcaacgctcagaacaacggctccaattttcagctggaggaaatttcccgggctcagcttgtgcccctcccaccttctacctatgtggagtttacagtgtctggcactgactgtgttgctaaagaggccacagaggcagccaagtgtaacctgctggcagaaaagcaatatggcttttgtaaggcaacactcagtgagaagcttggtggggcagaggttgcagtgacctgcacggtgttccaaacacagcccgtgacctcacagccccaaccagaaggtgccaatgaagcagtccccacccccgtggtggacccagatgcacctccgtcccctccacttggcgcacctggactccctccagctggtnacccccagacttccatgngtactggcaagttcctcaggacaccagttgcaccgggcgncattanaactggc

SEQ ID NO: 25161 - DNA, 829 bp, Homo sapiens
  misc_feature (1)...(829): n = a,t,c or g
tatgacatgattacgaatttattacgactcactatagggaatttggccctcgaggccaagaattcggcacgagccctatcattgcccagtatggagatgtgttggtgagaaatctgaggcgggaagcagagacaggcaagcctgtcaccttgaaacacgtctttggggcctacagcatggatgtgatcactagcacatcatttggagtgagcatcgactctctcaacaatccacaagacccctttgtggaaaacaccaagaagcttttaagatttaatccattagatccattcgttctctcaataaaagtctttccattccttaccccaattcttgaagcattaaatatcactgtgtttccaagaaaagttataagttttctaacaaaatctgtaaaacagataaaagaaggtcgcctcaaagagacacaaaagcaccgagtggatttccttcagctgatgattgactcccagaattcaaaagactctgagacccacaaagctctgtctgatctggagctcgcagcccagtcaataatcttcatttttgctggctatgaaaccaccagcagtgttctttccttcactttatatgaactggccactcaccctgatgtccagcagaaactgcaaaaggagattgatgcagttttgcccaataaggcaccacctacctatgatgccgtggtacagatggagtaccttgacatggtggtgaatgaaacactcagattattcccagttctcgtgccgaattcttggcctcgagggccaaattccctatagtgagtcgtattaaattcgtaatcatgtcatagcgggtnttccaa

SEQ ID NO: 25162 - DNA, 455 bp, Homo sapiens
gggcggcgagcggttccttgtgggctagaagaatcctgcaaaaatgtctctctatccatctctcgaagacttgaaggtagacaaagtaattcaggctcaaactgctttttctgcaaaccctgccaatccagcaattttgtcagaagcttctgctcctatccctcacgatggaaatctctatcccagactgtatccagagctctctcaatacatggggctgagtttaaatgaagaagaaatacgtgcaaatgtggccgtggtttctggtgcaccacttcaggggcagttggtagcaagaccttccagtataaactatatggtggctcctgtaactggtaatgatgttggaattcgtagagcagaaattaagcaagggattcgtgaagtcattttgtgtaaggatcaagatggaaaaattggactcaggcttaaatcaatagataatggtatatttg

SEQ ID NO: 25163 - DNA, 424 bp, Homo sapiens
  misc_feature (1)...(424): n = a,t,c or g
gagaacatttgtgactaatgagaatatttgacaaatttgaagagtattctgaacaaacaacatagcaactagaaataccttaccatatgagaaatgatagtccctgagaaagcccctaagaggaacagcttagggcagacttgttagtatctttaaatatttgatgaaagaccattctattaaagataaatttaatgtataatgcttgagtaggtaaaaatatcaacattaataagagtttggaagtttggaagaagttgattccaacccacatggataacttgaggggttcaagacttcagtgtaggaagaaagtgcaaatgtggtagaaataggaagagaactagaattaaaagtggagccttaagatgggactgaattgttgcaatctcatgataaaatgtgagggaatgangagttgctt

SEQ ID NO: 25164 - DNA, 435 bp, Homo sapiens
gtctgttaatgcttgctttttctctacctttcttccttgtttcagttgggaagcttttggctgcaagtaacagaaactcctaattcaaatggcttaagcaataaggaaatgtatattcccacataactagacgttcaaacaggccaggctccagcacttcagtacgtcaccagggatctgggttcttcccagctctctgctctgccatctttagcgctggcttcattctcagactctggtagcatgatggctgtagctgtttcatgggccccttcaaacctcatagcaaccagaggaagaaaatgagccattttttgagtctccttcatagacttgaataactctttttcagagcttctcacagcaaacctctcctcatgtctcctcatgtcttattgttcagaaatgggtaatgtggccatttcaccagtcact

SEQ ID NO: 25165 - DNA, 261 bp, Homo sapiens
gtatcattaacttggtgtgtttctgtgctacttaatataggtggatagtggagaccttaaagagatgccaactggctggccaggagccagtgcagtggctcatgcctgtaatcccagcactttgggaggccaaggcaggcagatcacctgaggtcaggagttcgagaccaacctggccaacatggcgaaaccccgtctctactaaaaatacaaaaattagcagggcatggcacgtgcctctaatcctagctactcgggtga

SEQ ID NO: 25166 - DNA, 529 bp, Homo sapiens
  misc_feature (1)...(529): n = a,t,c or g
cccctatgacatgattacgaatttaatacgactcactatagggaatttggccctcgaggccaagaattcggcacgagcggcacgaggacatccaccaatgctggctctgcattggtacaagcagtggtaccatggcttgttgggacatgaggttccagttgccaatttcaagtcactgtcatccttccagggctcgaatcagacgcctctcaatgcaccctctgtatcagtcctgggtgattgcagctgttcagggcaacaacgaagtgtccatgtgggacatggagactggtgacagaagatttactctctgggccagcagtgcaccaccactttctgaattacagccttctcctcatagcgtccatggtatctactgtagtcctgcagatggaaatcctatcctactaacagctggctcagatatgaaaataaggttttgggacttggcttacccagaaaggtcctatgttgttgcaggaagtactagttccccatctgngcctactacaggaaaataattgaaggc

SEQ ID NO: 25167 - DNA, 564 bp, Homo sapiens
  misc_feature (1)...(564): n = a,t,c or g
atacgactcactatagggaatttggccctcgaggccaanaattcggcacnagancccatccaccacttccttggcatcagcaccttctcacagtacacagtggtggatgaaaatgcantanccaaaattgatgcagcctngcctctaaanaaagtctgtctcattggctgtggattttcaactggttatgggtctgcantcaatgttgccaaggtcaccccaggctctacctgtgctgtgtttggcctgggaggggtcggcctatctgctattatgggctgtaaagcagctggggcacccagaatcattgcggtggacatcaacaaggacaaatttgcaaaggccaaaaanttgggtgccactgaatgcatcaacccncaggactacaatnaaacccatccaggaggtgctaaangaaatgacngatggaggtgtggatttttcatttgaagtcatcggtcggnttgacaccatgatggcttccctgttangttgtcaagaangcatntgnanaaatgtcaacntnaggggaactcctgattcccaaaactcccantganccca

SEQ ID NO: 25168 - DNA, 456 bp, Homo sapiens
cagctatgacatgattacgaatttaatacgactcactatagggaatttggccctcgaggccaagaattcggcacgagcatttttaaaattctttcttgaaagtactgaaagtacctgtaaataattatgttagtataaatctatatcaatgcaaagtaatttgcttaatttttctgggcatactgtcagttttgggtatattcccaacgtcctagtagtagaacttgaaacaaaaataatggtgtagaccaggcatgttggctcatgcctataatcccagcactttgggaggcagaggcagaattgcttgagaccacgtgtttgataacagcttagacgacatattgagacctcatctctacaaaacaaatgaacaacagaaacataatgggtatagtggcaagttgatacatgtgaactttgttgtaaactgcattggattttaaaagagtaaaa

SEQ ID NO: 25169 - DNA, 443 bp, Homo sapiens
ggaaagtgacaacagcaagggtttctctttttggaaatgcgaggagggtatttccgcttctcgcagtggggcagggtggcagacgcctagcttgggtgagtgactatttctttataaaccacaactctgggcccgcaatggcagtccactgccttgctgcagtcacagaatggaaatctgcagaggcctccgcagtcacctaatcactctcctcctcttcctgttccattcagagacgatctgccgaccctctgggagaaaatccagcaagatgcaagccttcagaatctgggatgttaaccagaagaccttctatctgaggaacaaccaactagttgctggatacttgcaaggaccaaatgtcaatttagaagaaaagatagatgtggtacccattgagcctcatgctctgttcttgggaatccatggagggaagatgtgcc

SEQ ID NO: 25170 - DNA, 373 bp, Homo sapiens
gatgagaaatttgcatttaatgttaaactaactgttaatgctattttttaaatgtatcagtcttctattaatatggctgataccaggacaaagtaccactgggcttgtaccatgttcagcaacaccaacaacttttggggacctcagagcagccaatggccaagggcaacaacgacgccgaattacatctgtccagccacctacaggcctccaggaatggctaaaaatgtttcagagctggagtggaccagagaaattgcttgctttagatgaactcattgatagttgtgaaccaacacaagtaaaacatatgatgcaagtgatagaaccccagtttcaacgagacttcatttcattgctccctaaagagttg

SEQ ID NO: 25171 - DNA, 986 bp, Homo sapiens
gcggcacgaggagagtattggagaaggagtaagcacagtgaaaccaggtgacaaagttatcacactctttctgccacagtgtggagaatgtacctcttgcctgaattctgagggcaatttttgtatacaattcaaacagtcaaaaacccaactgatgtctgatggtaccagcaggtttacctgcaagggaaaatcaatatatcactttggtaataccagcaccttctgtgaatacacagtgataaaggaaatctcagttgccaagattgatgcagtcgctcctctagagaaagtatgcctaattagctgtggcttttccactgggtttggtgctgcaatcaatactgccaagttggagcctggctctgtttgtgccgtctttggtctgggaggagtcggattggcagttatcatgggctgtaaagtggctggtgcttcccggatcattggtgtggacatcaataaagataaatttgcaagggccaaagagtttggagccactgaatgtattaaccctcaggattttagtaaacccatccaggaagtgctcattgagatgaccgatggaggtgtggatttttcatttgaagtcatcggtcggcttgacaccatgatggcttccctgttatgttgtcatgaggcatgtggcacaagtgtcatcgtaggggtacctcctgattcccaaaacctctcaatgaaccctatgctgctactgactggacgtacctggaagggagctattcttggtggctttaaaagtaaagaatgtgttccaaaacttgtggctgattttatggctaagaagttttcattggatgcattaataacccatgttttaccttttgaaaaaataaatgaaggatttgacctgcttcactctgggaaaagtatccgtaccattctgatgttttgagacaatacagatgttttcccttgtggcagtcttcagcctcctctaccctacatgatctggagcaacagctggg

SEQ ID NO: 25172 - DNA, 470 bp, Homo sapiens
  misc_feature (1)...(470): n = a,t,c or g
gnnggtgnnnnnatttgannccctatttganaacgntatgacatgattacgaatttaatacgactcactatagggaatttggccctcgaggccaagaattcggcacgagcccgtttggtccgtgtgaagagctaccacaagccccagcctcacagtgtccactcaagggcagcttggtcctcttgtcctgcagaggcaggctggtgtgaccctgggaacttgacctgggaacaacaggtggtccagagtgagtgtggcctggcccctcaacctagtgtccgtcctcctctctcctggagccagtcttgagtttaaaggcattagtgttagatacagctccttgtggctggaaaacacccctctgctgataaagctcagggggcactgaggaagcagaggccccttgggggtgccctcctgaaganagcgtcaggccatcagctctgtccctctggtgctcccacgtctgt

SEQ ID NO: 25173 - DNA, 597 bp, Homo sapiens
  misc_feature (1)...(597): n = a,t,c or g
ttaatacgactcactatagggaatttggccctcgaggccaagaattcggcacgaggtgggagctggaggtgcagggggacctggaacatggatgggagtggacaggcctttctccttagaggccagaggtgctgccctggctgggagtgaagctccaggcactaccagctttcctgattttcccgtttggtccgtgtgaagagctaccacaagccccagcctcacagtgtccactcaagggcagcttggtcctcttgtcctgcagaggcaggctggtgtgaccctgggaacttgacctgggaacaacaggtggtccagagtgagtgtggcctggcccctcaacctagtgtccgtcctcctctctcctggagccagtcttgagtttaaaggcattagtgttagatacagctccttgtggctggaaaacacccctctgctgataaagctcagggggcactgaggaagcagaggccccttgggggtgccctcctgaagagagcgtcaggccatcagctctgtccctctggtgctcccacgtctgttcctacccttcatctntgggagcaactgcacctgactggccacccggggcaatgg

SEQ ID NO: 25174 - DNA, 375 bp, Homo sapiens
gcgtgcttctcagacagtgccttttcaccatgagtgggtgcccatttttaggaaacaactttggatatacttttaaaaaactccccgtagaaggcagcgaagaagacaaatcacaaactggtgtgaatagagccagcaaaggaggtcttatctatgggaactacctgcatttggaaaaagttttgaatgcacaagaactgcaaagtgaaacaaaaggaaataaaatccatgatgaacatctttttatcataactcatcaagcttatgaactctggtttaagcaaatcctctgggagttggattctgttcgagagatctttcagaatggccatgtcagagatgaaaggaacatgcttaaggttgtttctcggatgc

SEQ ID NO: 25175 - DNA, 465 bp, Homo sapiens
tttgaaaccgtatgactgattacgaatttaatacgactcactatagggaatttggccctcgaggccaagaattcggcacgaggtctttcaggtgtacccattgctcaactgtatggaggggatcccagggggctcaccatatgccggctgggcctacggcaagacggggctctaccctgcctcaactgtgtgtcccacccgcgaggactctcctccccaggccgtggaagatctggatggaaaaggcagcaccagcttcctggagactttgaagacagagcggctgagcccagacctcctgaccctgggacctgcactgccttcatcactccctgtccccaatagtgcttatgggggccctgacttttccagtaccttcttttctcccaccgggagccccctcaattcagcagcctattcctctcccaagcttcgtggaactctccccctgcctccctgtgaggc

SEQ ID NO: 25176 - DNA, 410 bp, Homo sapiens
ggaaaagaacttcgccagtgtatgctaccaaagtcagcagctttatctgaaaaactcaaagtattccaagaatttctcctgcccaggcatcctcctatttttcatgagtggtttctgagaacattccctgatcctacatcatggtacagtagtagatcagcttactgccgttccactgcagtaatgtcaatggttggttatattctggggcttggagaccgtcatggtgaaaatattctctttgattctttgactggtgaatgcgtacatgtagatttcaattgtcttttcaataagggagaaacctttgaagttccagaaattgtgccatttcgcctgactcataatatggtaaatggaatgggtcctatgggaacagagggtctttttcgaagagcatgtgaagttac

SEQ ID NO: 25177 - DNA, 435 bp, Homo sapiens
ctgctatgacatgattacgaatttaatacgactcactatagggaatttggccctcgaggccaagaattcggcacgagtctatcactgccataacagatgaccacaaacttagtgacttaaaagaataccagtatattatcctacagttctgcagctcagaagtgggaaatggatctcctgacttaaaatcaaggtgtcagctaatgtgtgttccatctggaaactctatgaaagaatccatttccttaatcatttcagctcctagaggcccagccacagtccttgtctgatggtcccaaagctagcaaaggggagttctcacattacgccactgtgacctcctcttctgtctccctcttccacatttaaggatccttgtgctaccctgggcctgcctggataatccagaataatcttcctactttaaggtcagct

SEQ ID NO: 25178 - DNA, 476 bp, Homo sapiens
  misc_feature (1)...(476): n = a,t,c or g
gntatgacatgattacgaatttaatacgactcactatagggaatttggccctcgaggccaagaattcggcacgagcgggccacctacgagcgtggcgtcaaggtgcgcctgctcatcagctgctggggacactcggagccatccatgcgggccttcctgctctctctggctgccctgcgtgacaaccatacccactctgacatccaggtgaaactctttgtggtccccgcggatgaggcccaggctcgaatcccatatgcccgtgtcaaccacaacaagtacatggtgactgaacgcgccacctacatcggaacctccaactggtctggcaactacttcacggagacggcaggcacctcgctgctggtgacgcagaatgggaggggcggcctgcggagccagctggaggccattttcctgagggactgggactccccttacagccatgaccttgacacctcactgacagcgtgggc

SEQ ID NO: 25179 - DNA, 403 bp, Homo sapiens
  misc_feature (1)...(403): n = a,t,c or g
tgactcgtgctgcatgcctggtctttcctctgtttctccttctgaaagttttctatacctgtaccttttctcagccacaaaataaatgttgggagaaatgatatataccactttcccagaaaaaaaaaaacttacacttgggacttggcaaattcctagtcacaatttttttcagcagtaacaggaaaccacttatcacatggagacctaatgtaataatagaaaaatactcataatagggagaaaccaagagaagttttgtttttgtttttttccaactgggttcattagaacagcgtgttctaagtatttgaaactgaatgtttattccttgatactaaaagttcttctccaatcctatcactgatagngccaaattctcaccaaattgctcctaagcttc

SEQ ID NO: 25180 - DNA, 345 bp, Homo sapiens
ggacagctgcctgagccagccagtgacagcgtttcctcagggcacttggattggtgaagacatattccctcctctgctgcctcccactgaacaggacctcactaagcttctcctggaggggcaaggggagtcggggggagggtccttgggggcacagcccctcctgcagccctcccactatgggcaatctgggatctcaatgtcccacatggacctaagggccaaccccagttggtgatcccagctggagggagaacccaaagagacagctcttctactacccccacagacctgctctggacacttgctcatgccctgccaagcagcagatggggagggtgccct

SEQ ID NO: 25181 - DNA, 465 bp, Homo sapiens
  misc_feature (1)...(465): n = a,t,c or g
gggtgcagaagtacccacagcagaatagatcatgtgtcccaccagtggcagagtgggctgttcctcagtcatcaagactgaaatacaggcaattattcaatagtcatgacaaaactatgagtggacacttaacaggtccccaagcaagaactattcttatgcagtcaagtttaccacaggctcagctggcttcaatatggaatctttctgacattgatcaagatggaaaacttacagcagaggaatttatcctggcaatgcacctcattgatgtagctatgtctggccaaccactgccacctgtcctgcctccagaatacattccaccttcttttagaagagttcgatctggcagtggtatatctgtcataagctcaacatctgtagatcagaggctaccagaggaaccagttttagaagatgaacnacnaccattagaaaagaaattcctgtaacgnttgaaaa

SEQ ID NO: 25182 - DNA, 327 bp, Homo sapiens
gactgattcaaccaaatggcgaagtcagagactatcgggggccatggagacactctgggccatttttatgaggtagtctaggctcatcttcatgagggaactgaggtcttggggggtgggggttacccaaataggttcacagaagaaccagaaataaaacctgcctttctagactgtaagtcttgtgattgtcatctaaatggttgtctctatacagcaactcatctctagaactgaaaataagtttaaatccctcctccatccccaataattcaagctgcatttcagagaaaaccaggactttggaatcagacagatcaactttga

SEQ ID NO: 25183 - DNA, 618 bp, Homo sapiens
gcagcatggtgtgtacatcttctccagcagtcttcagaataaccctaggagacagtactttatcacacaggggagaggttaagggtcctgactgcaagaagtgacagcaaagctgagctgcatggtatcaagtattcgttagtctggggaggagcagctcaacttgctgctaaaggagaatgcagagaagcatagaatggcaggaaaggaggaaggggcaggtgggcaggaaataaggctggccagaaacagcaaggcaccatgaaggcccctccctggctctgcctgcaccttgagaaaacctctttcctaaggtcacctgccatcttcccgttctgtgccaacctcctgggagaaaccttcacagatggtctggctaccatctagttttggcactgggtttccaccttcctcacaaacctcacaaactgccccaagtcctgggcaaaagtaggggagcaaccctgcagaagggcctcatgacctaagaagccagaaccaggatccaaaggacatggggtgtttaccccctcaggcaacagtgcccagtccctgccacctccccgagccccagcaccagcctcctcccatgttcttatgcagagccagaaacattcc

SEQ ID NO: 25184 - DNA, 539 bp, Homo sapiens
  misc_feature (1)...(539): n = a,t,c or g
taccactgatacttgtatgactgattacgaatttaatacgactcactatagggaatttggccctcgaggccaagaattcggcacgagcatctctcttgcccgctgccacaagcactgttgtaaacacactgaaaaacaaaagagttatgtccctgagtaacagcttatctgccagccattactcttaagcaccatttactggttcacagctcaatttaaaacatctacctatatatttgagactgtatctcactctgttacccaggctagagcgcagagaagcaatcgtagctcactgcagcctcaagctcctaggctcaagccattctcccacctcagccttctgagtagctgggactacaggcacacaccactacacttggctaatatgtgttattttctgtaaagacagggttttccatgttgcccaggctgatctcaaacttcnggnctcaagtgatcctcccaccttagcctggcaaagtgctggaattacaggcttgagccactggcctgacttcaaaaatagtttgcagtat

SEQ ID NO: 25185 - DNA, 365 bp, Homo sapiens
ccgtgccaaagatgcagcactgggaggaggacaccatcaggctggagctcagggaggagatgaaggtgaagctgctggagctgcaggagctggtcttacggcttgtgggcgaccgcaacgagtggcatggcagattcctggcagctgcccagaaccctgctgatgagcccacttcaggggccccagccccccaggaacttggggctgccaaccagcagggtgatctttgcgaggtgagcctcgccggcagtgtggagcctgcccaaggagaggccagggagggttctccccgtgacaaccccactgcacagcagatcatgcagctgcttcgtgagatgcagaacccccgggagcgcccaggcttg

SEQ ID NO: 25186 - DNA, 358 bp, Homo sapiens
ctttgatatcagagtaatgctgccttcataaaacgagttgggaagtgtttcttcctcttctttttctggaagaatttgagaaggtttgatgctaattcttctttaaatgattggtggtattcaacagagaagccatctggttggacttttcttagttgggaaatttttgattcatggttcaatctctttacttgttataggtctggtgagaatgttaatttcttcttgagtcagtttaggtaatttcagtatttttaggaacttgttcatttcatctgagttatctgatttgttgtcacacaattgttaatatttttataatgcattttatttctctaaagtcaacagtaatgtaccc

SEQ ID NO: 25187 - DNA, 408 bp, Homo sapiens
ggagagctagactgagcttcaataccctgtctcttaaagagaatctccaagtaagcatatggttctctccatttgagagtccagagatgttttatatggccttgcataatgtgaccttcttcagaccctcaccagagttagctcaaaaacaacagcagtcacgtttgatctgtagtctgaaaagctgtggtgctaaaccctgctaggatggactgaagaatagtgtcaaggtcttgcatatcttcattataccttctttggtattacatgggctgataggactttttagagtcctgcttgactgattatataggatgctatttcagtggcacagtccctccccatcacctcaacaagataagatgagagctgtaacaaagctgaagtgtttcatttcttcattctgag

SEQ ID NO: 25188 - DNA, 400 bp, Homo sapiens
  misc_feature (1)...(400): n = a,t,c or g
gccgagtagctgggattacaggcacctgccacgcctggctaatttcgtatttttagtagagacggggtttcaccatgttggccaggctgctctggaactcctgacctcaggtgatctgcccgccttggcctcccgaagtgctgagattacaggcatgagccactgtgcccagccttgctgctgatattcttatacatgtctcttggtacacatatagaaattttccctagcgtatggacttactggatcacaggatatgcacaccttcaactttattaggtattgtccagttttcccaagcatttggactggtttatacttccaccatcagtgcaagtgtcgtctccacaaaggcgctccttnttgnttcctcctaatataaagtanctggtatgnccct

SEQ ID NO: 25189 - DNA, 378 bp, Homo sapiens
ggttacgcacacgtacttaaatgaaagcatgtggcatgttcatcgtataacacaatatgaatacagggcatgcattttgcagcagtgagtctcttcagaaaacccttttctacagttagggttgagttacttcctatcaagccagtacgtgctaacaggctcaatattcctgaatgaaatatcagactagtgacaagctcctggtcttgagatgtcttctcgttaaggagatgggccttttggaggtaaaggataaaatgaatgagttctgtcatgattcactattctagaacttgcatgacctttactgtgttagctctttgaatgttcttgaaattttagactttctttgtaaacaaatgatatgtccttatcatt

SEQ ID NO: 25190 - DNA, 488 bp, Homo sapiens
attacgaatttaatacgactcactatagggaatttggccctcgaggccaagaattcggcacgagcgcagaggtgagagtcgcgcccgggagtccgccgcctgcgccaggatggagttcgtgaaatgccttggccaccccgaagagttctacaacctggtgcgcttccggatcgggggcaagcggaaggtgatgcccaagatggaccaggactcgctcagcagcagcctgaaaacttgctacaagtatctcaatcagaccagtcgcagtttcgcagctgttatccaggcgctggatggggaaatgcgcaacgcagtgtgcatattttatctggttctccgagctctggacacactggaagatgacatgaccatcagtgtggaaaagaaggtcccgctgttacacaactttcactctttcctttaccaaccagactggcggttcatggagagcaagggagaaggatcgccagtgcctggaggacttccca

SEQ ID NO: 25191 - DNA, 311 bp, Homo sapiens
ggcaaatcagtgccccctggttgtggaaccatcttacccagacctggtcatcaatgtaggagaagtgactcttggagaagaaaacagaaaaaagctgcagaaaattcagagagaccaagagaaggagagagttatgcgggctgcatgtgctttattaaactcaggaggaggagtgattcgaatggccaagaaggttgagcatcccgtggagatgggactggatttagaacagtctttgagagagcttattcagtcttcagatctgcaggctttctttgagaccaagcaacaaggaaggtgtttttacattt

SEQ ID NO: 25192 - DNA, 464 bp, Homo sapiens
tttggaaacccttttgacatcattacgaatttaatacgactcactatagggaatttggccctcgaggccaagaattcggcacgaggttgtgaggtttttattctgaaccttttcacatcttcagtatatgctcttcatttttcaatcagttaattcccaacagtcattgtcaccagtaatcttatattttacagtttaaaggattatatgataaactttccattttataaatggtaaaaatccctttcaggatttctggtgaagcacgtttgaagaaacatactggttggaaagcagcgtgaagtatgcccctgtggaaacactaccgggagccaaggagattgccctctcatcgcggggccagtcctagaagccacttcttccccaaggcaatggcaggaggaaagatttgacttagtgtggggatgataaagatcaggaggttgcagcacatcatcatagga

SEQ ID NO: 25193 - DNA, 501 bp, Homo sapiens
  misc_feature (1)...(501): n = a,t,c or g
aaacagctatgacatgattacgaatttaatacgactcactatagggaatttggccctcgaggccaagaattcggcacgagccctcccttcccctcccctctcctcctgtcccctcccttcccctccccttcaatttattcttaaaacagcagccggagtaattccgttaacatgtaagtcacatcatgccattcctctgctcaaactctccaatggcaccccagctccaatggcaccccaggaaaaatgtcaagtctttctatcagccttcctggccttactggccttcctgaccctgatccacccacagctctgaccggatctccttctgctctcctcttcacacacgcttcactccagccttactggccacctccttgctcctctgaacacactaggcaagctcccatcaacaggtctctgcatctgctggccctctgcctggaagtctctcctcccagctgctgcgtgggtnccttccttcaattctttcttcaatgc

SEQ ID NO: 25194 - DNA, 358 bp, Homo sapiens
gcggcacgagtggggtttcagagataattcccagcctcacaattcctcatgaagttcttttcctgtgggaaacttttaatttggaagcatgcaacctaatgtgggaaccaagattaacattttctgaaatacttctacaagaaaagcagaaatggtctgtccaggaagctgaatttacatagtagaaaaatgagctgccctgcagtatttggtaggtctttgtgtattggttgtgataaaagtgtgtatgtgtgtgtgtacgtgtgtgagagtgagagattgtatacttgcctttgtttccttcacatacaactagtaaggccctagaaaaactacactagaaagtgggtttacccca

SEQ ID NO: 25195 - DNA, 449 bp, Homo sapiens
  misc_feature (1)...(449): n = a,t,c or g
gtcaataccctggtttttaaaatcagtggctaacaagtacttgcaatttgttgcctgtggctcagttacacctttggcatctagaatggttatactgctttacatttagtagcttccaacatttctgaattatcaaagttataaaaagctatcaaaactagagattcttatagatgaagtaaatcctcgtaagggaagatacttagctactgaggcttgagcagattaaaacatctgtcatcctttaactctcttcctcttgctcaaacactattagcccttagattcacaaagttacagaaagtttggtggaaaatattaagatatagccaccttgtgattttgtactaagaatgaataaatgatttactgnaaatgtagtttttgcctgtaatcccagcactttgggaggctgangtggatggccacctgagggcangagttgagac

SEQ ID NO: 25196 - DNA, 366 bp, Homo sapiens
ctcccatgtactttttgaaagacagcttattggtttcccttttagagatgagggaccagatttaagagcttattttgtgctttacattcattaactcacttgatctccacagcaactccatgagaagggtgctaatattaccactgggtactgagtagtacctctctttcactagttgcataataagaattaacccagagagtgacctgagggcgggattttggacacacttgacaagagaggaagaggctggagcgcaggaggtagctggtgctgggctcctagtcttggcagaggagcccaaagcacttggctgccctgcgtgtcactcatctccctttgcctcccagctggagtcctggatgc

SEQ ID NO: 25197 - DNA, 436 bp, Homo sapiens
ggaatctagcaccatgacggaactagagacagccatgggcatgatcatagacgtcttttcccgatattcgggcagcgagggcagcacgcagaccctgaccaagggggagctcaaggtgctgatggagaaggagctaccaggcttcctgcagagtggaaaagacaaggatgccgtggataaattgctcaaggacctggacgccaatggagatgcccaggtggacttcagtgagttcatcgtgttcgtggctgcaatcacgtctgcctgtcacaagtactttgagaaggcaggactcaaatgatgccctggagatgtcacagattcctggcagagccatggtcccaggcttcccaaaagtgtttgttggcaattattcccctaggctgagcctgctcatgtacctctgattaataaatgcttatgaaatgaaaaaaaa

SEQ ID NO: 25198 - DNA, 362 bp, Homo sapiens
gacagctcaatccggtactttgagatcacttccgaggcccctttcctgcactatctctccatgttcagttccaaggagtcccagcggggcatgggctacatgcccaaacgtggcctggaggtgaacaagtgtgagatcgccaggttctacaagctgcacgagcggaggtgtgagcccattgccatgacagtgcctcgaaagtcggacctgttccaggaggacctgtacccacccaccgcagggcccgaccctgccctcacggctgaggagtggctggggggtcgggatgctgggcccctcctcatctccctcaaggatggctacgtacccccaaagagccgggagctgagggtcaaccgggg

SEQ ID NO: 25199 - DNA, 529 bp, Homo sapiens
gaaggcggcgggaggcggcgagcgccatggccagtccgggctgcctgctgtgcgtgctgggcctgctactctgcggggcggcgagcctcgagctgtctagaccccacggcgacaccgccaagaagcccatcatcggaatattaatgcaaaaatgccgtaataaagtcatgaaaaactatggaagatactatattgctgcgtcctatgtaaagtacttggagtctgcaggtgcgagagttgtaccagtaaggctggatcttacagagaaagactatgaaatacttttcaaatctattaatggaatccttttccctggaggaagtgttgacctcagacgctcagattatgctaaagtggccaaaatattttataacttgtccatacagagttttgatgatggagactattttcctgtgtggggcacatgccttggatttgaagagctttcactgctgattagtggagagtgcttattaactgccacagatactgttgacgtggcaatgccgctgaacttcactggaggtca

SEQ ID NO: 25200 - DNA, 362 bp, Homo sapiens
gccataggttaactggtctgcctttgtgaaaagtagatgtaggtttttcggaagtcctaaaagagagctggctggaaagagtgcatttgtaggccattccattttcagagcctgctcccaaatgcctgtgctctgaggtcctccccctgggagaggtttcattttggatgtaggaaaaccatctctcctggtgactatccttgtcggcctagcatctgagaatctagaaataaaatggaatgtcatcatttttgagaactgctttttaatgctcctccaggagaataaaatagcagtctggttcttggtgcctgctactttcaagtgaggacacattacaggttaaaattagaaaacactgt

SEQ ID NO: 25201 - DNA, 690 bp, Homo sapiens
gtttggcttcaccctctgataccaactgattatattaaaaacttaccaatgtggcgatttaaatgtcttggagtccagtctgaagaggaaatgtcggaggggtctcaagatactgaaaatgactcggaaagtgagaacacagacactttgagtagtgagaaggaagtatttgaagataagcaaagcgtacttcacaattctccaggaacagcaagtcactgtgatgctgaggcttgttcatgtgccaataaatattgtcagaccagcccatgtgaaaggaaggggaggtcatatggatcatataacactaatgaagatatggaacctgattggttaacttggcctgctgatatgctgcactgtactgaatgtgttgtttgcctagagaattttgaaaatggatgtttgctaatggggttgccttgtggtcatgtgtttcatcagaattgcattgtgatgtggttggctgggggccgacattgttgccctgtttgccggtggccttcttataaaaaaaagcagccatatgcacaacaccagcccttgtcaaatgatgtcccatcttaaccatgtgcaatttgtcctttataagctttgagtatcttacagcttgcctttttaatgttagtcacaatgtttttgtggtttgaagtttagtttaatgttagtgcagtgacgggaaatacacat

SEQ ID NO: 25202 - DNA, 353 bp, Homo sapiens
gcggcacgagtgagaagatagctgttgtgtgcacactcctggctcctcctcattctcctcacttgagtaccagtggcctctgagcatgagaacagaggcctgtcttgctttcaccaagccccagtagctggaaggcacttaggaaactgtaagtggcccctggaaaggacctgtgaagctgccgagcaccctctggcatctcaggagagggaagtagatcagcagctcaggatttggggctggctgttgagcaatggtggggcccctagaagagaagcccacctcttcccagaggccttcagaagagacctctccttgtgtggggcctgttgtgctttttctctcttggcctt

SEQ ID NO: 25203 - DNA, 410 bp, Homo sapiens
gtaactattacaagttacagtagaatgaacatctatgggtgtataaaagtcttgttcctggggaagacattgtttatacaaactccagcttgatctttgataaatccttttacctaagggtgtgaaataatcatttaaaaatacataggcaaattatgatatttcatgcaaattatgacattctgtaaaaagtaaaacaatatcattgataagcataatatactagcactgtgtgcttcaattaatattttttaatcatgaaattcacataaaataaaacttaccatttaaacaatttaaagtatacaactgaagtgccatttagtactgtcacagtattgtgtgatcatcaccattcacaccattagttagttccagaacattttcatcagccccaaaggaaactctgt

SEQ ID NO: 25204 - DNA, 333 bp, Homo sapiens
gagatagaatccacgtctttcactttaggcctaggatagccactagccatggatgattgggaagagtttctgtcaaagactcttaaaactttgagagtgagcctgctgcttttgtgggcatggacagtgttggtcataagcaatacatttgctctcactccaaacagaattcttagttgctgtgagaagagaaggactagcagtaaggcattaggggaacccattacctgaccagtatccctgcccccaaccctacctggtctattttgtttgtatttatccactatccctttttaatttttgttgtagatccttcccgccagaagaaacttg

SEQ ID NO: 25205 - DNA, 376 bp, Homo sapiens
tttaaatactcaatctcctctccaaggagtctgcaatggtgcactaccagtgagaattcttcaagcatcttgggtaactgatgctgggttgtacatgtcttcttccaggattccttttcttcaacgtactggaaaataagcttatgaactaaaagggaggaaggaggagcttgatcctcatctaacagagattgaaaattgacatcaacaatcttcctataacgcttgtccaggaaagggaaaccaacaactgactcttcaaaggtgatggtgagttgtatcgtgtcataaacaaaggtgaatacagcttgatcatcactccactcaacgacatcccactcagacaagctcaactgatccagtagctcttcagttc

SEQ ID NO: 25206 - DNA, 343 bp, Homo sapiens
ggccaagatcatgaaggcaaaccctgccctgtatgtgttacgtgaacggatccgcaaggggctacagctctattcatctgaacccactgagccttatttgtcttctcagaactatggtgagctcttctccaaccagattatctggtttgtggatgacaccaacgtctacagagtgactattcacaagacctttgaagggaacttgacaaccaagcccatcaacggagccatcttcatcttcaacccacgcacagggcagctgttcctcaagataatccacacgtccgtgtgggcgggacagaagcgtttggggcagttggctaagtggaagacagctgaggag

SEQ ID NO: 25207 - DNA, 330 bp, Homo sapiens
tggctttaaaagaagccaaagcactactagctttttttccatattggtatttttgatgctgcttccaattttaaaagggaacaaagctgccataaatcgaaatgttcaatactaaaagctaaaatatttctcaccatcctaagcagataattattttaattttcatatacttttcctgtatagtaactattttgattatatcatcaatgttacctgtttcctctttcagaacagtgctgcatatacagattgttattggcaaaggaaaatctggctatctggcaatattttacctaagcgcagattaattggtgaaaaaattaactctta

SEQ ID NO: 25208 - DNA, 444 bp, Homo sapiens
  misc_feature (1)...(444): n = a,t,c or g
ggactcacagatttccaagcaagccctcagtgagattgagggacgacacaaggacattgtgaggctggagagcagcatcaaggagcttcacgacatgtttatggacatcgccatgctggtggagaatcagggtgagatgttagataacatagagttgaatgtcatgcacacagtggaccacgtggagaaggcacgagatgaaacgaaaaaagctgtgaaataccagagtcaggcccggaagaaattgataattatcattgtgctagtagttgtgttgctgggcattttagcattgattattggactttccgttgggctgaattaagagtggcctaagaggctgctgcactgaaataaactgatttcactccagactggtgtggccacccttgcttcagatgaaaatggagtctgaatggccttcctgananccaatgccacccc

SEQ ID NO: 25209 - DNA, 476 bp, Homo sapiens
ccattgctatgacatgattacgaatttaatacgactcactatagggaatttggccctcgaggccaagaattcggcacgagcccctttctctgtgcaacctctctgccccttaataaatgtttttggtactgactactgctgctcctgctaataccatcctgtagaaatttttcttgagtgaggaatagtttttagaaggcttttatgatgataacttttaaatttatttttaactatgccagcaggttattagatatataggttcaaaggagattgaggctggagtctgttcaaacattttcagaggtgaagatgacacagggttcatggagatttccttcatggtaccagaacagggcagggtttcactgcatgataatacccatgtttccattgcttgtagacctaatcatttttacttattgattggcactgtgggccaagatcgtgacatccatcctaataagcaggtctca

SEQ ID NO: 25210 - DNA, 355 bp, Homo sapiens
  misc_feature (1)...(355): n = a,t,c or g
ggagcaaaggcccgctggatcagctagagaaaggaggggaaactgctcagtctgcagatccccagtgggagcagttaaataacaaaaacctgagcatgcctcttctccctgccgacttccacaaggaaaacaccgtcaccaacgactggattccagagggggaggaggacgacgactatctggacctggagaagatattcagtgaagacgacgactacatcgacatcgtcgacagtctgtcagtttccccgacagactctgatgtgagtgctgggaacatccttcagctttttcatggcaagaaccggattccagcgtnttaacattctnaacgccaagtttgnttttaacctct

SEQ ID NO: 25211 - DNA, 461 bp, Homo sapiens
  misc_feature (1)...(461): n = a,t,c or g
caatgctatgacatgattacgaatttaatacgactcactatagggaatttggccctcgaggccaagaattcggcacgagcgaggacgtgcgcaaggtgtgccaagactgccccctgctggccccgctgaacgacaccagggtggtgcacgccgcgaaagctgccctggccgccttcaacgctcagaacaacggctccaattttcagctggaggaaatttcccgggctcagcttgtgcccctcccaccttctacctatgtggagtttacagtgtctggcactgactgtgttgctaaagaggccacagaggcagccaagtgtaacctgctggcagaaaagcaatatggcttttgtaaggcaacactcagtgagaagcttggtggggcagaggttgcagtgacctgcacggtgttccaaacacagcccgtgacctnacagccccaaccagaaggtgccaatgaa

SEQ ID NO: 25212 - DNA, 427 bp, Homo sapiens
gcatcttctgagcaccggagcatttaaatagatcctctagtaagggattgagatgtcttctaaggaacagcatgtaagccactgccctgtaactttctgcacaattgctagggcatgcatggtgggctcacttgtattcagatagctttctggggtaaaatacaaatgctcagaatcaagatttggaacatctgccttgcacagactaagtgcggcttatgccataggtgagtgtctatgtttgatgagctatttcatgctgtaccacttaaaatcaccgagaacaattgaattttctgaaagatatcttcctcatggggtggcataaagttgctactcgggaggcacccgttttgcagggtgaaatgcaaagtgaactgaagacttgccctaagtgttcttcactctattatcctggagagaacaa

SEQ ID NO: 25213 - DNA, 524 bp, Homo sapiens
  misc_feature (1)...(524): n = a,t,c or g
ttgannccctaacagctattttgatgaccatagcagctatgacatgattacnaatttaatacgantcantatagggaatttggccctcgaggccaanaattcggcacgagggcaaagcctgagagaggccgattcctccacttccactctgtgaccttctgggttggcaacgccaagcaggccgcgtcattctactgcagcaagatgggctttgaacctctagcctacaggggcctggagaccggttcccgggaggtggtcagccatgtaatcaaacaagggaagattgtgtttgtcctctcctcagcgctcaacccctggaacaaagagatgggcgatcacctggtgaaacacggtgacggagtgaaggacattgcgttcgaggtggaagattgtgactacatcgtgcacaaagcacgggaacggggcgccaaaatcatgcgggagccctgtgtanagcaagacaagtttgggaaggtgaagtttgctgtgctgcagacgtatggggacaccacacacaccct

SEQ ID NO: 25214 - DNA, 644 bp, Homo sapiens
gacatgattacgaatttaatacgactcactatagggaatttggccctcgaggccaagaattcggcacgagctaagatcaatcatgacgacttacagtgacaaaggggcaaagcctgagagaggccgattcctccacttccactctgtgaccttctgggttggcaacgccaagcaggccgcgtcattctactgcagcaagatgggctttgaacctctagcctacaggggcctggagaccggttcccgggaggtggtcagccatgtaatcaaacaagggaagattgtgtttgtcctctcctcagcgctcaacccctggaacaaagagatgggcgatcacctggtgaaacacggtgacggagtgaaggacattgcgttcgaggtggaagattgtgactacatcgtgcagaaagcacgggaacggggcgccaaaatcatgcgggagccctgggtagagcaagacaagtttgggaaggtgaagtttgctgtgctgcagacgtatggggacaccacacacaccctggtggagaagatgaactacatcggccaattcttgcctggatatgaggccccagcgttcatggaccccctacttcctaaactgcccaaatgcagtctggagatgatcgaccacattgtgggaaact

SEQ ID NO: 25215 - DNA, 353 bp, Homo sapiens
ctttatcagccatacagcctgttacattactcaattctgctgtgtggtgcaaaagcagcaacacacattatgtaaacaaacgagtgtggctgtgttccaataaactcaacttatggacactgaaatttgaatttcataatatcattgtatcataaagtattattcttctgatattttttttcctaagcacttataaaaatgtaaagacctttctttgcttgtgattcttataaaaggaaagcgagctagatttggtccacagagtgtagtttgccaattcctctttaaaaatgatatattcacatctattcagcataaagaaatatctaacgtggaactatgctggttgaaaa

SEQ ID NO: 25216 - DNA, 522 bp, Homo sapiens
  misc_feature (1)...(522): n = a,t,c or g
cctatggagtggtctacagagcaaaagacaagaaaacagatgaaattgtggctctaaagcggctgaagatggagaaggagaaggagggcttcccgatcacgtccctgagggagatcaacaccatcctcaaggcccagcatcccaacattgtcaccgttagagagattgtggtgggcagcaacatggacaagatctacatcgtgatgaactacgtggagcacgacctcaagagcctgatggagaccatgaaacagcccttcctgccaggggaggtgaagaccctgatgatccagctgctgcggggggtgaaacacctgcacgacaactggatcctgcaccgtgacctcaagacgtccaacctgctgctgagccacgccggcatcctcaagggtgggtgattttgggctggcgccggaatacggatccctctgaagnctacacccccgtcgtggtgaccagtggtacccggccccaaancttctgcttggtgcccaggaatacttccnggcgtggacatgtggt

SEQ ID NO: 25217 - DNA, 414 bp, Homo sapiens
ggaaacaaaggattatggaactaagcgtcttgtagaaggaactattaatccaggagaaacctgtttaatcattgaagatgttgtcaccagtggatctagtgttttggaaactgttgaggttcttcagaaggagggcttgaaggtcactgatgccatagtgctgttggacagagagcagggaggcaaggacaagttgcaggcgcacgggatccgcctccactcagtgtgtacattgtccaaaatgctggagattctcgagcagcagaaaaaagttgatgctgagacagttgggagagtgaagaggtttattcaggagaatgtctttgtggcagcgaatcataatggttctcccctttctataaaggaagcacccaaagaactcagcttcggtgcacgtgcaaactgccaggatcc

SEQ ID NO: 25218 - DNA, 362 bp, Homo sapiens
gccaggatgctctcgatctcctgaccttatgatccacctgcctgggcctcccaaggtgctgggattacaggcatgagccacggtgcccagcccaatttgattattaacataggtgagagttaacccactatgactttgcccattgtttagaaagaatattcatagtttaattatgacatttttgatgagacacagtggctcacgcctgtagtcccggcactttgggaggccaaggcaggcagatcatctgaggccaggagttcaggaccagcctgaccaacatagtgaagccccctttctactaaaaatacaaaaattactaggtatggtggcacacgcctgtggctcaactacccaggagg

SEQ ID NO: 25219 - DNA, 509 bp, Homo sapiens
gtggagggacatcaaaattactttcgtcactgctcctatctgattctgaatcagaccagggatttctcttctttccttttttgattggcttaaatgccaatgtagtttgtttctttgtctttgtacctggttctcttttctgtttcttttctaatctttgttttaggccttctagttccacaccatcttcttgagggcttccttcagtattcattcttaattttctttttatttttcttttctgcctctgctttcatttctatggttattcgtggaatgactctttgaccacgcggagaaggcaaaacttcagccatttgtgtttttttccccttggccttcccccctttcccaggaagtccgacttgttcatcttgtttttccttggcttcaacagcctccaattcttcaataaatgtagccaagtcttctttccacaaatctgatggactctttctttttaatgtgtccagctcttgttctttttcatttcttagcctgcagagttc

SEQ ID NO: 25220 - DNA, 437 bp, Homo sapiens
aaccgctatgacatgattacgaatttaatacgactcactatagggaatttggccctcgaggccaagaattcggcacgagaaaatttttttctcaagtgtccatggaatattcagaaagatagaccatattctgggccataaataagccttggcagatttaaaagaattgaaatcattctgagtatgtatgttttctggccataatgaaaccaaactacaaatcagtaatagagtgacaataggaaaatatctaatcatttagaaattaaacatcagacttctaaataaagtctggagtgaagaaggggcctcaaattcaatagtagaaatgcatagacttaatgaaaatgagaccataccgtatcaatatatgtgggaggtagctaaagcagtgctgatagagaaatttatggcactaaatgcttgacagtagacaa

SEQ ID NO: 25221 - DNA, 391 bp, Homo sapiens
gctacatgcagatatcaagccagacaatatcctggttaatgaatccaaaactattttaaagctttgcgattttgggtcggcttcacatgttgcggataatgacataacaccttatcttgtcagtagattttatcgtgctcctgaaatcattataggtaaaagctatgactatggtatagatatgtggtctgtaggttgcaccttatacgaactctatactggaaaaattttattccctggcaaaaccaataaccatatgctgaagcttgcaatggatctcaaaggaaagatgccaaataagatgattcgaaaaggtgtgttcaaagatcagcattttgatcaaaatctcaacttcatgtacatagaagttgataaagtaacagagagggag

SEQ ID NO: 25222 - DNA, 564 bp, Homo sapiens
gcataggcaggatgtggttaggattgtgggtgagtacctaactggcatgcatcaccaacagccaatagctgttggtggctacaaggtgactctgggacagatgcatggccttttaacagaaaggagaaccaaaatgtcctcggtatttgaggatcagaacgcagcaacccatctcattcgccacgctgtgggcaacaacgagtttgggactgttgatcatgagcgcctctctaaaatgcttagtcttcctgaagagcttgctcgaatgtacagagatgacattacaatcattgtagttcagttcaattctcatgttgtaggggcgtatcaaaaccaagaatagtgagtggctctttcactggcaattctcaaatgatacacatttaaagggcagatttttttaaaaagatactactataataaacatttccagttggtcattctaagcatttacccttttgatactctagctagtcaggtactccaaattgactttgcagcagggtggcagggtcaggagagtctggcctgcctagcttaaaattcatggcacctgcacttgaa

SEQ ID NO: 25223 - DNA, 435 bp, Homo sapiens
  misc_feature (1)...(435): n = a,t,c or g
gcaccaagagagctagcacaataccctgaagtatcctgctgaagctcgattttagcagaacccacatctttgcctggcttcttcctctaacccagtagatctcaaattttagcaccattagaagcacctggaagacttattaaaccacagactgctgccaagccccgctgagtttctgattcaggattctggagacctgggtataggtatttctaccaggtgatgctgacccagctagtccaggggccactgccctcctcatcctgctttccccccttgctaatattactaaacattccttgaccataggagtctatctatcccttagccaactttgtgtctcctttattacctaacactaacaactgaaatcaatctactgagcttaaggnatgcactgtactacatacnataactaaaacttggnccctactg

SEQ ID NO: 25224 - DNA, 378 bp, Homo sapiens
gctagaaatcagtaacaaggaaaacttgaaaactcacaaatatatggaaaataaacacactcttgatcactggttggagatgaaatcatacaggaaattagaaaacactttgagatgaatgaaaatgaaaacacaacataccagaacttatgggatgaagttaaagcagcgttcagagggaaatgtttagctgtaagcatctacctttaaaaataagaaagccagcagtggtggctcatgccaacatcccagtattttgggaggctgaagcgggaggatcccctgaggtcaggagttcaagaccagtctaaccaacatggcaaaagcccatcgctactaaaaatacaaaaattagccaggcatggtgatgcaggcctg

SEQ ID NO: 25225 - DNA, 389 bp, Homo sapiens
ggagagtagcacatgagcttcaataccctgcaagagaggtgaagactcaagttctatttgtttctggcatgaaaagcgatggtttccttctcatcactcataaaaaatagcagaaatgtggcaattgcgggatcgatcccaccgcacaccatacgtgtgcatatgctaccatgcacataggcctcaacccaggcatgggaaataccagtaggagcggcaaagagaccttccaatctctctagaaactccctacaactgaaccagtgctacttcagatcccgccgcacaccatacgcgtgcatatgctaccatgcacataggacgtgaggtctggcgtcaactcaggcatgggaaataccagtaggagtggcaaagagaccttccaatct

SEQ ID NO: 25226 - DNA, 407 bp, Homo sapiens
gactgctctgtgcctcagtttccttacttgtaaaatgggatctctacccacttcgctgtagggtttgtaattatctctcgatctatctgtgactttgcacagagtgctagcaaatggcagcccttgggagtggcagcaggggtgctccagtgtcccttgtccctcctgttcctctgtgcttcccagccatcctctcacatgtggttgggaaaagtcttcaaggctcacctgagacctcccctccttcaggaagccttgctagtgccccgcatgacctcctttgcacctgctaatgtctggctcccatactctcgtaggacttaatgcatgccagtggcctccctgcccgcctctttgcccccatcaccaggtggcaggaaactcactcattcattcaataaacttgg

SEQ ID NO: 25227 - DNA, 465 bp, Homo sapiens
gtcttatagtgtttggacagctgataaatttaatccttctttgtaatactttctatgtgacatttctcttccccttagaaacactgcaaattttaactgtaggtatgatctcttctggtgttgactggactgcttggggtgggggacgatcaggaggaagtgagcagtcgcctgcctgcagcaggcagcttctactcctgcctcatgcatacgtcccacaaatgcaggtgtcctgagcaccacacctagtgggaagagtgtgggggaggcgcacagtgtgagcccgcccccacgtcgtggggtaacatctgttatcaaactgctgtcgttgttgtggaagcatgtagactgtgccagaggccagacccacgggctcatgcacccctgagccagcagggcatcttggaaaaggaactcttggttcgatacctggagcagaggaggggaaagtccagggctataggg

SEQ ID NO: 25228 - DNA, 445 bp, Homo sapiens
gcaaccacgaggtgatgaaagccatcaatgatggcttccggctccccacacccatggactgcccctccgccatctaccagctcatgatgcagtgctggcagcaggagcgtgcccgccgccccaagttcgctgacatcgtcagcatcctggacaagctcattcgtgcccctgactccctcaagaccctggctgactttgacccccgcgtgtctatccggctccccagcacgagcggctcggagggggtgcccttccgcacggtgtccgagtggctggagtccatcaagatgcagcagtatacggagcacttcatggcggccggctacactgccatcgagaaggtggtgcagatgaccaacgacgacatcaagaggattggggtgcggctgccggccaccagaagcgcatcgcctacagcctgctgggactcaaggaccaggtgaac

SEQ ID NO: 25229 - DNA, 712 bp, Homo sapiens
acaaaagtagccataaagactcttaaaccaggcacaatgtcccccgaatcattccttgaggaagcgcagatcatgaagaagctgaagcacgacaagctggtccagctctatgcagtggtgtctgaggagcccatctacatcgtcaccgagtatatgaacaaaggaagtttactggatttcctgaagagcgatgaaggtggcaaagtgctgcttccaaagctcattgacttttctgctcagattgcagagggaatggcatacatcgagcggaagaactacattcaccgggacctgcgagcagctaatgttctggtctccgagtcactcatgtgcaaaattgcagattttggccttggcccgattgatagaagataatgagtacacagcaagacaaggtgcaaagttccccatcaagtggacggcccccgaggcagccctgtacgggaggttcacaatcaagtctgacgtgtggtcttttggaatcttactcacagagctggtcaccaaaggaagagtgccatacccaggcatgaacaaccgggaggtgctggagcaggtggagcgaggctacaggatgccctgcccgcaggactgccccatctctctgcatgagctcatgatccactgctggaaaaaggaccctgaagaacgccccacttttgagtacttgcagagcttcctggaagactactttaccgcgacagagccccag

SEQ ID NO: 25230 - DNA, 546 bp, Homo sapiens
  misc_feature (1)...(546): n = a,t,c or g
gctgaggagcagtcccccaggtaccctcctcggtgatatcccagccttcctctgaatgcctgatggtgctgagtcctccaggtcattttggtgggtctcccccccgactgaaccaagtgcagggaccatgggtatacttaacccaaatctgtctgttttaatcactgtcctctggacagataaaagctttccataggattgctctctcaagcattcctctgtggctttgatactagtgattaaatcatggaagggaaagcaaaacaaaacaaaacataaaagggaccagctccaacctttagcttttaatttttttagcctcatgaaagaaaccagattgttgacctaaattccccctttcatcccctcatcttctcacctctgctggnattctcctggcagaagtcccacaggtagtggcatcctttaattgaagggnctgaaactgcttttacctggcccacaatgaccttacattttccnanggggaaccaagcttgggaaacctggaatcgctgggatcttggagncncaaatgtggatgga

SEQ ID NO: 25231 - DNA, 542 bp, Homo sapiens
  misc_feature (1)...(542): n = a,t,c or g
accgttatgacatgattacgaatttaatacgactcactatagggaatttggccctcgaggccaagaattcggcacgagaacgatgatgtatacaaattatagcacggagagggaacggccaagttgtttcctctttccatgcctccaactcctctgaaatgtgggtcatgatgataataggaaaaactgtctctgccatagagaggtggaaaaagtcccgcgaagtgtccccggtatctagaaagcgctcagtagtgtttgctgttatcttagggatatcaggctgcctggacatttctcagaggatgaaggggattgtagtaaggaagaccaccttccagaggatgaaggggattgtagtaaggaagaccaccttctagaggatgaaggggattgtaggaaggaagaccaccttccagaggatgaaggggattgtaggaaggaagaccaccttcccggggctgggcaaggctgcggnactgnctntcatcaggtccaggaggactcagnaggctgatgcanagggacacacgcatcngcct

SEQ ID NO: 25232 - DNA, 519 bp, Homo sapiens
ggaaaaggcaaggaaagagtctcccctcaagctccagcaggaatgcagtcctgacaccttgagtttagcctagtgagacttctgacctccagaactagaagatacaagtggtgttttaaggcactaaaacgaagaactagaagtgttgttttaagcccataaatttgtgataatctgttacagtagtaataggcaatgcatacacaagcacacaaagtaaaatttttctgtggttattttccatattttttcagttattttctgccttttgaagacattaaagacataaaatgaatatgtattagtttaggaataaaatttaaaatgtaggaatgctataaaagaagaaaaaattttaactgggctaaagcgaacccagtatgtcatcctattacatcagcttcttcatctttggatgaagaggttggtgactgtttcttctaatgtgagaatagctcccaattgctaattggtcagaatttgacaagatgaaagaggaaagaaaaaggaaatcttgat

SEQ ID NO: 25233 - DNA, 428 bp, Homo sapiens
  misc_feature (1)...(428): n = a,t,c or g
ggtttcctcgttcccccatttcccttttataccagctcctcccaactctgttcctctcattgccataacaatcccatattaaccagctggggaatgatcaggagaaacctcaggagtgggacagtgtgacctgtgccccattttcaaagctgcttgttctggagaggagtgtcctatccctgtatcttggagtcaagcgttttgtatcctcaaggtttgacaccaagcagcagtgcggcacacattgtaattgagatcctggaatgcacaatccagggggaagaggggatggccatagacctctccaggccacctgcagacctntgccacgtaagaaggagttgagtactgntngccctnttcctttgngcattcttctatgngnaaacttnctctattagatgaagcnaagggcttggcngaacaac

SEQ ID NO: 25234 - DNA, 580 bp, Homo sapiens
  misc_feature (1)...(580): n = a,t,c or g
gtctggctttagccttgagtacagtatggactgaatggagactactaggctctcagccatctgctgtgttctggtagtgctctacaatcatgtgtctctactacttctttgcaatgtaaatactagtgtaaaactactcagccacaagctctgagagagatcgagagatgttcttctcttaatagaaataagtcatttggtggaataactcttcgagtcaaccagtgtaagtaacagagacaccaaaaactagccattagtttagtttgcttgacccagcaatctacctcttagtatatgctttggtgacactcatgtacttatgcaccaggtggcaggtgtgtctagaattaagatattcatagtagcattgtttcagatagtaaaaaagtgttccncaaaaaatggtgaattatcagggaaattactgactttgaccacancatnctgcaaccttatcanaaaagcttatncttatttccncctacctanntagtggaganaagaangatttttaaaaagnctgaagctgaaactctnatgntccaagtatnaacnttgggtgggtcaactgaatcaa

SEQ ID NO: 25235 - DNA, 450 bp, Homo sapiens
  misc_feature (1)...(450): n = a,t,c or g
gggttgcaggtgcttacaatggcccagggatctacatctatccaagatctaggtgctgtgggccagttctctagtgtgactgaaatgcaaaagccctgctacattttaaatttgaaaaaacttaaaggcaattgaggtcttattggaaagaattcagaagatcaaggtttgcttacgtcctaaacattaacagggccctttatgtgtaacccttcaatgttgtttcttagtgatactgtacttggtttctgtggatatcactctgtaaagagaaactccaaaagtgtttcccccagtgattggccctaaacccagggccttggcaggctttcctggaatagggcattagttaatggctgctcccccccctatccctgaccagtgcctgtagccggctttgccatatcctgttcttgctganttttttctttggtgccttggacccccggg

SEQ ID NO: 25236 - DNA, 581 bp, Homo sapiens
gcaaacactttatagtttgtttattttgtgagatgatcttccagcgttatgacccagtacatcctgaatagttcaagctatgatttcgctagaaagtgatacttgaattatcttatttgccactgttttaccaaatatttctaagtgaacatctttgatgcaatctttcagatgcaatctttcactattatcttaaaattgcatatcgttctttagtcttaggaacccaaaatactgtttatgagaagcaaaaaaaagctcactaatattaaaatataagctattaaacatttgctcctctaagctccctggttcaagtgattctcctgcctcagcctcccaagtagctgggattacaggcacgcgccgccatgcccagctaatttttgtatttttagtagagatggggtttcaccatgttggccaggttggtctcgatctcctgacctcgtgttctgcccacctcggcctcccaaagtgctgggattacaggcgtgagccacggcacctggccttaattcacttttaaagtcacactttcacactctgaacttgctctgtacagctattcaactccagtc

SEQ ID NO: 25237 - DNA, 450 bp, Homo sapiens
  misc_feature (1)...(450): n = a,t,c or g
gggaatgaatgatttgtgtcaggctacccagtcagtgaggggcagagccacattgaagcctgttgaggagaagaagggattggtagggtagccctgtgatagtggcaggtgggtagaggggagttggttctgggtcataactacagaactacacgataagaactttatggagccaagagcaacagcccaggacatcccagtgaagatgtccaactggcaagattggccctcaggagatagttaaaggctgaaaatagtaactgggacttgatttcccctgcagtcttccacagtcgcgttatgccactcccagtatgcttgctgtccctgtcaaccaagcccacaactaggttatgcaaatgagcataatttaaggcgagctctttcggagatgctaacccaggatgccagccattntttggccagantttcncnagggccacntgtgcc

SEQ ID NO: 25238 - DNA, 552 bp, Homo sapiens
  misc_feature (1)...(552): n = a,t,c or g
gggagaagtataggagtgctagcaagatgtgggttgataaggagcacatcactaaagcacttcacaccattgacgagtctgaaagagcagttcacaggcggcaaatggtgctaagtttaggatcatattggggagctggtttagtatattcatctctctccttgaattggtcccatttaaaaacaaaaacaattcaatccctctgttccatgtgattcatcagtcactccttttgtttagaataaaacttactaaagattgattcatatttgctatttttccctggtattttgctgggtgttataaggaagtgtgaaacaagaaatgtgttttgcctgtaccaaacatttggttgtagaaatcaataatacaaaagaaagcaataggaattatttattagtgtttaattggatgtgtagttgtgtgcatcacacttagacctaagttggcttctctttggantctggctttcctagacctctttcctagggcttcncaatctaacttctctccccactcttcctcttaccttcccttccactggtggaacgg

SEQ ID NO: 25239 - DNA, 383 bp, Homo sapiens
gtaaaatgttaattgtagaatctaggtggtgggtacatggtgttcactgagcaattctttcatcttttgcatgtttgaaaaatttaatagtatactagtggggaaaatatttgagagtggtgagttctgtgtgtgcgtggaactatctgtaacttggaggagctagaaaaatccatttggacaatgtgttcatggactcagaaaatcagaatataatttttgtgaggcagggtctcactgtgttgtccaggctggattgcagtggtgcaatcatagctcactgcagccttgaccccaggaggtcaaggtcgacgcggccgcgaattccagatctatgaatcgtagatactgaaaaaccccgcaagttcacttcaactgtgccg

SEQ ID NO: 25240 - DNA, 770 bp, Homo sapiens
  misc_feature (1)...(770): n = a,t,c or g
gccagccccttcacctccttccagagcccaagatcaatgctcaagttttggaggacatgatcaccatccccatggtactgatgcttgctggatttagggagggcattttgctaccaagcctcttcccaacgccctggggaccagtcttctgttttgtttttcattgtttgacgtttccactgcatgccttgacttcccccacctcctcctcaaacaagagactccactgcatgttccaagacagtatggggtggtaagataaggaagggaagtgtgtggatgtggatggtgggggcatggacaaagcttgacacatcaagttatcaaggccttggaggaggctctgtatgtcctcaggggactgacaacatcctccagattccagccataaaccaataactaggctggacccttcccactacataatagggctcagcccaggcagccagctttgggctgagctaacaggaccaatggattaaactggcatttcagtccaaggaagctcgaagcaggtttaggaccaggtccccttgagaggtcanaggggcctctgtgggtgctgggtactccagaggtgccactggtggaagggtcagcggagccccagcaggaagggtgggccagccaggccattcttagtccctgggttggggaggcagggagctagggcagggaccaaatgaacagaaagtctcagcccaggatggggcttcttcaacagggcccctgncctcctgaagcctcagtccttcaccttgccaggtgcc

SEQ ID NO: 25241 - DNA, 889 bp, Homo sapiens
ttaatacgactcactatagggaatttggccctcgaggccaagaattcggcacgagattgtaagtaaaattcactttggtaatttattgtgtcacatagaattgaagtttttctcttgctaatattattcctattttcaaattttggggttcctgttagcctgattttcggatagctgctacaggagttgtccttgatctggataaatccataaaaattgtgaagaaattaaagctaactggttttccatataaaattttcaagaacacttcatttattaagggaatgtttaattctgccttggaagtggccaaatttgaaggtgctgtgattcgaacagtcagtgggataagggggcagatcaagaaagcactccgagctccagaaggagctttcagggccagctttgaggataagctgctgatgagcgatattgtcttcatgcgaacttggtatcctgtttccatcccagcgttctataacccagtaacatctttgttgaaaccagtgggtgagaaagacacctggtcaggaatgcggaccacgggccaactcaggctcgcccatggcgtcagactaaaggcgaacaaggactctctgtataagccaatcctgaggcaaaagaaacattttaattcactgcacattccaaaagccttgcagaaggccctgccatttaagaacaagcccaagacccaagcgagcctcatgaaagaaaggtactgttgcccatgctgtactgcacgctgcgtttagataggaaaagaacactctcaatagcacacttcctgtttctactgtagtctcagttattcagggcactggaactaaagtcagaggaagagccagagtccatttccctttctttgctggtcctgctctgccctgtg

SEQ ID NO: 25242 - DNA, 485 bp, Homo sapiens
  misc_feature (1)...(485): n = a,t,c or g
accagctatgacatgattacgaatttaatacgactcactatagggaatttggccctcgaggccaagaattcggcacgaggtggaaaaaagactagatttaagcagtaaaagatcattaagcgaggcttcatcacttcttcagtaggacagttattattgggattcaaagaggggcttatcaatgaatactatgttgtccttccccttctaaatttgaaatcaactgagaagtagataagaagattgaaacattttttttttaatagccttattggtaaggctcaatggagaatatgccatagatctgttcccaagtgagcttgctaaaatcctccctcccaattaaacttaccaggatgatggacatctggaacttccaccccacccctgactccacccgccccactgcgggttgcttagtacaggacctgtanacaaaggctggcatcccacacgctatgcttaatcctgctggtgcttnagct

SEQ ID NO: 25243 - DNA, 590 bp, Homo sapiens
  misc_feature (1)...(590): n = a,t,c or g
gataatgggcagattttctgtcttcaaagtttccggctaaacctcttcaagttctttattgtttgggactgagacactcagccatgttaatgggtagtttcttttgtatttgccttgaaaggccaaaatatttttatattgccacagacaaagccacctatttaaaaatgaactccatgtccgtcgtttcccaccaggagactatgtaccatgtgtgtgtctctatgtattctggggtcttgaaacaggtttctcatggggatggtcattcaccacggtccagaggggcagaacaggcggcgcttgccttgcccagggggcctggggaacgtgggccctcatctcagatctgcccccagtatgtttaggacgcgagccccagaagggatctgggagtaaacttaacattcactgtgtctctgctctgcatccgccatttgtgtgtgtttctggactgtgggctgtgtgtaccttggttggtgactcagtgagaagaagcaggaatgccaaagatactgtgaatgttctgagttttgttgctgttgttgttganaggttgtttcactggtatctattgcattgtataataa

SEQ ID NO: 25244 - DNA, 455 bp, Homo sapiens
  misc_feature (1)...(455): n = a,t,c or g
gcaatgtctgaaatcactcccacaaagttttgtagtgtaacaagtcagggtaactaatgtcactcaccgccatacaaatccatggaatttgtggcacagtgtggaggttagacagttagatgttcctcctttacattgctactggttccctatgtccatccaaacctagaaaaataaataaatctttaataaaaggaacacaggaccagatatcaggggacctggattttaggtatgtctagtttactcactgatatcacaaagacagattttaagttcttaatatatactaagtgttgaaatatcccttagtgctccatcctcatctataaaatagctagatacaaagaagaaataatacggttttatggaatatctttgcaaattaaaatggcagttctcaagtnggggntcatgggtggnctaagggcccccatgacnctttgagttgtctg

SEQ ID NO: 25245 - DNA, 425 bp, Homo sapiens
aacaaatatagataggtagaactatattttcccccaatcagaatcatcatatcataggtacaatctttcaccaagtaaatttgtataaataagcactattctttgtattaccaaagcaaggtacaggtgactaccctagttcaaaacaaccactttctcaggcttctcatgtgtgtagctaagctaccttgtcatatgtgttgattcttgaaaactgggacgtgtatttccattgggggttggccatttatgctgacatgccatccttccagcaaacgtatgggaatgtgctttcaattgatggactactctattttttgcaaatttgtaaactttgcttctccaaatacaagtactaggttgtccatttatggtacctatttggtgctagtaaattttcaaactagatttataaatgcactgta

SEQ ID NO: 25246 - DNA, 548 bp, Homo sapiens
ggactgtccagacacaggcgaacccacacgggtgagaagaaatttgcgtgccccatgtgtgaccggcggttcatgaggagtgaccatttgaccaagcatgcccggcgccatctatcagccaagaagctaccaaactggcagatggaagtgagcaagctaaatgacattgctctacctccaacccctgctcccacacagtgacagaccggaaagtgaagagtcagaactaactttggtctcagcgggagccagtggtgatgtaaaaatgcttccactgcaagtctgtggccccacaacgtgggcttaaagcagaagccccacagcctggcacgaaggccccgcctgggttaggtgactaaaagggcttcggccacaggcaggtcacagaaaggcaggtttcatttcttatcacataagagagatgagaaagcttttattcctttgaatattttttgaaggtttcagatgaggtcaacacaggtagcacagattttgaatctgtgtgcatatttgttactttacttttgctgtttatacttgagaccaac

SEQ ID NO: 25247 - DNA, 529 bp, Homo sapiens
ggggttcctcctgacccagctgcctcttacggtttgggatgggacatgcacacacactcacatgctctcactcaccacactggagggcacacatgtaccccgcacccagcaactcctgacagaaagctcctcccacccaaatgggccaggccccagcatgatcctgaaatctgcatccgccgaggtttgtattcattgcgcatatcagggataccctcaagctggactgtgggttccaaattactcatagaggagaaaaccagagaaagatgaagaggaggagttaggtctatttgaaatgccaggggctcgctgtgaggaataggtgaaaaaaaacttttcaccagcctttgagagactagactgaccccacccttccttcagtgagcagaatcactgtggtcagtctcctgtcccagcttcagttcatgaatactcctgttcctccagtttcccatcctttgtccctgctgtcccccacttttaaagatgggtctcaacccctccccaccacgtcatgatggatggg

SEQ ID NO: 25248 - DNA, 499 bp, Homo sapiens
aattcggcacgagccagacacttgccaccaaatgctcaacagattacacagacagaggtccagcaaggacagcagcagttcagccagttcacagatggacagcagctctaccagatccagcaagtcaccatgcctgcgggccaggacctcgcccagcccatgttcatccagtcagccaaccagccctccgacgggcaggccccccaggtgaccggcgactgagggcctgagctggcaaggccaaggacacccaacacaatttttgccatacagccccaggcaatgggcacagccttcctccccagaggacccggccgacctcagcgcctcctgcaggctaggacactggtgcactacaccccatgcctgggggccgagattctccagcataaagatgccatattttttgtttccttttgttccatttttttctctaaggaatcaatatttcaatatgttgagtgtgtgtccaatgctatgaaattaaaatattaaataa

SEQ ID NO: 25249 - DNA, 423 bp, Homo sapiens
gaagatttccttacaagggccgtgttacatgacactgttaatgattgcatttggcttgctgtgggggcatctcttgcggatcaaacccacgcagagcgtcttcatttccacgtgtctgtccttgtcaagcacacccctcgtgtccaggttcctcatgggcagtgctcggggtgacaaagaaggcgacattgactacagcaccgtgctcctcggcatgctggtgacgcaggacgtgcagctcgggctcttcatggccgtcatgccgactctcatacaggcgggcgccagtgcatcttctagcattgtcgtggaagttctccgaatcctggttttgattggtcagattcttttttcactagcggcggtttttcttttatgcttggtataaagaagtatctcattggaccctattatcggaagctg

SEQ ID NO: 25250 - DNA, 589 bp, Homo sapiens
  misc_feature (1)...(589): n = a,t,c or g
ggtcggagtcccgattttctcctgctgctgtggcccggacatggcgactcccggccctgtgattccggaggtcccctttgaaccatcgaagcctccagtcattgaggggctgagccccactgtttacaggaatccagagagtttcaaggaaaagttcgttcgcaagacccgcgagaacccggtggtacccataggttgcctggccacggcggccgccctcacctacggcctctactccttccaccggggcaacagccagcgctctcagctcatgatgcgcacccggatcgccgcccagggtttcacggtcgcagccatcttgctgggtctggctgtcactgctatgaagtctcgaccctaagcccagggtctggccttgaaagctccgcagaaatgattccaaaacccagggagcaaccactggccctaccgtgggacttactccctcctctcctttgagaggcccatgtgtcgctggggaggaagtgaccctttgtgtaactgtaaccgaaagttttttcaaaaatcctanatgctgttgtttgaatgttacatacttcnatttgtgccanatctccctccantcccc

SEQ ID NO: 25251 - DNA, 432 bp, Homo sapiens
tatgacatgattacgaatttaatacgactcactatagggaatttggccctcgaggccaagaattcggcacgaggtattttgaaaccttccagccactcctcaggaggctgggctatcaaggcacattttttttcccccaagccctggtcatcttgtctaggtatagaatacaacagtggaccagacagctgtgcttaatttttcctccaaaaccaaatcaggctagtgaacagtgccaatattaggctgatggccatgacattgaaaactaatcaggtggccattgcacagttcctagagtgcaaggagtcagaccaacagttctgcatcggtgtcacccatgtaaaagcacgcactggctgggcgtgattttgatcagctcaaggctgtgaccttcttcagaacctgcaaaatgtcactcaagggccaaga

SEQ ID NO: 25252 - DNA, 623 bp, Homo sapiens
cccacgcgtccgggaaaatatctttgttcttgtttgctgctattttctgtcctattttgagaaatataaatacatagaaatggtgcatcttaacatttgtttgtacatgtataaatgtcttgtattttaattcatttttagcatgaattgtttaagggtaagccacaacatctagaaatcactcatagatattgaacaataaaggagaatggtaccgatgcaggaggaagcaagcgtgtcttcccctgcagcacacagcgacttgcgttgacaaaggaggaggaaacgattactctgtaaacaaagttatccttacttgggagattgccacagcctgctgctgagttgagttaccagacatcctccatgtgagaagcagcgaacattgaatctcagggatggcccacaactgggtccacatgtaatgagccctgtttaataacgaaggggtgggggagagcagtccgtctacaacctggaatcagatttgcaaaatttcctgcactgctgtctgacactgtcctgttgatgccctttctgactgtgttctctgttttctctgtctgctgtctaaccctgtgccttgcctgggataaggacaatgatgaggttactggtttgga

SEQ ID NO: 25253 - DNA, 389 bp, Homo sapiens
gctggtttatgtttacaactatgttttattttcaaatggtaaaggaaaggcttcatgttgctatttgaaagtacttctcaactagccgggcatggtggcataattcctgaagtaggaggatcatccccttgaggccaggaggtccaggctgcagtgagctgtgattgtgccactgcaccatagcttgggtgacagagtgagaccctgtctttaaaacaaaaagaaagtacttctctgcaagtaaattttatggatataatctttattctgattaaataaatgattaccctaatcagctattatttattattttctatttaacattcatttttgaagtgccagagacctgcctatgtcgcataaagtttggtcagatatatgcaaaagcg

SEQ ID NO: 25254 - DNA, 380 bp, Homo sapiens
gaataccctgtgtgtgtggactttaaattctgaacccaaatgagggggagaaaaccaagttgactttcatgactgagctctcagggacgtccaaggaatctgtgcatttcaagaaacaaagttcatcagcttctctcctaaggtatttgcccacaatacccagagggcttggcagcatcatgtgtgatgggtggggagctccaagcaggtgggcaggacccaggggcctggtgaccaggacagacccccactgtccatcacctttcctggccctgtcctctgctaaacttcccacaggccttctgcccgatcacacagagtatgcccaaactctctcaggcctctggcagctgaaaaccactgctttaaatccctttacc

SEQ ID NO: 25255 - DNA, 536 bp, Homo sapiens
aaagaaggcaaaacgatgtataaatgaaagaaattgagatggtgcacgatgcacagttgaagtgaacttgcggggtttttcagtatctacgattcatagatctggaattcgcggccgcgtcgacatcagcgtcagcagcgagcaggtgttgaaattccgtaaacttaacttcaatggggagggtgaacccgaagaactgatggtggacaactggcgcccagctcagccactgaagaacaggcaaatcaaagcttccttcaaataagatggtcccatagtctgtatccaaataatgaatcttcgggtgtttccctttagctaagcacagatctaccttggtgatttggaccctggttgctttgtgtctagttttctagacccttcatctcttacttgatagacttactaataaaatgtgaagactagaccaattgtcatgcttgacacaactgctgtggctggttggtgctttgtttatggtagtagtttttctgtaacacagaatataggataagaaataagaataaagtaccttg

SEQ ID NO: 25256 - DNA, 341 bp, Homo sapiens
ggagctagcaccatgagcttcaataccctgtatcaagtttctagagtttgtttggatcaagtccttggcaattatcttaggctgttttaaacatctggaaggttcagatgttaagctctctttgtatttacattacacatgtgtacttaaagaatacttgagggctgggcatggtggctcataactttaatcccagcacattgggagagagggcaaggtgagaggatcacttgagtccaggagttcaagaccagcctgggaaataaggtaagacccccatctctaagaaaaataaaaaattaggcagggcacggtggctcatggctataatccatcccaga

SEQ ID NO: 25257 - DNA, 440 bp, Homo sapiens
ggagacagggtttcactgtgtcagccaggatggtctcaatctcctgacctcgtgatctgcctgcctcggcctcccaaagtgctgggattacaggcatgagccaccgcgcctggcccagcagtttttatagaataaaaagagaagtttagtaaacttttaaattttattagcagtctggttttagattactagagtttaagagaccatcatctcatcaaagagagttaaaagtagggatgttctctgcaaggcctcttctgatatgattaattgattgtaaattaagtaatcaaggcatactttgttgatttgtcatatctgggtaaaaggtttatggtttatttaataaatgaaactgcaaaatcagttttctacatttctggtatatttttggtaaagcacttaaaagaatttctgctctgccaggggcaagaatcttg

SEQ ID NO: 25258 - DNA, 205 bp, Homo sapiens
ctacacaaagtaacaactgtcttgagattcttaagtaaatttcacatccttgttttatacttttactatacatgtgtacatgtatctgtaagtgatatgtggtgttggtttttgtattaaatttttacagacatgtataacgctgtctttcaatagcttgatttttttaaactcagtatcaagtttttgaggtgtatatgttgat

SEQ ID NO: 25259 - DNA, 539 bp, Homo sapiens
  misc_feature (1)...(539): n = a,t,c or g
gagtgnnnnnnnnntttganaccctntgacatgattacgaatttaatacgactcactatagggaatttggccctcgaggccaagaattcggcacgagattctgatatgaaaagagctttggaaaagttggatggaactgaagtcaatgggagaaaaatcagattagttgaagacaagccaggttccagacgacgccggtcctactccagaagccggagtcattcaaggtactgttgatgtcttttgtgtgttggagctcatcataaattcattagtgagcacatagataatttatttacattttcctgttgagttcttaataacatgattccatctggttcaataacttagaattttgaactgaacatttatttgtaaaactcttgaactcttaggtcatgagtacaaatagaagtcccttctcttagaaatcagaggccttgctcacgcctgtaatcccagcactttgggaggccaaggtgggcgcatcacaaggtcaggagttcangaccagcctgaccaatatggtgaaaccccat

SEQ ID NO: 25260 - DNA, 439 bp, Homo sapiens
tatgacatgattacgaatttaatacgactcactatagggaatttggccctcgaggccaagaattcggcacgagggacgcagtggatatggttatagaagaagtggccgagataaatatggccctcctactcgcacagagtacagacttattgtggagaatttgtcaagtcggtgcagctggcaagacctaaaggattatatgcgtcaggcaggagaagtgacttatgcagatgctcacaagggacgcaaaaatgaaggggtgattgaatttgtatcttattctgatatgaaaagagctttggaaaagttggatggaactgaagtcaatgggagaaaaatcagattagttgaagacaagccaggttccagacgacgccggtcctactccagaagccggagtcattcaaggtctcgctctcgaagcagacattcccgtaaa

SEQ ID NO: 25261 - DNA, 648 bp, Homo sapiens
tgaggccaacccaaagctgcagaaagtacttgatgccctccaagcaattaaaaccaagggcaaacgagccccattcacaaattttgacccctctactctccttccttcatccctggatttctggacctaccctggctctctgactcatcctcctctttatgagagtgtaacttggatcatctgtaaggagagcatcagtgtcagctcagagcagctggcacaattccgcagccttctatcaaatgttgaaggtgataacgctgtccccatgcagcacaacaaccgcccaacccaacctctgaagggcagaacagtgagagcttcattttgatgattctgagaagaaacttgtccttcctcaagaacacagccctgcttctgacataatccagtaaaataataatttttaagaaataaatttatttcaatattagcaagacagcatgccttcaaatcaatctgtaaaactaagaaacttaaattttagttcttactgcttaattcaaataataattagtaagctagcaaatagtaatctgtaagcataagcttatgcttaaattcaagtttagtttgaggaattctttaaaattacaactaagtgattctgtatgtctatttttttcagcttatttgaaccaataaaat

SEQ ID NO: 25262 - DNA, 407 bp, Homo sapiens
gttggaaccgagacaaatggaacttagctaaaagatgggaaaggtagactgactctgacttaatctacttaacctaccaggcaatttataacttgatggcctaatttttgcagcacccagaagcaagcctgtttcagcacggcaaaggctcagctgctaagtgggcagcattgttggaggtgagcagcttaggctgactgttcatcaaaggaccaagcgcttgaggttcgctcatcgctggaggccagagtggggagggccatttaactgctcaaggccatggaactctactgtcagtttcagggaaatttgggaccctggagcacaaaccaaaactccaattaaccaggagaggaactcgatcccaggagataagtgaagagttagaagtctatctttagaaacaa

SEQ ID NO: 25263 - DNA, 359 bp, Homo sapiens
ggcatgctgtttgtcattgttgctcttggtggtgtattttttcttttgagagaaaggcgagacaaaaaacaagctaatattatggagtcattgcaaagtaacttttaggcaatgttccgtcatttgtacatgtttccatattgcacagttttcctacttattttttaagtgaatgtatacaaggctgggcacagtggctcacacctggaatcccagcactttaggaggcccagaagggcagatcacctgaggtcaggcgttcgagaccagcctggccaacatggtgacaccccctctctaccaaaaatacaaaaattagctgggcgtggtgatgcatagtagtcccaggcatgctccac

SEQ ID NO: 25264 - DNA, 462 bp, Homo sapiens
atgatgtatataactatctattcgatgatgaagataccccaccaaacccaaaaaaagagatctctcgaggatccgaattgcggccgcgtcgacatcattttcagtcaagaccacatttctcagagtttgccaaaacaaaccttctgccttcgggttgtcaggccactggaggatggagctcttacagatccgctgccgtagcctcaaatactgagaatgctgtaacactggctccagcaggataaatataatcacatccatgttctcatccattagcctctgcaaagccaagtaaaaagctgttttaaagttccagctttttgcatattttttggttaaaacaaatactgttttcttgctttggttgatgctctgcatgaggttgtcgatgatggccaatcccgggtcccaatccctctcctctagacaaaggagaacgtttttgctcggctctcttcaagg

SEQ ID NO: 25265 - DNA, 402 bp, Homo sapiens
gctccctaatgttgcccatgctgaacttgaactcctgacctcaggtgatccgcccgcctcagcctcccaaagtgctgggattacaggtgtgagccactgtgcccggcccagttgttgtctttgacacacaaaaagttcccacattcccacattatcttattcaattcttataaaaatcgcaatcatcaaaggcttaataacttttctgaggctacgtgcatttttaaaaattagtcattgaagccttgggcctgtgaaattaataaatacttaatggagaaatttcaggctttagagagcagtgaaagatgcttatttttggtgtcaggaggttcagggttccagaaatcctggtagtcacctcattgtaagcaatattcaccctaataatttaattttttt

SEQ ID NO: 25266 - DNA, 446 bp, Homo sapiens
gactggaacaataaaacctatccccatgggataggggccactgtaaagattaaattagttaatacatgtaaaatgcttagaacaatgcacagaacacagtgagcacttgataaacattagctcttggtattttgaatgacatacagcacaagagttaacaatggagacaccctgagccacactacctgtgtttgactctgggatctacccactactagatgtagaccatgagcaagttactctgcctctctatgccttggcttctccatctataagatacaaataatgataataccttaactagcatggttgttgggagaattaaattaatcgtttcatagaaagagcttggcacagtgcctggaacacagtaagcgctttctaaatgacagtaattataatggtatctttctatgatgtggctagcatgaggcaaggaaagttag

SEQ ID NO: 25267 - DNA, 341 bp, Homo sapiens
  misc_feature (1)...(341): n = a,t,c or g
gaaagccacattataattagaacctaaagtctctgattgtccaaaaatgacccagtgacctgctaattacaaaactcagttcctttgtgcctccccactctctctctctctttctgacattcatgttatcattttctccttgtttcctgctccctggtaaattgcttttcagtttttttctctctgctcttccttcacttcccagtaaatgaaactgtttttctttataatgaactattctgttctctctcacttttattctcctttggatgactcttgtggcttcaacttggcttgacttgtgtggntgacttcaattaaacactatcagccatgcccat

SEQ ID NO: 25268 - DNA, 394 bp, Homo sapiens
  misc_feature (1)...(394): n = a,t,c or g
ttggccctcgaggccaagaattcggcacgaggactgcagctggtttcaggaacttctcttgacgagaagagagaccaaggaggccaagcaggggctgggccagaggtgccaacatggggaaactgaggctcggctcggaaaggtgaagtaacttgtccaagatcacaaagctggtgaacatcaagttggtgctatggcaaggctgggaaactgcagcctgacttgggctgccctgatcatcctgctgctccccggaagtgagtatggccaaggatgagggtgcagtggggaggggaagctacaaggagagatattgggaatttccttgcactgccacatggctcctgggattcccagagaatcccacaagattcaaagtctnaccacagatgtg

SEQ ID NO: 25269 - DNA, 441 bp, Homo sapiens
  misc_feature (1)...(441): n = a,t,c or g
gctggaagctctgcaagatcatgacctgcgaagggataaaaagtcttcaaattgttgagcaccaattgcaccatcgccaaccgcatcaaggaccaactatatgaatttgaattagaatgttcctggagatggaaatctgatgctaaaacatcatcatcatcatcattgtcatcatcatcacttcccagactctcctctgaatcatattcggctctactttgagaagagggtagaaaaggcttagctatgaaatagtcccagatactgagctcaggtgggatgaacttttctttaaccgccagtgactcctggcttactggtgccgaggaaggggtcagtggggcagattctctgcaagacatttttgacggcctaaaacgtttgttctggttttctccttcttcaactagtgaagaaactaacnnaaagaaaatttaatgg

SEQ ID NO: 25270 - DNA, 339 bp, Homo sapiens
ggaacagcgtaccctgtaagtaacatttgaagcatttaaagagaaatctgtggaattattgtgggtggtctataatccttaagtgcaacgaatattgttagtagacttaataagtaacccatctgtatacatcactactttttaaatgtctgtggttacttttgacaataaaaattccaaatacaactgaagtcaaaatttttcattttttttctctgacaacagaaatcaaaagtgcaattggtcattgtttaatgttccaaaaattcctttctgacttgaaaaaaaaatgttattatagaggcattttactttcagaagttaagaattcctgcatat

SEQ ID NO: 25271 - DNA, 424 bp, Homo sapiens
gagataattaaagaaggcgagggcgctgaccatcacggccatcgcgcagctcttcctgttgggctgcacctgggtctttggcctgttcatcttcgacgatcggagcttggtgctgacctatgtgtttaccatcctcaactgcctgcagggcgccttcctctacctgctgcactgcctgctcaacaacaaggttcgggaagaataccggaagtgggcctgcctagttgctggggggagcaagtactcagaattcacctccaccacgtctggcactggccacaatcagacccgggccctcagggcatagagtccggcatatgaaggcgcatggttctggacggcccagcagctcctgtggccacagcagctttgtacacgaagaccatccatcctccttcgtccaccactctactccttcaccttc

SEQ ID NO: 25272 - DNA, 422 bp, Homo sapiens
ctcggtgagaggcggaggagcggtaactaccccggctgcgcacagctcggcgctccttcccgctccctcacacaccggcctcagcccgcaccggcagtagaagatggtgaaagaaacaacttactacgatgttttgggggtcaaacccaatgctactcaggaagaattgaaaaaggcttataggaaactggctttgaagtaccatcctgataagaacccaaatgaaggagagaagtttaaacagatttctcaagcttacgaagttctctctgatgcaaagaaaagggaattatatgacaaaggaggagaacaggcaattaaagagggtggagcaggtggcggttttggctcccccatggacatctttgatatgttttttggaggaggaggaaggatgcagagagaaaggagaggtaaaaatg

SEQ ID NO: 25273 - DNA, 402 bp, Homo sapiens
gggcataaaatgtatgaccactggggccggagtatctatttctacatagtcagctacttctgaaactgcagcagtggcttagaaagtccaattccaaagccagaccagaagattctatcccccgcagcgctctcctttgagcaagccgagctctccttgttaccgtgttctgtctgtgtcttcaggagtctcatggcctgaacgaccacctcgacctgatgcagagccttctgaggagaggcaacaggaggcattctgtggccagccaaaaggtaccccgatggccaagcaattcctctgaacaaaatgtaaagccagccatgcattgttaatcatccatcacttcccattttatggaattgcttttaaaatacatttggcctctgcccttcagaagactcg

SEQ ID NO: 25274 - DNA, 396 bp, Homo sapiens
  misc_feature (1)...(396): n = a,t,c or g
gcgatgacttgtgggtggagcttcgccacatgcatatcgcaaatgtggccaagaaggacacggagcttctgaggaccttttgtgagagcaagaggctaaccacggacaaggcgaacatcaaagacctatcccagatcctgaaaaagatgccgcagtaccagaaggagctgaataagtattctacgcacctgcatctagcagatgattgtatgaagcacttcaagggctcggtggagaagctgtgtagtgtggagcaggacctggccatgggctccgacgcagagggggagaagatcaaggactccatgaagctgatcgttccggtgctgctggacgcggnggngcccgnctacnacaagatccgggtcctgctgctctacatcctncttcnnaatg

SEQ ID NO: 25275 - DNA, 420 bp, Homo sapiens
tttagaagtaaccactcttgtctctctggctgggcacggtggctcatgcctgtaatcccagcactttgggaggccgaggcgggccgattgcttgaggtcaagtgtttgagaccagcctggccaacatggcgaaaccccatctactaaaaatacaaaaattagccaggcatggtggtgggtgcctgtaatcccaactacctaggaggctgaggcaggagaatcgcttgaacccggggggcagaggttgcagtgagctgagtttgcgccactgcactctagcctgggggagaaagtgaaactccctctcaaaaaaaagaaagaccactctcagtatctctgatttctgaagatgtacaaaaaaatatagcttcatatatctggaatgagcactgagccataaaaggttttcagcaagttgta

SEQ ID NO: 25276 - DNA, 542 bp, Homo sapiens
  misc_feature (1)...(542): n = a,t,c or g
ggcctggtctggactctggagtggtggcagcgggttctgtactgtggtcaagatgtttcttctggctttctaaatgtgtcctaattggattctcagggcctcccaaagcttgtctttcctggttaaactggttagagtgggcttccatgtttataaataagaatcttgactgcttacaacactttatgtgtgttatctcattgaattctttttttaatttttgagatggagtcttgctctgttgcccaggctggagtgcagtggtgcgatcttggctcactgcaacctccacctccagggttcaagcgagtctcatgccgcagcctcccaggtagctgggattacaggcacacagcaccatgcctggctaatttttgtatttttagtagagactaataaggtttcaccatgttggccaggctggctcaaactcctgacctcaagtgatccacctgccttggcttccaaagngctggggattacaggggggaaccccgggcctggcctcttgaattctacagaacctantgagggagggtata

SEQ ID NO: 25277 - DNA, 461 bp, Homo sapiens
ttatgacatgattacgaatttaatacgactcactatagggaatttggccctcgaggccaagaattcggcacgaggcactagaatagtctaaaaccccttgcactttaaaatatgtatgtggtatttaggcaaaaagctaacgtatttttttttaacaagcaaatttaatgataattttttcacactgaaaacactactaatgatgtggttgagataaagggaacaggacctcttggtttatagaaggtagtagaaatttggattatagctgtactaggctctgctatgatgattaaagttttttctgttgatacctcacacaattctagggcattaagttcagagaaaaggaggaaagggatatttcctttaactttcattagcgcctgagttatttctgagcttgaggtcttgctgtacggcagttcagtagttatcaaatcagttggtctcaggacccc

SEQ ID NO: 25278 - DNA, 436 bp, Homo sapiens
  misc_feature (1)...(436): n = a,t,c or g
ggggggtaacctttatttcccttctttttctctttagctctgcttattccaggggtgtgttaagagngangntgntcatnggnnnaaanattngggataanaaaatntnananncttggggnnnantgcntttnntcattatcttnnccanggcccattnnaanatcatgnaaaantaangaatganttaactgantttnnaaaaacatgggttgntgatnagtcagctnaaanttgggacaaatcacttnataccctttttggagacaaattatgcacagttgcaactcttcgtgaaacctatggngaaatggctgactgctgtgcnaaacacgaacctgngagaaatgaatgcttcttgcccncaaagatgaccacccaaaccttccccgattggtnaaaccagnttnaagnnantgcccttgttttnagaaaa

SEQ ID NO: 25279 - DNA, 476 bp, Homo sapiens
  misc_feature (1)...(476): n = a,t,c or g
tntgaatcccatcagctatgatttggattccnaatttaataccgactcactatagggaatttggccctcnaggccaagaattcggcacgaggtcgaaggagactgtgatttccagctgttgaaactagatggcaagttttccgtggtatacgcaaaatgtgattccagtccagactcagccgaggacgtgcgcaaggtgtgccaagactgccccctgctggccccgctgaacgacaccagggtggtgcacgccgcgaaagctgccctggccgccttcaacgctcagaacaacggctccaattttcagctggaggaaatttcccgggctcagcttgtgcccctcccaccttctacctatgtggagtttacagtgtctggcactgactgtgttgctaaagaggccacanaggcagccaagtgtaacctgctggcagaaaagcaatatggcttttgtaaggcaacactcagtgagaagc

SEQ ID NO: 25280 - DNA, 597 bp, Homo sapiens
gagtactgcagctaaaccagcggcttcaataacaagtaagcctgctacacttacaacaactagtgcaaccagtaagttgatccatccagatgaggatatatccctggaagagagaagggcacagttacctaagtatcaacgtaatcttcctcggccaggacaggcccccatcggtaatccaccagttggaccaattggaggtatgatgccaccacagccaggcatcccacagcaacaaggaatgagacccccaatgccacctcatggtcagtatggtggtcatcatcaaggcatgccaggataccttcctggtgctatgcccccgtatgggcagggaccgccaatggtgcccccttaccagggtgggcctcctcgacctccgatgggaatgagacctcctgtaatgtcgcaaggtggccgttactgatcttacttcatccagtctaataggtttggagattaaaccttttctcaacttgtgctgtttatatagccaagcttccgtcaataaggcttcattgtgactttaacaaacattatcttcccacataccaggaactattggacatttattttacatgggaaaaattatttgga

SEQ ID NO: 25281 - DNA, 472 bp, Homo sapiens
  misc_feature (1)...(472): n = a,t,c or g
gatgnnttncccctttgagaccttatgacatgattacgaatttaatacgactcactatagggaatttggccctcgaggccaagaattcggcacgagatggagtcgcgataccactgccaggcgtcaggaaaggtgacatgagttctcggcacttcaaacctgagatcagggtgacctcactccgcttctctcccactgggcgctgctgggcggccaccaccacggagggactcctcatctactccctggacacccgcgtgctctttgacccgtttgagctggacaccagcgtcacccccgggagggtgcgcgaggcactgcgccagcaggacttcaccagggccatcctcatggcctccggctcaacgagagcaaactggtgcaggaggccctggagcggtgcccaggggccaaattgaagtggcacctnctcctttctgaactgnatgtggagaaagtgctggagttttag

SEQ ID NO: 25282 - DNA, 726 bp, Homo sapiens
tatgacatgattacgaatttaatacgactcactatagggaatttggccctcgaggccaagaattcggcacgagctccattgagggcaggcatgacctcaagactggcaggaaggagctggacaagattacagccaagcacgcggccaaggggaaggccttcaccgccctgtgctactctgcagacggccacagcatcctggcgggaggcatgtccaagttcgtgtgcatctaccacgtccgtgagcagattctcatgaagaggttcgagatctcttgcaacctgtctctggacgccatggaggaatttttgaaccgaagaaaaatgacagagtttggcaacctggcactaattgatcaggatgctgggcaggaggatggagtcgcgataccactgccaggcgtcaggaaaggtgacatgagttctcggcacttcaaacctgagatcagggtgacctcactccgcttctctcccactgggcgctgctgggcggccaccaccacggagggactcctcatctactccctggacacccgcgtgctctttgacccgtttgagctggacaccagcgtcacccccgggagggtgcgcgaggcactgcgccagcaggacttcaccagggccatcctcatggccctccggctcaacgagagcaaactggtgcaggaggccctggaggcggtgcccaggggcgagattgaagtggtcacctcctcccttcctgaac

SEQ ID NO: 25283 - DNA, 348 bp, Homo sapiens
ggaatcttgttaaattcctgtgtgcaggaaaggaagaagtagccaaaatgagcgggcgtttctaggactcattcaagaaacagtaggattcacccaagatctccactagctcctgtgatcctagctcccagcttaatgaggctctgcaaccattctcccttttattcctcacctttacctcacttggaacataaagggtgtttaaaatgggaagacaggctgggtgtggtagctcacgcttgtaatcccagcactttgggaggcccgggcgggtggatcacctgaggtcaggagttccagaccagcctgaccaacatggtgaaaccccgtcactcctaaaaatgcaat

SEQ ID NO: 25284 - DNA, 319 bp, Homo sapiens
ggaatataaggtggcctgcctgctcttgatctttctggcagtttccctcccactccttgccactgacccttcttccttttatagcattgagaaggatggttacaacaacaatattcattgcttgaccaaagccatcatccaggtgtctgctgccctcttcacgctctacaacaagaacattgaaactcacctcaaggaatttctggtggtggcctctgtcagcctcttgcagctgggccaggagactgacaagcttaaaaccagaaatcgagaatccatttctctgctcatgcgcttggtggtggaggagtcatccttc

SEQ ID NO: 25285 - DNA, 334 bp, Homo sapiens
gatggtcagacctcagaaaagaaattaaaatttggctgagaaagtatatccaaagtagaaaatcctttgcttcactctttctttcagcaaatgctcagtgaggacctgctgcgtgcccacggctgccagcacttaccaaaggctgtgtgggcttcagagatggagaacagattagtggttgccagggtttagggatggtggagaggaggggtgggtgtgacttcctggtggtgctggtgcagtgctgtgccttggttgccacggtggttacgtgaacccacccatgtgatgaagacacacagaatcttaggcacactttgtacccgcatcacgg

SEQ ID NO: 25286 - DNA, 372 bp, Homo sapiens
gccccggccaggaccccgagggaggcgtcgactataagaacatccacctcgagaagaaatatgtccgcagggacagtggcttctccagccagggtgtggacacctatgtggagatgaggcctgtctccacttcttcaaatgactccttctctgagcaagacctggacaaggaggatggacggcccctggagctccgggacctgctttacttctccagccaagtagcccagggcatggccttcctcgcttccaagaattgcatccaccgggacgtggcagcgcgtaacgtgctgttgaccaatggtcatgtggccaagattggggacttcgggctggctagggacatcatgaatgactccaactacattgcaa

SEQ ID NO: 25287 - DNA, 300 bp, Homo sapiens
gctaagggaaatgctggtaaagtaaacctgcccaaggagctgcctgcagatgctgtgaacctaacaatacctgcctctctggacctgtcccccctgttgggcttctggcagctgccccctcctgctacccaaaatacctttgggaatagcactcttgccctggggcctggggaatctttgccccacaggttaagctgtctggggcagcagcagcaagaacccccacttgccatgggcactgtgagcctgggccagctccccctgccccccatccctcatgtgttctcagctggcactggc

SEQ ID NO: 25288 - DNA, 363 bp, Homo sapiens
gaataccctgagcttagtgtatccaaactttgtccccaggatcccaaaagtgaaatcttagaacaggctcattagaaccttcagagcagagagagctgccccacctgctacttcatggtcatgtttgagagacctgagagctgtcaaaagggggttaactaaatgagataatgacaaaaaatgtaaatttcccttctgccttcctactggcctttggcaagaacagataggttagataaacaaagggtgaaatatctatcacaccaccaagcagagagttctaactcttccttaacctgcaggtcccttcttccagggaggtttctctgattagccagagtgggccgttcaccttgtcatgac

SEQ ID NO: 25289 - DNA, 461 bp, Homo sapiens
  misc_feature (1)...(461): n = a,t,c or g
gcnnnattganacccctattnatgatncccgaatttaataccgactcactatagggaatttggccctcgaggccaagaattcggcacgagcggcacgagaaaagttagaagtcattttacaaattaaaaaaacatttttttcttggtagtctttaaaaattaggggattgaaaggatccaggatgggctttgtgtgtgtgtctcagattctcatttattactgagcacacctgtgtatatatataaatcacaaggagatcatcaagggaaaacattttgcatgtgtaaagcttcatgaagnnctctttaagaaataccaaagcttgtttatttctgataattaacctaagcccttatgaaaatacacannatgaagggattatgacaggnattaccanaaacaccaaaaggaacaaaggggcctgcgttaaaacctaattgctaangcttcacaactagga

SEQ ID NO: 25290 - DNA, 451 bp, Homo sapiens
gattacgaatttaatacgactcactatagggaatttggccctcgaggccaagaattcggcacgaggatcttgacaacatattattccataaaaccagtttagggcacaggccagttcctgattagaacacaggacctgtgggagggactatcagagatgcaaaaattacttcaagatgagtttattgttttcatttgtattgcaaaagttagaagtcattttacaaattaaaaaaacatttttttcttggtagtctttaaaaattaggggattgaaaggatccaggatgggctttgtgtgtgtgtctcagattctcatttattagtgagcacacctgtgtatatatataaatcacaaggagatcatcaagggaaaacattttgcatgtgtaaagcttcatgaagttctctttaaaaaataccaaagcttgtttatttctgataattaacct

SEQ ID NO: 25291 - DNA, 464 bp, Homo sapiens
gctaccaggaagtgtcccagtgtttcggggtcctctccagccgcattgaagtccaagacacgagtgggggcacgacagccttgaggcccagcgctagcacccaggctctgtccagcagtgtaagctccagcaagctgttctccagcagcactgctcctcatgagacctcctttggagaagaggtggaggtgcacaacctacttatcattgaccaacacacctttgaagtgcttcatgcccaccagtttctgcagaatgaatatgccctcagtctggtttcctgcaagctgggcaaagaccccaacacttacttcattgtgggcacagcaatggtgtatcctgaagaggcagagcccaagcagggtcgcattgtggtctttcagtattcggatggaaaactacagactgtggctgaaaaggaagtgaaaggggccgtgtactctatggtggaatttaacgggaag

SEQ ID NO: 25292 - DNA, 515 bp, Homo sapiens
  misc_feature (1)...(515): n = a,t,c or g
tnnnntnnnnnnttttgaanccnttgtatgacatgattacgaatttaatacgactcactatagggaatttggccctcgaggccaagaattcggcacgagggctggttaacatcagatcccagaaaacagtgttctaaagaagacggtggtggatggtggtataatagatgtcatgcagccaatccaaacggcagatactactggggtggacagtacacctgggacatggcaaagcatggcacagatgatggtgtagtatggatgaattggaaggggtcatggtactcaatgaggaagatgagtatgaagatcaggcccttcttcccacagcaatagtccccaatacgtagatttttgctcttctgtatgtgacaacatttttgtacattatgttattggaattttctttcatacattatattcctctaaaactctcaagcagacgtgagtgtgactttttgaaaaaagtataggataaattcattaaaatagcacatgattttaaaaaaaaaaaa

SEQ ID NO: 25293 - DNA, 433 bp, Homo sapiens
gggaaataaccacagactgtgaacaaatgagtgtgactgcattccagtaaaactacttacaaaaacaggcaacagaccagatttggcccacaatctgtagttgacaatcttgggccattaactgctgcttgagctcaatttctactagttttcctctcattcactatgtagaagccacactgtcttcttaccattcgcaaagcacactaagtccattccttctgacagtctttgcagttaaccctccctctgcctagaacactcctcctagagctttgatagttcacttctcaatattaaggtatttactcaaatctcttcctctggctttcctgcccagacctgtttgaaacaatcaccctataccatcttccatctgtccctcattataattcactacactcttctcttcagggcactttttttttttttt

SEQ ID NO: 25294 - DNA, 341 bp, Homo sapiens
ggtgaaggtgctgaaccctcagcaggagggcagtttgagtccctcacctttgacatggagttgacctcggagtgcgctacctcccccatgtgaggagctgagaacggaagctgcagaaagatacgactgaggcgcctacctgcattctgccacccctcacacagccaaaccccagatcatctgaaactactaactttgtggttccagattttttttaatctcctacttctgctatctttggtcgacgcggccgcgaattccagatctatgaatcgtatatactgaaaaaccccgcaagttcactttaactgtgcatcgtgcaccatctcaatttctttcat

SEQ ID NO: 25295 - DNA, 316 bp, Homo sapiens
ggtcagtgaagttcagggtgggcaaatgagtgtgtgtgaggtataggaaatgctgatgacttctttaatgcttgaagtccgttcacaggtatctagccctagaatgcctagaacaggaagaggcagctggtgttctgcaaaacttggacaggggcaaagttgctgaaaaagttttggtttaacccgaagataagtggaaaagagcttgtccatgaacccaggttctcactctgtttacagaagtgtgttgagtacagttggtgaaggaagaggtaacaaaaaatgctaaatattttatccatgaaaatgacttcca

SEQ ID NO: 25296 - DNA, 433 bp, Homo sapiens
tttgaaaccctatgactgattaccaatttaatacgactcactatagggaatttggccctcgaggccaagaacttatacattaatttagtgattcattgtaggaactcccatcccagtcatcatctgtgggcctgtgtagtgactatcgtacgtttggtttattcctaccaccatttagtgagaaaacaattctacacttttggtcacaatagtaaggtggccacacacacacacacacacacacacacgtgtaaactgcaatagggttcattggggagggtgaggttaatttgcaaatatatgaagaagaagtgtaagcatttgtaacaatgaaaaggtctcagtatctgtgtgacaaggtaaaggagccttgggatgtgcattgattattatttgcttaaaaattgtttatttccctgaaaaaaaaaaaaaa

SEQ ID NO: 25297 - DNA, 345 bp, Homo sapiens
agaatgtgtaaaataaagctttggaggtgggtgtaatattttccatgagacacttaacgtagtacgtaaatatatcaggcagcctagtgtgtcaagtactgtgggtatggtagacaacagattagttaaatctctgctctcgagaaacctgatgtgtgtgtgtgtgtgtgtgtgtgtgtgtaagtctgatgttctcttgggtgcgatagtatatgagttggtgatagtgctgtcttgtagaaaaataaagctaggtaaaggaggaagtagtaagatatgcttgggaagtaggagttgcttttttatgtaacaatgaggaagctaagcctgtggctttgggagtga

SEQ ID NO: 25298 - DNA, 423 bp, Homo sapiens
gggatcaggaagtcaaattacagaggaagcagtaacaactgtggatgaagcgatggcaagccggcaggtggatattgcaactcagggctggttcattggtctgatgtgtgctgttgctctccttatcttaattttgctgattgtttgcttcatcagaagaaacaagggtggtaaatatccagttaaagaaaaggaagatgcccatgctgaccctgaaatccagcctatgaaggaagatgatgggacatttggagaatacagtgatgcagaagaccacaagcctttgaaaaaaggaagtcgaactccttcagacaggactgtgaaaaaagaagatagtgacgacagcctagttgactatggagaaggggttaatggccagttcaatgaggatggctcctttattggcaatacagtggtaagaaa

SEQ ID NO: 25299 - DNA, 466 bp, Homo sapiens
  misc_feature (1)...(466): n = a,t,c or g
ccntnnnnnnattganncctaacagctatgacatgattacgaatttaatacgactcactatagggaatttggccctcgaggccaagaattcggcacgagacaggaccatgaccattcacaacggcatgttcttcagcacgtatgacagagacaatgacggctggttaacatcagatcccagaaaacagtgttctaaagaagacggtggtggatggtggtataatagatgtcatgcagccaatccaaacggcagatactactggggtggacagtacacctgggacatggcaaagcatggcacagatgatggtgtagtatggatgaattggaaggggtcatggtactcaatgaggaagatgagtatgaagatcaggcccttcttcccacagcaatagtccccaatacgtagatttttgctcttctgtatgtgacaacatttttgtacattatgttattggaattttct

SEQ ID NO: 25300 - DNA, 308 bp, Homo sapiens
  misc_feature (1)...(308): n = a,t,c or g
ttttttttgtagtatggaagttgtaaagctgtgttttaataggattaccttaggaataagaggactgctttttaaagatacgagatcccgctgccttggcaattctgttatcagaaagatagtgattttgatacaaaacagtaagaaactgtagaattgcaggacccataatcctcacaaggaagatttagagagtgctgtgtgtcaatcactcatcagcacctcacagatattatctcaattcgtcctggcaaccatcactgcccctacttagcagtctcagagaggagactnaacttncacngggg

SEQ ID NO: 25301 - DNA, 356 bp, Homo sapiens
tttcctgtgtcataaatttctatgaagaatattttaatagttttatgcataggaactaagagctaatttttctcagccaggtgttcatttgtccttctttgattgttcaaaatacctccatttatcttcttctaggatcactcattttcattggtttatttgcaagatgaaacagtgtccagcagtgacgactgttggaaaagatatgtctaaaagctgttgtctccccctgatgtccggagttcgagaccagcctgaccgacatggagaaacctcgtctctactaaaaatacaaaattagccagggtgtcgtggcgcatgcctgtaatcccagctactccggaggctgaggcagg

SEQ ID NO: 25302 - DNA, 518 bp, Homo sapiens
  misc_feature (1)...(518): n = a,t,c or g
aattcggcacgagcatttttggccaatgaactatgtatgaaagtatctggagatgccatttcttccttaattataaaaaagtcaagagagaaagctcccccgcgcccccctttactcactctcccttcttgtctgagaacctagatatgaggcttagaaatatagcactcttgtgactgtgaggtaagaagcaagtggagatgctaagaatgtggaaagattctaaggagctcctaataccgttgataaactgctatgtgtgcctggattgcctttgtcttgacaaattgtgtgagacaagtgaatctctccattatctttttattttcttttgacacggagtctcgctctgttgcccaggctggagtataggggcgcgatctcggctcattgcaagctccgcctcccgggttcacgccattctcctgcctcagcctccggagtaactgggactanaagngcccgccacaagcaaggggaaatttttggggaatttaataanaaggggttcccaaggt

SEQ ID NO: 25303 - DNA, 427 bp, Homo sapiens
  misc_feature (1)...(427): n = a,t,c or g
gcggcacgagaacaaatgaaactttttaacatacctgttacttatttgatcttagggagatctcagtttccttacctatgaatgagctactatgagtaagcagctgtgatatctgaaggaattaatggtttttaatggtttctctttaggacggtccagaatgacccagccctaatcgtggctgagtttacaagacactgccttggaatctggtccaaggcagctgctcatggcatctccatttcttctttgagaagctttactgcttctcaagcaaccccaccttctcaggccctcagattttcccctcattagtaatcttgggccatttcagatccatgaatctttctacttccaaaggatgggnttcaaggtgaaatcaaggccattggaacttggntggtaattcccaanagaagttgnccat

SEQ ID NO: 25304 - DNA, 314 bp, Homo sapiens
acagaattcttttggttcggttgtatctacttatatctcataggactttttttccccccacagagagaatttggggatatagaaaataccattattttaagtttatgataccatatgaacaataccagttctttttattgacaatcattaatttaaaaaaatcaaagaatttaaactgtagttacaaatttattactattttacaaaactttaaggaaatcagaaattcaaaatctgaaaattcttttttagtattttgcataaagtttgtggtttgatataaaaggtaaatttcaaggctttaaatgttaggg

SEQ ID NO: 25305 - DNA, 474 bp, Homo sapiens
accgctatgactgattacgaatttaatacgactcactatagggaatttggccctcgaggccaagaattcggcacgagtgatgtcacacatttcccattcatataagatttaaaatcatagatgtgtaactttaaacttgtgactaattaataatatatttttattacagctaattcacttaagtaaaacaattctcttgaaatgttaatagcctttactgagtagatggagtagtgagccctaagtattttgattgcccagactgtctcattttctaggacctttcctatcatctcatggttcaggtgggatctgccatgttccatcagtgaccctgcctcttggctggagagggctgacccagagggaggcggctgatccaagctgggccagggtcctttaggaattaggaattgatattttatggttcctcagcctagctctaaaatgaaaatactaactctgggactattg

SEQ ID NO: 25306 - DNA, 878 bp, Homo sapiens
  misc_feature (1)...(878): n = a,t,c or g
ccaggtgaatattggcttggaaatgataaaattagccagcttaccaggatgggacccacagaacttttgatagaaatggaggactggaaaggagacaaagtaaaggctcactatggaggattcactgtacagaatgaagccaacaaataccagatctcagtgaacaaatacagaggaacagccggtaatgccctcatggatggagcatctcagctgatgggagaaaacaggaccatgaccattcacaacggcatgttcttcagcacgtatgacagagacaatgacggctggttaacatcagatcccagaaaacagtgttctaaagaagacggtggtggatggtggtataatagatgtcatgcagccaatccaaacggcagatactactggggtggacagtacacctgggacatggcaaagcatggcacagatgatggtgtagtatggatgaattggaaggggtcatggtactcaatgaggaagatgagtatgaagatcaggcccttcttcccacagcaatagtccccaatacgtagatttttgctcttctgtatgtgacaacatttttgtacattatgttattggaattttctttcatacattatattcctctaaaactctcaagcagacgtgagtgtgactttttgaaaaaagtataggataaattacattaaaatagcacatgattttcttttgttttcttcatttctcttgctcaccaagaagtaacaaaagtatagttttgacagagttggtgttcataatttcagttctagttgattgcgagaatttcaaataaggaacangggcctttaaccctggccgtnngaaaaccatgacgggaagggaaaactgangtttaaantcccntttnaaac

SEQ ID NO: 25307 - DNA, 400 bp, Homo sapiens
agtctggtagctgagcgttgggctgtaggtcgctgtgctgtgtgatcccccagagccatgcccgagatagtggatacctgttcgttggcctctccggcttccgtctgccggaccaagcacctgcacctgcgctgcagcgtcgactttactcgccggacgctgaccgggactgctgctctcacggtccagtctcaggaggacaatctgcgcagcctggttttggatacaaaggaccttacaatagaaaaagtagtgatcaatggacaagaagtcaaatatgctcttggagaaagacaaagttacaagggatcgccaatggaaatctctcttcctatcgctttgagcaaaaatcaagaaattgttatagaaatttcttttgagacctctccaaaatcttctg

SEQ ID NO: 25308 - DNA, 459 bp, Homo sapiens
  misc_feature (1)...(459): n = a,t,c or g
ggttatctacaataatcattaggtttctggaataacagtaagagctatgagagtgcatgattccatttctctccagaatatttcagtgctttctcaccttgaaaaatgaaaacaatctattcagacggttgggaatattttaattttctacttaaaactaaggttattctccacttgaggtaatgtagaggagattcttctctttactgtatctacatgtgttacattttagctcacaaacccttgttggtgatggagagttaacatgaataattaggacatcttggattatactgaactgctggctattaccatggtatttaaatgaatttataatcagatcttctaaatgttaggtgctctaaacatcgaatttttcttgcagccttgcttaaaagaagaagcatctgattaccttgaattggatacaattaaaaatctcgnaaaaaatattcacag

SEQ ID NO: 25309 - DNA, 414 bp, Homo sapiens
  misc_feature (1)...(414): n = a,t,c or g
gcaggaattacacttttcttgaaaagagtaatggtttactagaattcagagagggtggtgtttatcaatagaaatgaaggtcagaatatgaagaagaccacactacctgattacaaacatttgaaaggaatagtaacagtcagtctgtgcccccataccttaacatatgctattccatctgactggaatccctttcctccatctttcaaatcctacttaagtctctgcaaatcttctgacccttttatcctacagatacaatcattctccatgctgtagtacttccacaaagcgtacatacttctattacggtatatgaaatggcaagaggcagtacaaatgaacgtgaaatccggcaccaaactgagtttgacactcagctctactgngtgaccatgagcaagttatttaacc

SEQ ID NO: 25310 - DNA, 398 bp, Homo sapiens
gggacagaggtcgggagagagaactgagacccggtgcacatcttcaagaggcctagaatctagttgacaatattgacttaacttcagcaagtattttaatctctctccaaaggtatgcagaacttagttgcaagagaaggtgcaacttttaaatagggacgtttctatggcccgagagttttaccagtattctctttccaaatcccattacccagtcttgccatcagacaggcctcaaacacagaaggcaatccttctacagatacaatctaagtttcatggccgagcacagtggcgcacgcctgtaatcccagcactttgggataccaaagcgggtggatcaccaaaagtcaggatttcgagaccagcttggccaacgtggtgaaacgccgtcgcta

SEQ ID NO: 25311 - DNA, 660 bp, Homo sapiens
  misc_feature (1)...(660): n = a,t,c or g
ggatgatgtatataactatctattcgatgatgaagataccccaccaaacccaaaaaaagagatctctcgaggatcccgaattccagatctatgaatcgtagatactgaaaaaccccgcaagttcacttcaactgtgcatcgtgcaccatctcaatttctttcatttatacatcgttttgccttcttttatgtaactatactcctctaagtttcaatcttggccatgtaacctctgatctatagaattttttaaatgactagaattaatgcccatcttttttttggacctaaattcttcatgaaaatatattacgagggcttattcagaagctttggacttcttcgccagaggtttgtgaaaagttcctggttgcattactctgcagtttccatttgcattatcgatgagtaagatgcttgttaagcagcatgctgtgactganaggatactatnatngtatantgaannttctttctnaaagggatntctgnccnattctnntaantcncnnanctntaccntntncagntngtnnntatnnnnatntattgnagaatgcntnngngtnaatcttntnnangntgnngacctaanngntcttcnntaantatttcctnntctntgctnatnctngnnnnngtanttattanttanttatc

SEQ ID NO: 25312 - DNA, 394 bp, Homo sapiens
ggtactaccagcaaaaatcccagcaatcaatattacaaagaggcagcactcacttgagtacagaagtaacaacattagctgcttcgtaaacaagatggcatgggagatattctgttttgagtaaatgacaagtcctacagtctagataggaagatttctcctccatatggattttgtgatttcgtcttgtgttgagtaaggaaggggagcttggattccaagatcaatttaatgtctatattccttggcattgtcatgttagagcagcacatctcagatggctttcaatagttattttagcattgattttcctctactagagtaaatcaaaagatgatttagaaaatcaaaagtcagttttcccttgaagttttctcagaataaaggggagctg

SEQ ID NO: 25313 - DNA, 340 bp, Homo sapiens
gcttcccaattcctgatatttgcacagctttcaaaagctggcttttaataataaaaataaaactaagcataaaaatttggaattttatgccaaatatttctgtttcggttctgtctgaactgctttcaaaatgattaaggtattaaaatttagaattttgtaattcaccaatttttagtaagttttcagaagatgtgcccttctgccatctgtcactcgtagagctcctattatttgaataaatcctagctagttagctcaccgaagttccaattccacagtgcatgcctgagtcttgatgttatctaaatagcaaggagcttataggctattgtgctta

SEQ ID NO: 25314 - DNA, 219 bp, Homo sapiens
gtggagaagccaggggcagcccctgtaagcctgatgtgagaagctacatatgaggttagggctcatggagcaggactctcccttgagctcgcaggccttgtcttcccagggccatctgtgccaaccctgcgaaccaggagaggtcagccctgccttgcacagacaaccgagggcccagccctgggactcgccgtgagcactgggcaggactaaggaggt

SEQ ID NO: 25315 - DNA, 469 bp, Homo sapiens
ctatcacatgattacgaatttaatacgactcactatagggaatttggccctcgaggccaagaattcggcacgagttttccagggaggattgtttttgttcacagatgagcaaacatcctgtaagtgctgatttttcactgtgctttccaccctgttcctccctggtgccagcgtgccaacatctctacttattggcagcctagttgaagaaacctctagagttggcccaggaggactgttttctcagtgtttagagatcatacagtgccaagggcagctgccatggcctcaagccttccctagctcagcatcttctactctttctgctcccccagtctggctgtctgaatctagaccacagcctgtactccttaagtgttggaagcaagaagatttggtgctgacaaaccccctcccatcattttcagagctgccccaggaatctgacttccttgttcttcagcccagc

SEQ ID NO: 25316 - DNA, 378 bp, Homo sapiens
gctggatttggcaacaacttcatgaatatgatgtcaagtactagcaataacaaaaaatatatatattatacttcaccaaaattaaaaactctgcaatggatattaccaagaaagcaaaagagaacctacagaacggaattaaatatttgcaaatcacaaaactaagggatgcatatccaaaacatataaagaactacaactcaacaacaaaaattcaaacctactcaaaaatgggccaaggacttagacatttctccacagacaatgaaacaaacagccaagaaccaagtgaaaagatgttcaacatcactagtaatcagagaaatgcaaatctataccaaatcaatcccacttcacattcactaggatggctatcaa

SEQ ID NO: 25317 - DNA, 638 bp, Homo sapiens
  misc_feature (1)...(638): n = a,t,c or g
ggcttcaagctcaacaagaagctgtacgagctcatcatcacccgctactcggagcccgacctggcggtcgactttgacaatttcgtttgctgcctggtgcggctagagaccatgttccgatttttcaaaactctggacacagatctggatggagttgtgacctttgacttgtttaagtggttgcagctgaccatgtttgcatgaggcagggactcggtcccccttgccgtgctcccctccctcctcgtctgccaagcctcgcctcctaccacaccacaccaggccaccccagctgcaagtgccttccttggagcagagaggcagcctcgtcctcctgtcccctctcctcccagccaccatcgttcatctgctccgggcagaactgtgtggcccctgcctgtgccagccatgggctcgggatggactccctgggccccaaccaattgcaaaccaaggaaagnanctttccctggtcctggctccggaaaaccccnggnttnccaaaaaacccggangttcccctccccaaatttaagggncaccattcagnacaacnggctnggcttccngaagatataaccntacccactnctcgaaanttcggnatccagggttntggancccccnccggctccggg

SEQ ID NO: 25318 - DNA, 376 bp, Homo sapiens
gtttaaagtttgtttctttattatttcatttttattggctttggtttaaaaagggaaagataaactccccaactgaaggctttattacttttactatataaatgttgctctattaccaaaaagatatgttgttatttgattaaagttctcaaaagagtaatctcaacttttttattatttctatttagagataaagaaaatacttgagtgtgtgtgtgtgtttgtgtagcagccaagttgaaacttttatgttgacattattcttgttgaaatttatcttcacaattcatagaaattggtgattgatgagaaattttaatttttttaagtaaaatttggatttgcttagcatctcaggacagaacattcttcatgg

SEQ ID NO: 25319 - DNA, 422 bp, Homo sapiens
ggttgtgctataacaaatcatcctgtcaagtgtaaccactgtccacgtagttgaacttctgggatcaagaaagtctatttaaattgattcccatcataactggtggggcacatctaactcaactgtgaaaagacacatcacacaatcaccttgctgctgattacacggcctggggtctctgccttctccccttaccctcccgcctcccaccctccctgcaacaacagccctctagcctggggggcttgttagagtagatgtgaaggtttcaggtcgcagcctgtgggactactgctaggtgtgtggggtgtttcgcctgcacccctggtttctttaagtcttaagtgatgccccttccaaaccatcatcctgtccccacgctcctccactcccgccttggccgaagcatagattgtaacccc

SEQ ID NO: 25320 - DNA, 425 bp, Homo sapiens
ggccccctccgtggtgaaggtgtcttacaagggatccccagcagcaagacgggcctttgtcccccagctccggagtgggaagttcaacgtcttgctgacgacgtacgagtacatcatcaaagacaagcacatcctcgccaagatccgttggaagtacatgattgtggacgaaggtcaccgcatgaagaaccaccactgcaagctgacgcaggtgctcaacacgcactatgtggcaccccgccgcctgctgctgacgggcacaccgctgcagaacaagcttcccgagctctgggcgctgctcaacttcctgctgcccaccatcttcaagagctgcagcaccttcgagcagtggtttaacgcaccctttgccatgaccggggaaaaggtggacctgaatgaggaggaaaccattctcatcattccgg

SEQ ID NO: 25321 - DNA, 438 bp, Homo sapiens
  misc_feature (1)...(438): n = a,t,c or g
gccacttttcattattctaaacaaatttgatgaacaggcttttgcataggtatctacccataccctcattcacttacctaggtgacatttctaaaggtgaaattaactgatcaaaggacgtgtgtttttaaggctttgatgcacattacttaactttaactaacctcaggaaaaacagtgataaattataccccaaggccagcacttgggaaggtgagatgggcggatcacttgaggtcaggagttggagaccggcctggccaacatggtagaaccccatctccactaaaaatacaaaaattaatgggtgtgttggcatgtgtctgtaatcccagctactagggaggctgaggcaagggaatcgcttgagccccanaaggtggaggctgcagtgagtcaagatcacagcactgnattccatcctgggcaataaaagtg

SEQ ID NO: 25322 - DNA, 436 bp, Homo sapiens
gattctcattcctgtcgtgcaggctggagtgcagtggcgcgatgtcagcacactgcaacctccatctcccaggttcaagcgattctccttcctcagcctcccgagtagctaggattacaggcacccaccatcatgcccagttaattattgtatttttagtggagatggggtttggccaggctggtctagaactcctgacctcaggtgatccacccgccccgaccccacaaagtgctaggattacaggcgggagacaccgtgtccggcccattttttaagctttgtaaagacaggattatgcatgtagttgtctgtagttcctgtgaatcataatattaaactgaaactttttttgtttcagttaattttttttgaattattcaaaaccagtagtttatattcctaatactgattgtgtgaaacattttcagcattt

SEQ ID NO: 25323 - DNA, 956 bp, Homo sapiens
cgtttgacatgattacgaatttaatacgactcactatagggaatttggccctcgaggccaagaattcggcacgagcggcacgagcgagtctccagcaccatgtctggtttgtctggcccaccagcccggcgcggcccttttccgttagcgttgctgcttttgttcctgctcggccccagattggtccttgccatctccttccatctgcccattaactctcgcaagtgcctccgtgaggagattcacaaggacctgctagtgactggcgcgtacgagatctccgaccagtctgggggcgctggcggcctgcgcagccacctcaagatcacagattctgctggccatattctctactccaaagaggatgcaaccaaggggaaatttgcctttaccactgaagattatgacatgtttgaagtgtgttttgagagcaagggaacagggcggatacctgaccaactcgtgatcctagacatgaagcatggagtggaggcgaaaaattacgaagagattgcaaaagttgagaagctcaaaccattagaggtagagctgcgacgcctagaagacctttcagaatctattgttaatgattttgcctacatgaagaagagagaagaggagatgcgtgataccaacgagtcaacaaacactcgggtcctatacttcagcatcttttcaatgttctgtctcattggactagctacctggcaggtcttctacctgcgacgcttcttcaaggccaagaaattgattgagtaatgaatgaggcatattctcctcccaccttgtacctcagccagcagaacatcgctgggacgtgcctggcctaaggcatcctaccaacagcaccatcaaggcacgttggagctttcttgccagaactgatctcttttggtgtgggaggacatggggtaccacctacacccaacaagtcaatgagggacttctttttaatt

SEQ ID NO: 25324 - DNA, 426 bp, Homo sapiens
ttgaatacccgttatgacatgattacgaatttaatacgactcactatagggaatttggccctcgaggccaagaattcggcacgagggtgtgtcagctatccacctccatgagcatcgtatgctcaggagctcttatcaatacagagaacatggaaagaaaactccctgaatagaaatctcaatatctgtcacatattcttcattcagtcatttcatgttttataaaatgccaaaatatgaaatattaagtcatattttataacatgattgaatcacttgttatccagagtttaaaatctcatagacctctaatcaatgagtcagtgatgacaatgttacttatattttagacagagattctcaggttttttttttcttttttctgcctcaacagcaagtctttcaaaacagtggctgtcaggtttc

SEQ ID NO: 25325 - DNA, 427 bp, Homo sapiens
ttgaattcatatcctttgactgattacgaatttaatacgactcactatagggaatttggccctcgaggccaagaattcggcacgaggtggtatagaacaatgcagctgtatctgtcacaaactggtcttatctagaaacatctgctgagtctctaaccctttcagctttctcttcttttttgagacagagtcttgctttgttgcccaggctggagtgcagtggcaagtcaccacttactgcagctttaagctcctgggctcaagcaatcgtcctgccccagcctcctgagtagttgggacaacagtcgtgcactatgatgcttggctaattttttttttatttttgtagagatgaggtcttgctatgttgcccaggctggtcttgaactcctgggctcaagcaatctgggacctaaatggcaaatag

SEQ ID NO: 25326 - DNA, 400 bp, Homo sapiens
agaaaactgctaaagggtatccctgacctttatgatgatgcagctattttcgaggccaaaaaatcattttactgggcaagaaaaacatctcattcctttgtcgtgaatatccttgctcaggctctttatgaattattttctgccacagatgattccctgcatcaactaagaaaagcctgttttctttatttcaaacttggtggcgaatgtgttgcgggtcctgttgggctgctttctgtattgtctcctaaccctctagttttaattggacacttctttgctgttgcaatctatgccgtgtatttttgctttaagtcagaaccttggattacaaaacctcgagcccttctcagtagtggtgctgtattgtacaaagcgtgttctgtaatatttcctctaa

SEQ ID NO: 25327 - DNA, 373 bp, Homo sapiens
  misc_feature (1)...(373): n = a,t,c or g
ggaacagtctgctgtgcttcccagcataactggtattctgaagacctgtgtggaatggggaaaagagcattagaacctagggagtaccacatgttcctgtcattgtgaaactgatagactcttggaagcaagggtgtgcctttgtttacccagcaaaacccagcgcagggtctggcaaaatgtagacagactctcaattggagtgagcctcttgggttcaagagtaagtacttctggttgaaagtctgaagtatgatatcctccatacttgccttattccccctggactggtctcaggattaccatggaaacacacacatcaatcaaagatccacaatgagtaaaacaaccccgccagncncagagactggca

SEQ ID NO: 25328 - DNA, 488 bp, Homo sapiens
  misc_feature (1)...(488): n = a,t,c or g
ngtgtnnnnnctttgaacccttgaatgattacgatttaatacnactcactatagggaatttggccctcgaggccaagaattcggcacgaggcgagatgggcttgagggggctcagagcataaggcttcagggcccaagttgggagaagtgaccaaagtgtagccagttttctgagttcccgtgtgctagactggccagaagagagggtctggggcctggtcactcggccactctctcctgtttctggcctcttctcccttcactcccgtccagtctggttttgagagcaggggctgttctgcagcacctcagggaagggaggagagatacctgctgcttccattgcttttcccttcctggagtcgatgcctttctaagggttggagctgctccttgcaggggccgggtcagtttcccaggccatgccggggtggccatctatgctagggctggaagctgaggctgccgcagctgtgggctggggtggg

SEQ ID NO: 25329 - DNA, 747 bp, Homo sapiens
gttattcaactccttccagttgtcttgaacagcctgactcctgcctgccctatggaagttccttttatgcattggaggaaaaacatgttggcttttctcttgacgtgggagaaattgaaaagaaggggaaggggaagaaaagaaggggaagaagatcaacgaagaaaagaaggagaaggggaagtaaagaaggggaagaagatcaaaacccaccatgccccaggctcagcagggagctgctggatgagaaagggcctgaagtcttgcaggactcactggatagatgttattcaactccttcaggttgtcttgaactgactgactcatgccagccctacagaagtgccttttacgtattggagcaacagcgtgttggcttggctgttgacatggatgaaattgaaaagtaccaagaagtggaagaagaccaagacccatcatgccccaggctcagcagggagctgctggatgagaaagagcctgaagtcttgcaggactcactggatagatgttattcaactccttccagttgtcttgaacagcctgactcctgccagccctacagcagtgctgtttactcattggaggaacagtaccttggcttggctcttgacgtggatgaaattgaaaagtaccaagaaggggaagaagatcaaaagccaccatgccccaggctcagcagggagctgctggaggtagtagagcctgaagtcttgcaggactcactggatagatgttattcaactc

SEQ ID NO: 25330 - DNA, 528 bp, Homo sapiens
  misc_feature (1)...(528): n = a,t,c or g
attgaagaccgttatgacatgattacgaatttaatacgactcactatagggaatttggccctcgaggccaagaattcggcacgagagaggcaggaacgcagcgtctatgaagactggcccatttgcagagcactccaaccagctgtggaacatcagcgccgtcccttcctggtccaaagtgaaccagggtctcatccgcatgtataaggccgagtgcctggagaagttccctgtgatccagcacttcaagttcgggagcctgctgcccatccatcctgtcacgtcgggctaggaggggccaagccgaagagccacccaggccacagttcctgtgcctgccttccccaccccagcagtggcccctccccatcccctccctctgttcgtcccgtttgatgagaggctgtttactggggtggggtggcgagatgggcttgagggggctcagagcataaggcttcagggcccaagttgggagaaagtgaccaaagtgtaccagttttntgagttcccgggggnctaaatgcc

SEQ ID NO: 25331 - DNA, 639 bp, Homo sapiens
gtaagatggcggcggcggcggtggtggagttccagagagcccagtctctactcagcaccgaccgggaggcctccatcgacatcctccactccatcgtgaagcgtgacattcaggaaaacgatgaagaggcagtgcaagtcaaagagcagagcatcctggaactgggatctctcctggcaaagactggacaagctgcagagcttggaggactcctgaagtatgtacgacccttcttgaattccatcagcaaggctaaagcagctcgcctggtccgatctcttcttgatctgtttcttgatatggaagcagctacagggcaggaggtcgagctgtgtttagagtgcatcgaatgggccaagtcagagaaaagaactttcttacgccaagctttggaggcaagactggtgtctttgtactttgataccaagaggtaccaggaagcattgcatttgggttctcagctgctgcgggagttgaaaaagatggacgacaaagctcttttggtggaagtacagcttttagaaagcaaaacataccatgccctgagcaacctgccgaaagcccgagctgccttaacttctgctcgaaccacagcaaatgccatctactgcccccctaaattgcaggccaccttggact

SEQ ID NO: 25332 - DNA, 530 bp, Homo sapiens
caacagctatgacatgattacgaatttaatacgactcactatagggaatttggccctcgaggccaagaattcggcacgaggtcagctttcccctgactaagcagaaatatttagaagttaaaatgtgaattctggagtctgattgcttggggttgaaccccatctttgtcacttggccaacaggttactcaggcttaggtgagttatttggactctctgagtctcagttttctcatctgtaaaatggtgataataataatatttccctgcttgcattattgtgagagttacctgagttatctatgcaaagagtttcgcacaatacctggcacacagtaatcactcggtaagcatcagctgtcattgccctccctgcctagaagggtaattctggagggcaccagccctgcaaagtggagatctgcctgtctggccttgtccctttcttatctccctttgccatctctctcctgaaaggctcaccctaggctgtgtgggccaagatgaggtgatggcaggctcatctgaga

SEQ ID NO: 25333 - DNA, 468 bp, Homo sapiens
gactggcacctgagcatctaaaggacagcaaggacaaagtgtggtgtcccatgagattctggatgggggaggctggagcagagggtacttctgtgagggctgaggttttgcctcaagaggatgaatcacgaactgctttcagcagaggagggacatgatccagctctggctctgagagatgactttgactgctaacattggaaagactgcaggcaacacaggcaacagcagggagagcagtaggggagctactgcagtaacaccggcaaggaaaaaaggccacttggacccgggtggtagaagtggagagaaaaggtatcagactctgcatatactttaaaggcagagccagaggctttgagaacaaattcaatgtagcttgtgaaagagtcaaggaggactccaaggtttctaataccacaatgtgatgaaggttctgaaaacaatggctcggaaggtctttaacat

SEQ ID NO: 25334 - DNA, 442 bp, Homo sapiens
  misc_feature (1)...(442): n = a,t,c or g
ttgganatccgntatcacatgattacgaatttaatacgactcactatagggaatttggccctcgaggccaagaattcggcacgaggccagtgcaagcacctggtggacctattctggacaatggatgtatgaaagggtgtggtatccacaagcagaagtacagaatcactctacttcctcctatcgtaaagtgacttggcactgggaagcctccatgaaagctcaaggtctatcctttgctcaagtaaggttattggagggaaatttttctctttgcgtagaaaataaaaatggcagtggacccttcctaggtaatatacctaaacaatactgtaatcaaatactatggtttgattctacagatggcaccttcatgccctctatagatgttacaaatgaatccaggaacgatgangatgatacaagngtttgcctangcact

SEQ ID NO: 25335 - DNA, 755 bp, Homo sapiens
  misc_feature (1)...(755): n = a,t,c or g
cgctccgctgtacctggatcctgctcctctgggttgaaacccgggcgccgccaagatgccggcttaccactcttctctcatggatcctgataccaaactcatcggaaacatggcactgttgcctatcagaagtcaattcaaaggacctgcccccagagagacaaaagatacagatattgtggatgaagccatctattacttcaaggccaatgtcttcttcaaaaactatgaaattaagaatgaagctgataggaccttgatatatataactctctacatttctgaatgtctgaagaaactgcaaaagtgcaattccaaaagccaaggtgagaaagaaatgtatacgctgggaatcactaattttcccattcctggagagcctggttttccacttaacgcaatttatgccaaacctgcaaacaaacaggaagatgaagtgatgagagcctatttacaacagctaaggcaagagactggactgagactttgngagaaagtttcgacctcagaatgataaccagcaagtggtggacttgctttgtgaagagacagttcatgaacaagagtctttcaggacctggacagtgaagggagcccgggcagccaccgtctccagagccctgggcagcattttccagcaagatgtacacaatcttttgcctttacttcgtaaagttttatacagaagagagaagagcatgtctttgcttgaaaaactcttgatcaagcatttgggtgggagaaaagaaagtggg

SEQ ID NO: 25336 - DNA, 357 bp, Homo sapiens
gagagttcaagagcttaggggataattcaaggcagacactggaaagaactttttgattgtgacaaggagaatatatcgaagaaaaccttgtttaaatagggcaagtgaaatttacctctggggcatgggctacttgaagtttgagtaactttctaggtctcagtcctttaattatggggtaacatgtgagtcataggacaatttcttctttgtgaagaaagctgtcaatttatttgttggactttggtcagtaggcaatgcagaatcacttgtgaccagtgcaggcaacaaagaatcaccatgagttttggaacataagagtgacataatcagagacatgtattagggagactaaac

SEQ ID NO: 25337 - DNA, 408 bp, Homo sapiens
tgacatgattacgaatttaataccgactcactatagggaatttggccctcgaggccaagaattcggcacgagacatccttccttctcaggtaaggaaactgaggattgcctcaaagtcacatgactatggtaaagacatttttttcccacatgcttatgactaaatgttagtactcgctggaaacttcataccagacatcccataccctttggactgattaactcatagcaggggaacttgggccttagagtcactgttaattggaggttagaggtatgtggctgagagaaaattgtctgggaaatgcatttgcccttcaagctcagaacccagaaagcttttgtcagagccagccaggactggctgcaggattttggaatttcagaaattttgtgagatttttataa

SEQ ID NO: 25338 - DNA, 299 bp, Homo sapiens
tccccttctatttctttgccattcatttcatccatagccttaacagctgctcctctgtcttcaaaatgaacaaatgcataatctttcaacttctttactctttcgagttttccaaattcagaaaatgacttttccaatatttcttctgtcaccgtagtagccaagtttctcacaaacaaaacttttaccttagccatgacttctggatctggttcttccacagggtcagcccattcaactgtaactacatttccccacacttttacttttccactcatcagccggcgtctggcttgtgc

SEQ ID NO: 25339 - DNA, 353 bp, Homo sapiens
gtgatgtcagaacagaaagaggaagtgatgttatcatcatgctagtaggaaataaaacagatcttgctgacaagaggcaagtgtcaattgaggagggagagaggaaagccaaagagctgaatgttatgtttattgaaactagtgcaaaagctggatacaatgtaaagcagctctttcgacgtgtagcagcagctttgccgggaatggaaagcacacaggacagaagcagagaagatatgattgacataaaactggaaaagcctcaggagcaaccagtcagtgaaggaggctgttcctgctaatctcccatgtcatcttcaaccttcttcagaagctcactgctttggccccct

SEQ ID NO: 25340 - DNA, 317 bp, Homo sapiens
  misc_feature (1)...(317): n = a,t,c or g
ctttggcctgtgtgtcactgattttgtgtgcgtatatgttatctttcaagtacatttcagacaccctagaagtggggacaccttttttatctcataggtccgtggcccagaatttgacaataaaaggcaattcatcctaaatgtaacccagattaattatatcaacaaaatgttttataaatgtgaggcagtatggcagagtagaaacacttctgtcctccctttccacgcctttgaaatggagttaataattcctctttttcagagttgttgtaagaattaaaatanaaaatgcatgtgaatctctcagcgcaatg

SEQ ID NO: 25341 - DNA, 419 bp, Homo sapiens
  misc_feature (1)...(419): n = a,t,c or g
gannntttgannccnttaacagctatgacatgattacgaatttaatacgactcactatagggaatttggccctcgaggccaagaattcggcacgaggggccttgtctgctggccacgcaagtgtcacatgcgatctacattaatatcaagtcttgactccctacttcccgtcattcctcacaggacagaagcagagtgggtggtggttatgtttgacagaaggcattaggttgacaacttgtcatgattttgacggtaagccaccatgattgtgttctctgcctctggttgaccttacaaaaaccattggaactgtgactttgaaaggtgctcttgctaagcttatatgtgcctgttaatgaaagtgcctgaaagaccttccttaataaagaaggttctaagctgaaaaaaaaaaaaaa

SEQ ID NO: 25342 - DNA, 521 bp, Homo sapiens
  misc_feature (1)...(521): n = a,t,c or g
aanagctttgacatgattacgaatttaatacgactcactatagggaatttggccctcgaggccaagaattcggcacgagtggatgacaggctagtcacaatgcagatatgggacacagcaggacaggaacggttccagtctctcggtgtggccttctacagaggtgcagactgctgcgttctggtatttgatgtgactgcccccaacacattcaaaaccctagatagctggagagatgagtttctcatccaggccagtccccgagatcctgaaaacttcccatttgttgtgttgggaaacaagattgacctcgaaaacagacaagtggccacaaagcgggcacaggcctggtgctacagcaaacaacattccctactttgagaccagtgccaaggaggccatcaacgtggagcaggcgttccanacgattgcacggaatgcacttaagcaggaaacggaggtggagctgtacaacgaatttcctgaacctatcaaactggcaanaatgaccggccaaggct

SEQ ID NO: 25343 - DNA, 449 bp, Homo sapiens
  misc_feature (1)...(449): n = a,t,c or g
gtaaatgtttctttcttgtgaagagatgttctcgtttgcatactgctttttaaagactttgatttctccaagtgtgtatcatctgcactaggaactttgtttttaagcaataggtctggatacacatttaacttaggaggctcctccaatttgcctcaaacctcttacggagcttctcctcagaagtggtaccatcgccttccaaagtcagcactctacactcttgaatgtaccaaggatctcttggcgacagtaccaagcacggttctctacacaggtgactgaagttgcctctgtgttggctggcatccctgagtcccctcngggctcctatggagcctaaaagaaaccttcacttgcagaaaacttgagtcacaaaattctggaacttgaaaaagtantaaggggctccaacaattgacttaacccnaagtaataaaagcactgcc

SEQ ID NO: 25344 - DNA, 339 bp, Homo sapiens
ggcacccatatagcaatacactattctgaaatgtaaattacaaaggaaataaaatgtaatcatgcagacattttttaatataagaaaatgcgataaaatatactacaccagatcaacatttatcaattccatagatactgagttttcaacttactgcactgttttcatataagtacatgcaaaactagcagattatggatttttaaagtaacattaaaataataccatagtttgacaatacttgggcaataggaatgaaaactaagagccctagcctaattatttctgccttaacagaaatctcaattaagacattacatatataaaaatcacagaaat

SEQ ID NO: 25345 - DNA, 463 bp, Homo sapiens
  misc_feature (1)...(463): n = a,t,c or g
gggagagcctgcagacagaggcctccagcttggtctgtctccccacctctaccagcatctgctgagctatgagccaaaccagggatttacagggaggaaaagctttcggactgctgaaggcccagcaggaagagaggctggatgagatcaacaagcaattcctagacgatcccaaatatagcagtgatgaggatctgccctccaaactggaaggcttcaaagagaaatacatggagtttgaccttaatggaaatggcgatattgatatcatgtccctgaaacgaatgctggagaaacttggagtccccaagactcacctagagctaaagaaattaattggagaggtgtccagtggctccggggagacttcagctaccctgactttctcaggatgatgctgggcaagagatctgccatcctaaaaatgatcccgaagttnngaggaaaaaccananaaaaggaa

SEQ ID NO: 25346 - DNA, 359 bp, Homo sapiens
  misc_feature (1)...(359): n = a,t,c or g
gcaaacccttctccatagtatttcagtcatggaaggatcatttatgcaggtagtcattccaggagtttttggtcttttctgtctcaaggcattgtgtgttttgttccgggactggtttgggtgggacaaagttagaattgcctgaagatcacacattcagactgttgtgtctgtggagttttaggagtggggggtgacctttctggtctttgcacttccatcctctcccacttccatctggcatcccacgcgttgtcccctgcacttctggaaggcacagggtgctgctgcctcctggtctttgcctttgctgggccttctgtgcaggacgctcancctcagggctcanaaggtgccag

SEQ ID NO: 25347 - DNA, 430 bp, Homo sapiens
  misc_feature (1)...(430): n = a,t,c or g
gctctagagaggggacactgttacactgttttcccaaagcagcatcatcccctcataaaccatccagatttggtggctggacacagggcagcccagagcaccatccctgaagggacaggcctggctggattctaatacctgtttatacaagggtgggtagtgtctctcagggttttggccaggctacataccttgaataccgttaattgcaccagtaaaaagcctgtttctagcagtgattatactaagtcacaagtttcaacaataaaacccattttttgtgttcagaatgttggaccaaatatggataacagaaaaacttaaactggccacatttggaatgtggctcactttgattaataccagttgccaatctanactttgattcttactgctggaactgatgacctggaaagtaaacccttactta

SEQ ID NO: 25348 - DNA, 526 bp, Homo sapiens
  misc_feature (1)...(526): n = a,t,c or g
gngnnnnnattganaccntttganaaccgtttgactgattacgaatttaatacgactcactatagggaatttggccctcgaggccaagaattcggcacgagaagaaattcagcaatcagtacaaagccacaataggagctgactttctgaccaaggaggtgatggtggatgacaggctagtcacaatgcagatatgggacacagcaggacaggaacggttccagtctctcggtgtggccttctacagaggtgcagactgctgcgttctggtatttgatgtgactgcccccaacacattcaaaaccctagatagctggagagatgagtttctcatccaggccagtccccgagatcctgaaaacttcccatttgttgtgttgggaaacaagattgacctcgaaaacagacaagtggccacaaagcgggcacaggcctggtgctacagcaaaaacaacattccctactttgagaccagtgccaaggaggccatcaacgtggagcaggcgttccagacgattgcacggaa

SEQ ID NO: 25349 - DNA, 456 bp, Homo sapiens
ggctagcaccatgagctagactacaccctcatgagggtctgcaagcagatgataaagaggttctgtccggaagcagattctaaaaccatgttgcagtgcttgaagcaaaataaaaacagtgaattgatggatcccaaatgcaaacagatgataaccaagcgccagatcacccagaacacagattaccgcttaaaccccatgttaagaaaagcctgtaaagctgacattcctaaattctgtcacggtatcctgactaaggccaaggatgattcagaattagaaggacaagtcatctcttgcctgaagctgagatatgctgaccagcgcctgtcttcagactgtgaagaccagatccgaatcattatccaggagtccgcctggactaccgcctggatcctcagctccagctgcactgctcagacgagatctccagtctatgtgctgaagaagcacacc

SEQ ID NO: 25350 - DNA, 839 bp, Homo sapiens
  misc_feature (1)...(839): n = a,t,c or g
gctgtggagctgctaattcgcaatcatttggttaatatgtagcagtatgatcttcacctagcgcagtcaatggagaatggcttaaactacatggctgtggcatttgctatgcagttagtaaaaatcctgctggtggatgaaaggagtgttgctcatgttactgaggcagatctgttccacaccattgaaaccctcatgaggattaatgctcattccagaggcaatgctccagaaggattgccccagctgatggaagtagtgcgatccaactatgaagcaatgattgatcgtgctcatggaggcccaaactttatgatgcattctgggatctctcaagcctcagagtatgatgaccctccaggcctgagggagaaggcagagtatcttctgagggaatgggtgaatctctaccattcagcagcagctggccgcgacagtaccaaagctttctctgcatttgttggacagatgcaccagcaaggaatactgaagaccgatgatctcataacaaggttctttcgtctgtgtactgaaatgtgtgttgaaatcagttaccgtgctcaggctgagcagcagcacaatcctgctgccaatcccaccatgatccgagccaagtgctatcacaacctggatgcctttgttcgactcattgcactgctcgtgaaacactcaggggaggccaccaacactgtcacaaagattaatctgctgaacaaggtctgaaatcctttcttgccttagtcttggtctacatcagtggggtgttttatttatttatttattattattattttttatattggttctttgaganagctcactntgtacccaagctggag

SEQ ID NO: 25351 - DNA, 437 bp, Homo sapiens
  misc_feature (1)...(437): n = a,t,c or g
gctgggcagacgagagtctctgagactcccctgattctttttcccattgtctctttaccctgcctgcagacttacagatgtcttgagactcaccagatgcttctgatatgtatcctgagattcttccagatataattctctgtgattcaattttttcaaaaatttccagctttggcatggatctactgttttcactctcattatcacagtcccataggagctggggttctgatgaatcaaaatgggccttggtctccactggctgtaacttgacattaagtgctggtccaggaggtgacacttttttctggaatatttcttgtccatgttcatgggcttgaacctggagtactgcttcatcagtgcctctctccaaatcttctagtatggcactgcctcctctccantttctgggaatgttcatgtacccaggcctg

SEQ ID NO: 25352 - DNA, 352 bp, Homo sapiens
gtggattgctacaagaactttgtggccaagaagtgtgctggatgcaagaaccccatcactgggtttggtaaaggctccagtgtggtggcctatgaaggacaatcctggcacgactactgcttccactgcaaaaaatgctccgtgaatctggccaacaagcgctttgttttccaccaggagcaagtgtattgtcccgactgtgccaaaaagctgtaaactgacaggggctcctgtcctgtaaaatggcatttgaatctcgttctttgtgtccttactttctgccctataccatcaataggggaagagtggtccttcccttctttaaagttctccttccgtcttttctcccatt

SEQ ID NO: 25353 - DNA, 295 bp, Homo sapiens
cgcaggtgcacagtaattgcctatccctgcaggaggtggaagatttctgcagactgcgttgcctctgtgtggcttttcaactccacttacccctttctcagagagcttgttctcgagtcatcacatgctcttggattaggaacagtgattctttcttaaaaatggtaaacatattttgtttattttttgtctgaacatgagagatgaaaaccatgatcacctttaaaactagagttatattggaataatgccagatctaattagctgataaatcaagttcctattttcaacaact

SEQ ID NO: 25354 - DNA, 479 bp, Homo sapiens
  misc_feature (1)...(479): n = a,t,c or g
gngnnntttganntttgaaaacccnttgactgattacgaatttaatacgactcactatagggaatttggccctcgaggccaagaattcggcacgagggcggcttggagagctcgggagagttccctggaaccagaacttggaccttctcgcttctgtcctccgtttagtctcctcctcggcgggagccctcgcgacgcgcccggcccggagcccccagcgcagcggccgcgtttgaaggatgacctctaggaagaaagtgttgctgaaggttatcatcctgggagattctggagtcgggaagacatcactcatgaaccagtatgtgaataagaaattcagcaatcagtacaaagccacaataggagctgactttctgaccaaggaggtgatggtggatgacaggctagtcacaatgcagatatgggacacagcaggacaggaacggttccagtctctcggtgtggccttntacaaaagg

SEQ ID NO: 25355 - DNA, 400 bp, Homo sapiens
  misc_feature (1)...(400): n = a,t,c or g
ggatacattattaatattcaaatccccaaaatattcatgattattggaatttttttaatgcagaacctgaatatcttaaacaaaataaagttttcctctagagaaaagaacccagacctccagccttggactcaaagaataagatttatttgtggggataaggatgattctgccatcaaaaataattttaacaacttgggaaaccactgaccttcagatagtgatactctggagagggttgcatgtattcaggtgcttgactggcatttatgtccttctgagcatctgtgttagtcgccttcaaattcagccttttctctttgtgtgaaccttctgtgctagggagacttttcttactaatctctggacaaaacattgattctagnttccattgctcaag

SEQ ID NO: 25356 - DNA, 452 bp, Homo sapiens
  misc_feature (1)...(452): n = a,t,c or g
gcaaaagccaggatgcttgacacctgtcttggctctggttttaggcactcacacgtacgaagcttgagattcttgtttaccagtccccacaaattataagccacagattaaaatgtcccagggctggcttggagaaggccctccaaatgcaccagagaagcttccggaaacttggcacctgagactaacgaaacagctttcagcagagtgggtggcagatgggaaggcttcagaagcaaggtgcctccctgagtgatgtcccaggagaaaaatgacatcaacccagccaacgagaaaaagccctgtcgtgctgtgtgggaaggcaggtgccgggccttacctagctccacatgctcatgccatacttgctggaagctgggatgatgggatcccttcttcagggccacaggaaggganaggttcatgggtcctggatggctaagccctggctg

SEQ ID NO: 25357 - DNA, 400 bp, Homo sapiens
gtctgaatgcaggagagtgtagagtgttttctctaacaaggctaggtaagtcatcttcaggggaggggcttacaaggactcattggggaagcgacccctgtgtatgcaggtggctatgctaagagctggtgatagagcagggtgtctcggtggagggctccctctcggactcagaggcacattttagagcttcattgctggtggctgaaaagcacagcttaggtccttctgtgtatcttatagagatgaaagtaaagggcatcgggaaccagcgaggagaccctccccacatgtgcactcacacgagccttatggattacacgtttccttacagcatggcccctgggttggccactggaattgccattccttttcagacttagctttgggaggcagtgtg

SEQ ID NO: 25358 - DNA, 634 bp, Homo sapiens
  misc_feature (1)...(634): n = a,t,c or g
gcggcacgaggataaagtttaattgagttgtatgctaacaaattgctgaattcaagacagttgatctaatttagtgggatcttgaaatttaagtaattgctcagttttctaccaagtatttagccggagatcttagctacttctaaagtttatttatttattatttattggatacaggatctcactgttgccaggctggagtacagtggcaccatcacggctcactgcagcctttgacctcctgggttcaagtgatcctcccacctcagcctcccaactagcagggactgcaggtgtgcaccaccatgcccggctaatttttttattttgagtacagacagggtcttcttgaattgcccaggctggtctcgaactcttgggctcaagtgatcctcccacctcagccttccaaagtgccgggattacaggcttgagccaccacgcctggcctcagtttgtttagttgacatgtaacaggtctgttagctttttacctgtgaaatgtaacagcatangcacatcagaaacattanttcctggtacttctctgcaccttttctggatctggaaattgtcanggcacntgggaagtgcgggtgggtttccagagcctctcacccannatcgcgtcggg

SEQ ID NO: 25359 - DNA, 360 bp, Homo sapiens
gctgaggcactgataatatgtttgaggttaaaatataaattaagactttaaaagatgaaaaatggtcccttcttccctaatcagctcccttcccctgcctggtatgagttgcccatcatacgcatggtcctggaggatgaccaggactaatgcatgtggtatgagtaggtttggccccctcactatctctagagtgagaatctggctcctgtttccatgggtcaaagccggttgcagagaatctgtagtcactttggagctttagcttctctgccaagccctcaataagccagcaaaccaggactctgccccttctgtttccataggaatcatgttggatagtcagctgtaccaagcccc

SEQ ID NO: 25360 - DNA, 336 bp, Homo sapiens
gatttttggtagagacagggtttcacgacgttggtcaggctggtctcaaactcctgacctcaaatgatccaatcacctcggcctcccaaagtgttaacgattacaggtgtgagccactgcacctggctgagccctggagctatttctttctaaccaagatggacgcagaggtctagaaccagcctgctaaacactcctcttatctaccactcaacttcagtaagttaatactgttcacataaacttcagtttaacttaatagaaagggcaaggaccttggcatcaaaatgttattcagttccagccttgtcacttgctagctgttaactctggcat

SEQ ID NO: 25361 - DNA, 680 bp, Homo sapiens
  misc_feature (1)...(680): n = a,t,c or g
accgttatgacatgattacgaatttaatacgactcactatagggaatttggccctcgaggccaagaattcggcacgagggcctggagtcttggccataaagcctgaggcggcggcagcggcggagttggcggcttggagagctcgggagagttccctggaaccagaacttggaccttctcgcttctgtcctccgtttagtctcctcctcggcgggagccctcgcgacgcgcccggcccggagcccccagcgcagcggccgcgtttgaaggatgacctctaggaagaaagtgttgctgaaggttatcatcctgggagattctggagtcgggaagacatcactcatgaaccagtatgtgaataagaaattcagcaatcagtacaaagccacaataggagctgactttctgaccaaggaggtgatggtggatgacaggctagtcacaatgcagatatgggacacagcaggacaggaacggttccagtctctcggtgtggccttctacagaggtgcagactgctgcgttctggtatttgatgtgactgcccccaacacattcaaaaccctagatagctggagagatgagtttctcatccaggccagtccccgagatcctgaaaacttcccaattgttgtgttgggaaacaagattgactcgaaaacagacaantggcacaaagc

SEQ ID NO: 25362 - DNA, 417 bp, Homo sapiens
ggaaagaggaaaatctgactgcataggccccaaaggctttcctctaatagaatgatgggttttaggttaaaaaaaaaattattgttttgttcttttaggtttagaaataatagggagagagggaaaaagcagtcattaggaagttccctgagccgctttccaagtaagacgggtgaaaaatgaaccagcattgacacttggctccatgtgaaagcccctgtcacctctccccccttccgtggccctggccttttgtttctggagaacggagctaaggtactttttctcccagaccaaaggcagcagggaaggagtccccttgtgtacgcatcgcctttagatggccttctcatggttattgcaatgcagacttccccacacaattgctccggggagaccgaaaagcaaaacatttgt

SEQ ID NO: 25363 - DNA, 262 bp, Homo sapiens
cttagccatttttcaaagcaattgaaatgcattgctctggatctgttccttggcagtggactcagaaagccaacatgtggctcctcccagcccataaccagtatttttgctgcttctgaatacaaattggttggttttgacttcagattgaacttactgtagcctcagatgatttcccccctccgcctccaggaagaaagaatgttactgccttaataaaaaatgaaaagagaatgatgctcaaaatctttccaaataaaat

SEQ ID NO: 25364 - DNA, 504 bp, Homo sapiens
  misc_feature (1)...(504): n = a,t,c or g
gtcgctttctcaggtttcccagttcatggcgtgtgaggagctgcccccgggggccccagagcttccccaagaaggccccacacgacgcctctccctaccgggccagctgggggccctcacctcccagcccctgcacagacacggctcggacccgggcagttagtggggctgcccagtgtggacacgtggctcacccagggatcaaggcgctgctgggccgctccccttggaggccctgctcaggaggccctgaccgtggaaggggagaggaactcgaaagcacagctcctcccccagcccttgggaccatcttctcctgcagtcccctgggccccagtgagaggggcaggggcagggccggcagtaggtggggcctgtggtccccccactgccctgagggcattactggtccaactgcccggaggcacccggcctgggcttaaggcacctcaaggacttttctgcaattactgctcttattgttaaggataatattaagntcat

SEQ ID NO: 25365 - DNA, 173 bp, Homo sapiens
gtcctccttactgcttaaagtgaaatgtgagaggaaagagccgaaataaagaaggaatttttaagcaaaacacaatcagaacttggagatttgggatagatttctcaatctatattgtaaaaattgagaaagtttttcttgaagaggtatggttgaacaatgttttctttttc

SEQ ID NO: 25366 - DNA, 443 bp, Homo sapiens
gcatgaatctctctgcccaagaccaccagacattctttacttgtgactcggaccatctgcgtcccgcagatgcaataatgcagaaagcctggagagagagaaacccccaagctaggatttctgcagctcatgaagccttggagataaatgagtgtgcaactgcttatattctcttggctgaagaggaagcaacaaccattgctgaagcagaaaaattatttaagcaggccctgaaggctggagatggctgttaccgacgctctcagcagctacaacatcatggatcccagtatgaagcccaacatagacgagacaccaatgtcttggtgtacatcaaaagaaggctagcaatgtgtgccagaagactcgggaggaccagggaagcagtgaaaatgatgagagattaatgaaggagttcccccttttgagtatgttcaatatcc

SEQ ID NO: 25367 - DNA, 360 bp, Homo sapiens
ggcccttcccagggtagcagacataagcagcaataaatcagtaggtactaaaacacaggatcactttattctggctttctgccatttatagacactcaaacttggaatgagcagaaatccttttgaacttatatttgcaaaaccttgtgtccattcttttatcttccggattacctttatttttttctgtttatttcctcataccatcatctatgctctgttgggtgcagagtctgcttagatatctttgagtggccctgatttgcatgtggtagcttgcttacccagagaaaggtactcgggatcgaattggatgcagtttagctgtggctcagtagagggagtagaggagctgaggga

SEQ ID NO: 25368 - DNA, 346 bp, Homo sapiens
gccacattggtgctgtacttgaacgagcaaagccagaatatatcagcaaaacatacaagattgattcttgggagaatgctgaggactttcttgagaagctcgctttccggactgggaagttactaaagggtggagagcccgacttgcagactgtgggtaagatggtcctcaatgactggcagaggggccggattcctttctttgtcaagccacccaatgcagagccacttgtggccccccagcttctaccctcctcatctttggaagttgtcccagaagcagcccagaacaatccaggggaggaagtcacagaaactgcaggtgaagggtcagaatccatcattaa

SEQ ID NO: 25369 - DNA, 422 bp, Homo sapiens
gatcacctggagtccctcgtctgtggtcttggaggcttaaattgtaaaatacatcccttatggaatcctaaattcctctaggtgtttttggaaggcgcatttgagccttgtgagctaaaatggaatggatttaatatttcctatctggcatttccatcttgcccctggtacacaagtcactggcctggaactcagccttgattcactgtccgtcttcacggattagctgtgctgttatgttgtctgtgctgcagattggcccatgtgggaagtcgggggggacctgatttcctgcttggaagacttgggggactgccgagcatatcaaagtgttcatagtcaccaagtgaactgcagcacaaccatctcctctccagcaagccctgaagtcagtagtgcctgcaggtgaaaccaaccagccc

SEQ ID NO: 25370 - DNA, 421 bp, Homo sapiens
ctttaaagtgtggaagcagaaaggacctgcattttcctacattgaggagctgacataggggtaaggtatgggagaggtaggtggatccagggaaaagcagtggggacggaaggcaaagagaccactcaacccccacctggaaggggcaaagaaaagccagagttccatgtttgtactcctgtgctggactgtttcctgagtaccagcaggtccctttttgtctctcatgggcctagcataggtatgagccagggatcctttcctggtccctaagatcaaaccccatggagcagccagcgttagatgcccccacccacctgtactctggagagactgtgctgggaacatgtaccactgagcctgagatggggatgagggcagagagaggggagccccctcttccactcagttgttcctactc

SEQ ID NO: 25371 - DNA, 332 bp, Homo sapiens
  misc_feature (1)...(332): n = a,t,c or g
gcatcaattacgaagtgaaaataaattgattttaatgaaaacacagctacaaccacacaagtaacatctaccacaactcaagataccacaccattcaaaattactactcttaaaacaactactcttgcacccaaagtaactacaacaaaaaagacaattactaccactgagattatgaacaaacctgaagaaacagcctgggcgacagagggagactccatccaaaaaaaaaaaaanaaaaaaaaangggntttttaantggnntggttanngggnntttaaaannnttgntttttaagggtaactttnnttggggttccccccntcccttt

SEQ ID NO: 25372 - DNA, 448 bp, Homo sapiens
  misc_feature (1)...(448): n = a,t,c or g
anaccgntattacatgatcacgaatttaataccgactcactatagggaatttggccctcgaggccaagaattcggcacgagaaacaaagcatctaaaaccacagcttctggaagaactacttgttcttgcctgtcttttatctcttttcaaacttgaccttggcctctcgtcgggctttgggcattaggtgattgtagttacaaactttcgcaaaagacttgatctttgaccccttggtgatcttcttcttgcccatggcagctgtcactttgcaggggtagtggtcaattccagacaccagagcatggctgtaggggcaatctgaggtgctatcatcaatgttcttcacgatgacggctttgcatccagagtagcgtccagccaggacaagcaccaccttcccaggtttcatgaacttgcccatttcggcagcaaccactcgggcct

SEQ ID NO: 25373 - DNA, 641 bp, Homo sapiens
  misc_feature (1)...(641): n = a,t,c or g
gcaccagcaccgagggccatggggccctctccatttctcctctcagcagaagtccaggttcccatgcagactttctgctgacccctctgtcacccactgccagtcagggcagtccctcattctgcgttgggagtctggaagaagactctcccttcccttcctttgcccagatgctgagggttggaaaagcaaaagcagatgtgtggcccaaaactgctccaaagaaagatgagaacagcttagttcctcctgcccctgtggacagcgacggggagagtgataattcagaccgtgttcctgtgcccagttttcaaaattccttcagccaagctattgaagcaaccttcatgaaaactggncacaccaantacttcanatcccctccctgaagaaaaaggggggaangaanngaanaaaacaggannagagcncnggttaaaaccaaatngtcaaancaanntgacacaagnggccaagggtnacttcccaaccgggttttgtttttgnttttttccccaagcttttgtttggngctgtaattttaagtantgagtttgaanagattantctggggaaggggttccaaaggtgaggggacaaanaaattttaanacagtgtatttccantccggncttaacaa

SEQ ID NO: 25374 - DNA, 436 bp, Homo sapiens
ctgaaatctttagcagttaaggagtttttttcaaagcccaagtataaccacattttgaaaccaggaagactgtctctctgaaccgagcactatattgcagttggacatgagaaccgtgcaaatttctgatctagagaccctgaggggcgagctgcgcttcgacatcaggaaggcggggaccctgcacggcttcacggcctggtttagcgtccacttccagagcctgcaggaggggcagccgccgcaggtgctcagcaccgggcccttccaccccaccacacactggaagcagacgctgttcatgatggacgacccagtccctgtccatacaggagacgtggtcacgggttcagttgtgttgcagagaaacccagtgtggagaaggcacatgtctgtggctctgactgggctgtcacttccagacaagaccccacat

SEQ ID NO: 25375 - DNA, 466 bp, Homo sapiens
  misc_feature (1)...(466): n = a,t,c or g
ggtaaaggcagcttgggaccagctgagactgaggggggacttgaggctctcctaggaacacatcgattgaggtgtcttgaagcagggcagtaaatttaccagcttcttgatgaaacataactccagtgatgcagggatgatactgctaataaatgacagtggctgctaacatctcttgagcactgcccttgcagccagcacgatgctaagcactcaacgtggataacctcatgtaatcctggcagccccccaatgaggtagctatgtttttatacccacttaagagatgaagaaacctgagggtctcagagcagctcacacagctggtgagacactgagccagaattcacacccaagctgcggtggaatctgctcaactgtgttctcctgttcctgagggcaaactgnagggggtcattgcggtaggtgccatgaacaatcaagggcnangggggaggnggactga

SEQ ID NO: 25376 - DNA, 445 bp, Homo sapiens
  misc_feature (1)...(445): n = a,t,c or g
ggccagtcccttgtggctctcccagccaccttctgcactgagccacatctgggttagagctgcaaaattcaccctgaaaaaaatgtgaaagccattttgggttggacatttgtaaaacaaattttttctccttttggagacctggtgcccttggtatttgtatatagaatccacttgtttattctcgaggagagcagctatgtgtgtgaattgggcatccgttggaagaaacataacaggcttgcctgtaacagctggaatatagttgcagccctttgaaataagacaatcttagttttccttccttctccttagccagccatccagcgtaggaaacaggatgctgtgtacataccctgagtaggaggagagggttccagagtgccacttggctgctcctgngtacccattcttgtcaaagcnccttgagaccatgggcttaaaa

SEQ ID NO: 25377 - DNA, 356 bp, Homo sapiens
ggaacacgcagcacgcacatctgagggaaaaggtaatcatgaatgtgcattgtgacttttactaaaggcagagcttcagagttgattcccttgagaaacccaggtgtacccggttcctgttcgccagagctgtgaacgctttcaggcagtcactctgggcacacctggacatcataaaatgcggaacttctcccaggagaggggatgctgaggcttcaggtactagtgaatcaggcaggaaccaatgagaggcaaacagagctgtgctgagaggagaaaaggcatacttgtaccttctggatttttcaggcttcgaagacaagatcagaaacaggtgaacttacaataatatctcc

SEQ ID NO: 25378 - DNA, 553 bp, Homo sapiens
ccaagaccagcaggctccagatggaccctgggaaggacaaagagggggtgccccagccctcagggccgccagcaaggaagaaatttgtgatacccctcgacgaggatgaggtccctcctggagtggccaagcccttattccgatctacacagagccttcccactgtggacacctcggcccaggcggcccctcagacctacgccgaatatgccatctcacagcctctggaaggggctggggccacgtgccccacagggtcagagcccctggcaggagagacgcccaaccaggccctgaaacccggggcaaaatccaacagcatcattgtgagccctcggcagaggggcaatcccgtactgaagttcgtgcgcaacgtgccctgggaatttggcgacgtaattcccgactatgtgctgggccagagcacctgtgccctgttcctcagcctccgctaccacaacctgcacccagactacatccatgggcggctgcagagcctggggaagaacttcgccttgcgggtcctgcttgtccaggtggatgtgaaagatcc

SEQ ID NO: 25379 - DNA, 524 bp, Homo sapiens
tatgacatgattacgaatttaatacgactcactatagggaatttggccctcgaggccaagaattcggcacgagtgccgaaatgggcaagttcatgaaacctgggaaggtggtgcttgtcctggctggacgctactccggacgcaaagctgtcatcgtgaagaacattgatgatggcacctcagatcgcccctacagccatgctctggtggctggaattgaccgctacccccgcaaagtgacagctgccatgggcaagaagaagatcgccaagagatcaaagataaaatcttttgtgaaagtgtataactacaatcacctaatgcccacaaggtactctgtggatatccccttggacaaaactgtcgtcaataaggatgtcttcagagatcctgctcttaaacgcaaggcccgacgggaggccaaggtcaagtttgaagagagatacaagacaggcaagaacaagtggttcttccagaaactgcggttttagatgctttgttttgatcattaaaaattataaaga

SEQ ID NO: 25380 - DNA, 465 bp, Homo sapiens
tttgacgcctgcaggtaccggtccggaattcccgggtctacccacgcgtccgtccaaaagccatgaacagcggcgtgtgcctgtgcgtgctgatggcggtactggcggctggcgccctgacgcagccggtgcctcccgcagatcccgcgggctccgggctgcagcgggcagaggaggcgccccgtaggcagctgagggtatcgcagagaacggatggcgagtcccgagcgcacctgggcgccctgctggcaagatacatccagcaggcccggaaagctccttctggacgaatgtccatcgttaagaacctgcagaacctggaccccagccacaggataagtgaccgggactacatgggctggatggattttggccgtcgcagtgccgaggagtatgagtacccctcctagaggacccagccgcatcagcccaacgggaagcaacctcccaacccagaggaggcag

SEQ ID NO: 25381 - DNA, 310 bp, Homo sapiens
caggaagaaggcaagggacgagacaaccatgctgtgctgtatgagaagaaccaaacaggttgaaaaaaatgatgacgaccaaaagattgaacaagatggtatcaaaccagaagataaagctcataaggccgcaaccaaaattcaggctagcttccgtggacacataacaaggaaaaagctcaaaggagagaagaaggatgatgtccaagctgctgaggctgaagctaataagaaggatgaagcccctgttgccgatggggtggagaagaagggagaaggcaccactactgccgaagcagccccagccact

SEQ ID NO: 25382 - DNA, 432 bp, Homo sapiens
gcaacatgatttctgaagtctctagccagatttcaaatttgcttacagcacacagaaaattgctaaagagaaaaatctatagtggccgtttctgttcaggctgcaaaatcttgtgcactatttacatatttaagtatgaactgtctcaaagggtctttcattaaaaaatgaccaacatggagaaaccccgtctctactaaaaatacaaaattagctgggcgtggtagcgcatgcctgtaatcccagctactcgggaggctgaggcaggagaatggcttgaacccgggaggcagagatttctgtgagccgagatcgcgccattgcactccagcctgggcaataagagcgaaactccgtctcaaaaataaataaataaataaagaggatgtaggctacagccatataccctgaacatgcccaatctcatctgat

SEQ ID NO: 25383 - DNA, 436 bp, Homo sapiens
  misc_feature (1)...(436): n = a,t,c or g
tnnntttggnnacttgaataccgntatgactgattacgaatttaatacgactcactatagggaatttggccctcgaggccaagaattcggcacgaggcttcttagcatcatcttcatgaatggaaatcggtccagtgaggctgtcatctgggaggtgctgcgcaagttggggctgcgccctgggtatgattgggctctctcagcgcttgctgtccgtgttgtcctttggcaagagaggacggtcctaggattgcatcagtctggtggtctggtggagcgggtggggtgctggactgggtagagggcccagggttctgacctgggtggatgatgggtgaatggtcctgaactctctgctccctctctcagtgtctcttgggcttctatggagcttccctcttgtgctggaaacctcttttccatcttggaaatgcct

SEQ ID NO: 25384 - DNA, 328 bp, Homo sapiens
ctcacttgttctgctgacaaaaaacagataaaagataaatctcatgtcaagatgggaaaggtcaaaattgaaagtgagacatcagagaagaagaaatcaacgttaccgccatttgatgatattgtggatcccaatgattcagatgtggaggagaatatatcctctaaatctgattctgaacaacccagtcctgccagctccagctccagctccagctccagcttcacaccatcccagaccaggcaacaaggtcctttgaggtctataatgaaagatctgcattctgatgacaatgaggaggaatcagatgaagtggaggataacgaca

SEQ ID NO: 25385 - DNA, 441 bp, Homo sapiens
  misc_feature (1)...(441): n = a,t,c or g
gatctttcctcctcaagagaagagctgcaggctgtcgaaagcccatttcaagctttgtgctgcctcttgatctacctctttgtccaggtggacacgctttgcctggaggatttgcatgcgtttattgcgcaggccttgtgcctccaaggaaaatccacctcgcagcttgtaaatctacagcctgattacatcaaccccagagccgtgcagctgggctcccttctcgtccgcggcctcaccactctggttttagtcaacagcgcatgtggcttcccctggaagacgagtgatttcatgccctggaatgtatttgacgggaagctttttcatcagaagtacttgcaatctgaaaaagggtaatgctgtggangttcttttaaaaccaaattagatttcggttcaccaaattcacaacctgaaggcagtcgtctgnaaggcctg

SEQ ID NO: 25386 - DNA, 351 bp, Homo sapiens
taatcatggtggacatgatggacttgcccaggtcgcgcatcaacgccggcatgctagctcaattcatcgacaagcctgtctgcttcgtagggaggctggaaaagattcatcccaccggaaaaatgtttattctttcagatggagaaggaaaaaatggaaccatcgagttgatggaaccccttgatgaagaaatctctggaattgtggaagtggttggaagagtaaccgccaaggccaccatcttgtgtacatcttatgtccagtttaaagaagatagccatccttttgatcttggactttacaatgaagctgtgaaaattatccatgacttccctcagttttatcctttag

SEQ ID NO: 25387 - DNA, 445 bp, Homo sapiens
ggcgtggagtcaggattctaatccaggcaaatctgctccggatacttttgcttttagtattactaatcttcattcctgagaaaataacacgttttatcaatgtccaataaactgctaaacagcccttaaatagcatttgaaactggaaggggtcttagaagttatccagtagaaaccttctactccttttctttaaagaaactgaagcctgagaatgtcatgagtatagtcatacatacgttactcagtcaccattaatagtcactgttgatccttagaaataaggtatttgttatacaaaccaactgaataatattaaatagtaactgtaactctttaagttgtatcagttctagtcacacataaaatcaagagttagccgggcatggtggcacacacctgtagtccagctactcactcaagaggccaaggctggaggatcact

SEQ ID NO: 25388 - DNA, 351 bp, Homo sapiens
ggagaaaagcacaccaaagcctgtaataagcaaatagaccatagataaacagaaaggtctttaaaagtagccagatcaggcctggtgtggtggctcatgcctgtaatcctagcactttgggaggccaacatgggtggatcacttcagcccaggagttcaagaccagttcaagagcaacatggtgaaaccctgtctgtacaaaagatataaaaattagccagccttggtgggggatgccggtagtcacagctacttgagaggctgaggcaggaggatcacctcagcctgagacgtcaggcctatggtgagctgtcatcgtgccactgcgctccagtctgggtgacagagtga

SEQ ID NO: 25389 - DNA, 377 bp, Homo sapiens
gaaaaagcaaacaaaaaaaaactgggctgaaaaataccacatcacttttttcaaaaccttgttgggattctctggtttataataaagattaaaacctgaatatttttgtttagcatcagttttaatgaaagtattatgttccattctttggcttttcctaacttgcttaattagtttaatatattggtttgcatactctgttagagtacagcataagttgtttataagtcagtagaaaaccaaacgttttcacatttgaaaactaatgtgtccaagcagtacataaccatgccagagtcatgcatggacgtgtgagtatctcccttttagagatgttttgccagctgggaggtggacatttttaggcaagtgacatt

SEQ ID NO: 25390 - DNA, 452 bp, Homo sapiens
tttggccctcgaggccaagaattcggcacgagagagcaaccttgcaggtaacaaggatgtgaaatgggagagcatggcagtgcctggcacgtagcaggcattccacaaatactagctgccttgggatctgtaggtctccttttgcaaaagactggaggttgtattcatgagcatgagatacagcaagttcctaagaatacatacagggcatccccagatgattctctgtatatctgacagatgatccttcatagtgatgttttgcttcatctaggggaaaaaaagtacttttaggcaaactaaaattgtgacatttttattcataaaagaaatagattaaaatattttatggcgcttgatacagggcttggtattttcatatgttataatagaaagtttcaaatttctgggccgggtgtagtgactttcgctgtaatcccagcaatttggga

SEQ ID NO: 25391 - DNA, 482 bp, Homo sapiens
  misc_feature (1)...(482): n = a,t,c or g
ggggaaggctggggtcctggccctgtctccagagctggggaggctgttgaatttgaagtgctattagaaaggccaggcagacatgggtcccagacagtgagaaacttagcactggtgttggagatggcgatttgagagctttctgggaaagtgactagttgtaatagtgagagaggatgagatctcttagggggaagagagaagagaggagagtgggaaggatccacggccgaacagcaggagatggcatttcctaggtagtgggaagccttgggaattttttgagctgtaatgcagttgatctatcgctgttgaacctagagtctagtcagcttgtctgtctgcttgaacatttccagtgactgggagacattattcgttggacacttggttgggtattttcccttgnattaaaagctagaaatctgnctggtaattncattccttgggcttaagccantggantncttggcataanttcc

SEQ ID NO: 25392 - DNA, 361 bp, Homo sapiens
  misc_feature (1)...(361): n = a,t,c or g
aaaaatttcagataagggatactcaaactgtattatgtacaagatattgtagtaggcactttggagaatacagtggagaatcaaacacagatctcatcttcagtgaggatatgatctagtaagggaaatgagtcctgcgtaaacaattataatacaagatagaaagtggtgtttaagaaagtagtgctacgtgaactcagaagagcgagttattcagaaagaccagtggctgagaatcagagaaggcttctaggagatggtgtttgagtgaggccttaaagggttgggtggggtttgataatgcaacaatggcaggaatgtaggggattatggggtgaaggaacagnttnacncaggcaga

SEQ ID NO: 25393 - DNA, 781 bp, Homo sapiens
aacagctatgacatgattacgaatttaatacgactcactatagggaatttggccctcgaggccaagaattcggcacgagaagacatctaacttagagtctgcagcccagagccacatgcaaaacaccttcaataaacagccactatttcacatgctgtatatggacgctcagctctccatcaaaagatcagggctccactcaattgcaggtttgcctttattcaggtagtgggccaaagcactttatttggtaagcaatccagaaacctgagtttattcagagtaagtgaccaaatcaatgagtaaaagaacttggctcctacatcaaagccaagtctttgggcaatgctggcagtttctcctggaagtaatgagaaatgttgtgaaagaactcagcgcattggccagaaatgattgaaaaaccatcaaatttggggcagcaggaggtgtaaatacaagtgagaaaagggattctagagccacctatgaaataccacaatctccttgaggtggggaacattccttgatgttccaaaactgagaaaagcacacccagggccagtctttgtagagtttgttgctgttaagagcccacccaggcagatcacaaggtcaggagtttgagaccagcctgaccaacatggtgaaaccccatctctactaaaaatacaaaaacttgcccggtatggtggcatgtgcctataatcccagctactcaggaggctgaagcaggagaatcacttgaacccaggaggcagaggttgcagtgggccaagattgc

SEQ ID NO: 25394 - DNA, 311 bp, Homo sapiens
gaccggattgagatgtggagttatgcagcaaaggtggccccagcagatggcttctctgatcttgccatgcaagtaatgacgtctccatctaagaactacattctctctgtgatcagtgggagcatctgtatattgttcctgattggcctgatgtgtggacggatcaccaagcgagtgacacgagagctcaaggacaggtagagccaccttgaccaccaaaggaactacctatccagtgcccagtttgtacagccctcttgtatagcatccccactcacctcgctcttcttagaagtgacaccaaccccgtg

SEQ ID NO: 25395 - DNA, 413 bp, Homo sapiens
gccctcaaccaaaatggcgctagctcggaagctgccgaggtgctaggagttgccgaagcaagtccggaagctaccgagcgagtccggaagttgccgaaagggagcagcggggaaggaggatggcggatatcatcgcaagactccgggaggacgggatccaaaaacgtgtgatacaggaaggccgaggagagctcccggactttcaagatgggaccaaggccacgttccactaccggacgctgcacagtgacgacgagggcaccgtgctggacgacagccgggctcgtggcaagcccatggagctcatcattggcaagaagttcaagctgcctgtgtgggagaccatcgtgtgcaccatgcgagaaggggagattgccagttcctctgtgacatcaagcatgtggtcctgtacc

SEQ ID NO: 25396 - DNA, 421 bp, Homo sapiens
  misc_feature (1)...(421): n = a,t,c or g
gcaggggtgccttccttgaagaattaaaagcagaaagatttgggagctgagagttaagctgaacaaaaggtatcattggaacatttcaagatcatcaaatcaaattccacagggattggtgaccaaccagaaggctcagacatctgattgctgacctgtccagacatcatctggtctccctgaacctgaaatcacaccatggatgattttgagcgtcgcagagaacttagaaggcaaaagagggaggagatgcgactcgaagcagaaagaatcgcctaccagaggaatgacgatgatgaagaggaggcagcccgggaacggcgccgccgagcccgacaggaacggctgcggcagaagcaggaggaagaatccttgggacaggtgaccgancangtggaggtgaatgcccagaacagtgtgc

SEQ ID NO: 25397 - DNA, 529 bp, Homo sapiens
  misc_feature (1)...(529): n = a,t,c or g
gtagccctatgaatcccgctacgacatgattacgaatttaatacgactcactatagggaatttggccctcgaggccaagaattcggcacgaggagcctccatctcaaaaaaaaggagacattagaaaactaagttgagtccaggcgtggtggctcttgcctgtaaccctagcactttgggaggctgaggcgggaggatatcttgaccccaggcgttcgagaccagcctgggcaacatagtgagaccccgtttctttcaaacaaaagaaggaaaactaagttgaaagtgttatttttgcttcaatttttatttctttacataaaaggtttcttgtcataccttggtaaaaatttgatgagctggtttcattttgaaagcctttattttaaaaataagtatgtatctttgtatgatttataagtgtaccagtaggtagaaatacatgtgttcttggccagatgtggtggctcacgcctgtaatcccagcattttgggaggctaaggcnagtggatcacctgaggtcaggaa

SEQ ID NO: 25398 - DNA, 364 bp, Homo sapiens
ggtttgctttacctatgaacccatcatctaggttttaagccccacatgcattaggtatttgtcctaatgctctccctccccttgccaccccccacccccagacaggccctggtgtgtgacagacatagttcttggttcaagggtgtgtagtgggagcaaacagttcatatttagttttcattcacatgtgcctacattcttggccccataattattttgagctctccacagatttcttaagcacagaatgcttgtctaattattttgacatattcctgctgggcagtaaatattgtgaagttttatgtgaatgcatttgaacatcaggttatatttttcttactattttttacttgctatggcc

SEQ ID NO: 25399 - DNA, 329 bp, Homo sapiens
  misc_feature (1)...(329): n = a,t,c or g
ggggtgggaaatttagctgactagggacaaacatgtaaacctattttcctatgaaaaaaattttaaatgtcccacttgaataacgtaattcttcatagtttttttaatctatggataaatggaaacctaattatttgtaatgaattatttagacagttctaagccctgtcttctgggagttatcaattttaaagagaacttttgtgcaattcaaatgaagtttttataagnanttgaaaatgacaacncantaccactttctgtataaaagtntatattttatgngatttattcctactaaatgaaagtgcactactgcctcatgnaaa

SEQ ID NO: 25400 - DNA, 336 bp, Homo sapiens
gttctctttcccctattccataaatatttaataaggtggggggtgctagttgctatcctgtgccctaagaaagcagaaataaaagccagttttttgtcccatcaataactgtatactggcatcacaactgaaggttttccttttgcactggaagagaaacatcagaagctagttagatgtcatgtcttaccctttaaatttttccaggtagcaaaaatttccaccacgtggagcagaaaaataacctgaactctcagtgggtagctttaattcctacccagtttatttagtaaaagcaaacaaaaaaacaattttgcctctgtacctctactttgg

SEQ ID NO: 25401 - DNA, 424 bp, Homo sapiens
gcccacgtctgctggccccacagccccacagagcccagcttgggttcaggcagctgtccaggcctccccttcctccaacattagccagggctgtggctttcccttcgggaagggagacagcgttgagggaaagtggcttactgcagacttcagggccttactcacaggaccatcaccttccactgcgcctttggaaagtcagggtggggaagaagcaggcacccctcagggtggcccgcagcagccacagcaggccttgtaggaagtgatatggggaaaagcaagaggctgtacaatgccaaaagcaagtccagggcatttactgtgaggaagcaacgcaggtggagggcagggaggcttgcagggccttacctgtgatagtgaaagtgtcggcacctggacatcctggaccagacgcaggcct

SEQ ID NO: 25402 - DNA, 1212 bp, Homo sapiens
tttatgacctgattacgaatttaatacgactcactatagggaatttggccctcgaggccaagaattcggcacgaggtgctggaccccacccctgtggcaagatgcagcgtgaggcagctgaaggagcatgctgtcgaaggagactgtgatttccagctgttgaaactagatggcaagttttccgtggtatacgcaaaatgtgattccagtccagactcagccgaggacgtgcgcaaggtgtgccaagactgccccctgctggccccgctgaacgacaccagggtggtgcacgccgcgaaagctgccctggccgccttcaacgctcagaacaacggctccaattttcagctggaggaaatttcccgggctcagcttgtgcccctcccaccttctacctatgtggagtttacagtgtctggcactgactgtgttgctaaagaggccacagaggcagccaagtgtaacctgctggcagaaaagcaatatggcttttgtaaggcaacactcagtgagaagcttggtggggcagaggttgcagtgacctgcacggtgttccaaacacagcccgtgacctcacagccccaaccagaaggtgccaatgaagcagtccccacccccgtggtggacccagatgcacctccgtcccctccacttggcgcacctggactccctccagctggctcacccccagactcccatgtgttactggcagctcctccaggacaccagttgcaccgggcgcactacgacctgcgccacaccttcatgggtgtggtctcattgggggtcaccctcaggagaagtgtcgcacccccggaaaacacgcacagtggtgcagcctagtgttggtgctgctgctgggccagtggttcctccatgtgatgaggaggtttggcacagaaaacatagccaccattttgtccaagcctgggcatgggtggggggccttgtctgctggccacgcaagtgtcacatgcgatctacattaatatcaagtcttgactccctacttcccgtcagcattaggttgacaacttgtcatgattttgacggtaagccaccatgattgtgttctctgcctctggttgaccttacaaaaaccattggaactgtgactttgaaaggtgctcttgctaagcttatatgtgcctgttaatgaaagtgcctgaaagaccttccttaataaaagaaggtctaagctgaaaaaaaaaa

SEQ ID NO: 25403 - DNA, 469 bp, Homo sapiens
gtaatcttaaggaattactattccttgagaatagtaatcaaaatttatccggttaaatagtcttaactgttataaaccatattattttataaagcgtcatttttcttggtcgagcaagtgtatagtattgtcgaaatgaaatttaactgtctgccttctttttactttaagaagtacttctttgggtttttgctttcttcctttcctttgtgtaggccataggaaaaggatacagagtagagtttcatgaacctgaaacttggtggaaatttgatcctgaagaattagaaaagaggaataaacatggtgtgtctcgaaagaagattgctcagatgttggatcgttatgaatatcaaatgtccatttctattgtaatgaattcagtggaaccatcacacaaaagcacacaaagatctcctcctccacaggggagacagaggtggggaggctctcttggctcacataatcg

SEQ ID NO: 25404 - DNA, 478 bp, Homo sapiens
  misc_feature (1)...(478): n = a,t,c or g
tcagtgacgttgagaaggaaatggaaaccctcgtggaggccgtgaataagggaaagaatagtaagaaaagccacagcttccctcccatgaacagagaccaccgccggatcatccatgacttggcccaagtttatggcctggagagcgtgagctatgacagtgaaccgaagcgcaatgtggtggtcactgccatcagggggaagtccgtttgtcctcctaccacgctgacaggtgtgcttgaaagggaaatgcaggcacggcctccaccaccgattcctcatcacagacatcagtcagacaagaatcctgggagcagtaatttacagaaaataaccaaggaaccaataattgactattttgacgtccagggattgaagctcatggtgctagctctcctcgtgccgaattcttggcctcgagggccaaattccctatagtgagtcgtattaaattcgtaatcatgtcaaacggtnttcaa

SEQ ID NO: 25405 - DNA, 396 bp, Homo sapiens
tgccggcctgcagcgccaaatgagctttgcctctgtccgcatcggcctgtatgattctgtcaaacagttctacaccaagggctctgagcatgccagcattgggagccgcctcctagcaggcagcaccacaggtgccctggctgtggctgtggcccagcccacggatgtggtaaaggtccgattccaagctcaggcccgggctggaggtggtcggagataccaaagcaccgtcaatgcctacaagaccattgcccgagaggaagggttccggggcctctggaaagggacctctcccaatgttgctcgtaatgccattgtcaactgtgctgagctggtgacctatgacctcatcaaggatgccctcctgaaagccaacctcatgacagatgacctccc

SEQ ID NO: 25406 - DNA, 326 bp, Homo sapiens
gcccccatgaaactcccagtgcataaactgtatatagaatatggcattcagaggatcacttgtccaaatgtagatggatattttccttccagtgtcaaaccgactatcacttggtatatgggctgttataaaatacagaattttaataatgtaatacccgaaggtatgaacttgagtttcctcattgccttaatttcaaataatggaaattacacatgtgttgttacatatccagaaaatggacgtacgtttcatctcaccaggactctgactgtaaaggtagtaggctctccaaaaaatgcagtgccccctgtgatccattcacc

SEQ ID NO: 25407 - DNA, 410 bp, Homo sapiens
ggccggggctccattttcaagggacggcgagaaggacacgctcggttccgcactctcaggctcctgctcctcacaaggcaagcgcctccagggagctgcatttgggaaaatatccaccaagcactaaagaaacacaaccataaagaaccataaagcatccacgcggaaaagcttattcagatcaataaagctgctgcgggccgggcacagtggctcacacctgtcatcccagcactttgggaggccgatgtgggtggatcacgagatcaggagatggagaccagcctggccaacatggtgaaaccccgctctactaaaatacaacaaattagctgggcgtggtggcacgtgcctgtagtcccagctactcaggaggctgaggcagaagaattgcttgaacccaggaggcg

SEQ ID NO: 25408 - DNA, 643 bp, Homo sapiens
gctctgtggatcgttatgagccggaatgtgagcctgctgttcaccactgtcactacactcttgaccatcctcttctacagcgggacagcccttctcaattttgtactctctctgataattttcctgaccacactattttatctattaagttccagtgatgagtactacaagccagtgaagtgggtgataagcctgactccactatctcagccaggtccttcttctaatattattggccagtctgtggaagaagctatcagaggggtgtttgatgcttccctcaaaatggctggcttctatggattgtatacctggctgactcatactatgtttggcatcaatattgtcttcataccatcagcattagcagcaatccttgggagcagtgccattcctggggacatactgggcagcagtacctgcagttcttgacctgtggctgacacaagggttaggatgcaaggccattttactgttgatttttcatctcttgccaacatactttgtagatactgcaatctactctgacatatcaggaggtggccatccttacctgacaggcttggcagtggccggtggagcatactacctaggcctggaaggagcaatcatcggtcctattcttctctgcatacttgtggtt

SEQ ID NO: 25409 - DNA, 417 bp, Homo sapiens
gtagtacctgccacattgtaaatacttaaatggtagctactgctctgaaaaactgtaatttcaggttatgtatgtagggaaattatttgtattttcatttatggtgtatgattgtaactgaatttcctcagtttgggccatgttaggattttgtttcaagttataagtgtttttaaaaataagggtattcctttaggaagtcagggtatgacatgtctgtgattttgctggttcatcacaaatgggaaataaatctctgctaactcaaactgttgaccaaagtaaaattaattatgccaatcaaaaactatttgctttaaaatataaaaggcaaaaacttcctattagcataatgaagtagaatttttaaactttgttataatcttaaattttctttaatgttgaagataggtcaac

SEQ ID NO: 25410 - DNA, 557 bp, Homo sapiens
gtgaggtcttgctgaggatgcattctgttggaatctgtggctcagatgtccactactgggagtatggtcgaattgggaattttattgtgaaaaagcccatggtgctgggacatgaagcttcgggaacagtcgaaaaagtgggatcatcggtaaagcacctaaaaccaggtgatcgtgttgccatcgagcctggtgctccccgagaaaatgatgaattctgcaagatgggccgatacaatctgtcaccttccatcttcttctgtgccacgccccccgatgacgggaacctctgccggttctataagcacaatgcagccttttgttacaagcttcctgacaatgtcacctttgaggaaggcgccctgatcgagccactttctgtggggatccatgcctgcaggagaggcggagttaccctgggacacaaggtccttgtgtgtggagctgggccaatcgggatggtcactttgctcgtggccaaagcaatgggagcagctcaagtagtggtgactgatctgtctgctacccgattgtccaaagccaaggagattggggct

SEQ ID NO: 25411 - DNA, 420 bp, Homo sapiens
gcagaactggcactgacaatgaatcatgtatacagtttctccgtgtttgaacatactatcttcccttctgagtacctcagcagccacctggaggccagactcaacagagccattgtgtggctggctggctacaatgccacgacccaggagatcgtacggccttctgagctgttggcaggagtcaaagcatacattggtttcatacagtcactggcccagtttttgggtgcagatgcttccagagtcatccgcaacgccctcctgcagcagacacaaccactggattcctgtggggaacagacaatcaccacactctacacaaactggtacctggaaagtctgcttagacaggcaagcagtgggaccatcatcctctccccagccatgcaggccttcgtcagcctgccagagaaggggagc

SEQ ID NO: 25412 - DNA, 380 bp, Homo sapiens
gtaaaagagtgtgtaggagcatcaaaccagaattgtcgaacacctgatgctgttgagctttgcaaaaaactgggtggctcatgtgttacagccctggatggttattatgtggagtccattatttgtgttttcattggatttggttggtggttctttcttggtccaaaatttaaaaagttacaggatgaaggatcatcttcgtggaaatgcaaaaggaacaattaatatatatgctactggacattctagcaaggtaattgtagtttagttttaattcggagagcaatgataatcagtgcacaggagtataaaatattattttaaacagcgaaattaataatataaaatgccaaatggttgaaaaaatagaaacctttctg

SEQ ID NO: 25413 - DNA, 433 bp, Homo sapiens
  misc_feature (1)...(433): n = a,t,c or g
gaggggagggggtgagggggttgggatgtgatggctaagaaacgtggggtttcttttgagcatcatgaagatgctctaaaatcgactatgatgatggttgcataaatctgtgaatataccaaaagtcattgatttgtctactttaaatgggaaaactggctgggcgtggtggctcacacctgtaattccagcactttgggagacagaagcgggcggatcacctgaggtcaggagctcgagaccagcctgggcaacatggtgaaaccccgcccctactaaaaatacaaaaatcagccgggcgtggttgtgggcgcctgtaatcccagctactcgggaggctgaggcaggaaaatcacttgaacccgggaggcagagatcacaccactgcacttcacctgggagacagancncgactcttnttaaaaaaaaaaaa

SEQ ID NO: 25414 - DNA, 358 bp, Homo sapiens
gtcgccaccgggctgctctggtctcgtcggtcccctcctccgccccgtcgtcctgactctctctccctcctttcctcagaggatgtccggcttccagatcaacctcaacccgctcaaggagccactcggcttcatcaaggtcctcgagtggattgcttctatctttgcttttgccacctgtggaggttttaagggccaaacagaaattcaagtgaattgtcctcctgcagttactgagaataaaactgttacagctacttttggttatccattcaggttgaatgaggcatcatttcagccacctccaggtgtaaacatatgtgatgtaaattggaaagattacgtcctcataggcgag

SEQ ID NO: 25415 - DNA, 426 bp, Homo sapiens
gcccaaccaagcagtgcgagagtttgccaaagaaattgacgcatcctgcattaagattgaaaaagttataggagttggtgaatttggtgaggtatgcagtgggcgtctcaaagtgcctggcaagagagagatctgtgtggctatcaagactctgaaagctggttatacagacaaacagaggagagacttcctgagtgaggccagcatcatgggacagtttgaccatccgaacatcattcacttggaaggcgtggtcactaaatgtaaaccagtaatgatcataacagagtacatggagaatggctccttggatgcattcctcaggaaaaatgatggcagatttacagtcattcagctggtgggcatgcttcgtggcattgggtctgggatgaagtatttatctgatatgagctatgtgcatcgtga

SEQ ID NO: 25416 - DNA, 443 bp, Homo sapiens
ttcgactatgataccgttatgacatgattacgaatttaatacgactcactatagggaatttggccctcgaggccaagaattcggcacgagagggattacaggcacccaccactgcgcccggctaatttttgaatttttaatagacggcgtttcaccgtcttggccgggctgatctcgaactcctgacctcatgatccccccacctcggcctcccaaagtgctgggattacaggtgtgagctaccacgcctggtcctcaggtagttctttatagcaacacgaaatggtctaagccactatccttatgccagtaccacactgtctcagttactgcagctttgtagtaagttttgaaattgggaagtgtgaatccttcaactttgtttttccttttcaagattatttctagctatcctgggtcccttatgtttccatgtaaatttt

SEQ ID NO: 25417 - DNA, 991 bp, Homo sapiens
ggagaggatggcagaatgattgctggccaggttttagatattaacctggctgcagagccaaaagtgaaccgaggaaaagcaggtgtgaaacgatctgcagcggagatgtacgggtcagtaacagaacacccttctccgtcccctctactcagctcctcttttgacttggactatgactttcaacgggactattatgataggatgtacagttacccagcacgtgtacctcctcctcctcctattgctcgggctgtagtgccctcgaaacgtcagcgtgtatcaggaaacacttcacgaaggggcaaaagtggcttcaattctaagagtggacagcggggatcttccaagtctggaaagttgaaaggagatgaccttcaggccattaagaaggagctgacccagataaaacaaaaagtggattctctcctggaaaacctggaaaaaattgaaaaggaacagagcaaacaagcagtagagatgaagaatgataagtcagaagaggagcagagcagcagctccgtgaagaaagatgagactaatgtgaagatggagtctgaggggggtgcagatgactctgctgaggagggggacctactggatgatgatgataatgaagatcggggggatgaccagctggagttgatcaaggatgatgaaaaagaggctgaggaaggagaggatgacagagacagcgccaatggcgaggatgactcttaagcacatagtggggtttagaaatcttatcccattatttctttacctaggcgcttgtctaagatcaaatttttcaccagatcctctcccctagtatcttcagcacatgctcactgttctccccatccttgtccttcccatgttcattaattcatattgccccgcgcctagtcccattttcacttcctttgacgctcctagtagttttgttaagtcttaccctgtaatttttgcttttaattttgatacctctttatgacttaacaataaaaaggat

SEQ ID NO: 25418 - DNA, 619 bp, Homo sapiens
gcggcacgaggtggagatctcctatgagaacatgcgttttctgataactcacaaccctaccaatgctactctcaacaagttcacagaggaacttaagaagtatggagtgacgactttggttcgagtttgtgatgctacatatgataaagctccagttgaaaaagaaggaatccacgttctagattggccatttgatgatggagctccaccccctaatcagatagtagatgattggttaaacctgttaaaaaccaaatttcgtgaagagccaggttgctgtgttgcagtgcattgtgttgcaggattgggaagggcacctgtgctggttgcacttgctttgattgaatgtggaatgaagtacgaagatgcagttcagtttataagacaaaaaagaaggggagcgttcaattccaaacagctgctttatttggagaaataccgacctaagatgcgattacgcttcagagataccaatgggcattgctgtgttcagtagaaggaaatgtaaacgaaggctgacttgattgtgccatttatagggaactcttggtacctggaaatgtgaatctggaatattacctgtgtcatcaaagtagtgatggattcagtactcctcacc

SEQ ID NO: 25419 - DNA, 368 bp, Homo sapiens
ggcaaaactcccgcatagctgccaaaataactgctgagtgctttgcgatggagagaaacaaaggaatgttgggtcactgcccgagtcatggggtctctgcctgagccatagaaagcttttgatttctggagccacattgaatgaactgattatgtttaaaattataaaagaaaaatatagcctaagttaattgagtgcaataaaccaatttaacttatttgttcttacgtgtaacaattgttgagtaggtaccatggtacccactctattgctaagctgtggaaggagccttgctttggaattctctcagctcctctttcccatcatttccttagctgtgtcccttttcagcctcctgtgctaactga

SEQ ID NO: 25420 - DNA, 425 bp, Homo sapiens
gagagcagcaccatgagcttctaccctgtgtggatgccctcagttcaggctttgacatccacattctccccgtactgcttcacgtacaggcgaccctttcaccccattagggcactgttgggctgctgcccctccctcaccctcaaattccccacactggttacctaccctgtgttgtatggatgccttcctcactctctgactactccctacaatgtactgccctgcccagtgtggatgctctccttaccacacttgtgctctgacactctactctgggccaccttggcccatctctaactagagcaccttccctgctttggcctatataactggctttaggacagaactgctcatgaaagggaaatttatatatatatgagtacatacacacatacacgcagtatttcacttaattttattaa

SEQ ID NO: 25421 - DNA, 426 bp, Homo sapiens
  misc_feature (1)...(426): n = a,t,c or g
gataacaaggtaccaaagactgagtggcttataaacaatagcaatgaattgcttacagtcttcgaggctgggaggtccaagattaaggaactggcagattcagtgactggtgagggctgcttcctggctcattgtaggctgtcttttcactgtgtcctcacatggtggaaggaggagaggaactctctggggtctcttttatcagggcactaaccccacttatgagggccctaccctcatgtcctaatctttccaaaggccccacctcctaataccatcaccttgagtgttaggattttaacatacacattttgggaggacacaaacattccatttattgcaggtactattatctctgttttccacatgaggaaactgaagcacagacaggctaaattacttgcctgcctggccatcatggngaaa

SEQ ID NO: 25422 - DNA, 464 bp, Homo sapiens
  misc_feature (1)...(464): n = a,t,c or g
gnnnnngnnnnnttgnnttntgnntnctggaanacncttatgcctgactacgaatttaatacgactcactatagggaatttggccctcgaggccaagaattcggcacgagcactgatgcctggggaataaaggtggagcgtgtggaaattaaggatgtgaaactacctgtgcagctccagagagctatggctgcagaagcagaagcgtcccgcgaggcccgcgccaaggttattgcagccgaaggagaaatgaatgcatccagggctctgaaagaagcctccatggtcatcactgaatctcctgcagcccttcagctccgatacctgcagacactgaccaccattgctgctgagaaactcaacaattgtcttccctctgcccatagatatgctgcaaggaatcataggggcaaaacacagccatctaggctagtgtagagatgagcgctagccttccaagcatg

SEQ ID NO: 25423 - DNA, 381 bp, Homo sapiens
gaaacaactaaagcgctccagcacatcagtcccgacgcttcctgtgaggtgcacgctccgcagcccagcccagccgggagaccacgtggccattgcggtctcctgaccttggccagtgaacctgccagccttccaggacaggcggccggagagctgcccctgaaggacagtcctctcgtcttgcagactggtgaccttctattccctgttcatctctgtttctagatttagtcacttgaaataagaaatctttggggtttgggcttttttatactcttctcagtttgtgaaacgctaactgcacacgaagccgcctgacggcacccagcgctgtggctgtcattctcccagggcagaaccctgcgtttctctctgccacta

SEQ ID NO: 25424 - DNA, 443 bp, Homo sapiens
  misc_feature (1)...(443): n = a,t,c or g
gctggaagaattaacaactacagcatcaaggaggaggagtgtgattctgagggggatggctacggaagtgattccaacatccccagaagtgaccacccaaagtccactggtgagcccacaagagagatagaactgaaaagttcccaggggagcagtctgaaggatttaggcctgaagacaagttctctagttctggagaaatgttctttgtctgccttagtgagcaaagaagatgaagagttttgtgaactgtacactgaggacttcgatttggaaacggagggggagagtaaagttgataagctctcagatattcctctcaagccagaggtgctcgcggaagatggtgtggtccttgacagtgaggacgaggtggactcggccgtgcagcacccggaattgccagtgaagaccttgggcttctttataatgggngnctatgt

SEQ ID NO: 25425 - DNA, 419 bp, Homo sapiens
  misc_feature (1)...(419): n = a,t,c or g
gcagaagctgagagccaagcatggggcctggaggtcggacagacttgtgccacccattggcttgagcagggaccccatctctctcgaccccagtctcttcacctgtacgctggagctaataatgacggtggctgcctgatcgagcaggtgatgattcaatggcgcaatgtacaacatacagccggcaccaggcacattgtaagtaaatggccctgtttccatcagaaaggagaacagctgcctggactgaatatgcaacaggacacccggaatgtgttttttggatgcatcagctcactttctagccactggcctcttctagaagttgcacacagataaaaggtcccagttaatgaggattctggttaaagntttaaaattcacagcaagcccactccgcataataatgtatcagaaag

SEQ ID NO: 25426 - DNA, 625 bp, Homo sapiens
gcacaaaggctgatgtcttaactgtcacccatatggtccctgggccaccgggcagcctggggcggtgtgtgtgccatgtcacagcatggcctctcggccttgggaaggaaggcagtgcctgctctgctgtgagccgccaggaaccctcctcctgtcaatgggggtgtagtatttttgccaaaatatcatgttcaatttcagtagtttgatcagttgaaggctagaagtgtgaagtgcagatgagtgtgtgttcttccccaaggtccccccacagctccaggacaccgctgtcctggcatttgtggccactcactttgtaggaaactcatctccttcctgaggagccgggaggctggaccagtcccgtcgtgcagtcaggtgggcggtgtgtctttccagaaggtcacgtggaaatgtctcgggacttgggtcccggagtgcccgtgaagcgtgtttttgctcctgaggtgcattttctcatcatccttgctttaccacaatgagcaatgaggtcgggttttatatgcaacttattgtatctgaattccctcgtgccgaattcttggcctcgagggccaaattccctatagtgagtcgtattaaattcgtaatcatgtcatagctg

SEQ ID NO: 25427 - DNA, 952 bp, Homo sapiens
ggggagtgcgactgcgtctcgggcagcatggccgagaagcggcacacacgggactccgaagcccagcggctccccgactccttcaaggacagccccagtaagggccttggaccttgcggatggattttggtggcgttctcattcttattcaccgttataactttcccaatctcaatatggatgtgcataaagattataaaagagtatgaaagagccatcatctttagattgggtcgcattttacaaggaggagccaaaggacctggtttgttttttattctgccatgcactgacagcttcatcaaagtggacatgagaactatttcatttgatattcctcctcaggagatcctcacaaaggattcagtgacaattagcgtggatggtgtggtctattaccgcgttcagaatgcaaccctggctgtggcaaatatcaccaacgctgactcagcaacccgtcttttggcacaaactactctgaggaatgttctgggcaccaagaatctttctcagatcctctctgacagagaagaaattgcacacaacatgcagtctactctggatgatgccactgatgcctggggaataaaggtggagcgtgtggaaattaaggatgtgaaactacctgtgcagctccagagagctatggctgcagaagcagaagcgtcccgcgaggcccgcgccaaggttattgcagccgaaggagaaatgaatgcatccagggctctgaaagaagcctccatggtcatcactgaatctcctgcagcccttcagctccgatacctgcagacactgaccaccattgctgctgagaaaaactcaacaattgtcttccctctgcccatagatatgctgcaaggaatcataggggcaaaacacagccatctaggctagtgtagagatgagcgctagccttccaagcatgaagtcggggaccaaattagcctttaac

SEQ ID NO: 25428 - DNA, 410 bp, Homo sapiens
tttgaatgccacgaatttttacgactcactatagggaatttggccctcgaggccaagaattcggcacgaggtaaccccagtctgggaaagctgctgtatctccggtaaagaaaggtatctgaacacacattactctgaaataaactcaaggtgtcatgaacacatttctggagtcacggttttgcccagaagccaccttataaccacatgtagcaaatcatctgctcctgccaagttgaatatcttcgcccattaggggtgggacctgagttgagtctggggaagactgagctgagagggcatgtgatgggacacatgtctgctttcttggaggaacggtgacttgggtttcatttctggctgactgaattgagtctatactgcagtcctcttgcttgtgtggaactgac

SEQ ID NO: 25429 - DNA, 439 bp, Homo sapiens
ggatgaacagactcaggttgtgattgatgcaggagcactcgccgtctttcccagcctgctcaccaaccccaaaactaacattcagaaggaagctacgtggacaatgtcaaacatcacagccggccgccaggaccagatacagcaagttgtgaatcatggattagtcccattccttgtcagtgttctctctaaggcagattttaagacacaaaaggaagctgtgtgggccgtgaccaactataccagtggtggaacagttgaacagattgtgtaccttgttcactgtggcataatagaaccgttgatgaacctcttaactgcaaaagataccaagattattctggttatcctggatgccatttcaaatatctttcaggctgctgagaaactaggtgaaactgagaaacttagtataatgattgaagaatgtggaggctta

SEQ ID NO: 25430 - DNA, 427 bp, Homo sapiens
ggaactactgggctcaagcaatcttcctgcctcaccctcccaaagtgctgggattacaggcatgagccacagcgcctggctgttttcctttgttatgaccactattggcatttaaatgtctaatgaacctcaatattaattatgtgccacctagataggcagaaatgttagtagacatacaaacagcccctccctagttaagggggccaggcttccacaaagtaatccctcccgatttagctgtaaatgggttgctaatcagaaaggcctcaggacaaaggtaagtggcataaattcctatttactgaattaatatgactggttccctgggtgcccttcttctacttggaagcacttctggcagtctgatttgggattttcacctggcactgttctgagactggggctttggggcctatattaattt

SEQ ID NO: 25431 - DNA, 540 bp, Homo sapiens
ggaaaatttaaatataaccaacaatactgaaaataatgtacgtggcatttatagccttggtcaaagttctttattaaacaggcgtttgctgttccatgaatagttaacaattagtttatgcaacaaaatagataacttgaaaaagtgagtaagaatacagaatgatgaaccaggaatctggagttcttttgtgttttttcttgtttaacagacatggcttttaaaataaaatctgaaatataaaacaagtcatcttcatgtagagagctctcttttcctacaagaaggttttgcaaaaatgttaaacagtgttctaaaaatgtggctgaagttatactttacatactttaacttcttatatatacattatccaattaacattctaaccacattttcatatacaagtgggaccataaacattctctagtaagactacactagcacagagtaattttacccatgtatatatattcatttgaaacctgtttcccaaaatgaaatcactcatttaaaagcaaacaactggttagaattaatgtc

SEQ ID NO: 25432 - DNA, 337 bp, Homo sapiens
ggcagataatggcacctggacacagctgtggcttgtttctgactatcatgagcacgggtccctgtttgattatctgaaccggtacacagtgacaattgaggggatgattaagctggccttgtctgctgctagtgggctggcacacctgcacatggagatcgtgggcacccaagggaagcctggaattgctcatcgagacttaaagtcaaagaacattctggtgaagaaaaatggcatgtgtgccatagcagacctgggcctggctgtccgtcatgatgcagtcactgacaccattgacattgccccgaatcagagggtggggaccaaacggtaggag

SEQ ID NO: 25433 - DNA, 446 bp, Homo sapiens
ggggaagatggcggctgtggtggagaatgtagtgaagctccttggggagcagtactacaaagatgccatggagcagtgccacaattacaatgctcgcctctgtgctgagcgcagcgtgcgcctgcctttcttggaactcacagaccggagtagcccagagcaattgttacatctggatggaaaagcgacaccggggtccaggattggcctccggacagctgtactcctaccctgcccggcgctggcggaaaaagcggcgagcccatccccctgaggatccacgactttccttcccatctattaagccagacacagaccagaccctgaagaaggaggggctgatctctcaaggatggcagtagtttagaggctctgttgcgcactgaccccctggagaagcgaggtgccccggatcccgagttgatgatgacagcctggcgagtttc

SEQ ID NO: 25434 - DNA, 523 bp, Homo sapiens
  misc_feature (1)...(523): n = a,t,c or g
gcggcacgaggctatggggaccggaccagcacattctgtgggaccccggagttcctggcccctgaggtgctgacggacacgtcgtacacgcgggctgtggactggtggggactgggtgtgctgctctacgagatgctggttggcgagtccccattcccaggggatgatgaggaggaggtcttcgacagcatcgtcaacgacgaggttcgctacccccgcttcctgtcggccgaagccatcggcatcatgagaaggctgcttcggaggaacccanagcggaggctgggatctagcgagagagatgcagaagatgtgaagaaacagccttcttcaggactctgggctgggaagccctgttggcccggcgcctgccaacgccctttgtgcccacgctgtccggccgcaccgacgtcagnacttcgacgaggantcaccggggatgccccacactgagcccgccccgcnngcgcggccctcanaccgcggagaagnaancttccggactcgacttcgtggcnggggg

SEQ ID NO: 25435 - DNA, 448 bp, Homo sapiens
acagctatgacatgattacgaatttaatacgactcactatagggaatttggccctcgaggccaagaattcggcacgaggggattacaagcatgagccaccgcgcccagcccataaatatatttttacttgtaaatgtatctactccctccttcagtcatgctccttgttttatatttacattttcccatgataatcctatacattaaaattgaataagtgccccacttcgtggcccatatactaaacatctttttttcatttttttatattttaaaatttgaatgaaatttttaaaattgaatgaaattttatgttttctggcctatatggaagaaattaaaaactgatttgactgcatggcttaatctcgtattccactaaaatggaatttttttttaattcatatcgtttgaagtttcaaatgtgcatttattattctaaaatata

SEQ ID NO: 25436 - DNA, 413 bp, Homo sapiens
gtttttcctggccgtggtagttactcaaacagagggaactacaacagaggtggaatgcccaacagagggaactacaaccagaacttcagaggacgaggaaacaatcgtggctacaaaaatcaatctcagggctacaaccagtggcagcagggtcaattctggggtcagaagccatggagtcagcattatcaccaaggatattattgaatacccaaataaaacgaactgatacatatttctccaaaaccttcacaagaagtcgactgttttctttagtaggctaactttttaaacattccacaagaggaagtgcctgcgggttccttttttagaagctttgtgggttgattttttttcttttcttttttgtacatttttaattgcagtttaaaagtgaatcgtaagagaacctc

SEQ ID NO: 25437 - DNA, 526 bp, Homo sapiens
ttggattccctctttgataccgtttgactgattacgaatttaatacgactcctatagggaatttggccctcgaggccaagaattcggcacgagtctcataaaggtaagaaatgcaaatttggcctaatataccgaggttgcccggggcagcactgggtcacttctatagacacttctgtgttaatcaagggaaatcttaagggaaggtgaaaatgcttctagaaggcgactggacaccagcacccttgcttgctgcctttgggctcttcctctaaggccaacagtgacctgaaattattgactggctggccgtgctaatcaactggagaaaatggttccgaggtcaccaacatcagacaaattcattttaggacctatgtatgtgcttagaaagacagaagtgcttttgtaaaggatactatttcagaaaaacataatcatagtaacaactaatgacgctataaaatgctgatgtgttgaatgctactttagaaaaacatgttcaaatctaggaaaaaatttgata

SEQ ID NO: 25438 - DNA, 1112 bp, Homo sapiens
cggcggaacgattctgtgatcgtggacactttccacggcctcttcaagtccacgctggtgtgccccgattgtggcaatgtatctgtgaccttcgaccccttctgctacctcagtgttccactgcctatcagccacaagagggtcttggaggtcttctttatccccatggatccgcgccgcaagccagagcagcaccggctcgtggtccccaagaaaggcaagatctcggatctatgtgtggctctgtccaaacacacgggcatctcgccagagaggatgatggtggctgatgtcttcagtcaccgcttctataagctctatcagctagaggagcctctgagcagcatcttggaccgtgatgatatcttcgtctatgaggtgtcaggtcgcattgaggccattgagggctcaagagaggacatcgtggttcctgtctacctgcgggagcgcacccctgcccgtgactacaacaactcctactacggcctgatgctttttggacaccccctcctggtatcagtgccccgggaccgcttcacctgggagggcctgtataacgtcctgatgtaccggctctcacgctacgtgaccaaacccaactcagatgatgaggacgatggggatgagaaagaagatgacgaggaggataaagatgacgtccctgggccctcaactgggggcagcctccgagaccctgagccagagcaggctgggcccagctctggagtcacgaacaggtgcccgttcctcctggacaattgccttggcacatctcagtggcccccaaggcgacgacgcaagcagctgttcaccctgcagacggtgaactccaatgggaccagcgaccgcacaacctcccctgaagaagtccatgcccagccgtacattgctatcgactgggagccagagatgaagaagcgttactatgacgaggtagaggctgagggctacgtgaagcatgactgcgtcgggtacgtgatgaagaaggctcccgtgcggctgcaggagtgcattgagctcttcaccactgtggagaccctggagaaggaaaacccctggtactgcccttcctgcaagcagcaccagctggcaaccaagaagctggacctgtg

SEQ ID NO: 25439 - DNA, 446 bp, Homo sapiens
tatgacatgattacgaatttaatacgactcactatagggaatttggccctcgaggccaagaattcggcacgagagcagatcctcgtcagcttgctggcagaggatcaccaaagcttctctagagacgcagccagctcaagctgtctcttaaataccttgtgatgttctgggacaggcatggtgcacttgtaggagtaattgaagcctgtttctccaaatgccacagtcgtggggtgccttaaggcttgtaaaagatttctttcctgactcttattgtagtaacatggaaaatgagggtgacagccaaaggccccccagaccagattctctttcaacagctccccccgtaggcaatttgtcagggtgagggtggcagaggtcagagatgcaaccctgaaattccttagagaaggagctgctgtaaattcttctgaacttagtcaagg

SEQ ID NO: 25440 - DNA, 457 bp, Homo sapiens
  misc_feature (1)...(457): n = a,t,c or g
gcacattagtggaaggtggagaggaatggctgttgggaggatgtcctggaattagaactggagttcacttaaaattcaaattatagggaaaccagaaggcagggctggtggtgtcctgggagcagtctggggagctagcatcacaaccctggttttcctctgtgtttgcttcatcttcagagtgaagactagaaggaagaaagcagcccagccagtgcaaaacacggatgatgtgaaccccgtcatggtctcaggctccaggggtcatcagcaccagttccagacaggcatagtttcagaccaccctgctgaggctggccccatctcagaagatgagcaggagctccactacgctgtcctacacttccacaaggtgcaacctcaggaaccaaaggtcaccgacactgagtactcagaaatcaagatcnccagtgaggaattgtnccaaacccttacc

SEQ ID NO: 25441 - DNA, 368 bp, Homo sapiens
gagccgctgtacctactgcggttacaactctgtaaaacatgtatttattctttgaaccagtgtgtattgagtacctccttttgtcagggcttattcaaggctggaacatgcctacagctgtggacaagacctttccctttcgtatctcctgtagctcgcattgtaacttaagagaaaaaccttagcagtgacacaaatgtttatttaaatacagtagcaataagtgctttaaaaaaaacaggttgtcaagagggaggtcctcacctaatgttcttatgatatcaaaaaaatatttaaggccaggcacagtggctcacacctgtaatcccagcactttgggaggctgaggcgggaggatcacttgagcc

SEQ ID NO: 25442 - DNA, 436 bp, Homo sapiens
gggggaagctctcaaaccacgttcttcctctactctcacaccaccacaacaatcatcaacacagaacacatctgtgaccaaaagtgtgggggtttttcacctctgcaccaagcagtggacaccagctcggtgttctccaattcaggttgggggctcagtcttcaagactgcctgcacacccctggacaccagttgcatgtctggggccctggatcttatgacccactgtcttcatgttggtgttcccacgatcccctctttgggtttggttaatttgctggagcatctcacagaactcagggaaacactgaaatttattggtttattctgaagaatcttacaaaggatatagatgaagggatgcatagagcaaggtatgggggaagaagtgtggagcttctatacccttctttgggcccaccattcaggaacctcc

SEQ ID NO: 25443 - DNA, 344 bp, Homo sapiens
gagaagcataaccaagcagttgaagttgagcaaagtcctttgacctcgcctcccttatcgtagctctagaaacggcagctgtgttttctcctctctgtacagagttgggctggcaccccttcccaggaagctggcagtgggcctggggcacacaccctcagagctcggctgagtcacactcccatcagataaaaccatacacctaggcaggctacagggcttgatggaaaccacatcacctcggaatcatgattcagttccttcctgctcaggaaacgagcctcgcttagcattcctggctctgctgcctcacaggagctttcagggctttccattgtccctgt

SEQ ID NO: 25444 - DNA, 497 bp, Homo sapiens
  misc_feature (1)...(497): n = a,t,c or g
tggnnttnntnnnatgatancnatgggaaactttttgactgattacgaatttaatacgactcactatagggaatttggccctcgaggccaagaattcggcacgagatttagcacatattcattgctgctttctgtcagccaggttatgcaccattaggcactgccaccagagcagtcaacaagatagatatggaatgtagtctagtgggaggaagttaaggcttgcacagctggatgaatgtttacaaatgggagatagtgcttggctaggagccctacctagccaagtctctggggaagccacattgaagctaagaccgaatgaagtagagcaacaagccaggtacaggtctgggggaactgagttccaggcaaaaagagcagcaagtaccacacaggattctgtgacnagagtgtggtgtagttcaggaacaaaaccaaggccagagtaaccagatgcaganaggcanggccaagctgttcaangttgtggggct

SEQ ID NO: 25445 - DNA, 380 bp, Homo sapiens
gagctgttaggtcatttgcctactcatatttctcgtctgtttttctgtcggtctttttgtctttttattgtgtttgaagagctctttgtgtgttacggttgtggctgaagtgtctgaagaggtttctccccctccacattgcaggggcagctgaaatgcactcgagttttttgttttttgtttatactttaagttctagggtacatgtgcacaacgtgcaggtttgttacatatgtatacatgtgccatgttggtgtgctgcacccgttaactcgtcatttacattaggtatatctcctaacgctatccctcccacgccaccccacgacaggcccctgtgtgtgatgttccccaccctgtgtccacgtgttctcattgct

SEQ ID NO: 25446 - DNA, 437 bp, Homo sapiens
gaggctgtgttgtaggaaagctgatgattgtatgtcatacactggaccattctgagtgactgtagacaatgtccccggaaaaaaaagcagttgctgtgttttctactctgcttgttaacttagacactttttagcagattcatttgtaggagttggtgttcatttgctttatgacaattaaaaagattaattttgttcattgagtagtttatttgaaactgtagaatcattcttggaactacagaatagggaattattgattagttggagtttctgaagatgaaatttgagtttcataaggtagtctcaaaggacacttttgctttattgtccagaaaccaggagaggcaaacttgtttccaaagtagggcaagaggttttatttcaagttcagtcatcaggattattctctggaggttgtcagtactttttaccaa

SEQ ID NO: 25447 - DNA, 332 bp, Homo sapiens
gtttctttttttggaattctgttggtatgtagttactatattttattaaaggaaattagccttatctcttattatattttattaaagaaaattattatattattcctttatatttttattaaaggattttattattattaaaggaaattagccttatctcttattatattttttatgaccttcaaagtagtgtctctgcttaaaagtgtaccctggccgggcgtggtggctcacacctgtaattccagcactttgggaggccgaggcgggtggatcacgaggtcaggagatggagaccatcctggctaacacggtgaaaccccgtctgtact

SEQ ID NO: 25448 - DNA, 660 bp, Homo sapiens
gcagatctctggaaccgttcactctttataactgaagctttataccccttgaatagcagcttcccatttccctgtcttcatagcccctggcatccaccattctacactctttctgtggggttgactattttaattacctgacgcaagtggaatcatgcattatttgtctttctgtgactggtttatttcacgtagcataaagtcaccaaggttcatccatgtttttgcatatggcaagttttcctttttaagtctgaataatattccattttctacatataccacatttactttatccctttttctgttagtggacatttaacttgttctcacagcttggctattgcaaataatgctgcaatgaatatctcataagtctcgtatatgtccatacaagatcatgaaaatggacatgtctctgggtattttgaattggtgggacaattttgcttaagggtaggcatagtgggtggctctacatttgagagttctaattcccattcctatatatatttcttttctttttatttatttatttttttgagatggggttctctgtcactcaggctggagtgcagtggcacaaacatggcttactgcagcctcaacctcctgggctcaagtgatcctcccatctcagcctcccaagaagctgggacc

SEQ ID NO: 25449 - DNA, 861 bp, Homo sapiens
  misc_feature (1)...(861): n = a,t,c or g
ccggtacatgaagcttaccgtggtgaaacaggaagacaagatggagatgctgttcaagcacttcctggtggaagacaagagtctgagtgggggagcatcttatgtggactttctctgtcatatgcacaaggagattcggcagctactgagctaaagcaagtgggtaaatggcatagggcccaggctagcttccagaaagcaccccaggatgtcagagaaattgggacagtaacatatcttatgtaagctgacctcagtctctctggggggagggggagatataaggagacaccttctttctgggctcaagtatcctgccactctgtcatgtcctgctgatggaaggtgcccctgttccctcattctaccctctttttcctgctaatcctgtcataatgaatgtagcttctcagttcactgtatatgattcggtattgggggttnggaggcacccagaccctggcaatattatgtgtccctttggaccagtctcccaagaggagaggggcaggcaggaaagagtggggatcctaaggttactacagggggctcagtgtcatccacaacttcctatattagggataaaacatataggtgcacaagagctggggtatagcccataggtggtggagagaaaagtggtcagtccttcttgggcctggaggttagcagtcaagtttctctgctttcactgctcgctcgctctctcctgcaatgattgatgatcactccgtggatagagaggcacactgtcagaggtgaccggagaactgagttgcaaaatatattaagatctggtagaggtaccagcttcctttccagctggagaggccccaacactggatggttctgtagggagcc

SEQ ID NO: 25450 - DNA, 432 bp, Homo sapiens
gctaagtactctcaaatgttaaggttatatctctgatggcatacagcccatgacaatatgagagaatgaaatatattttaaaaggcatgacattgcttctccttttatgggatggaattggcatattaaatgaaaatgctgctatcctacagcattttttgttaaacctttttgatgaaaatatttttcttggagaaaggagatagttatgttttagtgaatttcagtatgaggaagcaaattttaaatgtcctactaaaacatccttttatatattaaccccaatttctaaagtaacatatgttcaaggtaaaaacattttgagaatactgaaatgtataagctataaggtgaaatcccatgatttggtaccctagagcaagtcaattcacatattggtatataatctttcagggttacttttctgggggg

SEQ ID NO: 25451 - DNA, 320 bp, Homo sapiens
aaaacatttgacaatacctttctagtatatccttactttcctctctaataatgaactaattcctatctctgcaaattttcccaacaacatttttgttaagtgtgattggctacattgtctttgttaataaaagttttattgacttaatagtctcattggaagtggatatgggagtgctttcatgagctaactttttggcactgaattttttttttttagtctaagtatagtttgttgaattaatttaggtttgattcttaaaaggaagaagtatgtatctaaaatgaagcctgttggctttgattttttttaatgaaaca

SEQ ID NO: 25452 - DNA, 1028 bp, Homo sapiens
ctttcagcgaaccacacgcacttcctcatgtctgccggtccctgcactagaggcttccctggacaaggagctgtactaccatggggagcccctcaatgtaaatgtccacgccgcaggcctttccagaatcttccatgctccgtcacactgcagccaggcccagaggatacaggaaaggcctgcggcgtagactttgagattcgagccttctgtgctaaatcactagaagagaaaagccacaaaaggaactctgtgcggctggtgatccgaaaggtgcagttcgccccggagaaacccggcccccagccttcagccgaaaccacacgccacttcctcatgtctgaccggtccctgcacctcgaggcttccctggacaaggagctgtactaccatggggagcccctcaatgtaaatgtccacgtcaccaacaactccaccaagaccgtcaagaagatcaaagtctctgtgagacagtacgccgacatctgcctcttcagcaccgcccagtacaagtgtcctgtggctcaactcgaacaagatgaccaggtatctcccagctccacattctgtaaggtgtacaccataaccccactgctcagcgacaaccgggagaagcggggtctcgccctggatgggaaactcaagcacgaggacaccaacctggcttccagcaccatcgtgaaggagggtgccaacaaggaggtgctgggaatcctggtgtcctacagggtcaaggtgaagctggtggtgtctcgaggcggggatgtctctgtggagctgccttttgttcttatgcaccccaagccccacgaccacatccccctccccagaccccagtcagccgctccggagacagatgtccctgtggacaccaacctcattgaatttgataccaactatgccacagatgatgacattgtgtttgaggactttgcccggcttcggctgaaggggatgaaggatgacgactatgatgatcaactctgctaggaagcggggtgggaagaagggaggggatgggttggaga

SEQ ID NO: 25453 - DNA, 354 bp, Homo sapiens
ggactgcatagggctcggcgtgggactgggagggaaagggctaagggctatctattcccgtgccaccacccatgaagcaggaagagtatacctttgtctgaattgccatctggcttctccactgaactttaaagctggcgggaggagggggagggcaagatgaatgggaaagaaaatattagcttaagatctgtttgcaaatggagtgcttgtatttatagaatgtacattgaaatgccttataaaaccaaacaaactcataaagtggccaggattcagtccatttcacagttcatacccagtgaaacgggaacacagcacataaaatacagaaatggcaaaagatagagccta

SEQ ID NO: 25454 - DNA, 894 bp, Homo sapiens
  misc_feature (1)...(894): n = a,t,c or g
agctcacagacaccatctgcggggtggggaacatgtcagcaaacgcctctgaccaggagaggacaccctggcatgtcactattaagcccaagagccaagagacctgccggggggccctcatctccgaccaatgggtcctgacagcagctcattgcttccgcgatggcaacgaccactccctgtggagggtcaatgtgggagaccccaaatcccagtggggcaaagaattccttattgagaaggcggtgatctccccagggtttgatgtctttgccaaaaagaaccagggaatcctggagttctatggtgatgacatagctctgctgaagctggcccagaaagtaaagatgtccacccatgccaggcccatctgccttccctgcacgatggaggccaatctggctctgcgganacctcaaggcancacctgtagggaccatganaatgaactgctgaacaaacagagtgttcctgctcattttgtcgccttgaatgggagcaaactgaacattaaccttaanatgggagtggantggacaagctgtgccgaggttgtctcccaagaaaaaaccatgttccccaacttgacagatgtcagggaggtggtgacagaccagttcctatgcagtgggacccaggaggatgagagtccctgcaagggagaatctgggggagcagttttccttgagcggagattcaggttttttcaggtgggtctggtgagctggggtctttacaacccctgccttggctctgctgacaaaaactcccgcaaaagggcccctcgtagcaaggtcccgccgccacgagactttcacatcaatctcttccgcatgcagccctggctgaggcagcacctgggggatgtcctgaattttttacccctctagccat

SEQ ID NO: 25455 - DNA, 368 bp, Homo sapiens
ctaatgttaacccatcctgttctcacacatactcaaaagagaaagacaagccatacaaaaataatagccagctagggaaacaaaacatctaacagcttcaaaatatgtcatcactatggcttgtttcctgtgtggaccaaaggaccctcttgtgtagctgctcttgtgtagcagttccctgcccctcttttgtgaatgtcaacggctttcccatttacagaggcaaggccgagagggagagggagtctgcagctccacctccagcctgtgcaaactgccaggagtcggctctgcataaggcacagtgccatttggtcatcagtcaagaaccagtgtgagcttttaaagtggatctgctcccttcaaaa

SEQ ID NO: 25456 - DNA, 471 bp, Homo sapiens
ttttgatcagtttcttttcttttgtttttttttttaaaaagacatttaaggacaaagacattatttctcatagcaggaaatgtagaggtagatggttccagtatcagcatagggactaaactacattataaaagatccagcttccttctgtcattcccctcttttgtcttcctcagcaggttggcttttttccctggggcctctcacttcgttggtgaccagtttcttaaactgaaagctttaatgttacatagtaaatggtagtgtgtcctgtgtaaattagggtacctattaaaagttgcaaaggggaattaaaggaatccctagaataaggattctgaagttttattttaaattattatcttcttaacagtttagtcccacctcttacttcctgcctcagtctgctttctctactgtctggattaattaggcagcctgctataaagttaaagtcacacatttctattt

SEQ ID NO: 25457 - DNA, 298 bp, Homo sapiens
gcaatttcggagtctacagttacttcaaaataaactgttaaaaaaatgcagaaataaaatataaatccaccactacaaaaaaaaatgcaggtgaaatacaaatattttcagacagacaagaggtgacagaattagattccaggaaatatatactatgataaatgttaaaggaatttgttcaggctgaagagaaattataccaaactaagatctattgaaggaataaagaatttcagtaactgtaaatactgggatatgttaagactttttttccttttcctttcttaatttttttaaa

SEQ ID NO: 25458 - DNA, 365 bp, Homo sapiens
gctgccccaagggacagtcagataaaacaaattacttgcttcagaagcaaaccctgtctgtcaagttattggatacaagctgagaccccagagccctgctcacagataagtattcagtggagaaagtaggaagattactataagtctgaagttaaatatcctctttttccgacctccagtaaagggaaatgtattttggaacttatgtaaaaatgtctttgtgatttttgccttagaaaacaaacctgactcctttgttttaagtccaagggctgatggtccacccccagggatgggggggtgtcctgtcacacaggaggtggtgctttgtgtggcttccagtctctgctggctctttaggagtt

SEQ ID NO: 25459 - DNA, 901 bp, Homo sapiens
atttaatacgactcactatagggaatttggccctcgaggccaagaattcggcacgagggcatccctcctgaccagcagaggttgatctttgccggaaaacagctggaagatggtcgtaccctgtctgactacaacatccagaaagagtccaccttgcacctggtgctccgtctcagaggtgggatgcagatcttcgtgaagaccctgactggtaagaccatcaccctcgaggtggagcccagtgacaccatcgagaatgtcaaggcaaagatccaagataaggaaggcatccctcctgatcagcagaggttgatctttgctgggaaacagctggaagatggacgcaccctgtctgactacaacatccagaaagagtccaccctgcacctggtgctccgtctcagaggtgggatgcagatcttcgtgaagaccctgactggtaagaccatcaccctcgaggtggagcccagtgacaccatcgagaatgtcaaggcaaagatccaagataaggaaggcatccctcctgatcagcagaggttgatctttgctgggaaacagctggaagatggacgcaccctgtctgactacaacatccagaaagagtccactctgcacttggtcctgcgcctgcgaggtggcattattgagccttctctccgccagcttgcccagaaatacaactgcgacaagatgatctgccgcaagtgctatgctcgccttcaccctcgtgctgtcaactgccgcaagaagaagtgtggtcacaccaacaacctgcgtcccaagaagaaggtcaaataaggtggttctttccttgaagggcagcctcctgcccaggccccgtggccctggagcctcaataaagtgtccctttcattgactggagcagcaaaaaaaaaaaaaa

SEQ ID NO: 25460 - DNA, 503 bp, Homo sapiens
  misc_feature (1)...(503): n = a,t,c or g
ttnnnnctttgnnnncaacagctatgacatgattacgaatttaatacgactcactatagggaatttggccctcgaggccaagaattcggcacgagatcgacgtcatcggggtgaccaagggcaaaggctacaaaggggtcaccagtcgttggcacaccaagaagctgccccgcaagacccaccgaggcctgcgcaaggtggcctgtattggggcatggcatcctgctcgtgtagccttctctgtggcacgcgctgggcagaaaggctaccatcaccgcactgagatcaacaagaagatttataagattggccagggctaccttatcaaggacggcaagctgatcaagaacaatgcctccactgactatgacctatctgacaagagcatcaaccctctgggtggctttgtccactatggtgaagtgaccaatgactttgtcatgctnaaaggctgtgtngtgggaaccnagaacggtgctnaccttcgnatgnncttgctgggc

SEQ ID NO: 25461 - DNA, 510 bp, Homo sapiens
  misc_feature (1)...(510): n = a,t,c or g
gaatttatcctaaatatgcttatcagcttctgcctcataacacacacaagaactgagtagctctaaatacatatttatttagctcatgatgtgtgagctggcaagttcaactgggcttagctgggcagttctggtgtgggacatgctagattatcttaactgggctttgtacatgcatctgcagtcagctgatggttcatctgggcctggctgttttatgatggtcatagatgagacaacgaagttctctctgtcatcatggtctctcaccctccagaagaccaatcgagggttggtcccatagtgccagggtttcaagggcaaaagctgtgatctcttaaggcctcatcagggaacaggctcaatgatactttcaccacattttaatgattaaagcaagtcacaacactggcccagattcatggggtgagattaagacanaataaaaaatgttgagacataatcattggnaggaaaaggaantactattttatgctagagaataatgtt

SEQ ID NO: 25462 - DNA, 381 bp, Homo sapiens
gattggcttggcatatataaatcacctggtggagagaggagactatgacatagcagcacgcaaatgccagaaaattcttgggaaaaatgcagcactctgggaatatgaagtttataaatttaaagaaattggacagcttaaggctattagtccttatttgccaagaggtgatccagttctgaaaccactcatctatgaaatgatcttacatgaatttttggagagtgattatgagggttttgccacattgatccgagaatggcctggagatctgtataataattcagtcatagttcaagcagttcgggatcatttgaagaaagatagtcagaacaagactttacttaaaaccctggcagaattgtacacctatgacaagat

SEQ ID NO: 25463 - DNA, 643 bp, Homo sapiens
  misc_feature (1)...(643): n = a,t,c or g
aatccaatacgactcactatagggaatttggccctcgaggccaagaattcggcacgagccatgagcttaccctgttctgattttcctaaaagcttcacactatataggctgggcacaatggctcatgcctgtaatcccagcactttgggaggccgacaagggcgggtcacttgaggtcaggagttcgagaccagcctgaccaacatggtgaaaccccatctctactaaaaaatacaaaaattagccaggcatggtgatgcacatctgtaatcctagctactcgggagactgaggcaggagaatctcttgaacctgggaggtggaggttgcagtgagccgagattgtaccacctcactccagcctgggtgacagagcaaaactctcaaaaaaaagtaaaatttcaaaaaagcttcacaatataaaccttaattttaatgacatattggctagtcaataaacaagtcttatctcatctcatctcttttctgataacaaacacccgatgtgttcaatttgctttcatatttaagtctttcctgaattgctgtcatcattcaacctcgtgccgaattcttggcctcgagggccaaattccctatagtgagtcgtattaaattcgtantcatgtcataangggtatca

SEQ ID NO: 25464 - DNA, 434 bp, Homo sapiens
  misc_feature (1)...(434): n = a,t,c or g
ggaacagaaacaaaaaaagcacaaagggaaaggagttggacatgaatttcagaaagtttcagttgacaagtcattttctagaggatggagtcgtgatcagcctggccaagccccaatgagacagaggagtgcaacaaccactggttctccaggaaccgaaaaggcgaggagtatagtacggcaaaaaactgtcgatattgatgatgctcaaatacttccccgctcaactagagtcagacatttttcacaaagtgaagaaactggaaatgaagtttttggtgctttgaatgaggagcagccattgcctcgaagtagcagcacttctgacatcttggaaccattcactgttgaacgagccaaaggtgcagttcctgtcattgacagttcatcccgtcatgcaccaagcttgcagagtttcacagaggcttnttcaa

SEQ ID NO: 25465 - DNA, 429 bp, Homo sapiens
atttgggacactatgacatgattacgaatttaatacgactcactatagggaatttggccctcgaggccaagaattcggcacgagctttttcatgtataagagttcttttttgttctgtgaacttttttaaaaaactaaaacatggtcttcatttcatggtatattctctggatttttaaaaaatttgttttcttttctctttactgaaggatctctttcctctaggctgccttcccgtttctgtgtgaggctctcctcagatggcctgcccatgtttaagagtgggggacgctgtagggatgggcactgccttctgtgagctgaacctttccttgttggggccttctgaccttagtgctgcgggttggtcctcccgggctattgtcacaagactctccctggtccctgcaggaaggggaggcttggctg

SEQ ID NO: 25466 - DNA, 363 bp, Homo sapiens
gctggccttcgggtgtacgtgctccgggatcttcagcacccgcggccgccatcgccgtcgcttggcttcttctggactcatctgcgccacttgtccgcttcacactccgccgccatcatggtgaagctcgcgaaggcaggtaaaaatcaaggtgaccccaagaaaatggctcctcctccaaaggaggtagaagaagatagtgaagatgaggaaatgtcagaagatgaagaagatgatagcagtggagaagaggtcgtcatacctcagaagaaaggcaagaaggctgctgcaacctcagcaaagaaggtggtcgtttccccaacaaaaaaggttgcagttgccacaccagccaagaaagcagct

SEQ ID NO: 25467 - DNA, 278 bp, Homo sapiens
ggatgtatgagtcacttcataagatgggaacaggaagacatcctgttgatgccaagccattttcagttcagtgatgagaatctaccccccgcaagaaagtgtgtttgtatcttcctcctttccccagtgcagagggggtcagcacctggctctttcccttgtgagaactcctccacttggtttagcgcccaggaaatcagccctgtctttcatttgcatctgttatgttatcagaagatcctctttgccaaagatactttctgtctgaactattttta

SEQ ID NO: 25468 - DNA, 332 bp, Homo sapiens
gagaatgtatatttttagggtttttgattctggacaacttgaaagcatctaaattttcttcctgtaagtgcttcttgagggtttatcagacattccaactgagatattttgtgaggatagttttcatactcatttcttatttgataggaatcttaagagttttgtttactatttcattaaaatatcattggatatgtggtgaaaagcctgagattgctgtgtaagagactggaaagaaatttcttattacctaatgtttgaagtatgaagtttcagggttgttgatggacaagctgatagtaggagagtagaatttgtaaaaaaaaaaaaaa

SEQ ID NO: 25469 - DNA, 462 bp, Homo sapiens
tttgatttccattaccattttgacatgattacgaatttaatacgactcactatagggaatttggccctcgaggccaagaattcggcacgagaaaaataagaattataaccagaaaggcttacagcaattaaaagggaaaaactaatgtctctaccataaactattagacttccattgtagttattgccctaatgtaggtatctagacccatacatttgacagtttaaagaccaaagttctcagaaatgttttctctttcctaacctgtattttaaaataagttaacattgctagaaggagttacaaaagcaccagtcaatgcacccatagatccaatcccttccttctttttattgtctatgtccacatttttggacaatgtcttttcaccatgtgcagagtgaccagctttaccccttagctctatgtgcgcttggtcaaggactgaagtagaagtaaata

SEQ ID NO: 25470 - DNA, 491 bp, Homo sapiens
  misc_feature (1)...(491): n = a,t,c or g
tccctcccccctnngnancncctatnncatgattacgaatttaatacgactcactatagggaatttggccctcgaggccaagaattcggcacgaggatgcaaaaatctcaaacaaaaaatgctagcaaactgaattcaacagcacacgaaaaggatccgtcaccctgatcaaatgggatttattcctgggatgcaaggatagaccttgtcaacaaatgcaaatcaatgtgattcatcctattaacagaatggataaaaaacatgtaatcatcccaatagatacatctgataaaatttaacatcctttcatgataaaaactctcaacacattaggtatagaagaaatgtacctcagcataataaaggccatatatgacccacacacagctgacatcatactcaatggtaaaaagttgaaagcttttcctctaagattatnantaagagaaggatgcaacacagtctggaagtcctacccagacttggtaggg

SEQ ID NO: 25471 - DNA, 701 bp, Homo sapiens
tcagataactgtaaagaggatatcaaccagaggacggaagtgtaagcctatttttgtccaaatagcgagacaagtagttaagctgaatgcttcagacctccgcctgccttcccgagcgtggaaggttaagctggttggagaaggggctgatgatgctggaggagtgtttgatgacaccatcacagagatgtgccaggaacttgaaactggtattgttgaccttcttataccctctcccaatgccaccgcagaagtgggttacaatagggacaggttcctttttaacccttctgcctgcctcgatgaacacttaatgcagtttaagtttttaggaattttaatgggggttgccattcgcacaaagaagcctctggacctccacttggcccctctggtgtggaagcagctgtgctgtgtcccactcaccctagaggacctggaggaggtggatctgctctacgtgcagactctcaacagcattcttcacattgaagacagtgggattaccgaggagagtttccatgagatgattcctcttgattcttttgttggccagagtgctgatggcaaaatggttcctataatccctggtggaaatagtatcccactcacattttccaacaggaaggaatatgtggagagggccattgaatatcgacttcatgagatggacagacaggtggctgcagtccgagaaggga

SEQ ID NO: 25472 - DNA, 726 bp, Homo sapiens
aacggaggcactgtggccgagaagctggactgggcccgcgagaggcttgagcagcaggtacctgtgaaccaagtgtttgggcaggatgagatgatcgacgtcatcggggtgaccaagggcaaaggctacaaaggggtcaccagtcgttggcacaccaagaagctgccccgcaagacccaccgaggcctgcgcaaggtggcctgtattggggcatggcatcctgctcgtgtagccttctctgtggcacgcgctgggcagaaaggctaccatcaccgcactgagatcaacaagaagatttataagattggccagggctaccttatcaaggacggcaagctgatcaagaacaatgcctccactgactatgacctatctgacaagagcatcaaccctctgggtggctttgtccactatggtgaagtgaccaatgactttgtcatgctgaaaggctgtgtggtgggaaccaagaagcgggtgctcaccctccgcaagtccttgctggtgcagacgaagcggcgggctctggagaagattgaccttaagttcattgacaccacctccaagtttggccatggccgcttccagaccatggaggagaagaaagcattcatgggaccactgaagaaagaccgaattgcaaaggaagaaggagcttaatgccaggaacagattttgcagttggtggggtctcaataaaagttattttccactgaaaaaaaaaaaaaa

SEQ ID NO: 25473 - DNA, 480 bp, Homo sapiens
  misc_feature (1)...(480): n = a,t,c or g
ggagacatacaccttggggagcacaatctaagactgggggcaaggccctttacacttctttccttgccttctcaaggaaaaggctcggttctatgtttttttcttattatacagagcagtgccagctgcaaagggatgcctgctccttttattttttgctaactatccctcagaaccaagttctaatggtcgcacaaggctcagtacaaggtgaaatggaaactggcttcacagagggaactctgaaatgctgagaataaggcccccttcattccctttcctccctcatctaagaataacctcagttctgccccattcctaatcttgcaaggcagctctaactgtaaggagttgccctcctcatttctttgctcctacgcatccctgggaacgaagttctacaggngcctcagtacncagtatgaggcaatataggaactnccccacaaaaggntctctgaanagcccaaaccncgaacc

SEQ ID NO: 25474 - DNA, 450 bp, Homo sapiens
ggcgggtgcgaaagggtttctggaaacagcctcccctcatctgggatgtcaatcctaaacagattcggattctcaaccccttcttcatggagattgcagctgacaaactgctgagcctgccaatgcaacagccacggaagattaagcagaagcccaccacgggcctgttggccatcacgctggccctccacctctgtgacttggtgcacattgccggctttggctacccagacgcctacaacaagaagcagaccattcactactatgagcagatcacgctcaagtccatggcggggtcaggccataatgtctcccaagaggccctggccattaagcggatgctggagatgggagctatcaagaacctcacgtccttctgacctgggcaagagctgtagcctgtcggttgcctactctgctgtctgggtgacccccatgcgtggctgtggg

SEQ ID NO: 25475 - DNA, 347 bp, Homo sapiens
actgtgcagaacagggagcactttgagcccacccagtacagcatggaccacttctcagggatgcacaattggtacgcctgttcccacgcgaggccgacctactgcaatgtgtgccgtgaggctctgtctggggtcacgtcgcacgggctgtcctgcgaggtgtgcaaatttaaggcccacaagcgctgtgctgtgcgtgcaaccaataactgcaagtggaccacactggcctcgatcgggaaggacatcattgaagatgcagatgggattgcaatgccccaccagtggttggaaggaaacctacctgtgagcgccaagtgcactgtgtgcgacaagacctgtggcag

SEQ ID NO: 25476 - DNA, 457 bp, Homo sapiens
  misc_feature (1)...(457): n = a,t,c or g
gcaaggggtaaatggaattaaatttgtcgtaaggtactagcaatgcttgaaaaacagtaaaaagttctaatttaagagaagctaatattcaaagatgaacattgtagtattcagggggccaattaaaagaccagtagaaaaagatataactaaaaagcttataaggaggtaaaatggcatgattaaaaaaagcttgaataattcaaaagaatctgagaaaagaaaagcaaaaacagaagaaacacacaaaaaataaatagcagcatggtggattaaacacactttattacattaaatatacacctttggggtagaggaagggatctgactagagttgtcagtatattatctgaaatgtcaagttttcaacaaaaattggactttacgctccaattaaaagacaaatgattangctgggcactgtgctcacactttggaatccccnnnctttgggagg

SEQ ID NO: 25477 - DNA, 552 bp, Homo sapiens
gcggcgccgcgcggtgaggttgtctagtccacgctcggagccatgccgtccaagggtccgctgcagtcggtgcaggtcttcggacgcaagaagacagcgacagctgtggcgcactgcaaacgcggcaatggtctcatcaaggtgaacgggcggcccctggagatgattgagccgcgcacgctacagtacaagctgctggagccagttctgcttctcggcaaggagcgatttgctggtgtagacatccgtgtccgtgtaaagggtggtggtcacgtggcccagatttatgctatccgtcagtccatctccaaagccctggtggcctattaccagaaatatgtggatgaggcttccaagaaggagatcaaagacatcctcatccagtatgaccggaccctgctggtagctgaccctcgtcgctgcgagtccaaaaagtttggaggccctggtgcccgcgctcgctaccagaaatcctaccgataagcccatcgtgactcaaaactcacttgtataataaacagtttttgagggattttaaagtttcaaaaaaaa

SEQ ID NO: 25478 - DNA, 345 bp, Homo sapiens
gggaagaaggtttggctgtgcttggttctgtgctcgttttcccttcaaaggggcttggctattgtgaaagaaaaggaagttaatgaactgactggaaagccaagggcaaggcaattagtccagggtcccaggcacagtcccccaacagttcctatataaaggaagactctgtctccacaatgtctcacctgcaccagtctatatccaaggcaaaacgcctcttgttgtcctccccgacaactcctagctgctgtgccctttcttctactttaccttttatactctgtcactgaaacctacttctgggagcccataccttggcacccgtaggtgacagtacttttt

SEQ ID NO: 25479 - DNA, 402 bp, Homo sapiens
gcggcacgagcgcagcggccagatacctcagcgctacctggcggaactggatttctctcccgcctgccggcctgcctgccacagccggactccgccactccggtagcctcatggctgcaacctgtgagattagcaacatttttagcaactacttcagtgcgatgtacagctcggaggactccaccctggcctctgttccccctgctgccacctttggggccgatgacttggtactgaccctgagcaacccccagatgtcattggagggtacagagaaggccagctggttgggggaacagccccagttctggtcgaagacgcaggttctggactggatcagctaccaagtggagaagaacaagtacgacgcaagcgccattgacttctcacgatgtgacatgg

SEQ ID NO: 25480 - DNA, 540 bp, Homo sapiens
  misc_feature (1)...(540): n = a,t,c or g
gccactgggagatcagatcttctagctggctctctgctgccacagctccgccgaagggagggggtggaagaggaggactaaactcagagctgagaggagaggcaggtgtgtgcaggtgcatcacctggatcatgaggtcacccctctgctggctcctcccacttctcatcttggcctcagtggcccaaggccagccaacaagacgaccaagacccgggactgggcccgggcgcagacccaggcccaggcccaggcccacacccagctttcctcagcctgatgaaccagcagagccaacagacctgcctcctcccctccctccaggccctccatctatcttccctgactgtccccgcgaatgctactgccccctgatttcccatctgcatcatgggcaaccccaaagtcaaggcacatggcaagaaggtgctgacttcttgggagatgccataaagcacctggatgatctcaagggcacctttgccanctgagtgaactgactgtgacaagctgatgtggatctgagacttcagctctggg

SEQ ID NO: 25481 - DNA, 316 bp, Homo sapiens
catctattcacacatcccacaaggagggaattatacaagggcatggatcagccagagtcatcttagaattctgcctaccacagacatttaagaaaacattctcatgaatattagctctagaaaatttaggatccatccaaaactttacactaacttcttccttgcccccaaataagaagacctcttcccagactttctaaatcctttctactcaaagtgtggtccatggaccggcagcacaaacaccatttatgaaaaattcagaccaagagaatcagaatcagccacatattcacaaggccttcagccaaatatt

SEQ ID NO: 25482 - DNA, 382 bp, Homo sapiens
gacttcctcctcagggaataaaggctcagggaccggcagttctactctggagcccaccagcctctcagagcctccggtgactggcctgtgtctccccctggatggacatgtggacggcgctgctcatcctgcaagccttgttgctaccctccctggctgatggtgccacccctgccctgcgctttgtagccgtgggtgactggggaggggtccccaatgccccattccacacggcccgggaaatggccaatgccaaggagatcgctcggactgtgcagatcctgggtgcagacttcatcctgtctctaggggacaatttttacttcactggtgtgcaagacatcaatgacaagaggttccaggagacctttgaggacgtatt

SEQ ID NO: 25483 - DNA, 220 bp, Homo sapiens
tgacgtccccagaagtttctgggtctaccacactccccaaccccgcactcctacttcctgaagggccctcccaaggctacatccccaccccacagttctgcctgagagagatcaacctccctgagatcaaccaaggcagatgtgacagcaagggccacggaccccatggcaggggtggcgtcttcatgagggaggggcccaaagcccttgtgggcggacc

SEQ ID NO: 25484 - DNA, 357 bp, Homo sapiens
  misc_feature (1)...(357): n = a,t,c or g
ctcccttccatgccggaacccaggccagggacccaccggcctgtggtttgtgggaaagcagggtggacgctgaggagtgaaagaaccctgcacccagagggcctgcctggtgccaaggtatctcagcctggacaggcatggacctgtctccagagagaggagcctgaagttcgtggggcgggacagcgtcggcctgatttcccgtaaaggtgtgcagcctgagagacgggaagaggaggcctctggacctgctggtctgcactgacagcctgaagggtctacaccctcggctcacctaagtgccctgtgctggttgccaggcgcanaggggaggccagccctgcctcaggacctgcc

SEQ ID NO: 25485 - DNA, 338 bp, Homo sapiens
ggcctgtggggggactcagcaggcacaccctggtgggttaagcatggcttcccagaggaagtaactttgacactgggaccataggtatcagctacgtgaaaggagagttcaaagatcatgtgggctggagtggccaggagatacttcctggaggaaggacatggagtggatttggggtaggggaggggagaaggcagtatttaaattagaaagtgcagtaattagttgaatttggatggtcctggttgaaagagaacagactgggcaaaggtctgaaggtgacctgtgccgagggccttttgccaggacagtgaatgatgaggccaggctggctggag

SEQ ID NO: 25486 - DNA, 323 bp, Homo sapiens
ggacatcatcccggatgtggtcagtgttgggggtagggaatcggagtaactggagagagggatgtgaacaccacaggcaatttgccaacgctagcccctgggttattgttgcaggagatcagtcggaaggtgtacaagggaatgttagacctcctcaagtgtacagtcctcagcttggagcagtcctatgcccacgcgggtctgggtggcatggccagcatctttgggcttttggagattgcccagacccactactatagtaaaggtagggatcgtacttgctgggcaccacgccatccctaactctgccacttgtctcctga

SEQ ID NO: 25487 - DNA, 345 bp, Homo sapiens
gagtaaaataagcattcttgaatttcacatttctacccctgggctatacctatccgtaaaatacaaaattcaaatactgcatagtctaccgctgtctatcttagtaacctttagaaagccatttgttgctgtgtactttactttcctcaccaatgaatattctggtttaatgatggccctggagttattaatattttgagattataagtgtagaattgcatctactagtgaattctgaattcggattgattaatttatatatacaaacttttagagtggcaacacagtggaagagaattcatttttatgttaagaatcttaatggtgcctcctcataaaagccaa

SEQ ID NO: 25488 - DNA, 458 bp, Homo sapiens
  misc_feature (1)...(458): n = a,t,c or g
aacnctatgatttgatanngctatgacatgattacgaatttaatacgactcactatagggaatttggccctcgaggccaagaattcggcacgaggattcattctagaacctttggaaaagatagacaaacacaaaagaaaaatatctcccattgactaccctccagggagcactggacccaaactaggatctggttgcttttctgtgaagatgtcctatttcatctttaaggattatgatcttttaggtaatggaagttgtgcttcatattttaagaactttttaaaatgaactttatttcatatttaatttatatacaataaaaggcactcattttaagtacacagtttgatgcattttgacacatgtgtagacatgtgtaaccaccaccctaattgagacacagaacaccttccatcgcaggagagagggttccctcacttccctctgcagtctgc

SEQ ID NO: 25489 - DNA, 316 bp, Homo sapiens
cacgtgtggggggcagctcaccgggaagcaggcaggagtgggggacaggctgagcccagtggccatcaggccttggggtacatgccaaggggcaagagagcgctatggctttccttctgttcctcctctcccagccccaccacttacaatggtctccattgggggctgtgtgtccctttgtccgtggggctgaactcaggctggttgcagggagggggctcccagggcattccagtgtcctagggtagaggcagagtgccctagagcaaggtcccaggagagctcatcttgtcaggccaggagagtggggacagga

SEQ ID NO: 25490 - DNA, 493 bp, Homo sapiens
  misc_feature (1)...(493): n = a,t,c or g
tttganatcngntatgacatgattacgaatttaatacgactcactatagggaatttggccctcgaggccaagaattcggcacgagaactggagatgcatcctttaaatgtgagctgttactacttccctaaactgtctactccacctgggctgctcttccagatcatttctaacacacattgcccaacttaggcctttggctggtggtgttctcatccatgaggcaccattccatcacaatcaccaccatcaacaaagagtatgtgttcaacatttacactatatattcaaggtgtaggctggaaatacagaggaaaaaaaaaaaannnnnnnncccaancctcanagctnatagncnaatanngaaaganagncagaggaanaggcccaatanttnggggngncaaaggaanccnttcntggnggcangggaaatgcttacnctgactccanaangctgcgggggtnaatcaggcantgggggccttgtaaa

SEQ ID NO: 25491 - DNA, 452 bp, Homo sapiens
  misc_feature (1)...(452): n = a,t,c or g
ggctgtttggattcccattttacagcctggaaaacagaggcttaaaaagggtaagtaacttgccaagagccatctggaaaccagtcaatagtggagccaagacatgagctcagatcggagcctgctcactctaaccctgaggctctatggtcagtctagtgaatgagttatgtctgtgccaaggggaggagggtgcctgggcatcagaagacctgtgtctcaactctgccccaatcagctgagaagctttgagtagtcacttggcttctctgcatctcagtttcccttctctgtgccacaggtgataacgtgtgcttcatagctggttgtaaagattaaaagctaccatggctaggagcttttggaattcttttttcttttaattttactttaagttctaggatacatgtgcagaacctgcaggtttgntgcataaggggaacatgtgccat

SEQ ID NO: 25492 - DNA, 370 bp, Homo sapiens
gctggaatgtagaaatgttcagggctgctttgtcagctgctttgcagctgttctttccctggaaagggaattgcagatatgagctataccctgccagcctttgtgatataaaagcattctatcattctgtaatggcttgctcttcagagaaacagaatgagtggtctttttgtggaagaggcagtaagtcacactttcacagcagtttggcatgattaatataaagtatatggaatttgtttatttagcaaagatgtattgattatatttcaaagttgggtaaagtttttaatatacataaagttgacaaagtagcatgatttgtatctgatctttcacatttaacagttgcttggaaaagatgctaatt

SEQ ID NO: 25493 - DNA, 424 bp, Homo sapiens
gttttttgtatttttggtagagacagggtttcactgtgttagccaggatggtctcgatctcctgaccttgtgatctgcctgcctcggcctcccaaagtgctgggattacaggcttgagccactgcgcctggccgaatgagagtttttaaaatgatctgaaaccattcatcatactaacatactgattgtgaaaagaccttgtggtaaacacaaagaagttgcataaactcttaaaaagaatggattgattattccttaagactttggttttactaattacgatgtattctagaatggtgccttcaaagatttcttttaatttatcttatttttgcagttctgctaatcacataattgtaatagtaatgaattgggcaagacagtaatttttctcctttagttttcattgtatcataagagccta

SEQ ID NO: 25494 - DNA, 481 bp, Homo sapiens
  misc_feature (1)...(481): n = a,t,c or g
gaaagaactttgaagagagagttcaagagggcgtggtggcgagcacctgtaatcccagctactcgtgaagccaaggcagagaattacttgaacccgggaggcggaggttacagtgagctgagatcacgccactgcactccatccagcctgggcgacagagcgagactcaaaagtatgattctggctgtaaagttttctttttttctctgtctcaaaaaaaaaaagtgtcagctttgccttgtcaaaaggtgaaggaacttgtttaannccttnaatttttttttgaaaaaaaaacgggggccttaaaatnttccccaagggggcccnaaattccgggtcccangaaancccccggccccgggcccaaaaaatgnngggancaattntganccanattacccagccaaannccaattttagttaaacnggttcaccccatttttaggccnaatnttntaaaatangnatcctgcngaaaaaa

SEQ ID NO: 25495 - DNA, 334 bp, Homo sapiens
ggcacctagaaggcacgtgggcaaagtaatcatcgttcaggcccaacccttaggtttaaaaagtcaggttgtccatcccattgggttcactgagtgaaggcacataaagcaattgaggaggaggaggaacccctcgtccccctaggagcagacccaagcttgtggcaccaggcatctgatggtgccaggaaagccactggaattgtcacacggcgagcacagagggccggccaccagtcctcgatgcttctgaaccctgaagcccgatgacatcttacgaggtggacgttggactgttcatgcgcatcgggtgtcagtgactcatggagaagtc

SEQ ID NO: 25496 - DNA, 449 bp, Homo sapiens
  misc_feature (1)...(449): n = a,t,c or g
acagctattacatgattacgaatttaatacgactcactatagggaatttggccctcgaggccaagaattcggcacgaggtgtgagccactgtgctcagctcagttttcaatattgatgagatactatccctttttatattttgcaagtgatattatccattgaaaaatactagtgagctgggccgtggtggctcatgtctgtaatcccagcacttggggacactgaggcaagtggatcacctaaggtcaggagttcgagaccagcttggccaacatggtgaaaccccatctctactaaaaatacaaaaaagtagctgggtttggtggcaggtgcctgtgatcccagctgctcgggaggctgaggcagtagagttgcttgagcccgggaggcggaggttcanngaccgatattgcgccattgactctacctgncaacnngacataacttc

SEQ ID NO: 25497 - DNA, 470 bp, Homo sapiens
  misc_feature (1)...(470): n = a,t,c or g
gggcatttagtaggccctcaaagtattgtttagaatagctacgcaggattttgttgaattacactgaatcttactaaagaacaagcctcttagaggtctcgaagaatttagccaagccttgtacactgtgtgaaatgtttgttatatttgagtgtgcagaactttgcagctcatggagagctggccgtgctaagtagagactttcctttcagtggtggtgggcttggtaaatgctgattatcagggccttttgataaacttgtccaaagtggtgtcacccctccacagagcctctgttgggaccactcaacagctggcaggcttggctaggcgtagtcacagggcgagtctcagctataagagagccagggcagccctcaggaagtgggcccaaaaaaatgaaatgcacctctagtaggagcctaccctgtcttctaagcaggcttgtnaacccttctgcattgcccctg

SEQ ID NO: 25498 - DNA, 501 bp, Homo sapiens
  misc_feature (1)...(501): n = a,t,c or g
gattaaattatgtatttctaaagacatttagaacaatacaaagaatatagtgtgggctcaataagtgacgatggtgttagttattagaaggccatcgagtgctggagaaaataattgaatatcattgatggaaataaaggaagttttccacgttaaaaagcttcggtttttggaaatgtgtgttttcagtatttctgagattaccaggtagaaattccagccagatgttggaattctgcactggcagttgggaataaagtcatgttaaaggagataagttttggagttattgtgtaaaattggtaaagcactggaatagattggtttgacagaggggaaactctttttgagataggcctatatttagggacaagagaagagacaaccaataagggttgaaagaaaccttgagagagtaagtcctatgacanaagcanggaagtttcanaatgattgcctaaagatagccnggctntttctgncttcancggggggcaggaa

SEQ ID NO: 25499 - DNA, 299 bp, Homo sapiens
caggactgtgccactgcacccggcctgcagtttttgttttcattctttcacagaacaaaatttttttatgttgatgagctcaagtttgtgaaatttacattgtatgaaccgtgctttttgtgttgagtctaaggcctcttcattcatctagccccaggtcgtaaagacttttgcttttttttttcttctgacagttttacagtatatatatataatactttttatattaaagcctactatgtattttgaaataattttgtaataaagcatgaggcatatactgaaattctttttttttt

SEQ ID NO: 25500 - DNA, 415 bp, Homo sapiens
gatggttgatttaaaaatacaagaatatgttcattagaaactggaggtaagatcacgttttcagtgatcatatttgttaactcctgcgttcatcaagacttaccaaaagaagatgaatttgtttaaagtcaaattggaaaccccatccttttccacatgttgccaagacagatgttcagatatacatagaaaacgtgtgtgctggccaggcacagtggctcacgcttgtcatccctgcactttgggaggccatggcaggaggattgcttgaacccaggagttcaagaccagcctgggcaacaacgcaagatctcatctctacaaaagaaaacaaaacaaaaagcttgtgtgcttctgttgctgcagagctgtgtgtacattggaggctacttaaaatatagtaggagagttaaca

SEQ ID NO: 25501 - DNA, 320 bp, Homo sapiens
gctagtttgcagagtaattgggcattgccagttacacaggcttttgatttttgtttggtcccatagttcatatgggaccaaacagaactgccattcactcagggtacttatgggaggattcagtgcatctatatgtatgagaacataatcataatttaaacatccgctgcaaacttttttcctggcatgtgctcccactgtaggacaatccaagttaaattcatagaacttgactctgaagatttagatttaaatctggtatgttcattgatactgttgcataattgattctgtaaaaactagaagtcagggttttctta

SEQ ID NO: 25502 - DNA, 339 bp, Homo sapiens
gattcatttaaaaaaaaagaaatttataaaatataaggcctaggacatttcaatcttccattttttctttaattttttttcattctttctcactgtcaaaatagggagaatttaacttaatcgtttaagtctctgtttatatgtaccattcttcagatatggattaacataatttgggaagttagagccccaaaagaacttaagaaaaatcatcttcaccaattgcttcattttaaagataagcaaaaaggccaggggcggtggctcatgcttgtaatcccagcactttgggaggccaaggtgggtggatcacttgaggtcaggagtttgagaccagcc

SEQ ID NO: 25503 - DNA, 388 bp, Homo sapiens
accaaatccaagatggcggccagcaggaggctgatgaaggacaaccctccatatgataagggagccttcagaatcgaaatcaactttccagcagagtacccattcaaaccaccgaagatcacatttaaaacaaagatctatcacccaaacatcgacgaaaaggggcaggtctgtctgccagtaattagtgccgaaaactggaagccagcaaccaaaaccgaccaagtaatccagtccctcatagcactggtgaatgacccccagcctgagcacccgcttcgggctgacctagctgaagaatactctaaggaccgtaaaaaattctgtaagaatgctgaagagtttacaaagaaatatggggaaaagcgacctgtggactaaaatctgc

SEQ ID NO: 25504 - DNA, 454 bp, Homo sapiens
  misc_feature (1)...(454): n = a,t,c or g
gganatccgctatgacatgattacgaatttaatacgactcactatagggaatttggccctcgaggccaagaattcggcacgagctgcattctgcttccccttcaattttcagctattcataattaaatgttgcttgttgccccagtgtatgagatagtgcccaaaggtatttatttcatgttttccagctttcttgcatttcacagattctatttattttgcatttcatagactttattccttagtgtaagaatttcagtggcataactctgccctgcttgggagtcactttttgaatcttttaatgatatataatggcacttggaaagtgtcccccacacctgatactttctgctttggactacaaggcagatcgtattctaaaaatcattgctgtctaggactgcttcccagaactatgttctccagaactataggtggaacagtttacctt

SEQ ID NO: 25505 - DNA, 444 bp, Homo sapiens
  misc_feature (1)...(444): n = a,t,c or g
naccnnttatgacangattacgaatttaataccgactcactatagggaatttggccctcgaggccaagaattcggcacgagtttttaattcctctgtgtgtttgttcagtgccttcctcattgttgactcaacctttactttacctcctagcttagtctgcattctgcttccccttcaattttcagctattcataattaaatgttgcttgttgccccagtgtatgagatagtgcccaaaggtatttatttcatgttttccagctttcttgcatttcacagattctatttattttgcatttcatagactttattccttagtgtaagaatttcagtggcataactctgccctgcttgggagtcactttttgaatcttttaatgatatataatggcacttggaaagtgtcccccacacctgatactttctgctttggactacaaggg

SEQ ID NO: 25506 - DNA, 334 bp, Homo sapiens
gtgtgctacagatgatagaggattttataccccaataatcaactcgtttttatattaatgtacttgtttctctgttgtaagaataggcattaacacaaaggaggcgtctcgggagaggattaggttccatcctttacgtgtttaaaaaaaagcataaaaacattttaaaaacatagaaaaattcagcaaaccatttttaaagtagaagagggttttaggtagaaaaacatattcttgtgcttttcctgataaagcacagctgtagtggggttctaggcatctctgtactttgcttgctcatatgcatgtagtcactttataagtcattgtatgt

SEQ ID NO: 25507 - DNA, 385 bp, Homo sapiens
ggggagggagaaaaacttttatcttggggctactagaagtttcatacttgttttttaaagcaccacagaattcttactgcattctcagctgatcccttaaatgttttgcttcatgcaaaatcttgtaattttagatgtgtttagttttttaaagattatctgcatataaaattaaggtaaaagataagcaaagatttctgtaatgaagcatattttcagttcagtgtgagttgctcatttgttaattttgtcagtaggatgattttgttagggaaaacgcaatcactgcaaaaaatgtgatatagaaaacattttgcttgaaggattggctttgtttttgtgtggggaatttagtgcattttccattctattgcatcattattaa

SEQ ID NO: 25508 - DNA, 428 bp, Homo sapiens
tacgaatttaatacgactcactatagggaatttggccctcgaggccaagaattcggcacgaggaatcaaatggaatctgttttcctctgcaattgaaggtaacagttttaaagtgttaaccatagtcttggacataaaatattattagtctttatcttgaatttgttactactttgcactaagattacaagggccttcacttaggtgacaaggttcttactatagatataatgtttttctcataatcctcataataaatcaaacacatggggaagaagagtgaccatttcaggattctgtggaacttgaatatgataataccttactgtcctgaatgtacgcatacccctagaaataacttatatcactgactctgaaaataactcatctgtggttgaacatctttttcttcagagacattcctgtaa

SEQ ID NO: 25509 - DNA, 402 bp, Homo sapiens
ggctttcaagaaactctgtccccatggccgaggattcatgaccaatggagcagatatcgatgaatgcaaggttattcacgatgtttgccgaaatggggaatgtgtcaatgacagaggatcatatcattgcatttgtaaaactgggtacactccagatataactgggacttcctgtgtagatctgaacgagtgcaaccaggctcccaaaccctgcaattttatctgcaaaaacacagaagggagttaccagtgttcatgcccgaaaggctacattctgcaagaggatggaaggagctgcaaagatcttgatgagtgtgcaaccaagcaacacaactgccagttcctatgtgttaacaccattggcgggcttcacattgcaaatgtccttccggatttacccac

SEQ ID NO: 25510 - DNA, 279 bp, Homo sapiens
ggcctttttcaaaagtggctgtcccattttgcattcccatcagctgcatatggcagttccagttattcaacagtcatatcagcccttggggtttatagtagttagtaggtttaaattttttaaactattgctctgggtctgtactgatgtctcattgtaattttaagttatatttctctgatgcttaatgaaatagagtagtcagtcattcatccacttgttatctgaacgtcttttgtgaagcatctataaaaatgttttgccctttttttttttttt

SEQ ID NO: 25511 - DNA, 674 bp, Homo sapiens
gggtcggagctcggtcctgctggaggccacgggtgccacacactcggtcccgacatgatggcgagcatgcgagtggtgaaggagctggaggatcttcagaagaagcctcccccatacctgcggaacctgtccagcgatgatgccaatgtcctggtgtggcacgctctcctcctacccgaccaacctccctaccacctgaaagccttcaacctgcgcatcagcttcccgccggagtatccgttcaagcctcccatgatcaaattcacaaccaagatctaccaccccaacgtggacgagaacggacagatttgcctgcccatcatcagcagtgagaactggaagccttgcaccaagacttgccaagtcctggaggccctcaatgtgctggtgaatagaccgaatatcagggagcccctgcggatggacctcgctgacctgctgacacagaatccggagctgttcagaaagaatgccgaagagttcaccctccgattcggagtggaccggccctcctaactcatgttctgaccctctgtgcactggatcctcggcatagcggacggacacaccttatggactgaggccagagccccctgtggccattccccattcatttttcccttcttaggttgttagtcattagtttgtgtgtgtgtgtggtggagggaagggag

SEQ ID NO: 25512 - DNA, 478 bp, Homo sapiens
gagagggcaaagggcccattcaggaagcagcatgggcggggtccaggggagaagagggcttgctgctgggtggggtagcctggtggactgggtcacctggctcaggggccacctccttcctgaggggcccagagcaccgggagtggagagctgcacggaagcatggttcgtggggatcgaggacgtcgggggcacctgggttttgaggtttgagccgagactcctcactttttggctcaagtagaaacaggtctgagagggggtccagatactgtcacagacaacccccacggatgggtgcccacccccaccagtcactgtggaggcagctggatccacgtggaaaacacgccaccagtggcttctgctgctgctgcagaacaggtgaacttgtgactcgcctagcagggcaccaagtgaccagacagcccggacccccaccctgtcctgccttgtgtggggcgccgcctcggaagac

SEQ ID NO: 25513 - DNA, 347 bp, Homo sapiens
ggagagctagcaccatgagcttcaataccctggaaatcgcacatagtgaggcaggatgggggatgccatctgggagaatgccaagactgcctaagggtggtgaggttttgtccttgtttacttgtttgaaataataagcagaaaggcaaataaagtactaactggacttaatttacaactcttcctccctgggaacttcaaaggcgatctggcgtgtggatggcggtgtgatctggtccacattggacatgctcaaatgaaagctgcatcatcctgccccagaaacacccaagaggcccaggacacggccagagcatgtcaccactgaccgtatgtagctcagccgg

SEQ ID NO: 25514 - DNA, 321 bp, Homo sapiens
gcagcgatattattcttcttttatattagccattttataaattctgaaagggaacacatcttattctttgccaattctgaaaactctggccaggttagcttaagaaaataagataataataatacctaagtatctctatatctacagatagggatctacagacaagacaaggtaggtttaggataaagggcaggagccaggtctagggaaaacagtgggtcagaacaagataggggtagaccaaaggaggacacatataatggagagtgagatcaagaatgaccagatagcaactagaggaacttatagtggggaatgaga

SEQ ID NO: 25515 - DNA, 445 bp, Homo sapiens
  misc_feature (1)...(445): n = a,t,c or g
gccagcttctaagtaccatgtccacttattcacatttcccatcatgtctgtgttctggttaaatagtcctgggtcctctagacctaacaaaagtattaaaattaatccagtgattttaaagtgtgggaaaggtgatttgggtgattttaaagtgtgggaaaggtgatttgggtgattttaaagtgtgggaaaggtgaaatgacactgggttacaatgtgcaagttattaccatttacagtagtcttgccattattttgttttattaaaacaaaaaagtatnaagtctgagtctagtgttagcttgtctttaacatctccttaaaacatgctcatctctctagagagaacaggcctcagagtcagaactttttaaataggcngctatacttagctggaactcaatgataccatttcctttctttttacttacttttcngntacctt

SEQ ID NO: 25516 - DNA, 484 bp, Homo sapiens
  misc_feature (1)...(484): n = a,t,c or g
gaannttgaancccttaacagctatgacatgattacgaatttaatacgactcactatagggaatttggccctcgaggccaagaattcggcacgagcaacatgaaagaaatggtgctacccagctcaagcctgggcctttgaatccggacacaaaaccctctagcttggaaatgaatatgctgcactttacaaccactgcactacctgactcaggaatcggctctggaaggtgaagctagaggaaccagacctcatcagcccaacatcaaagacaccatcggaacagcagcgcccgcagcacccaccccgcaccggcgactccatcttcatggccaccccctgcggcggacggttgaccaccagccaccacatcatcccagagctgagctcctccagcgggatgacgccgtccccaccacctccctcttcttctttttcatccttctgtctctttgtttctgagctttcctgctttccttttttc

SEQ ID NO: 25517 - DNA, 421 bp, Homo sapiens
gagcagcaccaaatccaagatggcggccagcaggaggctgatgaaggagcttgaagaaatccgcaaatgtgggatgaaaaacttccgtaacatccaggttgatgaagctaatttattgacttggcaagggcttattgttcctgacaaccctccatatgataagggagccttcagaatcgaaatcaactttccagcagagtacccattcaaaccaccgaagatcacatttaaaacaaagatctatcacccaaacatcgacgaaaaggggcaggtctgtctgccagtaattagtgccgaaaactggaagccagcaaccaaaaccgaccaagtaatccagtccctcatagcactggtgaatgacccccagcctgagcacccgcttcgggctgacctagctgaagaatactctaaggaccgtaaa

SEQ ID NO: 25518 - DNA, 88 bp, Homo sapiens
gctttttttggaacaaagagccctgcattatcactggcactgcgctatgcaaattaatagctgggtctgattgcaggtctcctctgtc

SEQ ID NO: 25519 - DNA, 329 bp, Homo sapiens
  misc_feature (1)...(329): n = a,t,c or g
gatagaagatagacagagaatcacatccacgtctgtgtctcatccggtcactggcctctgtaggtcctactccagggcgggtgctggctgtgcttttcccaagctgcttttggctcagttctgcttcctggggcatagaaggaggaggccatctcactcaggagctggaggggtcctatgggcaccagccttctcttcccatgtctgtggacagagtccattaggcgcagcattggcaggtgagaagcatcctcactgttactgtcgctggagggaaagtggagaggtggnngcnnganctntnaccngcnagccntcacnnccacccc

SEQ ID NO: 25520 - DNA, 412 bp, Homo sapiens
  misc_feature (1)...(412): n = a,t,c or g
gcggcacgagccctggtaaacatctaatggttcctttgcaactcagctcactctttcaactatttagtgacccccaactatatgtcaggaatcacaaggccttttggggatccttccttggcttgccagcctaatttggatgatcttttctgctaccactgaacctccccctcacagaacttactacctcatgctcttctacaatcactgacttacctgcctcacttcccaattagaacacttagcttctcagagctagggtcaaatcgtagctatctctagaacttttcagcacttggcctatagcagatgttcactaaatgtctgctgaaaaaagaattcttcagattactcaattaatggaaaaatctangacaaaatcttntgatntcatattcatgttctccttttc

SEQ ID NO: 25521 - DNA, 377 bp, Homo sapiens
ggcttttttaaaaaaaaaatcataggcacggtggctcacacctgtaatcccagcactttgggaggctgaggcgggtgatcacttgaggtcaggagttcaagaccagcctggccaacatggtaaaaccccgtctctactaaaaatagaaaaattagccaggtgtgacggtgggcacctgtaatcctaactactcaggaggctgagacaggagaatcgcttgaacctaggaggcagaggttgcagtaagccaataccatgccgttgccctgcaacctgggtgacagaggaagactgtctcaaaaaaataattgcaaaaacatctcatcatgttttaagaaggtttaacaatttgttgtgttgggccacattcagagctg

SEQ ID NO: 25522 - DNA, 345 bp, Homo sapiens
gagaggactggaagggatcaccaaatctcaaagcaatgagaagcattcctaaatcccaaagtgcccacatgggaaagagataaaatgtacaaattagaaaaatgtggataaacagtcaaacctttatcctctagaattttggcaatgttgactaagaaacagagtccaagcagagaaggtaggaaccctccatagctctctgccctgatgtgtgggggaactaggaagaagtcctttgacctcaccaggcctcatgcttccctttaatgtaaagggaaggggtttgcccactttcctctttttggggttggtgagagggcaaaccctgatatttttactgtgaag

SEQ ID NO: 25523 - DNA, 361 bp, Homo sapiens
  misc_feature (1)...(361): n = a,t,c or g
gaataccctgtttagccttcaggcccaatgcaaacacccctctttgctgttggcctgcagctccccagtcacagccaatttctttcctaatttcacacttttttttttgtttttggagacagagtctcgctctgttgttcaggctagagtgcagtggtgcaatctctgcaacctctacctccagggtgcaagcgattctcgtgtctcaggctcccgagtagctggaatcacaggtgtgcaccaccacatctggctaattttttgaatttttagtaaagacagggtttcaccatgttggccaggctggtctcgaactcctgacctcaggngatcctcccaccttggcctccaaaggctggga

SEQ ID NO: 25524 - DNA, 477 bp, Homo sapiens
  misc_feature (1)...(477): n = a,t,c or g
tttgggnacaacnagagactctttggaaaatcccatacgacttactatagggaatttggccctcgaggccaagaattcggcacgagagaatatgaaatgttttaaatggaaaaaaactcataatgaaagcataatacttaaaaagaatcagtagatttaaaaaataaccagagaaaatttctagaaataaaaaagatcttaagtatagagaacataacaagcacagctcaaaattaatgaacttaaagatatatctgaagagattacctataatgcagcacagagataaaaagtgaaatacagatgagaaactgagacatggaagaaaataaaagggcccaagacacatctaataaatgtcataaaaggagaaaaaggaggagaagcatnagangaaaaagtggtttacaacttttcaaaattaaactcnattttangatgaggaatcaaaatgagtgtcaagtaggataatgaaat

SEQ ID NO: 25525 - DNA, 460 bp, Homo sapiens
  misc_feature (1)...(460): n = a,t,c or g
gggaggcaagaggaggagcaggtgctgaggtgtagagcccacaatcactgcctggagcctggccaggggcctgcagggggctgaatcagaggccacagggcagagggatgggatggggagtacttactccctgggaggcaaacaggcaaatgatccttctagccaaggtgggactaaacccagggctcaaagtcagcccttaattcagacttgttaaactccttggagttgttccttaagcanaagaatctcctgtttagttcacgcccaacaaaagtttattgaggaagtacctacattttcccaagcaggcatnaggaatacaaagtccagcaagacagggaccctgccacaaggggctcaggtcctacaacctcggtttactgtgcctcttcctccctcctgccaactttgaatacttgggtggaggtctgaaggtggtgcttcctaantcacatgg

SEQ ID NO: 25526 - DNA, 404 bp, Homo sapiens
atttggccctcgaggccaagaattcggcacgaggcgcacagccatgaagtataacctgggattggacctgagaacagctgcctatgttaatgccattgagaaagtcttcaaagtgtacaatgaagctggtgtgaccttcacatagatggatcatggctgacttcctcactatcctcttcacatgtaacttctgcagacctatcacaagtttacatgtaaccacagaaatccctttctctcctgactcattaataatggataccattctcaacaagtcaatccaagtcagcccgttaaggagaaagaaattaaggttagcggatcatgtacaagctgagtgtgaaagtagaaatcacctacaccagagagccattttggtattttgcctttaaataaaaagcctc

SEQ ID NO: 25527 - DNA, 485 bp, Homo sapiens
  misc_feature (1)...(485): n = a,t,c or g
gggttctggatctgccactgaatcatcgtgtggtctgggtaagtcagttcatctctctggacctcagtttctcacttctgctctgaagcagtggcatctgagctgagacatgaatggtgagaaggagccagccaagggaggactgttctatgcagaggcactagtaggaataaaggccttgtcttagtcagtttgtgctgccatcacaaaaataccatagaccagatggcttagccaataaatatttatttctcacagttctggaggctggtaagtccaagatcaagacacaagccgatctggtgtctggtgagagtctgcttcctggctcctagacagcctccttctgtcctcacagaaggaggctatattctccctggcacagagacngaaaaagggttggaagncnggnccaaattnggaaaattgggntaaaccagcctggtttaggcangggagttgcttaagnccatggccactttttt

SEQ ID NO: 25528 - DNA, 426 bp, Homo sapiens
gctgctagccacatgtggctatttaaatttagttaagatggaataaaagttaaacttagttcttcgcactacccgtatttcaagtgttcaaatgtggctcatggctaccatattggatagcacagaatccaaacatttccattggcacagacagttctattggacggtgctggtataacttgtaccacttctgttacacaaaagggagagacagagggaaaataccaagctcaccactccagtagcacaggaagagagaagaccgcaagacctacccatgctttctgccgttgaatgtgctatgaactccagttcccaaaggtggcccatgtaacaccctagaacctaaccaatcctaggtactcttcctcctccctggagtggatcaagggctggtgtgagcttgtaagtatctttctaagcccg

SEQ ID NO: 25529 - DNA, 334 bp, Homo sapiens
ggggatggcttcgtcctgggacgtgagtgcaaaatatctgggctctgtgctaccagtgctgccaggaaggagagggcaaaactgcgtttccattggaaagcaatgccagtgttcctgacgtgctgcatacatgtgagcagccgacacctcccacacggtcacaaggcactggctctaagcgaatttgctcagctcccaaagtggtgggattacaggcatgagccaccgtgcctggcctactcacggccatttctatgattctacctcacagaactacctcatggggttgcttgaagattaaatgtgatgattttgtaaagcagtgcctcgcaca

SEQ ID NO: 25530 - DNA, 343 bp, Homo sapiens
gctggagagagttatagggaaaggaacaggggcttggaacacacctcatggaaagccaggaacaagttccagctatgggtatggagaaatgagggcaggagggtcacatgaagattcttctagtgacttcccagcttggtcatctctgctgccctcaccgtgtcagctgtccttggagccgcagtcatgtggtctggtttgtacactggcatggggccctctcctctggcagagacacgccatgttggttcctctaacttccacgtggactttactccattttcccaagcatcagctcacccacctgctgctttctccctcagagcactctgcactgaggctg

SEQ ID NO: 25531 - DNA, 380 bp, Homo sapiens
cccagctacgagctggagaacctgagctcctctgaaatgggctacacggccaccctgacccgtaccacccccaccttcttccccaaggacatcctgaccctgcggctggacgtgatgatggagactgagaaccgcctccacttcacgatcaaagatccagctaacaggcgctacgaggtgcccttggagaccccgcatgtccacagccgggcaccgtccccactctacagcgtggagttctccgaggagcccttcggggtgatcgtgcgccggcagctggacggccgcgtgctgctgaacacgacggtggcgcccctgttctttgcggaccagttccttcagctgtccacctcgctgccctcgcagtatatcacaggcct

SEQ ID NO: 25532 - DNA, 327 bp, Homo sapiens
  misc_feature (1)...(327): n = a,t,c or g
ctgaaactttttgagtgccaacatgactctcaaatgctcattggcacattttggatttcagatttgggatcctcaactggtaagtataatgcagatattccaaaatccaaaaaaatctgaaacccaaaatacttctggtcccaagaattttggataatggatactcaatctgtagaaaataaagtaacctttagtcagtttaaattggtcattaaaaaaaaaatctttatcattttaatagaacagataaggacacagaatagttgagaacttactctaaacaaattgcagaaatcattctgttaacatggggttctttcanacatt

SEQ ID NO: 25533 - DNA, 483 bp, Homo sapiens
  misc_feature (1)...(483): n = a,t,c or g
atttgaantcccttnatttgaacacctttatgactgattacgaatttaatacgactcactatagggaatttggccctcgaggccaagaattcccgactacgtagtcgggcagatccctttaccacattggtcagatacccctgaagaacagggagagcccaaaaatcaggtcccgagcagctcagtccccaaaatagggccagcatgggcttctgattgggatgaggaaaagactgaggaacgaggaaacaagggaaactgaaggcccatccggtggcctagccacacctggcaggggcacggagtgaatagctgagtcgccagtggaaaagatgtttccagcttcacgtgaagcctggctcgcattggcttgggccctgggtggggctcagcttgcaggccattcctggggcagctgggtgaggccagccccagcagggggacaccggcacctcttcacacgttatggtggtgtcctctgga

SEQ ID NO: 25534 - DNA, 523 bp, Homo sapiens
  misc_feature (1)...(523): n = a,t,c or g
gctatgactgnnnntttgnnnaacagctatgacatgattacgaatttaatacgactcactatagggaatttggccctcgaggccaagaattcggcacgaggaaatcgtgtgcagaagtaaagcagcaggattcataattttgctggggtaaaccctaaggcagttattttgttaaattccagaattccttaactctgttgtagagtagcagatcagttcccaggaggtgtgactgtggatgtagaatgttaggttttttaacagctagactcccaagactgttagatagggagtcagtggtcagagtctcactttggacacattagtttgaggagccgtggtcagagtctcactttggacacattagttcgttggctgctgttaaaaaacattaaaaggcagtggtctctcctggtcaggcttagaatggaggtgtgcggagcaaggcgggaaacttgcctgactgcattccagcctgggagacagcaagacttcgtgtaaaaaaaatanatanntannaagc

SEQ ID NO: 25535 - DNA, 401 bp, Homo sapiens
gcagatctcagtgtcaccgctgatggcttctcagcctcctacaagaccctgccgcggggcactgccaaagaagggcaagggcccggccccaaacggggaactgagcctaaagtcaagctgccccccaagtcccaacctccggagaaaacagaggaatctccttcagcccctgatgcacccacctgcccaaagcagtgccgccggacaggcaccttgcagagcaacttctgtgccagcagccttgtggtgactgcgacagtgaagtccatggttcgggagccaggggagggccttgccgtgactgtcagtcttattggtgcttataaaactggaggactggacctgctttccacccactggtgcctcctgaagtttacgtgccttgcaagcaatgcccccat

SEQ ID NO: 25536 - DNA, 453 bp, Homo sapiens
  misc_feature (1)...(453): n = a,t,c or g
ttgaacaccggtnnntggnnattacgaatttantacggactcactatagggaatttggccctcgaggccaagaattcggcacgagatccctttctctcctgactcattactaatggataccattctcaacaagtcaatccaaatcagcccgttaaggagaaagaaattaatatacaagctgagtgtgaaagtagaaatcacctacaccagagagctattttggtattttgcctttaaataaaaagcctcctccatatggctgtgcagccttgctctgtggcttttcccagcacaatcagtgctagtgctggggaagggacagtcaagagcagtcagttgcttacttattttgctctggatgagtctgggacacgctgtaactttaacacatttaagaagaaggtgtgtggccttttcagaaggtggcatggtcctcaagtgagttcttagtat

SEQ ID NO: 25537 - DNA, 381 bp, Homo sapiens
ataattgagggtgctaattttcttaagatagtgcctaaaacactaaatttcagtcaagtcgtaagtaggattttctttttgatcaacagggacaaaaacatctttagaattaaaaacatggttgttttggaatttttgcttctcttaccgtttgatagaaattttcatcctaaaatacatgtacaaagtttggaaagatgaaaaaaagaggtagcttttagattgcaaattggaaatgtaaaactcatgaaatttaagcaatataggtttagctatctgtgtttattttctaaaataatacctgagctggttaaatgatttctctccatcttagctaattctgtttaaaactatgtcagaggcctgcaggctgtgagttat

SEQ ID NO: 25538 - DNA, 367 bp, Homo sapiens
gcggagcggcggcggaccacctccaggggctaagtgatggatcttgtactccgtgttgcagattactatttttttacaccatacgtgtatccagccacatggccagaagatgacatcttccgacaagctattagtcttctgattgtaacaaatgttggtgcttacatcctttatttcttctgtgcaacactgagctattattttgtcttcgatcatgcattaatgaaacatccacaatttttaaagaatcaagtccgtcgagagattaagtttactgtccaggcattgccatggataagtattcttactgttgcactgttcttgctggagataagaggttacagcaaattacatgatgacctaggag

SEQ ID NO: 25539 - DNA, 359 bp, Homo sapiens
ggggaaggaatgttgaagtagaaaggagtggagaactcactgtgagatctgactggagaacctggtggctcttcgccagtataggttcctccaggacaggttctttttgagcagctaaagcataatataccgataccaattcagagtttgctcttttgttcagtgaaaaagtgaggacttcaactttaaaaatggatggagaactgccggattacaaggcaaagacgtaaaagtcgccaagaggtcaagtagcactggggacaggctatctactggccagtggaatagtgcagtaaagttcatacagagaccaggagtcttagaaaactgacctagagcaggagagacaggtcacatat

SEQ ID NO: 25540 - DNA, 346 bp, Homo sapiens
  misc_feature (1)...(346): n = a,t,c or g
gaacagacactttacaaaagaaaacatacaaatgcccactaggcacaagaagagagaccctcaatcatcactagtcatcagggaaatgcaaacaaaaaccaaggggagatactacttcatacttactagaatggctaaagttaaaaagatcgacaatactacgtgttaataaggatatgaaaaactgaatagccccaaattgcaaacaaccaaatgtcctatttttgaatgggtgaacaaactggggcattcccaaattggggaatacttctcaggaattcaacatgcatgaatcccaaagtcattatgttaagtgaaagaagncaacaccaaagataatacaaga

SEQ ID NO: 25541 - DNA, 544 bp, Homo sapiens
  misc_feature (1)...(544): n = a,t,c or g
gtnnnnnnccccccttgnccaccncttggacatcnttacgaatttaatacgactcactatagggaatttggccctcgaggccaagaattcggcacgagcggcacgagaggagaaagaaattaaggttagcggatcatgtacaagctgagtgtgaaagtagaaatcacctacaccagagagccattttggtattttgcctttaaataaaaagcctcctttatctggctgtgcagccttgctctgaggcttttcccaacacaatcagtgctagagctggggaggaacagtcaagagcagtcagttgcttgcttattttttctggatgagtctgggacacactgtaactttaacacatttaagaagtaggnnnnnnnnnnnnnnnnnnnnnnncatggtcctcaagtgagttcttagtattttatatcagcaaaataattcaattttgcaggttgcaaacaaatataaaacctgtttctgnttatgaatattattcttttanaatagaataagtcatgctgctgtantaaaatngcctttaatcact

SEQ ID NO: 25542 - DNA, 494 bp, Homo sapiens
  misc_feature (1)...(494): n = a,t,c or g
gtaanntntaanntganntgnatnngnnagtntannnnangtntnnttannanatanggagnnattgattnnntgtangacncatncancgnttacaaatnaananganncantatagggaatttggccctcgaggccaagaattcggcacgagaaacaatattgtggagtattttgccttgtgccctgattaataccttaggaggaaatgatcccaggggaagcctatattgaacgtctccttctgaatcactttgcttaaatagagtttcaatttgcctcccaaaagagccctgcgcttactgcgaccactgaaccatttactgcctgattgtaggcacaggtgcactgatttttcagtccaaatatccatgtgcacaaatttatacctggttaagaaatcttgtcctaacactttccttgctctcctctatccaatagcccacacccaaaatgacacccccagtaagtctccataggaggtatgcccccag

SEQ ID NO: 25543 - DNA, 457 bp, Homo sapiens
  misc_feature (1)...(457): n = a,t,c or g
ggtgtgtgtgtgtgtgtagagatgaggtttcactatgtttcccaggctggtctcgaactcctaagctcaagcaatccacccatctcggcctcccaaagtgctgggattataggcataagtcactgcacctggccatggcatgattcttttatctctcctggggctgaactccctacatttgcttacacctggcctggaagacccaagatccccctcacaatactacttctatacccagggccaggtgatgtgttggtttagttcaggactgagctttattatgcatctcccagcaggcaacctggggcttctgatactgcccgggagagctgggggaatggagctgttcctgacttcctacacaaggagtggctaatcttctgtcctttttctaaccaaagccatctctggaccaccaagagcaagtgggcagaggtccctcatcctggcangagag

SEQ ID NO: 25544 - DNA, 319 bp, Homo sapiens
catccttcctctaccatccctggttagaatggcgttctcactcacctatccacgctgcagatgagggtgaagaagtaaaaccatttaaaacatgcatcgcagcaaaccaacatggcacatgcatacctgtgtagcaaacctgcacgctgtgcacatgtagcctagatcttaaagtataaaaagacaaaacagcaaaaaaacatgtgtaaccaacacacaaaaccctacacaaccaaacggcactggtctctttcagagccttccctcaccaagccctaccctgtccccagagatgaggccatgacatgacagtacttta

SEQ ID NO: 25545 - DNA, 355 bp, Homo sapiens
gacccagaacagcgactgacatttagtagccactcagtaaatgtctgttgaataaatgtatcacttccaggtttttagattagcatatgcttggccatccaggtaggaggaagagaacaagatcttatatgtggtctaaacttaataacttttggactggtccaattaaatggtcagtttggaagatgataaccacataactgaatatggtctgaagaaaagctggtatttgtatatgcattttagttagtagtcttcaataatacaaaaaatctctttttgttggcattaagctaacaaaatccctttgctaaacagcaggtgtttattttgtttatggaaaggcaaaataatc

SEQ ID NO: 25546 - DNA, 473 bp, Homo sapiens
  misc_feature (1)...(473): n = a,t,c or g
ttgntttganaccctancagctatgacatgattacgaatttaatacgactcactatagggaatttggccctcgaggccnagaattcggcacgagcatatataccaaacactacaaacaattcatatttacagaaaatttaaactattttataaaaactgcacattacatttttggtgaaatatagtgcattctgaggatagcatatttcatataatagaaaaagaagcattctctaggtttgcatgtagctatagtcactatattttgcctttcatatagaaagttttaaagtattatgtttaaaaacatttattggctgggtgtggtggctcacacccagcactttgggaggccgaggcaggcggatcacttgaggtcagcagttcaagactagcctggccaacatggngaaaccccatctctactaaaaatataaaaattagccaggcgtggtggcgggcgcctgtaatcc

SEQ ID NO: 25547 - DNA, 366 bp, Homo sapiens
gctgctaaaatgcctgtgaatgagagagcccttcactgacctacagtaagaatcaacaccctccactcccagattcctcctcctgctaccacctcttcttgtcaatgacacttgctaccacctggaataggacaaatacgtttgaatagagccaatttttcatccattcaaacgacagtgccataaagttagaatctttcatcaattcatctcctgccatctcctcactgcctacagcagtgcctagtgcagtgcagccaatcaaaaactgtgtaggcaaatgaatgaataaaggaaaaaacttattgtcatacaaatatagaaaatgctttttaaggggtttgttatgacaacaataaatttaaa

SEQ ID NO: 25548 - DNA, 491 bp, Homo sapiens
  misc_feature (1)...(491): n = a,t,c or g
tgaatccntnagctatattggaatnccaacagctatgacatgattacgaatttaatacgactcactatagggaatttggccctcgaggccaagaattcggcacgagggagattctggctgaatggggagattttaaaaaataatcaatttcttgaaacttgagaaggttttaaaatgaagatacttaggggttttgctaaatgagaagattttagctgttcttgccatgcacaaaaaaatgggtaactatgtggtattatgaatatatttattttcttcactatatagtaactaatactttactttctgtatgtatcttagaacatcatattgcatatcttaaatatagacaataaatgtatttttaaaagttaacgtgatgaagctatcttatctcagatttaacactagaaattgctcattttttttttttggctggagtncagngttgcnatcatggctcactgcagcttcaacctcctggggctcct

SEQ ID NO: 25549 - DNA, 949 bp, Homo sapiens
atgaacctttgactgacacgaatttaatacgactcactatagggaatttggccctcgaggccaagaattcggcacgagtctaaatcatgtcagctatggccgtttgaccttcaaatatgaaagggattctaactaccacttgctcatgtctgttcaagagagtttagaaagaaaatttggaaagcatggtggaactattcccattgtacccacggcagagttccaagacaggatatcgggtgcatctgagaaagacatcgtgcactctggcttggcatacacaatggagcgttctgccaggcaaattatgcgcacagccatgaagtataacctgggattggacctgagaacagctgcctatgttaatgccattgagaaagtcttcaaagtgtacaatgaagctggtgtgaccttcacatagatggatcatggctgacttcctcactatcctcttcacatgtaacttctgcagacctatcacaagtttacatgtaaccacagaaatccctttctctcctgactcattaataatggataccattctcaacaagtcaatccaagtcagcccgttaaggagaaagaaattaaggttagcggatcatgtacaagctgagtgtgaaagtagaaatcacctacaccagagagccattttggtattttgcctttaaataaaaagcctcctttatctggctgtgcagccttgctctgtggcttttcccaacacaatcagtgctagtgctggggaggaacagtcaagagcagtcagttgcttgcttattttttctggatgagtctgggacacactgtaactttaacacatttaagaagtaggtgtgtggccttttcagaaggtggcatggtcctcaagtgagttcttagtattttatatcagcaaaataattcaattttgcaggttgcaaacaaatataaaacctgtttctgtttatga

SEQ ID NO: 25550 - DNA, 372 bp, Homo sapiens
gcggcacgaggctttgccaccgtgccagaaagctaactgcaagtgagggaacatgccttttcactcaatttctcttctatgttttttttttcctttacttctagagatgggactaggctagaccagtgtgtttatatttcctcctaggccagcttcaaatgaaaatgtgtaggaaaaatctccttttaaaggaatcaaaataatacttagagaacatagtaaactgtcatttgcttgtaagctgtttagctaaagttatatggttagattagaaaatgtactccctctaaagggggggtaaaattgctgtattcttgatctcagcaaaatgccaactggaggggggaccatgggtgggctgaattttttact

SEQ ID NO: 25551 - DNA, 324 bp, Homo sapiens
caccattttgcccaggctggtctcaaactcctgagatcaagtgatccacccacctcagcctcctaaattgttgaaattacaggtttaagccactgtgcctggccttgacctcacaattttcaatgcagccgtatcaagttgtaaaactttctattttgttatgaaataatgtgtaaaatagatgtttctgaatctttccctgacgttcactccatccccaaattcctgtatggtttaaggatcgatggaggattactagtacacgttactcagtagtaaaaagtttcatccatgggaatagtttttttaggctgtgtcaaaatt

SEQ ID NO: 25552 - DNA, 306 bp, Homo sapiens
  misc_feature (1)...(306): n = a,t,c or g
ggatagcattaggagatatacctattgctaaatgatgagttaatgggtgcagcacaccagcatggcacatgtatacatatgtaactaacctgcacattgtgcacatgtaccctaaaacttaaagtataataataataaaaaataataataatagttattgaaataaaaataataactggaattattcatatggttataataaataattgataagaaaacataccaaaaanggccggcnnngggggttnacccnngaaatcccagnntttnggnaggccanggnnggngnntnncnnggtcagnaaa

SEQ ID NO: 25553 - DNA, 501 bp, Homo sapiens
  misc_feature (1)...(501): n = a,t,c or g
tttntcanctntngaatcccctngtttggaacaccctanntaatacgnctcactatagggaatttggccctcgaggccaagaattcggcacgagcgcgtaatggccgctggctatcttgggggagccagctgttggactatgccccactgccaggaaacaggcgccggaaggttctctgacaagatctcgctttcctagggcggtgaaggcgttcaaaggtcgggaaggggcgctgggagaagcggggtagcgctgagccatgctcgcgaactgtgggtctgtctgtgaagagacccagtttcgtgggaccacggtggcgcctgcgctgggaggtgagcttgtgacagagcgaaaactacaattcccagcattcctgtggtgccagaactaccttgcccgaaagcctgtgcgagatttaccccgtcttccgctncttcaccggaaaactttgaggacatgaataagtcgccaggcttggcngntcttgttntcccaaggca

SEQ ID NO: 25554 - DNA, 235 bp, Homo sapiens
gaattttttttttttaagaaatgaaaattgttttgtactttaagtcactggatagtatttgatactatcagtatcagtaattatattcagtatattcggtaattataagcacctccacccccaaatttacccagttaagtagaaagaaggaaagaagacttggtagtattaataagttgttgttggaggagatgctcctattacattatgtctctattttctttttttttttttt

SEQ ID NO: 25555 - DNA, 505 bp, Homo sapiens
  misc_feature (1)...(505): n = a,t,c or g
cccacagctatgacatgattacgaatttaatacgactcactatagggaatttggccctcgaggccaagaattcggcacgagcaaactggaagaatttccagaagccaggcacgtggcggggctccctggatgagagttctctgggctttggttatcccaagttcatctcccaccaggacattcgaaagcgaaactatgtgcgggatgatgcagtcttcatccgtgctgctgttgaactgccccggaagatcctcagctgagtgcaggtggggttcgaggggaaaggacgatggggcatgacctcagtcaggcactggctgaacttggagagggggccggacccccgtcagctgcttctgctgcctaggttctgttaccccatcctccctcccccagccaccaccctnaggtgcctccaattggtgcttcagccctggcccctgtggggaacaggtcttggggtcatgaaggctggaaacaagtgaccccagggcctgtctccctt

SEQ ID NO: 25556 - DNA, 378 bp, Homo sapiens
gctcataagaccctggtttactgcatcagcttggagtggcaggccccttgttctcctaaatgcaagaatcagaaggcacttagtgacaactacatatgctgagcaatgggggaaaaaaaagatactgcctgctttcaaagggttgtctgtaatactaaattctgtgttcatgattcagtcatacccctgaacaaagttacttttttctttttttgagacggggtctcactgtcgcccaggttagagtgtggttgcgtgatcttggcttgctgcaacctccacctcctaggttcaagctattctgctgcagcctcccaagtagctgggattacaggcacctgccaccatgctcagcaactttttcttgtatttttagta

SEQ ID NO: 25557 - DNA, 458 bp, Homo sapiens
  misc_feature (1)...(458): n = a,t,c or g
tgnnnnnnntttgaaacgctatgacatgattacgaatttaatacgactcactatagggaatttggccctcgaggccaagaattcggcacgagccagaaattggattttgccaataatgtccagctgtccttgactttagcagccctatctttgggcctttggtggacatttgatcgttccagaagtggccttgggctggggatcaccatagcttttctagctacgctgatcacgcagtttctcgtgtataatggtgtctatcagtatacatccccagatttcctctatattcgttcttggctcccttgtatatttttctcaggaggcgtcacggtggggaacataggacgacagttagctatgggtgttcctgaaaagccccatagtgattgagtcttcaaaaccaccgattctgagagcaaggaagattttggaagaaaatctgactgtggattatg

SEQ ID NO: 25558 - DNA, 367 bp, Homo sapiens
ggaaagagtgagagaagatggaagggaagggccagtgcaactgggcgcttgggccactccagccagcccgcctccggggcggaccctgctccacttccagaagccaggactaggacctgggccttgcctgctatggaatattgagagagattttttaaaaaagattttgcattttgtccaaaatcatgtgcttcttctgatcaattttggttgttccagaatttcttcataccttttccacatccagatttcatgtgcgttcatggagaagatcacttgaggccatttggtacacatctctggaggctgagtcggttcatgaggtctcttatcaaaaatattactcagtttgcaagactgcattgta

SEQ ID NO: 25559 - DNA, 441 bp, Homo sapiens
ggagagagctagcaccataataccctgatcttgaacttccagcttctaaaactataagactgtgaatttctgttgttgaagctgcccagtctgttgagctacctagcctttgttatggcagccccagcaaagtaatacgccctctacaccacacaccacacccatagtctcaccatcgagactatctcacactaatgaaggacattgtgctttcattcaggccaaaggaagctcgtggattcccacacaccaggctgtggcacagcagggcccaggcctccctgtagtatgtggggatgcgacatgtcgaggtctcttcaaaatgccgctgggagcttttggtggatgaagtccagttattgcctgaatcgcaaagctcctttcacacagatgctgctcatcaatgaaaataattgttggagaacagttactcgttgaaat

SEQ ID NO: 25560 - DNA, 336 bp, Homo sapiens
gaaatagtgaacataagcatcattttcagatgttttgtcatgtccctttgtaatcccttcctctcttccttctgtttccccctcccaagcagctactaatctaccaatacagattagcttgtacattttagagttttatatcagcagggtcgtgcagtatgtacccattggaaaatctgtcttcttttactcagcataattattttgagatttattcatgctgttatgggtatccattgattctgtttcactactgaatagtatttcattgtatgggtataccacatcaatgtgtttatctgtgcatctgttgatggacctttaggtatttgcaat

SEQ ID NO: 25561 - DNA, 374 bp, Homo sapiens
gcttgacatgtagtaagtgctcatgaaatgtttgttcattgaataactgaattcaagaaccagtagacctctggatgaccctggtttcctgtttctgtggaccacaatgctctggggcagtgctgcgtatcagaggttcaagccatggctggagcagccacccctgaagtagacaccctaatatccttcccactgagttcctagttctacatgctggagtgaggctgtcaactctgaagtgtcagagtgtgtctgaaaatgattgctgtgaaaaataaaatatttcacattgcaggcctcatttttaagttatttttcccagagaacattttcatattttagaacttatggtaatgttaacactttctatttgc

SEQ ID NO: 25562 - DNA, 463 bp, Homo sapiens
  misc_feature (1)...(463): n = a,t,c or g
anaacccttttnannnnatttgnnnaacngctatgacatgattacgaatttaatacgactcactatagggaatttggccctcgaggccaagaattcggcacgagacatttgatcgttccagaagtggccttgggctggggatcaccatagcttttctagctacgctgatcacgcagtttctcgtgtataatggtgtctatcagtatacatccccagatttcctctatattcgttcttggctcccttgtatatttttctcaggaggcgtcacggtggggaacataggacgacagttagctatgctgatacccttctgtgaggagttgaatttgaagaccacttggctgtttcacaaaaccagaagtaattacagggtgttcctgaaaagccccatagtgattgagtcttcaaaaccaccgattctgagagcaaggaagattttggaagaaaatctgactgtgga

SEQ ID NO: 25563 - DNA, 371 bp, Homo sapiens
  misc_feature (1)...(371): n = a,t,c or g
gagaattcaaaaaaaaatttttttagtcagtactactaaggcagacacactgattactaggtacaaatcaaaccttgatgctaaaactcttcatcattgtaatttcaaagcacttacctgcttcaaaacattgtaaactaagactgaacacctgtatagtttaaaagcaacactatcaatagcatttcagccattttgccagccatgtgtaatcacaactgcagaaataaggagaaaacccctgtttttttagtttagctaattagatctgtaacatcactgggattgctctgaatgaatcctgaaagtttgttttttataagcaccctcaccacatgccatagctttggctcttttanacacctcgatgg

SEQ ID NO: 25564 - DNA, 536 bp, Homo sapiens
  misc_feature (1)...(536): n = a,t,c or g
tttnnctctntngntttcncttccanatgattacgaatttaatacgactcactatagggaatttggccctcgaggccaagaattcggcacgagaaaatctatcagggtaagttaatatgagtatttgaaagtttcactgttaaatttatattatcacatattaaatgaaagaactgttaactgtgtactgaattcaaaagttaatatagcttctctcttttttaagaaatgggacacaatattaaaaaattaaagagttttcaaatatttatacttaaatttatatctaaggaattatatatagaatgcatacctttcaagtagatactattgttgctgttaagattattgtcaacaaaatttaaatacacagactattaaataaagaaattaaaacaacaaaaaataacctctcggccaggtgtcctggttaacctgtaatcccagcacttcagaagcttgaggcaagaggattgcttgagaccaatagtttgagaccagcctgagcagcaaactgagactctatgtgtatcaaa

SEQ ID NO: 25565 - DNA, 457 bp, Homo sapiens
  misc_feature (1)...(457): n = a,t,c or g
ttgnnnnnntaacagctatgacatgattacgaatttaatacgactcactatagggaatttggccctcgaggccaagaattcggcacgagccatgaaacagtatccaggctagcttgttagcttgcacagatggtaacatcccagactcttgaaagactctgacatatagccagcatagtaaaatatgagtaagaaataacaggtaacaggactaaagggcaagatagaaaactggtattatttatgaacagtaactgtccgtataaaaaaatcccaacagacatgctacaaagtatgaattaaggttactagaaataaagttgctagataaaagactaatacaagatagaattgtaagtgcaacaaagacttaaggctttaaaaaatatttaaaatagtaacaagtaccctgtttaattacttctttatatgnntaaatacttnttnnnncccctat

SEQ ID NO: 25566 - DNA, 475 bp, Homo sapiens
  misc_feature (1)...(475): n = a,t,c or g
ggagaatttatagactgcatatcgctatacttgatggaaattaaactatttttattttgaaagaagttaatttatattttaagttctgtatgtttttctccttttacctgagttcttttcagtcattttgtgttgttaagttttttttaggttgtcatatatttttcttttttaggttaccatcctagtttactgtaaaacatttcttagagcaatagattgggaaagagcctcgagatatcttttagaccaaatcctagatctcagaaagccagtggacattcagtaaatacttgttggccaggtgccgtggctcacgcctataatcccagcacttcaggaggccaaggtgggaggatggcttgagcccagaagttcaggaccagcctgggtaacataatgggattccatctctacaaaantagnaatannnaaattagccaggaatggtggtgtgcacctgtagtcccagcta

SEQ ID NO: 25567 - DNA, 459 bp, Homo sapiens
  misc_feature (1)...(459): n = a,t,c or g
gggaaatttcaaaaaccattgcctaggatttttttcaagatccagtatgaagcattggggtcaaaacaggttttcaagtcagagagacctgggttcaaatcccacctttgacagttactggctatgaccatgggtaactctttaactgtctaagcctcaattttcccaaaggtaaaatatctggttgtaagaattagagatgatagaaaccattctagttattatgctttagtagaattaaatgatcttcacactcctacctcctttctttgctcaattgaaacaatgtccaaagctttctattgctggccctgttgtgtagaaatcatgtgttttaggcatcctcttatggatttatttaagggaagaagtcctcaactcatttcagtttgtccttttccaactgaaacaaaagagtccatagtattccctgatttangtatcttaagtggcatgtaa

SEQ ID NO: 25568 - DNA, 715 bp, Homo sapiens
  misc_feature (1)...(715): n = a,t,c or g
acagctatgacatgattacgaatttaatacgactcactatagggaatttggccctcgaggccaagaattcggcacgagttcttctgcatggtgggtacccccatgctgtggcacggcttcagctgtgattggcctactgtacccctgtatcgacagtcacctcggagaaccccacaaatttaagagagaatgggccagtgtcatgcgctgcatagcagtttttgttggcattaaccacgccagtgctaaattggattttgccaataatgtccagctgtccttgactttagcagccctatctttgggcctttggtggacatttgatcgttccagaagtggccttgggctggggatcaccatagcttttctagctacgctgatcacgcagtttctcgtgtataatggtgtctatcagtatacatccccagatttcctctatattcgttcttggctcccttgtatatttttctcaggaggcgtcacggtggggaacataggacgacagttagctatgctgatacccttctgtgaggagttgaatttgaagaccacttggctgtttcacaaaaccagaagtaattacagggtgttcctgaaaagccccatagtgattgagtcttcaaaaccaccgattctganagcaaggaagattttggaagaaaatctgactgtggattatgacnaagattancttttttcttnaggaatcnattta

SEQ ID NO: 25569 - DNA, 326 bp, Homo sapiens
ggctcccgggactggggggtttgtctggcatagccatgctggtagcaagagagaaaaaatcaacagcaaacaaaaccacacaaaccaaaccgtcaacagcataataaaatcccaacaactatttttatttcatttttcatgcacaacctttcccccagtgcaaaagactgttactttattattgtattcaaaattcattgtgtatattactacaaagacaaccccaaaccaatttttttcctgcgaagtttaatgatccacaagtgtatatatgaaattctcctccttccttgcccccctctctttcttccctctttcccctccag

SEQ ID NO: 25570 - DNA, 398 bp, Homo sapiens
  misc_feature (1)...(398): n = a,t,c or g
gcttattaaccttgatgtattttcatgcaatagttttaaagtcatctacatggttttataaagcatcagactgttttcagacatgctactttcattctcaactgacaactgccaagttaattgcctccacttcagcatatcactatgaatactggtaaaccttttagctaggacaccaagcagtatatatatatatatttcccctaaattgtaacttaaaaccaagtggggttgaccatcactaaagagatatgaaaccatacaaaggcaaaggcatattacagaacagtaggacggctagactgttattggagacagagaccagtgttacaaaaacctttgaagaacgttgttttggggaccatgcttttaagcccatctgctttctcaccgntatt

SEQ ID NO: 25571 - DNA, 537 bp, Homo sapiens
  misc_feature (1)...(537): n = a,t,c or g
aacccctttgacatgantacgaatttaatacgactcactatagggaatttggccctcgaggccaagaattcggcacgaggtttcactgtatgttatccaggctggtcttgaactcctgacctcagttgatccgcctgcctcggcctcccaaagtacagggattacaggcatgagtcaccacacctggcctggtcatttacatttttgccagaatgaaagataagcaaaagttacacatgcacacatatacatacatgcgtgtgtagagattataggtatatgtgtatgggcatgtatgtatataccatttgtattgtcctccattttaactccttattttgcccatatttttgttgtctctcctaagttattttttagagacaggatcttgctctgtcacacaggctggtatacatgggtgagatcatagctcactgtagccttgaactcctaggctcaaaagatcctcccatcttagtttctctcaagtagctaggactacaggcacacagcatctcaagatcctggcctcaaggg

SEQ ID NO: 25572 - DNA, 328 bp, Homo sapiens
gctcgtggtctgccactatgtgacagttacatggtttttaaggcttcttagccaatgaagactagattttgctccctgtgaccaaaatccatgccttaaattttctgatttctctcttagcacctagcaaagtaacagtaaggtagcaggactctgctctttgttaatagtaaactcaaaatttattgatgtttaatctggctctaatccaatggaccagaccagaattaaataaccaagaacagtgagaaatgcacatgttgtgatgtcagcaaggccacttgctgaccccaggcatcattgcaatgttccttatttcagtactgga

SEQ ID NO: 25573 - DNA, 391 bp, Homo sapiens
gaaagaagaatgtgggtcagttcagtggctttccatttgaaaaaggaagtgtccaatataaaaagaaggaagaaatgttgaaaaagtaagttatttttataaatactgtattttgatcaatatgctttaagtttattttttaatgttaaatcacattcgggccaggcacagtggctcacacctgtaatcccagcactttgggaggctgaggcgggcgtatcacctgaggtcaggagtttgagaccagcctgaccaacatggagaaaccccgtctccactaaagatacaaaattagccggctgtggtggcgcatgcctgtaatcccagctacttgggaggctgaggcaggagaatcgcttgaacctgggaggtggaggttgcggtgagccaa

SEQ ID NO: 25574 - DNA, 525 bp, Homo sapiens
  misc_feature (1)...(525): n = a,t,c or g
atttgaanaccgntttgacatgnttacgaatttaatacgactcactatagggaatttggccctcgaggccaagaattcggcacgaggaaagggggcatattctctgcagaatttctgaaagttttccttccatctctgctgctctctcatttgctggccatcggattggggatctatattggaaggcgtctgacaacctccaccagcaccttttgatgaagaactggagtctgacttggttcgttagtggattacttctgagcttgcaacatagctcactgaagagctgttagatcctggggtggccacgtcacttgtgtttatttgttctgtaaatgctgcgttcctaatttagtaaaataaaagaatagacactaaaatcatgttgatctataattacacctatgggatcaataagcatgtcagactgattaatgtctactgnaaaaatttggtaagtaaattttcatttgatattagatataaatatctgaatataaataattttaatatactagcatgatg

SEQ ID NO: 25575 - DNA, 372 bp, Homo sapiens
  misc_feature (1)...(372): n = a,t,c or g
gggcagggaaacagagacagggtgtatggacaggttttcatttgtctgggaagaaaagagaactaggaaattcaaggaaggggacatttaagacgggagaggttccatatctcaaatgtgtggatcatcccagcatccccagagggagagaaggaggctcaggtgcaggtaatattgtttaaagtggggagggtgggcaaggggagagggaggccctcccatggctccattgttggggagcagaggtttggggagagagaagaggaatattgaagcagcgatggcagagccagggagaccctttccctgggaatccggggtgaaaacggtcatcgtgtcancgtcaggaaagaggagactctatccttcatc

SEQ ID NO: 25576 - DNA, 584 bp, Homo sapiens
ggggcttctgaaacagatacccatagcattggagagaaaaacagctcacagtctgaggaagatgatattgaaagaaggaaagaagttgaaagcatcttgaagaaaaactcagattggatatgggattggtcaagtcggccggaaaatattccccccaaggagttcctctttaaacacccgaagcgcacggccaccctcagcatgaggaacacgagcgtcatgaagaaagggggcatattctctgcagaatttctgaaagttttccttccatctctgctgctctctcatttgctggccatcggattggggtaggtgatgtgactgtgtgactcctgtcatggcatgtcgtggggcgattctgggttgcagtgatttattcgtaacctgtttcctgaagtccagatcatcagttacagcttggtgcattttcacaaacacccacgtagtcactgttcaggtccagaaaccaccagcctgcagcccccaaaggccccagcacaggcgccctgctcgtgccgaattcttggcctcgagggccaaattccctatagtgagtcgtattaaattcgtaagcatgtcatagc

SEQ ID NO: 25577 - DNA, 312 bp, Homo sapiens
  misc_feature (1)...(312): n = a,t,c or g
gggcaagtcccaagaaaaaggacttttctcttccagcaccacagtgctattgtcacactttaattatcttccagcctctaattattagagtttaatcttccctccatattcaaatgtcaaggtaaaagattagaaagatttttgtcatctaaggagcttggagtttatccattagggcttggggaggattgtttnttatgggaggcatctganaggattagaaaganaccccgagtnaggccagggcacagtgggtcacgcctgtaatcctagcactttgagaggccanggnnancggnttgcttgcgtcca

SEQ ID NO: 25578 - DNA, 416 bp, Homo sapiens
gcctgggatcttgtagtaccagggcctgctctggaggctcagattcgtgtgtcacttcttgtctcttttgaaaggtaactggagagctggacactttcctgtcctctctctttccttgtagccttcctctctcagagatggcctgctatcaaatgccaagggcacagtcagctgggcttggtaaagggcctgagatgagagcttggggactttcccactggagtccatgatagtccagggtgtagacagaagctcttggatctcacagctttggaaaccgagtcctgtttctccaacaggccagtgcggtgacgggcacagacctgctatcctctctatttgtgtgtccaccgattccctggcacagggggtctttgttacaaaatctctttgctgggtgctttgaaggagcacgt

SEQ ID NO: 25579 - DNA, 395 bp, Homo sapiens
gaattcctcgtcttaacatagtggaaaatcatactgagatgctatcatgaagacagaggaaaaataattttagaggtcaagtaaactaagtagattttaaaaagaccagtatagcctaggcacagtggctcacacctgtaatcccagcactttgggaggctgaggcgggatcgcttgagcctaagagttcgagaccagcctgggcaacatggtgaaaccttgtctcatatacaaaaaatataaaaaattagctgggtgtggtaccacatgcctactctcaggtactcaggaggctgaggttggggatcacctgagcccggggaggttgaggctgcagtgagccatgattgcaccacgtgctctcacaacctgggtgacagagtgagaccctgcct

SEQ ID NO: 25580 - DNA, 405 bp, Homo sapiens
  misc_feature (1)...(405): n = a,t,c or g
gcaattggctctgcttcagagggtgcccagagctccttgcaagaagtttaccacaagtctatgactttgaaagaagccatcaagtcttcactcatcatcctcaaacaagtaatggaggagaagctgaatgcaacaaacattgagctagccacagtgcagcctggccagaatttccacatgttcacaaaggaagaacttgaagaggttatcaaggacatttaaggaatcctgatcctcagaacttctctgggacaatttcagttctaataatgtccttaaattttatttccagctcctgttccttggaaaatctccattgtatgtgcattttttaaatgatgtctgtacataaaggcagttctgaaataaagaaaattttagaataatnaannntnaannaaaggg

SEQ ID NO: 25581 - DNA, 344 bp, Homo sapiens
  misc_feature (1)...(344): n = a,t,c or g
gagtggctcacacttgtaatcccagaactttgggaggccaaggcaggaggatcacttgaggccaggagttcaggtgcagccttgacaacataacaagactgacccctgtctctacaaaaatgaaaaataattagctgggtctgtgttggtagccctagctccttgggaagctgaggtgggaggatcacttgagcccaggagtttgaggctacagtgagctatggtggtgtcactgcactcttaacttgggtgacaganccgagaccctgtctctnaaanannanannaaataaaagttttgagagatggatttttgcttgatggaataattaaatcgtggactc

SEQ ID NO: 25582 - DNA, 323 bp, Homo sapiens
  misc_feature (1)...(323): n = a,t,c or g
atattatgaagtttttgacttttctttaaaagatttggtagcattgactgatagattgatttacagaagattctgtcaaaggagtaattattttggtgganaatgacctgnttatatgataggatgcctgctaaagagaaaatgaatttattngggactatgtnnnagatgntcgntatcttcnatatatatgatnattaacaattaaaatttttgcnanttgngggcctgtctggttnnangtatntganntncnnctgatnntncgttgntttntntggtnnngaagtnanggctncatttcnntttntgnannannttgc

SEQ ID NO: 25583 - DNA, 415 bp, Homo sapiens
aattcggcacgagaagccaaagagctgaaggaccggcaccgggacttcccagacgtgatctcaggagcgtatataattgaagtaattcctgataccccagcagaagctggtggtctcaaggaaaacgaactcctaatccgcatcaatggaaagtccgtggtctccgcccatgatgttagcgacgtcattaaaagggaaagcaccctgaacatggtggtccgcaggggtaatgaagatatcatgatcacagtgattcccgaagaaattgacccataggcagaggcatgagctggacttcatgtttccctcaaagactctcccgtgggatgacggatgaggactctgggctgctggaataggaccctcaagacttttgactgccattttgtttgttccatggaaacccctgggccac

SEQ ID NO: 25584 - DNA, 545 bp, Homo sapiens
  misc_feature (1)...(545): n = a,t,c or g
gngnnnnnnnnttgananccctttgaaaaccgntatgacatgattacgaatttaatacgactcactatagggaatttggccctcgaggccaagaattcggcacgagcggcacgagcaccacctccctcttcttctttttcatccttctgtctctttgtttctgagctttcctgtctttccttttttctgagagattcaaagcctccacgactctgtttcccccgtcccttctgaatttaatttgcactaagtcatttgcactggttggagttgtggagacggccttgagtctcagtacgagtgtgcgtgagtgtgagccaccttggcaagtgcctgtgcagggcccggccgccctccatctgggccgggtgactgggcgccggctgtgtgcccgaggcctcaccctgccctcgcctagtctggaagctccgaccgacatcacggagcagccttcaagcattccattacgccccatctcgctctgtgcccctccccaccagggcttcagcaggagccctggactcatcatcaataaacactggtac

SEQ ID NO: 25585 - DNA, 922 bp, Homo sapiens
ataagctccagttttcgtattgcaaataagactcttacctacaaaatgagattcagtgaactaatttggtttttactcaaccaaattaaaaatttttttaaggaaaattagcagttggtctattcagaatcaaacctttttatattttatactgcacttcagtgtattttctgtcactgtaggtatagaagatctgcctcccctgtggaaattggggtctgttggtgggcttgcccctgaagcctggcttgggttgaaaagtgttcccgccctaaggccttggtgccctgaacctctgatgcctaccgggttctcctgatttgagtttcctttaaatactccctttttgagtaattttctgatgggaggaaagtagcagtcatcatctttttgtgtgcaggctgtctcatttatttttagccattgtcgtttcattcattttgtgtaatataaaccgtgtgtcatgtcaaagtgaaagacatttcaaatctgtagcataggctagtgggcaggtccgcacagtcgaagccacacctggtctgttttctgtgcactgtagccttagtgtcacctttcttcttgtgtctccttatggtacactccagcggttgccttttttatcatttctactgaagttgggaaattcaaccccagaaattgacagatgaaaggagacaatggttgtgtagggagatggagaaaatgcttaatctgaggatgagacagggttttttcatttttgtgggggctagaaaaaacataaaatgaggcagttaaataataatagttaatgaaggtgtgctacagaaaataatctggtgttcttgctaactttgcccttcactgttgcttaattgtgaacagccaaaagctatatgttatggcttattgtgtgaaggtaactaagaagtggtgttccatg

SEQ ID NO: 25586 - DNA, 477 bp, Homo sapiens
  misc_feature (1)...(477): n = a,t,c or g
ggtattctgcttttcgcattggataccagtcctaatccatggccaacagtggggtaattggagggtagagtcagtctttggggtgatttcagaaaggcaacaggaaatcagagaaagctcacatagtagttaagagccagttaatagcttggctctggaattgtaccgtctgggttttcatcctggctccaccacttctagcaagtaggctgctgcctcatctgaaaattcatataacaatattcatttcctaagtttgttgtgaggatgaattaaaagagctaaagtccatgcgttgggagaaccctagtgtgtttagtagataatccttccaaacattgattccatgggaggggataaatgataaaaggtaacaatagctaagagtgggagggggaccttgtggatattgaaagaatcagagaataggaatgatgttgggaggatgatggtatcnctgctantttttaagtgctc

SEQ ID NO: 25587 - DNA, 388 bp, Homo sapiens
gaccctacatttctctgctgagcaattggtgcgcctgtttcaaaggaggattagttccatcagctctgctaaaggatgacaaagccttgaacatttgctagatcatcccagtatttatgtggcctcttaaaaaaaattaaatccaagtcggttttaaactctagtttgagccgttttcccaggaagtttgtgtgatttgtataggacctttggaattaaatggctgttttagtgtctctcatgtgtgcatacattgtactgcccactccaggaacaaaacgtccccatccagaacatcttcgtattcaggaatggctccagtgcaaatgactgctatggcagcctgggtttgaagaaatgattcttaggcctggtttaaaaaatgcaa

SEQ ID NO: 25588 - DNA, 451 bp, Homo sapiens
  misc_feature (1)...(451): n = a,t,c or g
gggcaggtcccctctcgggaaatcccctgtgagttgggagtgggaggaattcataagtggggggttagtgtgggccccggcgactagggctggcctgagccccatcctgttcttccagcaatgataccctcccaggccctgaccctcgctgagcttcaggggcccctgccacgtgccacagccactgggggcagaggtggcactccccactgatcctcccagggagggtctgtctgaggtaggggaagccccgggcagcagttctgatggcaggcagcctgagggatctgggcacagcgggcggctcaggtgtccccggctgcctcccagtagctgngcaactacaaccagttttatgaaaaagctttataaaataagctttaagaaaaaaaaanaaaaaaaaaannatntttaattaaccgccgaagcttatncctttanggnggntaat

SEQ ID NO: 25589 - DNA, 348 bp, Homo sapiens
gcttcttttcttttctctccctctcttccctcccttccttcctccctccttcccaccttttcttcccacttcatgcccagtatcaagctcccatgctgctagagagagtcctcggctagaaacaggtgcaaattctggagatgagaccttgtagagtgttaaggatggttttcttcacagcagctacaggtaaggaataggggctgggctattaatacatctgctacaaatcaataaaggccttatgctccttttgctgatcgacaatgtatttaaaaatattagatgatcaagaagggctgcagaaaggaggaaacagaaacaaacagcacacctcttggttatttt

SEQ ID NO: 25590 - DNA, 354 bp, Homo sapiens
ggtttgagcgagaagaatccgcaggggccctggagccggactggccagtctctaggggctctccatgtgctgtcctgaagggaaagtccttttctaaaagagagccacgcttaaggcgtgcctttcgtagagactttgctttttcttgctagtttatgaaccacgaactgatgtctgttaactttacggagtacttggatatcatatttgttatttctctggagtttctaaaatcgaggtggagagccgggcacggtggcccacggctgtaatcccagcactttgggaggccgaggcgggtggatcatttgaggtcaggagttcgagaccaccctggccaacatggaaagaaaa

SEQ ID NO: 25591 - DNA, 433 bp, Homo sapiens
  misc_feature (1)...(433): n = a,t,c or g
gccccctttgnacaccgttatgacatgattacgaatttaatacgactcactatagggaatttggccctcgaggccaagaattcggcacgagaatgcatctgatgtcgacaatgtgaaagcccatttaaatgtgagcggaattccatgcagtgtcttgctggcagacgtggaagatcttattcaacagcagatttccaacgacacagtcagcccccgagcctccgcatcgtactatgaacagtatcactcactaaatgaaatctattcttggatagaatttataactgagaggcatcctgatatgcttacaaaaatccacattggatcctcatttgagaagtacccactctatgttttaaaggtttctggaaaagaacaaacagccaaaaatgccatatggattgactgtggaatccatgccagagaatggatc

SEQ ID NO: 25592 - DNA, 496 bp, Homo sapiens
  misc_feature (1)...(496): n = a,t,c or g
acagctatgacatgattacgaatttaatacgactcactatagggaatttggccctcgaggccaagaattcggcacgagcggcagtgtctcgggtgtggaccacctgctgctggcagcccagacgcacacggtgcctgtcccttggagagccatgtgcctcctgccctcgtggcgtgatggccgtcgtaaaatctccatgcagccctaagctgccacacacgagcaccagccagccactgtggacgtgggatgggcagatagttacagagcccggggtgactctgctgtcctttctctgcaggccaagcggaggctggactgaaatacatttacaaattagaatgtattttgctgtgggaaaatagaccccttgcattgccctcggtgttgactacagaggtttttgaaaggtgcattacaggcattcgatccgtgccaggcacancacttgtagcttggatcccaatgctgtgccgaaaatgtcttnggcctaaag

SEQ ID NO: 25593 - DNA, 343 bp, Homo sapiens
cggcagtctagtagagaccacacaattccatcactcagagtttactagcactcagagagctgaggttactctgtttatttattaaagaacttttacagcatgaagttagctctggagaccactctgtgtgctctttttctccgacttcagcaattgctacaccaacgtacacatcctgtttttattacacacattcgagcccacagctctctgcctggcccattggcttatggcaatgatcaagcagctcttcaggttgtaacatcactgctagaccaagccacccaattgcatcaatttttctactaaaattagagaaactcatcttaaacaacttcaactt

SEQ ID NO: 25594 - DNA, 414 bp, Homo sapiens
acctctatgacatgattacgaatttaatacgactcactatagggaatttggccctcgaggccaagaattcggcacgagctcagttcttagagctgtattacaacactgcccttggggtctcagtcccgcagccacatgatcagacacagggctctggaacagatcccttccatgctgcacatcagacctcttagatgggggtcacgatggtccgtcctaacgccacatgacctcaagtggtgtagatgtgaggacatgtcagtgtggggaaagaaggcctcagaggggccagtatccttgtatgctgccagccagcactggacaagtgggcacgttccagcctatgacaggcgtgacccttggaccagatcacagatgagatgggtggcttcaggaagcagggtggcttcagga

SEQ ID NO: 25595 - DNA, 392 bp, Homo sapiens
ggaactatttataaacatcctgcaggaaaatgagtctatatgtcagaatacacatttcccaccttgcccaacagtagaaaaacataagaagagaaaaacattaaaaaatgacaaggaagttaatggaagtcagcaatgtgatggtgtttggaggtggagccttcagaaggtaattaatgcccttgtaagaagaggccagagagcttgcgcaccttcttcctgccatgtgaggagccaagaagccggctgtctgcaacctgcaagaggaccctcactagaagctagccatactggcatcctcatcttggctttccaacttccagaactgtgagaagtatatgtttgtggtttagtcaatggtctatggtaattttttttatagcagtcccacc

SEQ ID NO: 25596 - DNA, 340 bp, Homo sapiens
ggcatactggttccttggcatttgggggcagagggtgttaagacttgatgcatgttgaaaaacagaagaaacatatcttaagagattttattagcttctagcactgtgccacatcgtcattcaataagcttattaagttaaataaaattgttataatggcttagagtggtggttcacttctataatcccagtactttgcggggccgaggcaggcagattacttgaggtcaggagttcaagaccagcctggccaacatgacaaaacccgtctctactaaaaatacaaaaaattgctgaggcgaggaattgcttgaaactgggaggcagaggttgcggtgag

SEQ ID NO: 25597 - DNA, 355 bp, Homo sapiens
gcacagtaaacatgacagttagtgctatcgtggtgcttactatgtgccaggcactctgttaagctctttacagatattaatgtattggtcttccccatcaactcacccatacacatgcattcatccaacaaaagtttaggctgagtgcagtggctcaggctgggggcggtggctcatgcctgtaatcccagcactttgggaggctgaggcgggcggatcatgaggttaggagttcaagaccagcctggccaatatggtgaaaccccatctctactaaaaatacaaaaattagccgggcgtgatggcgcacgcctgtagtcccagctactcgggaggctgaggcagaagaatcgtt

SEQ ID NO: 25598 - DNA, 365 bp, Homo sapiens
gttactgatggtaagtatctagtccagttactgacttatctatactgcatcaaataattttttagcttatcatcttgggttttctgggtatacaagctgtaaataacaaccatttttcatggcttaatttctatttcctgttttggtagtcagaattctaagattcctcctaagattcctggcccctgggatacacataccttcccctagttaatcaaacacgaatgtaggtactatttgcagggactgtgcagacgttaattcaaatcccaaatcagttgaccttaagacagagagactatccatccaagtaggcccgattaaccctttaaatttgggtttagaggtcagagacagaggacgtc

SEQ ID NO: 25599 - DNA, 483 bp, Homo sapiens
atacaaggatagaaattgcagtgttggttagctgagtgatggcctcagctcaaaaactccagtagtggataggcacagttgctcatgcctgtaattgcagcactttgggaggctgaggtgggaggatcacttgagactaggagtttgacaccagcttgggcaacatagggagaccccatctctacaaaaatttttgaaaattagctgggcttggtggtgtgtgcctatagtcccagatacttgggtggctgaagtgggaggtcacctgagtccaggactttgaggctgcagtgagctgtgatcataccaccacactccagcctgggagatagcacaaccctctctcaaaaaacaaacctaaacacaaaaccccaatagtgagactaccctagtgggtgtgtagaaaaaatgctttttttttctggaaggaattggaacctcaatttttaagttgacttgagttgcactgagagagtgatgatg

SEQ ID NO: 25600 - DNA, 350 bp, Homo sapiens
gagtcatttaaaaataataagtgggataagagagacagcctttcaaacatgggatgacaagaatctgatgtctgtgttttagcattaggcaaggattggagtccctggctgcagcaagggtggggctcttgcatgggtcgggactctggttgattgcagcatcgtagagcctaactgctgggaggtggggcaaccccagcgagaaactcctaggaggaagcacctccctgtggtggttggggcaacttgtggagcagggtgcttgagaaaagagcacagggcttagaggaaggagtaaggctcctatctctgtctgctactcgctccccacctgcctgagatggtgtgca

SEQ ID NO: 25601 - DNA, 424 bp, Homo sapiens
  misc_feature (1)...(424): n = a,t,c or g
ctatgacatgattancantttagnncgactaccaatagggantangnactatngaggaacaatgantcctcgagnccnntaattcggcacgaggggaggctgtccccgtatccaagggctgcggacaccctgggctgtttctgctctcagcgtgtggcatcccttcgccggggttaacagtgggggttcctgggccccgtgtggacctgctacatcaccacctccgggctgggacctgggactctgcatttttgcagccgcctgtcccccctcccagctgctggctctgtgcacacgaaagaccagaaccacggactcaggaggagcctttccgatcctcaggggctcggggtttatgaaacacacgggcatctgttcagttctctacctgccaaggacattctcagcatcacatctcgagtgg

SEQ ID NO: 25602 - DNA, 356 bp, Homo sapiens
gcattaagttagtaccatgctaaatacaaatacatgcgaaatacaaaacccgtgaaattaaccatttatctgtgcctctgctaatagttacttgcatttcattaagaagaaaaaaatgcaaagaggaataatactgtcataattctaaaactcctgatacaggaacaactatataaatttgtgattgttgaggataggaaattattaaagtaacagtgatggaagaagcagaagaacccttgtatctcttttgcctcagactgtaaaataaaatggagtcgaaggaaagaatggctagctggcgctgagtgtgagtagggagagtgactgcaggtgtgagcagggtttctgatctg

SEQ ID NO: 25603 - DNA, 430 bp, Homo sapiens
  misc_feature (1)...(430): n = a,t,c or g
gcccagcaaccctttgactcatctttgtgagtctctggaatcagagggtagccacatcgctgagaggtggagtgaagcactcgggtgaaaaggtacaaggaagtcagggacaggagtgtggggacatcacctagacaatgacagagaagaggggcacagccgagtgaggggagaggggccggcagtcctacatcccctggcctgaagcacgctccagggcagaaggaaaaacactgtctttggggtccaagagacctgagttcaaattctggctccaccactgaccacctgtgtaaccttgaactgctgctgcctgaacctcaggttccccttctaaaaatagaggagaaaaggatgcatttctccttgccctgtgagaacgaaatggtgcaagcaccaaggagccttaacnaaagncgggcctgccccc

SEQ ID NO: 25604 - DNA, 879 bp, Homo sapiens
gttgagaagctgaagcaactccaaggacacagttcacagaaatttggttctcagccccaaaatactgattgaattggggacaattacaaggactctctggccaaaaacccttgaagaggccccgtgaaggaggcagtgaggagcttttgattgctgacctgtgtcgtaccaccccagaatgtgcactgggggctgtgccagatgcctgggggggaccctcattccccttgctttttttggcttcctggctaacatcctgttattttttcctggaggaaaagtgatagatgacaacgaccacctttcccaagagatctggtttttcggaggaatattaggaagcggtgtcttgatgatcttccctgcgctggtgttcttgggcctgaagaacaatgactgctgtgggtgctgcggcaacgagggctgcgggaagcgatttgcgatgttcacctccacgatatttgctgtggttggattcttgggagctggatactcgtttatcatctcagccatttcaatcaacaagggtcctaaatgcctcatggccaatagtacatggggctaccccttccacgacggggattatctcaatgatgaggccttatggaacaagtgccgagagcctctcaatgtggttccctggaatctgaccctcttctccatcctgctggtcgtaggaggaatccaagatggttctctgcgccatccaggtggtcaatggcctcctggggaccctctgtggggactgccagtgttgtggctgctgtgggggagatggacccgtttaaacctccgagatgagctgctcagactctacagcatgacgactacaatttcttttcataaaacttcttctcttcttggaattattaattccta

SEQ ID NO: 25605 - DNA, 344 bp, Homo sapiens
ggatttgtatcaaggttgtaaaaagtctgttgtaccttcacgtatcaatcactatatttctggcatctattgttgtgtaacaaaattaccctaaaacatatcagattaaaacaataaatattaattatctcacatagtttctgagggttgaaaattcaggaatggcttagctgggaggttctggctcagggtcccttatgaggttgcagtcaagataccagctggagctgcagtcctctgaaggcttgtttgagctggagatctcctttctaaactaactcacatgactgtcagcaggagaattcagttccttaccatagggatctctctacagggttcaaggc

SEQ ID NO: 25606 - DNA, 432 bp, Homo sapiens
  misc_feature (1)...(432): n = a,t,c or g
ggacacatacatacgtatatacatacatgtacctcctttttctcaattcatttaatggaatgctgaaaaatagactatgcagaagataacagagtttggtcaagactttaaaaattattgtgtgtttttggagttaagaaattcaaactctagaacagaaataaggtggctagttgaagaatatacatacagctttcaatacttttaaagtaatagatattatgtccttaaaatcacaaaaactaaaggacaaagatgacaaattacttatgttgaagttnnnnnnntctctttgacaaagacactaggaaatttgaaacatgccagaggcctgatcctagaataaattactcacaaattaacaaaaagcagcttactagagaaatgagccaaggcaaataagccattcataaatagaaaaaattaaagtcc

SEQ ID NO: 25607 - DNA, 340 bp, Homo sapiens
gcttatttgtctgtgtgtccttggacaagctacttagcttctatgctaagtttcctcatacttacagagttggtttgagtgttaaataggatcatgcctataaaacacttaggtcatcaccttgcatagagcatatgtcagtgaaaattaacttaaattgttatttttattattagcagatttttttcagcctgcacgtgtacatccatgcattgcacattcctttctgttcttgccctccctgtcattgtgaggatactgaaaagttggtcttcctgtctctgggaaggcaatttagtccatgtaaaatgtctcaaattccctgtcctgtcacatggct

SEQ ID NO: 25608 - DNA, 525 bp, Homo sapiens
  misc_feature (1)...(525): n = a,t,c or g
gcaagtttaatcatggaaaactcaaaaagaaggggggaaatggtcagtttaagccaaaagaaactttctaaacaatgtataggtacacagcaaaattaaacaaatccaacaatttctgaagcttagtgtaattgagtggtggttgttattcaataaaattattcccaaaagtgtttctcctaagagtgcagttcccatgagtcacttcctgaacccattgaccaaaggtggacagagacaatcctgtagaccttgacattcagaaagatgtgagctgcttactgatcatatatgcatacgtttctttacagcagaggaaaccattgtccacaaaactgatgttcttttggggttttatgtacagacttgtccaatcatgtgtgtggttcctgcgagttgctgatgactccgcattgaagctctctgagttctttgattttaagttgggtttatggnatttttcaaatgttggaangngtgtggtctccngccctcctcccttttggaaaangaagcaaatgttaa

SEQ ID NO: 25609 - DNA, 169 bp, Homo sapiens
ttcaaaaagcttcattttagaacgtgatttaaaggatatcagttaccaccgtattttcagtttatcaatataaaataaattaaggcaaacaaatttgtctttagatccaagcacacctttttaaggagcatgaaaacttttaaaaacttatcaggaacccatgaatagc

SEQ ID NO: 25610 - DNA, 528 bp, Homo sapiens
  misc_feature (1)...(528): n = a,t,c or g
tntnnnnnnnnnnnnnnnnnnnnnnnnnngnngnnnnnnnnannnnnnnnngtnnanatnntnnagaggnntgantgtngntttgaaaccttatgnttgatacgaattaatacgactcactatagggaatttggccctcgaggccaagaattcggcacgagggggggcgtggtgctgaaggaggatgcgctgcccggccataaaacggagttcaaggtggactcggacgaccagtggggagagtactcctgcgtcttcctccccgagcccatgggcacggccaacatccagctccacgggcctcccagagtgaaggctgtgaagtcgtcagaacacatcaacgagggggagacggccatgctggtctgcaagtcagagtccgtgccacctgtcactgactgggcctggtacaagatcactgactctgaggacaaggccctcatgaacggctccgaaagcaggttcttcgngagntcctcgcagggccggcanagctacacattgagaacctgaacatggangccgacc

SEQ ID NO: 25611 - DNA, 332 bp, Homo sapiens
  misc_feature (1)...(332): n = a,t,c or g
gcggaactggagcagaaattttcaatgcagtttaatagaattgcttatgaattgaagaaattatgaatcattagttattcagcattctcttatgcagggggcagggatgtggtttctctgaaggcgttcagctttaagttggagtttatgctagcttaatgcagatagataggtaggtaaaaagcaaagcaggaaaaagaaactaactttccaggacaagggcacagagctcaggagaggatagtggagaagaaaatctaatttctgcctttaaaaggaatatagttaaaactctagtacttttccagttgtgaacanacngcctacctcta

SEQ ID NO: 25612 - DNA, 340 bp, Homo sapiens
  misc_feature (1)...(340): n = a,t,c or g
caggctcggatggactatagctttgataccacagccgaagacccttgggttaggatttctgactgcatcaaaaacttatttagccccatcatgagtgagaaccatggccacatgcctctacagcccaatgccagcctgaatgaagaagaagggacacagggccacccagatgggaccccaccaaagctggacaccgccaatggcactcccaaagtttacaagtctgtagacagcatcactgtgaagaatggtcctcctgtggctcccaagcctgcctggtttcggcaaagcttgaatggtttgaggaatcgtgcttagacgcctngcnngcgnnanttcc

SEQ ID NO: 25613 - DNA, 201 bp, Homo sapiens
ctgcactgagtatatgccctcattactggacttcattttgatacttgtctatccttcatagtgccctctacttttaaagggtttatatgttgaaaaactgctgtggccttttatgacctgtatataatgtagaataaaaataataaaatacttgatagctttttctaagtgaccaatgtactaactgaaaaaaaaaaaaaa

SEQ ID NO: 25614 - DNA, 355 bp, Homo sapiens
gcggcacgagaaaattggtcagcttggctcggggagaaacctggtaacataaaagcagttcagtggcccagaggttatttttttcctattgctctgaagactgcactggttgctgcaaagctcaggcctgaatgagcaggaaacaaaaaaggccttgcgacccagctgccataaccaccttagaactaccagacgagcacatcagaaccctttgacagccatcccaggtctaaagccacaagtttcttttctatacagtcacaactgcagtaggcagtgaggaagccagagaaatgcgatagcggcatttctctaaagcgggttattaaggatatatacagttacactttttgct

SEQ ID NO: 25615 - DNA, 478 bp, Homo sapiens
  misc_feature (1)...(478): n = a,t,c or g
gtgtttcgtagcagataacctcaaattaaaacttccgaggttttcatcaccccttgaagaaatatttgtgtttactgccctggagcaggaaattaggaaggtttaaggaatctctgaagctgattataatagagtcaaaaatcagtcttccattttgcactactatactactctcaggtgtccccagtcaggcctagtttctggagttaatatttgggggggaaaggaggaatccctgtgacccagtactccattgcttgaaccatttactttgtgacttgagggcttttgagagaaatggagtagacagatagataaataaatacatagaactcaactctggcagattcatcagcaccaccaacacagtagggagagaacaagattaaaatgggaaaaganttggaaaggaagggcnttnaaaagggaaacnatnnngggaagggtnatgggaaaaaaaaatctgggcttanagcaa

SEQ ID NO: 25616 - DNA, 550 bp, Homo sapiens
  misc_feature (1)...(550): n = a,t,c or g
gnggnnnnnnngcccctttcccctcacnnctnnggacatccctacgaatttnntacgactcactatagggaatttggccctcgaggccaagaattcggcacgagcgcgctgctgggcacccacggagcctccggggctgtcggcacagtcttcactaccgtagaagaccttggctccaagatactcctcacctgctccttgaatgacagcgccacagaggtcacagggcaccgttggctgaaggggggcgtggtgctgaaggaggatgcgctgcccggccagaaaacggagttcaaggtggactcggacgaccagtggggagagtactcctgcgtcttcctccccgagcccatgggcacggccaacatccagctccacgggcctnccagagtgaaggctgtgaagtcgtcanaacacatnaacgagggggagacggccatgctggnctgcaagtcanagtccgtgccacctgcactgactggcctggtncaagancactgactctgaggacaangcctcatgaacngnttcnanagcaggtcttntgagt

SEQ ID NO: 25617 - DNA, 516 bp, Homo sapiens
  misc_feature (1)...(516): n = a,t,c or g
ggcgcggtggctcacgcctgtaatcccagccctttgggaggccgaggcaggtggatcacctgaggtcagttgtttgaaaccaagcctggccaacatgatgaaaccccatcgctactaaaaatacaaaaaattanccaggcgtggtggtgcctgcctgtaatcccagctactcgggaggctgaggcacgagaaacantttaancccaggaggcggaggttgnaatgagctgaggtcgcaccactgcactccagcctgggtnacacagtgacaaaancaaaagttggaggccagtgactgtctgcagatgttgccggctgcttcactggtcagaccccgtccttctgcacagtctttaacacccaggaccctcgaaacctgtgccatggccccaanccatccacgtgggggtgtctcanangcccccatggtgtgaaagttgcggcatcaaactgtttgtaaaaaaaancctggaccacagcngtgaactantgggccnaagaacagagtttncagaa

SEQ ID NO: 25618 - DNA, 448 bp, Homo sapiens
  misc_feature (1)...(448): n = a,t,c or g
ggggactgcctcaggccatgattgtccagtcatctgaagtctgcagcaaattactcagggtctttgaatttctgtgttatgatagtaacttgtgcttatctttgacttttgtatgttctctgcaccatagggtgtgaagttgctggtaatgatgtcttatattcatagaccactggctaggcagctacttctcccccaggggaaagaacataggactggaatacaaatcatcagagttttgattcagttgctagtgacaggccattagacaaactacttagccaactggagcctcaatttcattattgatcaagtgaaggtctgtcatcttttccccaagagtgtactgaaaataaaattataagtacaaatgtgtggcctgcatggtggctcatgcctgtaatcccagcactttgggaagcccaaccgggagggatcanttgnggcc

SEQ ID NO: 25619 - DNA, 370 bp, Homo sapiens
ggtggtctttgcaaagagcatttatattttcttttttttttactaaaatgatatagggtttattttatattttcaaaaaaattgttaaacatcattcttatcaatgttaaatttacgttattaaaaaattacaaatgatagaatctttactcagggatgggcaataaaacagcaaagagctttgtgattgggtttgaaagattttgaattacagacagtgctcttaatagtttttaataagttgatatttttttctgtgtagatttaaataatttctttaaaagcgtaagctttggctggcatggtggcttatgcctgtaatcccagcactttgggaggctacgatgggtgggatcacctgagggcaggg

SEQ ID NO: 25620 - DNA, 322 bp, Homo sapiens
gcaggtgctgaagccttcagctactgtctcagttttttgaagtttagcaatggcgtctttctctgctgagaccaattcaactgacctactctcacagccatggaatgagcccccagtaattctctccatggtcattctcagccttacttttttactgggattgccaggcaatgggctggtgctgtgggtggctggcctgaagatgcagcggacagtgaacacaatttggttcctccacctcaccttggcggacctcctctgctgcctctccttgccttctcgctggctcacttggctctccagggacaagtggccctacggc

SEQ ID NO: 25621 - DNA, 302 bp, Homo sapiens
aaagaactttccttggaaagaacaggctccctaatcacactccttccagatgttaccagattcaataactgcaactcctgtcctatcagaatgaagggtaggcagctcttccttggtgggtgatagggacccatcacatccccacaggagagctcagtctgagggggacatctggaaagggaaggagatgccttcctttccctgagtagaggaagctccactgtcctcaagttatcccatcagctccagggctctcacggtccacatcaaagaacactggtaactccagcttaaccctgccc

SEQ ID NO: 25622 - DNA, 377 bp, Homo sapiens
gcaggcactgtggcgtgtgcctgcagccccggctgctcaggaagctgaggtgggaggatcactggaacctgggagtttgagattgcagtgagctgtgattgtgccattgcactccagcctgggtgacagagtgagtctctgtctaagaaaaaaaaaggcggggtggggaatgcaattggagtttcttaggtgagtactgttcttaaaattcttgatgtactcaacttcgttttgtatggtgaggatttttactgatagggtaagttagagaatcccattcatttcccatgtcttttatcagtgtcttgtgaatgtttatcagaatttgcctgctgcaccattcatggctctaggcaaatgcttcaagtatccttggt

SEQ ID NO: 25623 - DNA, 609 bp, Homo sapiens
tgatgacctttacgaatttaatacgactcactatagggaatttggccctcgaggccaagaattcggcacgagggaccggcgaggaataggaatcatggcggctgcgctgttcgtgctgctgggattcgcgctgctgggcacccacggagcctccggggctgccggcacagtcttcactaccgtagaagaccttggctccaagatactcctcacctgctccttgaatgacagcgccacagaggtcacagggcaccgctggctgaaggggggcgtggtgctgaaggaggacgcgctgcccggccagaaaacggagttcaaggtggactccgacgaccagtggggagagtactcctgcgtcttcctccccgagcccatgggcacggccaacatccagctccacgggcctcccagagtgaaggctgtgaagtcgtcagaacacatcaacgagggggagacggccatgctggtctgcaagtcagagtccgtgccacctgtcactgactgggcctggtacaagatcactgactctgaggacaaggccctcatgaacggctccgagagcaggttcttcgtgagttcctcgcagggccggtcagagctacacattga

SEQ ID NO: 25624 - DNA, 345 bp, Homo sapiens
gggagggggggtgctcttcgattccagaaggtccctaagatacccctttagaatttggaaactatttgtctagtgaagggaaaaacccacatggaagtgaatgttgtatgttacttaaaataattagaagtcaaattttgctttaattatttaccaggaaaaaagagcagtataatttcttttaaaactatatggggggccgggtgcggcggctcacacctgtaatcccagcactttcggagactgaggcggctggatcacgaggtcaggagttcaagaccagcctggccaagatggtgaaaccttgtctctactaaaaatacaaaagttagccaggtgtggtgg

SEQ ID NO: 25625 - DNA, 345 bp, Homo sapiens
ggagcgagatggacgtgaacgccatcgcaggcacgctgaagctgtacttccgtgagctgcccgagcccctcttcactgacgagttctaccccaacttcgcagagggcatcgctctttcagacccggttgcaaaggagagctgcatgctcaacctgctgctgtccctgccggaggccaacctgctcaccttccttttccttctggaccacctgaaaagggtggcagagaaggaggcagtcaataagatgtccctgcacaacctcgccacggtctttggccccacgctgctccggccctccgagaaggagagcaagctccctgccaaccccagccagcctatcacca

SEQ ID NO: 25626 - DNA, 383 bp, Homo sapiens
gtagaaatggggggatggagagtgagaaaggtaagagaaaaggggatggggatgacactgactctggtgagattgagagatagagacaggagaagctacatggagggaatagaaagcaggtggagaggttctcacctcgattagtaatttggacagttacttcagaatcaaattttagtaactactactattccttagaattcaaattaatgcttaagcaattactttttaatgctctagaaataatcaaacaggagagtcacagcagccctttccacccttactttcccatcttccacatccccaagaggatattttgctaaggactctgcctaaagcactatcacagtatgggatatttcctgagagtccaataaaattaa

SEQ ID NO: 25627 - DNA, 335 bp, Homo sapiens
  misc_feature (1)...(335): n = a,t,c or g
gtcgcactgctgcagcttagggcttgtgcaaaacaatgttctgtgcatttggttcagatactttatttcagcttctttacaaccaagtattagagtggtggtttttgagttcgtcaaaggtttaatgagtaaaatgctctcctagccagagggttaatgagatgatctaaactccagtttcggtggttgttttgtattatgttttagtaagaatcctagctaaaatggtcttttcaaaagattgtactctccagaagataatgtcgtagacccagtcacaggctttaacggtggaggggaccgttgncctttttttgtgtgcgacttaatagacc

SEQ ID NO: 25628 - DNA, 434 bp, Homo sapiens
gtttgacatgattacgaatttaatacgactcactatagggaatttggccctcgaggccaagaattcggcacgagcggcacgaggctagcaccatttattaccactgaggcagcgggttaaggaatgtattcgcagtgtcaggaaagcacagggtcgccagagtgaattgcatgtggaattctagaagaactttgcttgccatcctatgggatttggactgcaattttaatacaacagggaatcattatggtctattttctcaagattctgattaagtagcataagcgagtgtggagcatcatgaattcatgctggcaaatcatgagggcagacaggtaaagaatctgccctcatctttgcacttggctttctaggcccatcctcttggagctgtagtggggatctggggacacaggaagagggaaatggccgat

SEQ ID NO: 25629 - DNA, 485 bp, Homo sapiens
  misc_feature (1)...(485): n = a,t,c or g
tttgaancccatcntttatgacatgattacgaatttaatacgactcactatagggaatttggccctcgaggccaagaattcggcacgagacagcagcggcgtcgcggcccgcagccccgcggcggcggaaaggtaaccgacccgccctggggtgctgcgtgcgctgcctgctcccgcctgaggaaaacactgcccatggcgcaaggccgggagcgcgacgaaggcccccactccgccggcggcgcgtccttgtccgtgaggtgcggtgttcacggccccgcgaccgatctgggtctcgcggaacctcctgccccacgtcccctcctccctcctctccctccggttccttagggcggctttccccgcagcttcgacctcttcccctctgnnnnnnngccttcctcagcctcctncccgtgtgacctccctgtcgttcccatcccttgttccttgaccccgtccccagtgnctttccactccttatt

SEQ ID NO: 25630 - DNA, 335 bp, Homo sapiens
gctaacttcctgatacgttttatatctaaagtattggtgagaagactgaagcttcgttagtatggtttactcctccgagaacttcaaaccagtggcttgatttctggttacgtcatcgactccagtggtggagaaagtttgccatgagtccatctaacttcagcagcagtgactgtcaggatgaagaaggccggaaaggaaacaaactttactacaattttccctggggaaaggagttaatagaaaccctgtggaacctaggagatcacgaacttttacacatgtatcctggcaatgtgtctaaattacatgatgttttacctggagctcctatg

SEQ ID NO: 25631 - DNA, 387 bp, Homo sapiens
agctatgacatgattacgaatttaatacgactcactatagggaatttggccctcgaggccaagaattcggcacgagtgcatgtgcagaggaactgccctttataaaaccatcggatctcgtgaaacttactatcatgagaacatcatgggaaaaccctgcccacatgattcagtttacctcccaccaggtccctcccatgacatgtttgggattatgggagccacaattcaagatgagatttgggtggggacacagccaaaccatatcagtctgtaataaataactcaaatttctttaatcctatattttccaaactttcttagtcaccaaatgtctcttttcacatacatcttttaacatcttgcagggcacactgggaactgcta

SEQ ID NO: 25632 - DNA, 321 bp, Homo sapiens
caaaaatttgctgggcatggtggcgcgtgcctgtaatcccatctactaggggggctgatgcaggaggatcgcttgaacctgagaggcagaggttgcagtgagccaagatcatgccactttactccagtctgagcaacagaacgagacttagtcaaaataaataaataattaaataaataaataaataaaatatcttttatctttaaagtgtttaacattggtatactgtctgtagttggttcattagtcgtttataaagggttattttctcatgagtggaaacctgaacaatcagttacctttgtgcctatgccttctctc

SEQ ID NO: 25633 - DNA, 333 bp, Homo sapiens
ggcacaaggtgggctccttctgcaaatacaaatgcaagcctggataccatgtgcctggatcctctcggaagtcaaagaaacgggccttcaagactcagtgtacccaggatggcagctggcaggagggagcttgtgttcctgtgacctgtgacccacctccaccaaaattccatgggctctaccagtgtactaatggcttccagttcaacagtgagtgtaggatcaagtgtgaagacagtgatgcctcccagggacttgggagcaatgtcattcattgccggaaagatggcacctggaacggctccttccatgtctgccaggagatgcaaggcc

SEQ ID NO: 25634 - DNA, 320 bp, Homo sapiens
  misc_feature (1)...(320): n = a,t,c or g
ttcctctctcagtgaagccaccttgcctcctctagaagcctgagaccatagccacatagcagaaggcagagctgagaccctgagaaaaaaacaagcccaaataacgtatttgggccaggggtgatggctcacgcctgtaatcccagcactttggcaggctgcgatgggtggattgcttgaagccaggagtttgagaccaacctgagcaacacagggagaccctgtctctacaaaaaataaaaagtcgacgcggccgaagtngacgcggncgtnaatttnnntntatnaatcgtanatctgatanccnncnangttgcttc

SEQ ID NO: 25635 - DNA, 1214 bp, Homo sapiens
gcagtctgctatgggtaagcaggctatgggagtttacatcaccaacttccatgttcgcatggacacattggcccatgttctctattatcctcaaaagccacttgtgactacacggtctatggaatatctacgatttagagagctgccagcaggcatcaactcaattgtggccattgcatcatacactggatataatcaggaagactctgttatcatgaatcgttcagctgtagaccgcggcttcttcaggtctgttttctatcgctcatacaaagaacaggagtctaaaaaaggatttgatcaagaagaagtttttgagaagcctacacgtgaaacatgccagggcatgaggcatgccatttacgacaagctggatgatgatggtttgatagctccaggggttcgtgtatcaggagatgatgttattataggcaaaacagtcaccttgcctgaaaatgaagatgaattggagagcaccaatagacgctataccaagagagactgtagcacttttctcagaactagcgagacgggcattgtggatcaggttatggtaactctcaatcaggaaggatataaattttgtaaaataagggtacgctctgttaggattccacagattggagacaaatttgctagtcgacatggtcaaaagggtacttgtggtattcagtatatacaagaggatatgcctttcacctgtgaaggtatcacccctgatatcatcatcaatccccatgccatcccctctcgtatgactattggtcacttaattgaatgccttcaagggaaggtatcggctaacaagggtgaaattggtgatgccactccatttaatgatgctgttaacgtgcagaagatttctaatcttttatctgattatggctatcatctcagaggaaatgaggtcctgtacaatgggttcactggtcgaaaaatcacatcacaaatatttattggccccacttattaccagcgtttgaagcatatggtggatgataagattcactctcgtgctaggggacctattcagatcctcaatagacagcccatggagggtagatctcgtgatggtggcctgcgttttggagaaatggaacgagattgtcagattgcccatggagcagcccagtttttaagggaaagattgtttgaggcatcagatccatatcaggttcatgtttgcaatctttgtggaataatggcgattgcca

SEQ ID NO: 25636 - DNA, 373 bp, Homo sapiens
  misc_feature (1)...(373): n = a,t,c or g
ctcatttttaatttttctgaatctttggctgctacatttaaaacctcacaaacctaagtgttgcagggaagttacaaattgattggtagtgatgtttttaaaataaaaacaatggaaagtaaatataatgtaggaaaactagaattcattccccacacgtgtcttttttttttctttgttaagggaaaggatcatgttgactaaaactaaactaattntagtatagctnganaaaaatatgaanaaccncnttcangctttaaaatctgtcagtattctttatgcttgaanaacaaagtcnntttgatttgaagnganaactatcattagggggttttctgatttcctgangaaaagttggacatactgtctt

SEQ ID NO: 25637 - DNA, 440 bp, Homo sapiens
ccgtttgactgattacgaatttaatacgactactatagggaatttggccctcgaggccaagaattcggcacgagatctatgccacccgagaaggggactacgtcctgttccaccacgaggggggtgtggacgtgggtgatgtggacgccaaggcccagaagctgcttgttggcgtggatgagaaactgaatcctgaggacatcaaaaaacacctgttggtccacgcccctgaagacaagaaagagttgagtgagagggacggtagggaggtggcagttcggatgagaagaccgacaggctctgggcacagactggggagagcagagcggtctcctctctgggagccaggtggtagacacggccctgtcctgaggaagacagctgggtgcagggcggggactggcttggaaccagactgaaatatgccgccagcatccctc

SEQ ID NO: 25638 - DNA, 443 bp, Homo sapiens
accgtttgactgattacgaatttaatacgactcactatagggaatttggccctcgaggccaagtaattcggcacgaggtgggtattaaagacattcttaatggacaaacacaatgagcacttcaggtctttcacaacttgtgagttatttcctgggaatacttggagaattagagccacctcagctgaaccaatgccagccactgacgcctgtgtagcaatgacaagagttggcccaaacactgccaatggaaccacaccctatgtttactgacacaaagagtctttttacttatgaataataaacttggctattacttcttataaaagtgggaagtaatgggtggatagacccgtctttttggtttctgcaacctttaccggggaaggtcaaaccacagggttttcagtagagggagataggttaagtattaagaccagaat

SEQ ID NO: 25639 - DNA, 495 bp, Homo sapiens
  misc_feature (1)...(495): n = a,t,c or g
ttttgaanncnttgatnnccgcatntatgacatgattacgaatttaatactcgatgtacctgcaaaataggatttgggccggatcctaccttttcaagttgtgttcctgatccccctgtgatctcggaagagaaagggccctgttaccgacttgtcagttctggaagacagtgtatgcaccctctgtctgttcacctcaccaagcagctctgctgttgtagtgtgggcaaggcctggggcccacactgtgagaaatgtccccttccaggcacagctgcttttaaggaaatctgtcctggtggaatgggttatacggtttctggcgttcatagacgcaggccaatccatcaccatgtaggtaaaggacctgtatttgtcaagccaaagaacactcaacctgttgctaaaagtactcatcctccacctctcccagccaaggaagagccagtggaggccctgaccttctcccgggaacacgggccaggagtggcggag

SEQ ID NO: 25640 - DNA, 327 bp, Homo sapiens
ctttaacctttagaagaaaactaactttgaaacgccaatgtacatttggtttttggttctgctttcctcagctcttttctgtctttaaagcctacctcctttgctcagccattggaatgctcattttattttatggaataaaatgttgcataattctaaaattgcaaataaacccattgcaatctttaaatttgttgtgattttgtcttttgacagtcctaaatctatttcactgaataaactatccagaaatagtcaaattaacaaaggtgagccaaaaggtcaaatagaagattggaaattactaattaagattgcccccaaaaa

SEQ ID NO: 25641 - DNA, 462 bp, Homo sapiens
  misc_feature (1)...(462): n = a,t,c or g
aacanntttnnacccgaaacagctatgacatgattacgaatttaatacgactcactatagggaatttggccctcgaggccaagaattcggcacgagggaccttcgaccagctggacgccatatctagtttgcccacacccagtgacatctttgtgtcctactctactttcccaggttttgtttcctggagggaccccaagagtggctcctggtacgttgagaccctggacgacatctttgagcagtgggctcactctgaagacctgcagtccctcctgcttagggtcgctaatgctgtttcggtgaaagggatttataaacagatgcctggttgctttaatttcctccggaaaaaacttttctttaaaacatcataaggccagggcccctcaccctgccttatcttgcaccccaaagctttcctgccccaggcctgaaagaggctgaggcctggactttcct

SEQ ID NO: 25642 - DNA, 408 bp, Homo sapiens
  misc_feature (1)...(408): n = a,t,c or g
gagaacatatcctcatatgtctaattgggaaaaattctcattccctctctttttccatagcggtccctctgataagtcagacacggaaaccatgaagctcctactgactgacacgtttccgtacatatatacatcacttggcctgctgctttatgattttatcttgttttgctttgctttacgtggatggagtcacatggcgaaagtcacacttactgagaattctcatccttagttttcatttgcgagccgttcaacatgcatctggcgagttctccattttttctgctggaccacattccttgtaaacagattcataggattccatggtgaggataaaccagagtttactaanccactcccntgnagngggcnttangntgcntnntgnnnnntgnnnnnanaccc

SEQ ID NO: 25643 - DNA, 458 bp, Homo sapiens
  misc_feature (1)...(458): n = a,t,c or g
gcgtggttcatgcctgtaatcgcggaactttgggaagcccaagcgggtggatcacaaggccaggagatcaagaccaacctggctaacacagtgaaaccgtctacttaaaatacaaaaaattagccaggcgtgggtggcacgcgcctatagccctagctacttggcaggctgaggcaggagaatcgcctgaacccaggaggtggaggttgcagtgagcggagatcgtgccactgcactccggcctgggcaacagagcaagactctgtctccaaaacaaaaaaaaccccaaatgtccacacacaagtctgtacaaaaatgttcacaaaatgttcacagatgcattatttgcattaccaaaattataaacaatctaaaggccatcaattgcagaccaaatgtggggcatncatccatggagtattacntgattaaaaaaaatganggtgggcncattggct

SEQ ID NO: 25644 - DNA, 348 bp, Homo sapiens
ggagagagctagcaccatgagcttcaaaccctgtctctactaaaaatacaaaaaattagcctggcgtggtggcgaccgcctgtagtcccagctactcgggaggctgaggcagaggttgcagtgagccaaggtcacgccaccgcactccagcctgggtgagagaatgagactccgtctcaaaaaaacaaaagaaaatgaaatgctgtcctaatttctgcaatttcaatttgaaatatcaatgcttgcaaaactcatacaagttaaaacaatttttatttctaatgacctgtatctattaaatgtctgtgatgtaccaagaataaagcagaacacacttctcattaacac

SEQ ID NO: 25645 - DNA, 380 bp, Homo sapiens
gtcaaagaattacttttcatcttattaaatttttatttttgttattgtatgtatttatactttatattattattatattttattttatctatacgttttttttttgagactggctctctctctgccaccaggctggagtgcagtcgcatgatattggctcactgcaacctccacctcctgggttcaagcgatcctaccacctttgcctcccgagtggctggactacaggcacatgccaccacacccagctaatttttttgtatttttagtagcagtggggtttcaccatggtgcccaggctggtcttgaactcctgggctcaagcgatcctcctacctcagcctcctgagtatcagggactacaggtgcatgccacgacg

SEQ ID NO: 25646 - DNA, 405 bp, Homo sapiens
gtactaggagaaatagacttggaaaaggagagtgacacacccctccagcaagtatccattgaagaaattctagaagaacaaagggtggaacagcagaccaagctggaagcagagaagttgaaagtgcaggccctgaaggaccgaggtctttccattcctcgagcagatactcttgatgagtactaatcttttgcccagaggctgttggctcttgaagagtaggggctgtcactgagtgaaagtgacatcctggccacctcacgcatttgatcacagactgtagagttttgaaaagtcacttttatttttaattattttacatatgcaacatgaagaaatcgtgtaggtgggttttttttttaataacaaaatcactgtttaaagaaacagtggcatagactcctt

SEQ ID NO: 25647 - DNA, 471 bp, Homo sapiens
  misc_feature (1)...(471): n = a,t,c or g
agtntntnntnnnnanncnnnntngnnnnnnnntnnnntnnnnttgaanacctgtactncctgattacgaatttaatacgactcactatagggaatttggccctcgaggccaagaattcggcacgagatttgattctggtgataaattagaactttcaagcaaattttagaattttgggaaacttgtacccattactgggagtttgacactgtagattgatagtaacattagcaaatgtgatttttgagtatctgtgtcagtcaataaatcagtgttttccaaatgaccagtgtatcctggtccagatgacaaaatcatacttgagttattcaaagttcattaataggtttcagatttccacattgctctcaacctttaagaaatcacttgctgagttttggtataatatcaaagaataatacctgtggttatctggaaaggatattaaaatgtacctcacttttccggaa

SEQ ID NO: 25648 - DNA, 451 bp, Homo sapiens
gcaaaaatgtccacaagatggaaatgttagacacaagcagatatttttctttgtaaaacatcatgctacatatccaagtggcatatttaaatagatgtgtcctgttttgcagtaacatttctttagtactttgttatagatagatagtttcagatatcacttaatgtttctcttttctcataacaatagttgatagggctttttctgtaccaggcagtattctgggtactttacataaattaattcattaagtcttctcaacaggctgggtgtggtggctcacacctgtaatcccagctgcttgggaagctgaggtgggataatcacttgaacccgggagtgagagtttgcagtgagccaagatcacaccactgcactccagcctgggtgacagagtaagatcctgtctcaaaaggtttctcaacaaataatattatgaagtatttgcctt

SEQ ID NO: 25649 - DNA, 409 bp, Homo sapiens
  misc_feature (1)...(409): n = a,t,c or g
ggatttttggggacatcaggacagaacgtgagtgacattttccgatacagcagcatggaggatcacttggagatcctggagtggaccctgcgggtccgtcacatcagccccacagcccctgacactctaggttgttaccccttctacaaaactgacccgttcatcttcccagagtgcccgcatgtctacttttgtggcaacacccccagctttggctccaaaatcatccgaggtcctgaggaccagacagtgctgttggtgactgtccctgacttcagtgccacgcagaccgcctgccttgtgaacctgcgcagcctggcctgccagcccatcagcttctcggcttcgggcagangacgatgacctggaaggcctgggcttggcccttgactcaaaaagnggtttgacc

SEQ ID NO: 25650 - DNA, 494 bp, Homo sapiens
  misc_feature (1)...(494): n = a,t,c or g
ntttgaanncanagctatgacatgattacgaatttaatacgactcactatagggaatttggccctcgaggccaagaattcggcacgaggtttctgagctttcctgtctttccttttttctgagagattcaaagcctccacgactctgtttcccccgtcccttctgaatttaatttgcactaagtcatttgcactggttggagttgtggagacggccttgagtctcagtacgagtgtgcgtgagtgtgagccaccttggcaagtgcctgtgcagggcccggccgccctccatctgggccgggtgactgggcgccggctgtgtgcccgaggcctcaccctgccctcgcctagtctggaagctccgaccgacatcacggagcagccttcaagcattccattacgccccatctcgctctgtgcccctccccaccagggcttcagcaggagccctggactcatcatcaataaacactgttacagcaaaaaaaaaaaaaa

SEQ ID NO: 25651 - DNA, 435 bp, Homo sapiens
  misc_feature (1)...(435): n = a,t,c or g
gccctgagccccatcgggcactaaagagatggatgctttgcgagtaaatcttgcatgcattaacattaatttaaaatatccgagttggcagtcaaaagcatacttttcaataagcagccaacttttcttctattaaatctttaggagaatatattaccaacttctgggaaatagtatttgcaagaagctgagcttgagtaggtttaagaatttagcagtgttaagctgcctgccacaaacgtgtgaagtccacctgtatacgtgtgatcagcacatcagactgtgtcagagcttccgtggcccccacagctgtctctgtccaaacacaaccaccaagagggctcaggccgctctgatgatggtgctgtcctgaaagggggactgaggaccnttgcagggccgaaggacaggtcaaanctntgccaaaaaacctgg

SEQ ID NO: 25652 - DNA, 468 bp, Homo sapiens
  misc_feature (1)...(468): n = a,t,c or g
tttnnnntttgaaaccgctatgacatgattacgaatttaatacgactcactatagggaatttggccctcgaggccaagaattcggcacgagcgggtactgaggctctgtaccgtgaacagcgtggaggaaaagatcctcgcggccgcaaaatacaagctgaacgtggatcagaaagtgatccaggcgggcatgtttgaccaaaagtcttcaagccacgagcggagggcattcctgcaggccatcttggagcatgaggaggaaaatgaggaagaagatgaagtaccggacgatgagactctgaaccaaatgattgctcgacgagaagaagaatttgacctttttatgcggatggacatggaccggcggagggaagatgcccggaacccgaaacggaagccccgtttaatggaggaggatgactgncctcctggatcattaangatgacnctgannnnaanggctncctg

SEQ ID NO: 25653 - DNA, 399 bp, Homo sapiens
gggtggagcccatcaagcggtatgggaaccattttcttttaagctgctcaaagatcttaaagcagctgttggtcagtatggtcccaattcgcctttcatccgatcgctattgcaatctgtggctcagaataagctattgactccgtgtgattgggagattttaacgaaagttacactttcgccctcccaatttcttcagtttaagacttggtggaccgacgaggctcaaaatcaagatcgaaaaaaccgtgctgctaatcctgctattgccattacatttgaacaacttctaggaatagggggtcaatggggaactgtaaacaaccatcaggacttcgagatgatgccattgaacaaattcgcaattgctgtttgagggcatgggagaaaattcaggat

SEQ ID NO: 25654 - DNA, 469 bp, Homo sapiens
gtaagattcaggaaacgaaaccaggagccgcgggtgttggcgcaaaggttactcccagacccttttccggctgacttctgagaaggttgcgcaacaactgtgcccggcagtctataggcgcataagaggaagccatcgcctggccccggctctctggaccttgtctcgctcgggagcggaaacagcggcagccagagaactgttttaatcatggacaaacaaaactcacagatgaatgcttctcacccggaaacaaacttgccagttgggtatcctcctcagtatccaccgacagcattccaaggacctccaggatatagtggctaccctgggccccaggtcagctacccacccccaccagccggccattcaggtcctggcccagctggctttcctgtcccaaatcagccagtgtataatcagccagtatataatcagccagttggagctgcaggggtaccatggatgc

SEQ ID NO: 25655 - DNA, 392 bp, Homo sapiens
cccacgcgtccgctgccatggtggcataagtggcaccatttacgagtacggagccctcaccattgatggggaggagtacatccccttcaagcagtatgctggcaaatacgtcctctttgtcaacgtggccagctactgaggcctgacgggccagtacattgaactgaatgcactacaggaaggagcttgcaccattcggtctggtcattctgggctttccctgcaaccaatttggaaaacaggaaccaggagagaactcagagatccttcctaccctcaagtatgtccgaccaggtggaggctttgtccctaatttccagctctttgagaaaggggatgtcaatggagagaaagagcagaaattctacactttcctaaagaactcctgtcct

SEQ ID NO: 25656 - DNA, 499 bp, Homo sapiens
  misc_feature (1)...(499): n = a,t,c or g
gtggctgactggccttgcgaggaaaccgcctcggagctgcagccgaaggccaaggaatcactgaagatcggcgagggaggacagggggttcagcatgggtggctttttctcaagtatattttccagtctgtttggaactcgggaaatgagaattttaattttgggattagatggagcaggaaaaaccacaattttgtacagattacaagtgggagaagttgttactactatacctaccattggatttaatgtaganacggtgacgtacaaaaaccttaaattccaagtctgggatttaggaggacagacaagtatcaggccatactggacgatgttactattcaaacacagatgcagtcatttatgtagtagacagttgtgaccgagaccgaattggcatttccaaatcagagttagttgccatgttggaggaanaagagctgaggaaaagccattttagtggtgtttgcaataaacaggacatgggaacaaggccatg

SEQ ID NO: 25657 - DNA, 350 bp, Homo sapiens
gtgacatcaagactgactcatgctgccctggttggttttgccactctccctgtgccatcctgccatcactgaaagcacaggagtaaaacaatggcctctaataacagaccatggtcagctacctgcattatcacaacctgacatcacagccttaaataactcctgtaatttccatctgtctcttgctttcatgtgtgttagaaaaacagccaatctctttataaaacagccctataatcatacgtactcttcatcttctaagtgtccatgcagcttgaatcattgcacacagtcttctatgagttatgaaaataaataaaaccccctcttttccccattttatgggtggg

SEQ ID NO: 25658 - DNA, 904 bp, Homo sapiens
ggatttggcctctactccccataagtcacagtaccataagcaggcttctggcctcagcaatttggtctttgtgcccaagtttattgtgagaatttcctgaaaactctataaaaggtctcttcctactgtaggcctctaatgtttctcccctttttgcttcagtccactcttcagtcttgtaggcctagttttcaaacctgcacatgtgtcctacctggccacaggcatgcaggcctcaggcagctgggccagtttgggagcctcgggtgatgtctgcacgatctggggctgcctctgcacccctgctgtgggcttcagggttggagaagggctgggaccaaccgggtgagatccacaagtctctggatgtggctgaaggcaaatacacaattgaagtactttctgttttgaagtgctttcccttttgaatctggtttgaaacatgcagcttctgtctctagcccaaggaaagaccaaaacatagggaaataaaagcatttatctttgtcttggaagtaattgttgaagttgtgcagttgatcagtgcacagttagatgcaatgtttatagaaattgattgttaaaccaaatttacactggcatgtgtggtgtagtttctaaaaggcacttcacatttgaaatttttcttaccttagaaagtttctagtgatctaaatgtctagttttgtattcttttgtgtgtgttcactgtttctcagtattaccacttgaataattctctgtacaggggggtttgtgctatacactgggatgtctaattgcagcaataaagcctttcttcaaaaaaacgacgcggccgcgaattcggatcctcgagagatctctttttttgggtttggtggggtatcttcatcatcgaatagatagttatatacatcatccc

SEQ ID NO: 25659 - DNA, 349 bp, Homo sapiens
gaattaggaagactaagcagccccagagataagacctcatgggatcattgttacttcttatggagtgataaagtgaccttcctcgaattgtatcaatccataaccaatcaagttgctgcaacctatgcactgggcttgaatgaaagctgtcatgattctgctaaagattctctgtctttccctgtgtgtgaaaccttaacgtctctactttggaacgccgatctcatttatttggagttggtgtttccaggtggctttcttcaagctttgtgttcacataaactcagtacttaatcttacattctaaattttattatttactgctgacgtcagtttctgtcggattgta

SEQ ID NO: 25660 - DNA, 374 bp, Homo sapiens
  misc_feature (1)...(374): n = a,t,c or g
aaggttttcaaagaattactttcttccatgttcaaagctagattttactaaacacatgtatcacattcatatatattgtttcttggccccactgccaaaggaagtcagtcagtaatttcacaaccgttatcagagtttggaagcagaaatagctgttaactaaaatctcccactgctcagactactttctgccctaatggccattactatccagtctgtattgctacaagggacccactggtaccccttttagattctatcaaaaggaacagggttttcctagaggcaggcagcctggtggtatggcacagcagaagcttactgctaatgaaatgggaacctccccctcccttgtggtttcagcacanaacctg

SEQ ID NO: 25661 - DNA, 325 bp, Homo sapiens
ggcactctgaccatgagtcattcagttctcatgttaaaatgtacttaatattacaaatcaaaggtacagtggaagaagggttaatcacaagaagttacttatatggtagccctgagctttaattgcagagtaactttaattacttttagagcctaaagatgactctagagcctaagtcctagtttctcccaatgttatatttaattttaaaaaattgatatgaaaatgtctaatgtatagtaataatttatgacagatctagtcatttcttcctattaaaaaagattaccttatctccagtaggaaatggaattttatgggcctt

SEQ ID NO: 25662 - DNA, 440 bp, Homo sapiens
gtccactttagttggttaggaattggtggcaatgcaggagggactcagagttggagtatttatgttgaaaggttaagaatagtgttagacacagttctactcagctataccacatagtgtggaagaaaagaacagagggtgatttggtatttttcaatgttggatcttctattggttcctctgttctacagcattggtgaatgataacaatttacaacttgcacttaagttagagagttagagacatcggtatgaattcctgtttagcttactatagattcagatggctacatacagaatgcttgtagatatgtgtgtgtatatatatgtggtactgtacacacacactttgctgtgttagctgagaggggctaaaagaaatgacccccagaagcagtgagcatgagcacattcagtgcccagctcttgggttctaaagg

SEQ ID NO: 25663 - DNA, 340 bp, Homo sapiens
ggcaggttagtctgaggttgtgtgtacagggcctttgaagttcggaaaatactcatgtgaaataccaaaagaagctgagattagtaaatctgactttagattgagcatatttttgcaaaatagcataaatcctagcagaatttaatttctccccctgattcttaatattttcttttgaattttaaaacagaaaaacctgagggtgattaggatgataaaaatatttattaaaatgctttcaaaatcacctagaatttgaaggctattctgtttttacttggttaatgtcatctcttttcaaaatacaggcaaagaaaggtaatagttctgctacagcaat

SEQ ID NO: 25664 - DNA, 498 bp, Homo sapiens
  misc_feature (1)...(498): n = a,t,c or g
atctgnaatcncntgatatcncttgattacgaatttaatacgactcactatagggaatttggccctcgaggccaagaattcggcacgaggaactgaacttggggtagggttgagataagagtttgggtggggtggtggtaagagtttgggcctcccaagggctggactagactaaattggaggatctctgggcttcattccacttctgtccaccccagtctcacattcacatgcgttctcagttggagctataacagctcttatttttctcctggagtccctggcctttcagtggctacttctcctttcatcttctcatttcttatatttttctcttttgttcttccgtcagtcatccttctgttttctgacaattcctgatctctgcagtattactgccagcattgtctattgtctacgctttacagggagaggatgggtgaaaggggttctcaaaagggcagggacataccnanttaactggggattttnatttca

SEQ ID NO: 25665 - DNA, 446 bp, Homo sapiens
  misc_feature (1)...(446): n = a,t,c or g
accnctattacatgattacgaatttaatacgactcactatagggaatttggccctcgaggccaagaattcggcacgagctgctggacggcttcctgagccagttcccttctgggaaggtggtcatcacactgttcagtattcggctggccaccatgagtgctatgtcggtgctgatctcagcgggtgctgtcttggggaaggtcaacttggcgcagttggtggtgatggtgctggtggaggtgacagctttaggcaccctgaggatggtcatcagtaatatcttcaacacagactaccacatgaacctgaggcacttctacgtgttcgcagcctattttgggctgactgtggcctggtgcctgccaaagcctctacccaagggaacggaggataatgatcagagagcaacgatacccagtttgtctgccatgctgggcgccctctt

SEQ ID NO: 25666 - DNA, 568 bp, Homo sapiens
  misc_feature (1)...(568): n = a,t,c or g
ggggaaggatgggggaagaggaggcaaaaatacatgaaggatcaatgcttcttgggcttcagtttaaaaaacattttctttaatttttgaaaaataggtgtaagagaggagtggggagagggaanaggaagagatagggatgggagggaagaaggaaacaaggatgcatcatcaaagccatccccccactgggagggtaaggagagtggtggataaaattcaaggtccagaggttgggtctgaaatgggggcctgaaatttaagtccagaggcctcagctttggataaggatagaggcacggtgcttgatggcatctctcanatcgcagggtgaaagaggggctgcacctgcgcgtttgcangtcctgctggcanaaaagctcatanaccatcccncagggctctccaaanagtagttattnccccancaccagcactgagttcatcccccaagggagtactgtncacgggctccacggngacatcaccactatgtnttactggttggngggannnnnannannngnnnnnangnnannnnnnnnnnnnnncnngnccnannnnttgg

SEQ ID NO: 25667 - DNA, 416 bp, Homo sapiens
tatgacatgattacgaatttaatacgactcactatagggaatttggccctcgaggccaagaattcggcacgagggaagaaggaagaagaggagaaggagaaggagcgggtggcctatgctcagatcgactggcatgattttgtggtggtggaaacagtggacttccaacccaatgagcaagggaacttccctccccccaccacgccagaggagctgggggcccgaatcctcattcaggagcgctatgaaaagtttggggagagtgaggaagttgagatggaggtcgagtctgatgagaagcaaggagtaccatatatactgagaacaggaatacaggagaagaggacggtcacgaagccgagagagaagaacaccaccaggaagatcaagaagtaaagataggaggagaaggaggg

SEQ ID NO: 25668 - DNA, 339 bp, Homo sapiens
  misc_feature (1)...(339): n = a,t,c or g
gggagagcggccgccgccgctgccgcttccaccacaggttgaagaaaacaggtctgaaacaaggtcttacccccagctgcttctgaacacagtgactgccagatctccaaacatcaagtccagctttgaccgccaacctgtctgacatgtcgggacccgtgccaagcagggccagagtttacacagatggtaatacacacagacctcgagaatactgggattacgagtcacatgtggtggaatggggaaatcaagatgactaccagctggttcgaaaattaggccgaggtaaatacagggaagtatttgaagccatcaacatcacaantaangaaaaag

SEQ ID NO: 25669 - DNA, 353 bp, Homo sapiens
gctggaagacttgggtcttttaggccagcaccagcttttgagcagattatctatgtactgggaaccagggcatattcagacaattcccgggagagcctgggatcggcgccaggggaggtggtatttgtgctggcatctgggatgcttctgggatgttcttttccttccctcctgtgcggcaggagttcctgtgtcatcactcactctggcagcttctctccatccagcaggctgcggccactcctgctccaaggaggtctgaaactcagcctgagtgggtaggagcctcttacaagagttccttttctgctgggcatggtggctcatgcctgtaatcccagcactttgggagg

SEQ ID NO: 25670 - DNA, 422 bp, Homo sapiens
agcatttgtaattttatagtcgcagatattgcgatttttgcatacacattaaaatagaaaaggtgggaaatattttctgctgaccagtttccaacctttctgaaatatcactgtgaagaaatgctgttaaagcaaacttacataaagcaatgctagagtttgttaacaatgtttgatatatattgacaaaactttgttctctaaaactgccaagatcacatcacatttgtaaaaatggtaagttaatgcatttgtcatatagtgttatgtcttggctttaccatatttcattctttaaaaagtcattaatggtttagaaatgggatggaaagtttactgaaaatacctgtaagtaactatattgttaatatcttccctctgcagttatgactctataatcagttcaatgctttatttttaaa

SEQ ID NO: 25671 - DNA, 309 bp, Homo sapiens
ggaccccaaagggaatacaaagacaaataagtcctgctgtatttccaataaaagtctaaagtaaaacaaaaataaaggcatccacagtggaaaggtacaatcaaaactgcacgattatctgtgtagaaaatctacattttgtagaatctacaaaaatggtacccagaataaacaagtttagtaaggttgtaggaaataatattaatagtaaatagtcaattctatttctatataccagcaataaaaaaaaaatcaaaaatcaaaattaaagatcattagcatcaaatatgaaataacttagggataaag

SEQ ID NO: 25672 - DNA, 425 bp, Homo sapiens
ggctgcagaatatgcattttttttcatcagcacgtggaacattctccaggcttgaccgtatattaggacacaaaacacatctcaaaaagcttttcaaaatcaaaattatggccaggcatggtgtaatcccagcactataatcccagcactttgggaagacaatgcaggaggattgtttgagcccaagagtttgagaccagcctggacaacatagtgaggctttgtctctacaaaagattaaaaaattaaccacccgtggtgctgcacacctgtggtcccagctactcaggcggctgaggtggggaggctctcttgagcccaagagggttgcagtaaggatgcagtgagccatgatcatgcctctgcactccatcctgggcaatagagtgagactccatctccaaaaaaatattgaaatttttcaa

SEQ ID NO: 25673 - DNA, 432 bp, Homo sapiens
  misc_feature (1)...(432): n = a,t,c or g
ggtttctcactccctgactaaattgtgaggtctttagagatgaggactatatctgtctacctttttatatccagttcccagtatgctgcttgacatgtcataggtagttagtaaattctttctctgtgaacacacaaatggaaggatggcccatttcttttaggagttcatatgagcttgctaactctgagtcagaatgacccgtgaactgaaacattcagacgacaccaccactaaaaaccatggggattcaattcttttggagttttactgctgaatgtacattttgcttaatttttctttctggggaacttgccaaaatttaggtaagggcgccaggtgtggtggctcatgcttgtagtcccagcaccttgggaagccnaggcaggcntatcgcttgatccagaagntcnacaccancccgggcagcag

SEQ ID NO: 25674 - DNA, 132 bp, Homo sapiens
ggagttgtcaggaactggtgggctcaggaccgatgtcaggctctagggagtcaggctctggggatgtcggttcccacttctgaggagagggacagggaggcctcccaggtggtgaagcacccgacctcagct

SEQ ID NO: 25675 - DNA, 918 bp, Homo sapiens
  misc_feature (1)...(918): n = a,t,c or g
gtggaacccctgcacagagacggacacaggatgagctctaagtacccgcggtctgtccggcgctgcctgcccctctgggccctaacactggaagcagctctcattctcctcttctatttttttacccactatgacgcttccttagaggatcaaaaggggctcgtggcatcctatcaagttggccaagatctgaccgtgatggcggccattggcttgggcttcctcacctcgagtttccggagacacagctggagcagtgtggccttcaacctcttcatgctggcgcttggtgtgcagtgggcaatcctgctggacggcttcctgagccagttcccttctgggaaggtggtcatcacactgttcagtattcggctggccaccatgagtgctatgtcggtgctgatctcagcgggtgctgtcttggggaaggtcaacttggcgcagttggtggtgatggtgctggtggaggtgacagctttaggcaacctgaggatggtcatcagtaatatcttcaacacagactaccacatgaacatgatgcacatctacgtgttcgcagcctattttgggctgtctgtggcctggtgcctgccaaagcctctacccgagggaacggaggataaagatcagacagcaacgatacccagtttgtctgccatgctgggcgccctcttcttgtggatgttctggccaagtttcaactctgctctgctgagaagtccaatcgaaaggaagaatgccgtgttcaacacctactatgctgtagcagtcaccgtggtgacagccatctcagggtcatccttggctcacccggcaagggaagatcatcaagacttatgtgcacagtgcggagttggcaggaggcgtggctgtgggtaccttgtgtcacctgatcccttctncgtggcttgccatggg

SEQ ID NO: 25676 - DNA, 335 bp, Homo sapiens
cagaagtgtatgtggtacagaatataagtcaagatcttcctctccatgttggcttacattaaagagccaagaagaaatgtattatttacattgagattatctactggtgcgtgtagaaagtttaaattagctgcaagaaattttatctagacatgcacctgccaactgctacgagctggtatttactgggcagattaattacaaatatttctctgttcctttaaatatgatcaggcagatgcagaagttggtgctcatggtgagtgcatttcttcttaatgcctcagtttaaaatggctttaaggaattcatagctgtcaagatgacgtgatgct

SEQ ID NO: 25677 - DNA, 437 bp, Homo sapiens
ttgattccgaaagctatgacatgattacgaatttaatacgactcactatagggaatttggccctcgaggccaagaattcggcacgagccctgtgagaagtctgaccacccggaggccacccagtcgtgaggaagtctaagccacatgaagaaaccacagtaggagccatggtcaacagtccccgctgaggctggtcttggagtcatcccagtccagacagcaggcatacacacctgaggaagctcccttatgattctggcctccagctgttcacattctcccatcatggagcagagataagccttcctcactaggccgtctctattcctgacctgcagagtccacaagcctaagagtggttgctgtttaacaccacagtgtttagaagtgctttgtcacacagcagtcgacaataagaacaaaggtgctgcatataa

SEQ ID NO: 25678 - DNA, 467 bp, Homo sapiens
  misc_feature (1)...(467): n = a,t,c or g
ggagagagctagcacctgagcttcaataccctatctctacaaaaaatttaaatattaatcagatgcactgggtgtgcgcctataatcccagctactcaggatgttgaggtgggagtgatggggtgggagtgatacgnttnaanntttttnggannannttcntccntncattngatannttnttacacctgtcctcncttnncnnatnantnaanantttanntgnttcccactcnaangtngccttttacacctttgctcnatgaccttaacttttnnntcttcantctccttanttccnnataattannttnccaaacaaagaaagnnnttganccccttttgngaacccccnnctnganttttngtctatngattnccngtaccnganatttnncnttggtncnataaanngaactttaccctggaactttngngcaataatnngnnaaaaantttcnttgtcc

SEQ ID NO: 25679 - DNA, 478 bp, Homo sapiens
  misc_feature (1)...(478): n = a,t,c or g
ttggnncccaacagctatgacatgattacgaatttaatacgactcactatagggaatttggccctcgaggccaagaattcggcacgagcggcacgagaaaattggaaaatgtgggcttatttttcctttcctggatttgtgaattaagttttatgaatagattataaaaggaaagctataaaaattaaattattgtgtttcacttgatgattcactcttacataaaatgatacagatttgaaaacagaatcttgcatatgatggttgcttggtgtcaattttacatcaaaaaagcctccaaggaaaacattatgttgaggatgtatctgtgcggtttttgctgtaggtgaccttttgttcctgagtataccactgaacttcatatttgaacagctagaagtgggttttacctagttttggttctggacagcagngagaattttcaaaacttcattggtntaancatgccttgattttt

SEQ ID NO: 25680 - DNA, 363 bp, Homo sapiens
gttaatttctgattctgtgaaggccagatcatacagctggaaatgattgaaaagaaaagcatgttcttttgtttaacaagacaaagcctattgtgtactctgcttctgatgcttaaaagatgtatttttttttcttactgcgtaatatgtagggctaaaagttttgaactcttcacttcagaaattacttttccagacaaaagagcaaaacaatgtttgtttaaattgttctctggaacatgactgatagtgtttacaacatttctatgacattttgatcctgtggggagtacttggagaggtatttaaagtgcttttcactaaatcagatgctttgtagtgtttgaaccttttttaaaaaat

SEQ ID NO: 25681 - DNA, 312 bp, Homo sapiens
aaaaaagggccaattaggagctccaactctgaagacagttcaaacagcagcactagattttggagactcaacactcttaaagggtgtgatgtttcctgggaggaataagcccatttttaagtggggctttccccttcgaggggataacgagaggaaatcagcaacagaaagtgaatgcctatgctgggcatccctggagcacagcaactgggtgaggggctgagcagcaattactggggtggaggtctgttttgctaatgacatgacagagtttcaactgtgattccagaggctaaagaggagattctgcaa

SEQ ID NO: 25682 - DNA, 331 bp, Homo sapiens
gtttttttttatttttggtagagatggggtttcaccatgttggccaggctggtctcaaactcctcacctcgagtgatacaccagcctcagcctcctaaagtgctgggattataaacatgagccactgtgcccagccagaaatataatttttaaaatttcagttttgattgtttatgtctagcatataggaatgcaattggtttttgtatgttgacttgtttcctgcattgatacaaggcaagataaccttgatgaactgttgattttgttgttgttttgaggcggaggttgcagtgagccgagattgtgccactgcactccagcctaggta

SEQ ID NO: 25683 - DNA, 831 bp, Homo sapiens
ggctctggagacggagaaggtgcagtacacgttgccagacggcagcacgcttgatgtggggcctgcacgattccgggcccccgagctgctgttccagccggaccttgtgggggatgagagtgaggggctccatgaggtggtggccttcgccatacacaagtccgacatggacctgcgccggacgctgttcgccaacatcgtgctctcaggtggctcaacgcttttcaaaggcttcggagaccgattactcagtgaagtgaagaagcttgccccaaaggatatcaaaatcaagatctcagccccgcaggaacggctgtactccacatggattggcggctccatcctggcctcgctggacacttttaagaagatgtgggtgtccaaaaaggaatatgaggaagacggtgcccgatccatccacagaaaaaccttctaatgtcgggacatcatcttcacctctctctgaagttaactccactttaaaactcgctttcttgagtcggagtgtttgcgaggaactgcctgtgtgtgagtgcgtgtgtggatatgagtgtgtgcgcacatgcgagtgccgtgtggccctgggaccctgggcccagaaaggacgatgaactacccgcagtggtgatggcctgaggcctggggttgaccactaactggctcctgacagggaagagcgctggcagaggctgtgctccctcctcaggtggcctctggctggctgtgggggactccgtttactaccacagggagacagagggaggtaagccatccccgggagaccttgctgctgaccatctagctggctgcccaccctcccccaccccaggg

SEQ ID NO: 25684 - DNA, 341 bp, Homo sapiens
gcaactctggagcagacgcagtactcctgggagcgccaggcggccttccgcttcaaaaggaagctgcctaagtacctgctctttaccagcccccaggagaacccctggggccacaagcgcagctaccgcctgcagatccactccatggccgaccaggtgctgcccccaggctggcaggaggagcaggccatcacctgggcaaggtaccccctggcagtgaccaagtaccgggagtcggaactgtgcagcagcagcatctaccaccagaacgacccctggcacccgccggtggtcttttagcagtttcttcacaacaacgagaacattgaaaatgaggacct

SEQ ID NO: 25685 - DNA, 409 bp, Homo sapiens
  misc_feature (1)...(409): n = a,t,c or g
gatccaagactgggtccacatcaatgagaaggaagccaggattgattagcagtgtctgtcaagggggcaaggtgggaagaggtggcatgtgtgttgtccacatgacacccttagtaatgggcatttgctttggaaaaactgtagaggaacccagaggacttcaaaaggactctacagccagcaggcaagaggtgtcttctggataggaagaaggggacgaagtgcctctggaaggacagacagtgtgtccaggggagggagccctgctgtgccaggccttctcatgcctcggtgtgatctcacacctgggatgagtgtgagacactcacacatgaatgttgtgagacaacattcattcacttagtaaatattgagcaaccctatcaccaggcacagtgcanttggtaaa

SEQ ID NO: 25686 - DNA, 451 bp, Homo sapiens
gcctctttctgacacagagtgagaagggagagagggcctttcagcgagaggccttccgcaaatctgtggcctccaaaagcatccgccgctttcttgaggtttttatggagtctcagatgtttgctggcttcatccaagacagggagctaagaaagtgtcgggcaaagggcctttttgagcagcgagtggagcagtacttagaagaactcccagacactgagcagagtggaatgaataagtttctccgaggtttgggcaacaaaatgaagtttctccacaagaagaattaagcctccttctcagtagcagagtccagtgccttgcagagcctgaagcctggggaagagccagcctgggaccctctgggctgctgtggctcctctgcccccacagatcctatcctccaagccagcccacctctgccttcatcatatcccaggatactgtttgt

SEQ ID NO: 25687 - DNA, 346 bp, Homo sapiens
cttaaagcacaatccaaaaaagtaataataataatattagttaacccattaaagtataatctaaaaaagtaataataataatattagttaacccataaaaaaagaaaatatggggccccttgttcaaaaagcaggaaaagggtgacattaatgctattaaaacataaagcttcttttctttctttggtagtgactctctcaaattgtcatggtgcgctttcatttgctatttaatgttgttctaagtaaaaaaaaattagagtttaaaatttttagcatgaattttaccattcatctttatattgtgcaatggcagttttaaatgcaaatataagatcattcacct

SEQ ID NO: 25688 - DNA, 290 bp, Homo sapiens
cacaggtgggcccccacctaggtagaggcaaaatctgaagtgaagcccagattgcctgattgctagtctcactaaaggagtggctcttaacatggttagaccatccatcacttttaggaaaatattttacatggctatttttttttctatttttaagatatttgttagtattattgtagagacagaatctctccctataaaattcacataacaattgtcatctcccccccaaaattactgtatacccattagcagtcactttcattttttcttctcaaagcccaactccc

SEQ ID NO: 25689 - DNA, 546 bp, Homo sapiens
cgtgctctcgcgagatttgggtctcttcctaagccggcgctcggcaagttctcccaggagaaagccatgttcagttcgagcgccaagatcgtgaagcccaatggcgagaagccggacgagttcgagtccggcatctcccaggctcttctggagctggagatgaactcggacctcaaggctcagctcagggagctgaatattacggcagctaaggaaattgaagttggtggtggtcggaaagctatcataatctttggttcccgttcctcaactgaaatctttccagaaaatccaagtccggctagtacgcgaattggagaaaaagttcagtgggaagcatgtcgtctttatcgctcagaggagaattctgcctaagccaactcgaaaaagccgtacaaaaaataagcaaaagcgtcccaggagccgtactctgacagctgtgcacgatgccatccttgaggacttggtcttcccaagcgaaattgtgggcaagagaatccgcgtcaaaactaagatgggaagccgggtcataaagggtcaatttgg

SEQ ID NO: 25690 - DNA, 359 bp, Homo sapiens
tttttttctagaaaagatattttttttgtggtcgaggattacatcttgcatttagttctcatgtcttattaaattccatcaatctggaacagtttcttcatctttctttatctttcatgaccttgacatgttttgaagtttcgagccagttcttttgtagaatgtgggtttgtctgctgttcctcatgattagattgtgggtatgcatttttggtaggaattctccaagagccgtgtgtgcccttcttagtatatcatatcacaagacatgctatcaatttgccccattactgggtgtgttaactgtgatcattgggttaagagtcgacgcggccgcgaattccagatctatgaatcgc

SEQ ID NO: 25691 - DNA, 514 bp, Homo sapiens
  misc_feature (1)...(514): n = a,t,c or g
gccgtgttcttccgctttgcctcccattgtgacagtgattggcttggagtccggtggtctcctttgtcctgggctcctaaccccagttctgtgagcaagttcaggtagtccaggatccctctggaattgtacatacatgtggagtatatgcatcagtgtggggaaggggaggagaggcttttgtgacaatctcaagaatgtcagtgcctgggaggcacagactcctgccccagctctccctggtccctcttggagttcttcctctcactgctgaggtgggggtcgctgcctagagggagcggcctgcctgctgtccccactggatcgcgggctgcacttgtcccattgggagcaggctcagggaaatacaaatagcactgcgtgcttttatgtttcangtgcatcctaataaatgggcttttgcggttgccctgggaaactgcatgtaancgtgtgtaaaattgnttcgnaggggaaaaaaacagccaanttacaaaanaaccctttntgactg

SEQ ID NO: 25692 - DNA, 502 bp, Homo sapiens
  misc_feature (1)...(502): n = a,t,c or g
gcttccccaggtctgcgagcctcgaaggcttctttcagacagcagaccccttagaagcgcaaggctgctttctgacaaagaatcaagtgttcctttcaaccagccaagggactggttttctcgctgaccctttgacagctccagccggtccctccgttcgaggtccctgacttcctgcaacagactgagatggccttctgagcttttccagggctgacgaccaccttcttgataccttcccctctctcgttctgaatccgtgcccaccagacggactctagctcttgttgcccagactggggtgcaatggcgcaatcttggctcaccataacctccgcctcctgggttcaagcgattctcctgcctcagcctcccaaatggggccgtctagttgcaggaaaacaagctcagggctccactgattctacatgatgggaatccaggctttcggagatgaagactgggaggtctccagaccacacaagcccctattgnactggcc

SEQ ID NO: 25693 - DNA, 373 bp, Homo sapiens
gttggaagccgtggttatctctgttggctccatgggattgattatcagccttctctgtgtgtatttctggctggaacggacgatgccccgaattcccaccctgaagaacctagaggatcttgttactgaataccacgggaacttttcggcctggagtggtgtgtctaagggactggctgagagtctgcagccagactacagtgaacgactctgcctcgtcagtgagattccccccaaaaggaggggcccttggggaggggcctggggcctccccatgcaaccagcatagcccctactgggcccccccatgttacaccctaaagcctgaaacctgaaccccaatcctctgacagaagaaccccagggcctgtag

SEQ ID NO: 25694 - DNA, 362 bp, Homo sapiens
gcggcacgagctaaggctgtttgcttcaccgtggattcgcttgagttaggaatgagaagtagccacagtatggatgggtggatgggttttatgagatggatcacatattttattaagaactcaaacttctggctccctcttctttcagacttgccatgtgactctggcttggcctatctcctagggctatggtgtggactgaatgggatcatgaaagtagacagttttgagaacgtaaagaactttttcttttccctcaatctcaatcctgcagtggggtttcgcagcctgagtccacgacctaggcagtaggccggtgtgcctgactgcccagcatttgggtaatttagattgtaaaccgc

SEQ ID NO: 25695 - DNA, 375 bp, Homo sapiens
gcataaaactgctcaagaaatgtttgcagtactgcattggttccttagttgagtcatcctagagtccagagggcactggcagggtggggaagcctgaggcagatctggagtttgagaccctcactattttggcatgtagatgggtggggagcttgctcgctgtgtccttgctggacacagggccagtgtaagaagttggtcctgaagggcagaattggaaagcgaaaaacaagagatgctgaccttataaatcaaatgtgctgaaggcctattgtatgcctgtggtaagctttgaatacttaaacttaacgctaacctttcaagttggtgatattcttctgattctctagatgagaaaatggggcatcagaaagg

SEQ ID NO: 25696 - DNA, 350 bp, Homo sapiens
ggggaactaggagagagtgctagggaagccagtgccagcaggcctggagcctcatatttctttggcatttgtatgataccttctagtacttcgttttttgacttatatatgaactaactcaatttagatgcttagaaaataaacggccactggacctgcaagagattagtagtggtgttccatagccttagacatttcttacacttttatccacagataagaaaaaaatagtgatatttgatttgttttgccaaggcttagaaggatctaatatgtgttactcgttgagcagcgggaagcagcagacatttctagggtttctccctgtcaccattcaggagacagtgcac

SEQ ID NO: 25697 - DNA, 121 bp, Homo sapiens
ggagaaaaggcagagcaaagtgtcttctcttattttgttacaggacaaaagcccccaacacacacacacacacacaatcaccattcttccattgcattctgagaaaaaggctccaaatctg

SEQ ID NO: 25698 - DNA, 690 bp, Homo sapiens
  misc_feature (1)...(690): n = a,t,c or g
ctcatcagaccctggtcacaaaccctagtgaggtgcatgtgagcaccaagtcagggagagggggcaggagtgactctgaggccaacagagagggtgggaaggggatctccctaggtcccctggtgatcaccccccacccaaactggtatctccacattctcaatgactatgaagacataccaggctctgtccttttggcccccaccccatccctggccagagcttcaaaggccagtcccaaaaggttctaccctcacttgctcaggcttctagccttcctcttctcctccttcttcacatttttctctgtgattagtagcaggttagggtactgtataagccgcagtgaggctgggggccaagggggtggggtagagatgggatgaagagaggagaagagctgtccaaggacccctctcttcatgggatcccaaactgtacaaccagctcctcttttgcgtccacacggatctgagaaagtgcactgtaggcataagcagctatcctggagacctgctgcaaatcaganaacgggatgggctcnctggccagcactnngtnnggcnggccngtaananccgncancggngncagattcttnnctcgtgccgaattcttggcctcgagggccaaattccctatagtgagtcgtattaaattcgtaatcatgtcatagctgttgnnttcaaa

SEQ ID NO: 25699 - DNA, 310 bp, Homo sapiens
ctcatgtggttggttgatgattgtctgtcaaagcacaaactctgaaattattaaaaacataattatttcataaacagatgagttaagttccagttaactcaacatcagtataacagagcaattggaagagaatatgaaaaaactggaatctaaatagtcagtgaggaaggctttgataaaatgaaattgccagaaagatataaaactggttagggtcctacagggaaataaaattataaccgtggaggtacatttctctaccagaaagcaaaaataaagcatcatgtcttaatggttttctacaaatcaa

SEQ ID NO: 25700 - DNA, 356 bp, Homo sapiens
gaattaacaactctttatttcatattttggtaagataagggaattcagagtgaaataactaatgtttaagaaaataaaaggccaggtgccatggctcatacctgcaatcccagcactttgtgaggccaaggtaggaggatcatttgaggtcaggagttcgagaatagcctggccaacatagtgaaacccatttctactaaaaatacaaaaaattagctgggtgtggtggtgtgctcctgtaatcccagccactcgggaggctgaggcacgagaatcgcttgaacccaggaggtggaggttgcagtgagctgagattgcaccactgcactccagcctgggtgacagaacaagactgt

SEQ ID NO: 25701 - DNA, 405 bp, Homo sapiens
ttccaatgttcagtggcggaacttgcaatcctcagtttgtggtctgccagctaaaggtgaagatatattcctccaattcaggacccacacgacgggaagacaagttcatgtactttgagttccctcagccgttacctgtgtgtggtgatatcaaagtagagttcttccacaaacagaacaagatgctaaaaaaggacaaaatgtttcacttttgggtaaatacattcttcataccaggaccagaggaaacctcagaaaaagtagaaaatggaagtctatgtgatcaagaaatcgatagcatttgcagtatagagcgtgcagataatgacaaggaatatctagtacttactttaacaaaaaatgatcttgacaaagcaaataaagacaaagccaaccgatactttt

SEQ ID NO: 25702 - DNA, 528 bp, Homo sapiens
  misc_feature (1)...(528): n = a,t,c or g
atttgaancattgctatgacatgattacgaatttaatacgactcactatagggaatttggccctcgaggccangaattcggcacgaggggtatttgtttttccattcaacatttaatccttgagtaggtcctagcagtctgggcagtgtcttagggactaaggtattataaaaagataggagactgggtgtggtggctcatgcctataatcccaacactttgagaggccaaggcaggaggatcacttgagcccacgggttcaagatcatcttgggcaacatagcgagacccagtctctacaaataattttaaaaatcagccatgtgtggtggtgcacgcctgtagtctcagctacttgcggagttgaggcaggaggatcccttgagactaggaggtcaaggctgcagtgagccgtgattgcaccactgtactcctgcctgggtaacagagtgacacaaaattctgtttaataaaaattaaatgatagggttccagccttagagggactgcgtttcaagtgagagagag

SEQ ID NO: 25703 - DNA, 330 bp, Homo sapiens
gcaagtgcccgccaccacgcccggctactcaggaggctgaggcaggaaaatggcgtgaacgcgggaggcggagcttgcagtgagccgagatggcgccactgcactccagtctgggcgacagagcgagactttgtctcaaaaaataaataaataaataaataaataaaaaggagacatgtcttgtttttaagtgttttcttaaaatacatctttcttatttaggaactgatgaatccccagaaccactgccaatccccacatttttgttgggttatgattatgattatctggtgctttctccatttgctcttccttattgggagagactta

SEQ ID NO: 25704 - DNA, 1157 bp, Homo sapiens
ggagagaagagcgcctcagacctcggtacccgcgagcggggaggaggcaggaaagaaggacgcggcgtctggggagcacccaggcagcaagacggggcccgggctttcgacagtggggagtgtgacgcgcttgggaaaggcaggagcgccagcggtcgggctgctcttggctaacgagaggagtccgaggcggcggcgaggggcgaacgacccgacgcaagatggcgagtaaagagatgtttgaagatactgtggaggagcgtgtcatcaatgaagaatataaaatctggaagaagaatacaccgtttctatatgacctggttatgacccatgctctggagtggcccagcctaactgcccagtggcttccagatgtaaccagacctgaaggaaaagattatgcccttcatcgacttgtcctggggacacacacatcggatgaacaaaaccatcttgttatagccagtgtgcagctgcctgatgatgatgctcagtttgatgcatcacactacgacagagagaaaggagaatttggaggttttggttcagttagtggaaaaattgaaatagaaattaaaatcaatcacgaaggagaagtaaacagggcccgttatatgccgcagaatcctcacatcattgctacaaaaacaccatcttctgatgtgttggtttttgactatacaaaacaccctgctaaaccagacccaagtggagaatgtaatcctgatctcagattaagaggtcaccagaaggaaggctatggtctctcctggaattcaaatttgagtggacatctcctaagtgcatctgatgaccatactgtttgtctgtgggatataaacgcaggaccaaaagaaggcaaaattgtggatgctaaagccatctttactggccactcagctgttgtagaggatgtggcctggcacctgctgcacgagtcattgtttggatctgttgctgatgatcagaaacttatgatatgggacaccaggtccaataccacctccaagccgagtcacttggtggatgcgcacactgccgaagtcaactgcctctcattcaatccctacagcgaatttattctagccaccggctctgcggataagaccgtagctttatgggatctgcgtaacttaaaattaaaactccataccttt

SEQ ID NO: 25705 - DNA, 443 bp, Homo sapiens
  misc_feature (1)...(443): n = a,t,c or g
ttgaaattgaataccgntatgacatgattacgaatttaatatcgactcactatagggaatttggccctcgaggccaagaattcggcacgagctcactgcaacctctgccttccaggagaatggtgtgaacccgggaggcagagcttgtagtaagccgaggtcgcaccactgtactccagcctgggtgacacagcgagactctgtctcaaaaaaaaagaaaaaagaaaagtatctggcatctagtgagtacagtataattgtggactggtattggtattagcagaaagcagagcaagtaaccttttgttgcgtttttgagtgactggactgagttgaggagacttcaagtgagaagggaaccatgtgacagagcaaatcttggttgtagtcatggcttacttactggtactttcttcttactgtcatttcgcttaaatgaccag

SEQ ID NO: 25706 - DNA, 391 bp, Homo sapiens
  misc_feature (1)...(391): n = a,t,c or g
gagcaagtgagaagtcccagaggagggaaagatctggaggaaaaaaagaagccaaagtgtgtggagcctagtgtgaggtgaggtggtagagctgggtagaagtcaggtgatgcagggttttttgttcactggatcttcgtaggaaacttgggttttactgtaggtgagataggagatactgaaggggtttaaacaacaagtggcatatattttacaaagatcacccaggatgacacagggagactggattaacaaagggggaaggtggggaagcaaggagggcatttaggaagccattgcccaaatccaagcanaagatgatgctggcttcatcanagtggagggagtgggtttgaagagaagtatgtgggatgtgactgatgggaatgtt

SEQ ID NO: 25707 - DNA, 381 bp, Homo sapiens
gctaagatcacacagaagactgaagtgcctgtcttgtgaccaagagtgtccctgtgtgagcccttttttgagtttaggggcagctgttgactcagtcgcaaagggaacagattgtatatttggggtttcaactttcctttttctgtacccttttacagcctgcagaggactcagctaattctgaagactcatctaatgtccagtctcttaaaattctgtttcctcccttcctttttaaaaacctgacgtttatataaaaaaaattatgttcagtgaaagaagccagactgaaaaggctatatactgtattatctcatgtatgtggctctctggagaagacaaaattctagggttaggaaatagatcaatggctgccaggag

SEQ ID NO: 25708 - DNA, 239 bp, Homo sapiens
cttcttgctggaagtccctcacccagagaccagtgctcccaacggcagagcagcgggggagataaagaactggtgacacgtggctgtacattcagcacagctgtggtgtccccaagtgccatgacccaggagccattcagagaggagctggcctatgaccggatgcccacgctggagcggggccggcaagaccccgccagctatgccccagacgcgaagccgagcgacctgcagctgtc

SEQ ID NO: 25709 - DNA, 307 bp, Homo sapiens
  misc_feature (1)...(307): n = a,t,c or g
gagagagagagagagagagagcagtgctcaccctcttagttttatcaatagtatttgaggagttgactgttttaattcctttaagcctaccaaactgtagttattaaaacagcaatgtgtaaatttttggtgtgttccacaagtaaaattttggggcttatttaactgctgcaactagggttaccctcactaatgtgtggagaatagaggtaccgttaaaagttgatgaaatggctgggtgtggtagctcacgcctgtaatcccagcactttcggaggctgangcgggtggatccaaatagagccca

SEQ ID NO: 25710 - DNA, 389 bp, Homo sapiens
gcacaggaagctcagtctactcgactcctgtattttcacagaaaatgacggtgtggattctgctcctgctgtcgctctaccctggcttcactagccagaaatctgatgatgactatgaagattatgcttctaacaaaacatgggtcttgactccaaaagttcctgagggtgatgtcactgtcatcttaaacaacctgctggaaggatatgacaataaacttcggcctgatataggagtgaagccaacgttaattcacacagacatgtatgtgaatagcattggtccagtgaatgctatcaatatggaatacactattgatatattttttgcgcaaacgtggtatgacagacgtttgaaatttaacagcaccattaaagtcctccgattg

SEQ ID NO: 25711 - DNA, 310 bp, Homo sapiens
  misc_feature (1)...(310): n = a,t,c or g
ccttactgaaggtatactatgtttgtgagggcagggacatggagagaggacttggaatacagacatgtaataagcaattataatacaatgtaataatgcataaaataacatggagctattagaacacacatgaggaacattaaagcctactcattctagaaacagtgagttcaaagctttggcctgaagagtgaacaggaattggatgaaaagatggttaagaaaaaaaaaaaccnaaaaaaantanccctaggatntanaggtaanaaaaagtancnnggcaaattanagganctgaaantancccagg

SEQ ID NO: 25712 - DNA, 454 bp, Homo sapiens
  misc_feature (1)...(454): n = a,t,c or g
ttganaacngntatgacatgattacgaatttaatatcgactcactatagggaatttggccctcgaggccaagaattcggcacgagcgacgattctccaccgagtatgagctgcagcagctggagcagttcaagaaggacaacgaggaaacaggcttcggctcaggcacccgggccctggagcaagccctggagaagacgaaagccaacatcaagtgggtgaaggagaacaaggaggtggtgctccagtggttcacagaaaacagcaaatagtccccagcccttgaagtcacccggccccgatgcaaggtgcccacatgtgtccatcccagcggctggtgcagggcctccattcctggagcccgaggcaccagtgtcctcccctcaaggacaaagtctccagcccacgttctctctgctgtgagccagtctagttcctgatgacccaggctgctg

SEQ ID NO: 25713 - DNA, 478 bp, Homo sapiens
  misc_feature (1)...(478): n = a,t,c or g
ggagctttgaancctatgactgattacgaatttaatacgactcactatagggaatttggccctcgaggccaagaattcggcacgaggcatgcgttattttgttcaagcttcacagcaatccgtgaggtaggtattgtttgttgttcgttttgcccattttacagattaggaaactgaggcccacaggcgtaagcaacccaaagtcacaccgttagaaggcagtgagatctgaatgctcaagtcagcatgcgctcttcttccctctcgttttctgcatacgtgctttctccacgtctcccatatcgtaagggcatggcaggaggagagggaaactgatgtgatggtggatggcaaaacattttagtggttccaagaatcaagcccccttgtgtattcttggctttcaatgaactgcgtcttcagagcagcgcaggttaaaccactttctcgcctcattgtagtcaattggcttagttca

SEQ ID NO: 25714 - DNA, 343 bp, Homo sapiens
  misc_feature (1)...(343): n = a,t,c or g
gcggaacaaaagcagctcatggctgtgtaactgcactctcaggcaaggctctgccttccagcccgccagacgccctccaggacgaggcgatgacagaaggcagcatgggggtaaccctcgaggcctccgcagaagcttatntanctanctgacaactactgtctagagcttgtgcantgcntaatangcctagctnntcaaatcnnntgcctgtgnncnntntaggtnnntcntgntnngantntanntntnnntgnttatnntntctgatngcnannantnntnnctnttttttgcntnntnttnagtttnattnntntctcattnnntnnangtngntctc

SEQ ID NO: 25715 - DNA, 329 bp, Homo sapiens
cttcctagaatttttgatgtgccacaaggaatacagcctgcagaaaaagctccactggacaaaagtttttcaacacaagcagggcgaactccaggctgagagacgctagatactctggtcagagcaccatgtggttgtcgattagagacagagtttgtaggcagtgatgaatcagttatggccccgttatgaattccagtagttcgtacctgagcaacttctttgtgtctcatttgctgcattaagacaaactgactttctaactgttccagctgatgcttctgtgctggatttaaattatctctatttgctcgcagttgttccaagtg

SEQ ID NO: 25716 - DNA, 303 bp, Homo sapiens
gaaaaagaaaaaatgtgctttacttctagagagctgtgcctaaaaaaactggcctgagatagtaacagcacataagaaggtcttcaataaatgctggcagaagagagctctcatgtgtgctacttcagttcctgactgtaagctttgtgaccacagatagggtatgactgacggttttacaccttatctgagtgatgcatagatgatgtcaagagaaccactaaaatccttttcctttatccagctgtaaaagtgcagttgaaacatggtaaacaaattgacatttttgcttggttctttcat

SEQ ID NO: 25717 - DNA, 324 bp, Homo sapiens
  misc_feature (1)...(324): n = a,t,c or g
ctgccctgcaggaaatattaccctgaagaagtattggtcatagtctgagtcaggctggatggcgccggcccggctgagttcttgtcaagagtgttcttgactgtgtgaggcacagattgccattgttggcaagactcggctgagaatgtttacctgtagtttgcatgggccaatcccaccaggtgtggcttcttccaccgatcagtgcttcaaagctgtcctctgagcagctcagacccgatggcagccaaataatgtgttcaccagtacgtatgtgtctgcagctgccttctttaaccnttccaagggaaaagcaatggatta

SEQ ID NO: 25718 - DNA, 443 bp, Homo sapiens
ctatgacatgattacgaatttaatacgactcactatagggaatttggccctcgaggccaagaattcggcacgagcgctggtggccaagctggtggccaatggcatccagaacaaggaggcggaggtccgcatctttcactgctgccagtgcacgtcagtggagaccgtcacggagctcacggaattcgccaaggccatcccaggcttcgcaaacttggacctgaacgatcaagtgacattgctaaaatacggagtttatgaggccatattcgccatgctgtcttctgtgatgaacaaagacgggatgctggtagcgtatggaaatgggtttataactcgtgaattcctaaaaagcctaaggaaaccgttctgtgatatcatggaacccaagtttgattttgccatgaagttcaatgcactggaactggatgacagtgatatct

SEQ ID NO: 25719 - DNA, 405 bp, Homo sapiens
  misc_feature (1)...(405): n = a,t,c or g
tcctaaaggaaggcatttgatagacatgctccaaattcctcaggattactgaacactggaggaggactgctaccctgcatctgaggaatctaaacatgactccttagccatatcactgagggcccagatgagccagttaatgtaatcattaggatagcacatgagctgctgcaccaatctctttgtactcaataataatggtactcacattataacctggaatgagatcatagggcatgcccacataaggtgaaacatcctaaatttgctagacagatgttcaaaaccaggcccatagctggattcctggnataccttcttggactccatggagaccaaagtgacctatanttggaacatgacgntctatacgctattttcctttaggttcacctccttctatgg

SEQ ID NO: 25720 - DNA, 318 bp, Homo sapiens
cgatgcacagttgaagtgaacttgcggggtttttcagtatctacgattcatagatctggaattcgcggcgcggtcgacgcccaaggctggcagacacctgagatagctctcatagactcccataagctcctccgaagcatcatcctcctgctgatgggcagtgacattctctcaactcagaaagcagctgtggagacatcgtttttggactatggtgaaaatctggtacaaaaatggcaggttctttcagaggtgctgagctgctcagagaagctggtctgccacctgggccgcctgggtagtgtgagtgaagccaag

SEQ ID NO: 25721 - DNA, 1204 bp, Homo sapiens
  misc_feature (1)...(1204): n = a,t,c or g
gcctgctgaacctcaatgtgacgggctattaccgggtgaactacgacgaacagaactggaggaagattcagactcagctgcagagagaccactcggccatccctgtcatcaatcgggcacagatcattaatgacgccttcaacctggccagtgcccataaggtccctgtcactctggcgctgaacaacaccctcttcctgattgaagagagacagtacatgccctgggaggccgccctgagcagcctgagctacttcaagctcatgtttgaccgctccgaggtctatggccccatgaagaactacctgaagaagcaggtcacacccctcttcattcacttcagaaataataccaacaactggagggagatcccagaaaacctgatggaccagtacagcgaggttaatgccatcagcaccgcctgctccaacggagttccagagtgtgaggagatggtctctggccttttcaagcagtggatggagaaccccaataataacccgatccaccccaacctgcggtccaccgtctactgcaacgctatcgcccagggcggggaggaggagtgggacttcgcctgggagcagttccgaaatgccacactggtcaatgaggctgacaagctccgggcagccctggcctgcagcaaagagttgtggatcctgaacaggtacctgagctacaccctgaacccggacttaatccggaagcaggacgccacctctaccatcatcagcattaccaacaacgtcattgggcaaggtctggtctgggactttgtccagagcaactggaagaagctttttaacgattatggtggtggctcgttctccttctccaacctcatccaggcagtgacacgacgattctccaccgagtatgagctgcagcagctggagcagttcaagaaggacaacgaggaaacaggcttcggctcaggcacccgggccctggagcaagccctggagaagacgaaagccaacatcaagtgggtgaaggagaacaaggaggtggtgctccagtggttcacagaaaacagcaaatagtccccagcccttgaagtcacccggcccccatgcaaggtgcccacatgtgtccatcccagcggctggngcagggcctccattcctggagcccgancaccagtgtccttccctnaaggacaaagtcttcaanccacgttctctctgctgtgagccagcta

SEQ ID NO: 25722 - DNA, 374 bp, Homo sapiens
ggggtagggatgaggggagggaacttagaggacgagtcaataggtgcagcaaaccaccatggcacacgtatatctatataacaaacccgcacgttctgcacatgtatcccatttttttcctttgtgttagaaagaaaaaaaaaatccataagcagcttcaagccttgagccctgaaacggttacattttaataaatattgcaggggtcggggagtggcatgcacagagtagcaacagtagctttaccagcttgactttgattctcatcaggctataaggaggtctttcagaatgttaaattagccaagactatctacacaaggtactcaggttgggctgagggcactcctattaaccacatccagatccaggaa

SEQ ID NO: 25723 - DNA, 503 bp, Homo sapiens
atcagctatgacatgattacgaatttaatacgactcactatagggaatttggccctcgaggccaagaattcggcacgagaagaatatagataatggaaaacagaatactgtccttttttttttctttctttttttgagaaagagtcttgctccatcgcccaggctgcagtgcagtgacacgatcttgtctcactgcaacctctgcctcccgggttcaagcgattctcctgcctcagcctcctgagtagctggaattacaggcacccaccaccacacccagctcatttttgtatttttagtaaagacggggcttcattcaccacattggccagcctggtcttgaactcctgacctcaggtgatctgcctgcctcggcctcacaaagtgctaggattacaggcatgagccacagcacccggcccagaataagaatactgcttggaaatctagacttagtcaagggatcttatgttttctatttacaaaatatgtaatgatttcac

SEQ ID NO: 25724 - DNA, 358 bp, Homo sapiens
gaaaaatataaagtatggaaaggtagcataatagaatcagctaggacttcagccctggatcccagtgttgaagtatagttagcattcttttactacatggagtaatcttttttcctaatttagtggtacctaaaagtctttgaaccaatatgacatttaggccaatttgttctagttcatgaatatacaaatatagtctccaattttacaactccagagagctgttactttcactgggtatatccaaaccccatcttcctagaaactagcctgaatcagcaatttcaccaccttcaaacctggtttattccaaccgtagcactcgtatgcatcctactttatgcaaagtcttaaaagg

SEQ ID NO: 25725 - DNA, 383 bp, Homo sapiens
gtcaaattcctgacctcaagtgatccacctgccttggcctcccaaagtgctgggattacagacctgagccactgtgcctggcctgtttagggttttggcttctagacttagctctgccaccttttccatttcaccacatcaccccatctctgagcacatttctgaagtgaactacccagacctagctcacctggacagtccacagcctcaaggaattcatctgtgtaaagggtctgtcatggatgatcagacccatcccagtctgagcatttctggggtcccaggcaggtgacccttggggagtcagggtgaggagaagctggtctgagcctgcgcagcagcccagaagctgggagtagaaggaagctgcctccccacatgcc

SEQ ID NO: 25726 - DNA, 356 bp, Homo sapiens
  misc_feature (1)...(356): n = a,t,c or g
atttttctagtaattcatttttactattttttaacaaaattattggcccataatgaattggaaattcaaagaaaaaaaaagttctttaccagagataatttgcaaagcagtgttctaaaacagtggttcacatcctttcatgttcgcctaaccttctaaatgataccacactcgagagggtacggagcatgggatatagagtgctctttccctaccggtagccctctgatagagaatccttatattgaaaataatttcccactgactttcccttaattgattcaatcttttcctaaatctaacttaatttttttttaataaatgggtttaataaaacagaacagnggttattatgg

SEQ ID NO: 25727 - DNA, 384 bp, Homo sapiens
gggagttcagcctctaaagtgcatcactggagaaaaaccaaaacaatctttgtctagggaagagagtgatagaagacaaaatgaactcaggaagtagatgggcctgggagactgcccaatgctttcctggtttgtgggcccctggccaaacccctcagcatcaccctggctgagcaatccataaggagattggatagggatagcaggataaagaccaaatatcaaggaatgccactggctgactagaaaatttcaggaattcctgaaagatagaggggagagatcacatccataaagaactaaaggaaaaggaaactgcagattaaaacatacatggtgggttgggcacagtggctcatacctgtaatcccagcactttgccag

SEQ ID NO: 25728 - DNA, 396 bp, Homo sapiens
ctttaaatgaaccacagatctttccattctatgataaaagtctaagaatgcatcagttatggaaagcatcttttaccagaattgcacaaatactagtttttatttaaacccttggctcatgattaatgtatccatctaacaaagtcccaaaataatggaaggatgatgctgtggcaggtttaccctggaccatctgcggcggtgctctgcctctttctccatccaccctggtccaggtccacagcagtggagagagaaaagagacagaaggatggccgtggtcagcgcatgttgctgccgcagccccagtgcctgatgtctagttgttgcttggtagacgtccagagtttaacaggatagattcttgatattctgcttgaatcaacaatcttacct

SEQ ID NO: 25729 - DNA, 345 bp, Homo sapiens
gccctggacccctaccatggaggagaccatcaaagatccccccacatcagctgtcttgctggatcactgtcatttctctcaggtcatctttaacagtgtggagaagttctacatccctggaggggacgtcacatgtcattataccttcacccagcatttcatccctcgtcgaaaggattggattggcatctttagagtggggtggaagacaacccgtgagtattacaccttcatgtgggttactttgcccattgacctaaacaacaaatcaagctaaacagcaggaagtccaattcaaagcttactacctgcccaaggatgatgagtattaccagttctgctatg

SEQ ID NO: 25730 - DNA, 435 bp, Homo sapiens
  misc_feature (1)...(435): n = a,t,c or g
gaagtaatgaagcgagtacgagaagctcagtcatttatctcagcagctattgaaccagggtggctgcactcaacgagtttatgcaatgactttctgggatgtttctgaaggagaaggatgtacagagagtaggccccttgcactatatgtggtacattccacttgtgcctgattattaactgggatctttaattgttctgagcttacactgcaaagtgattttttcctcccagagtctggaaagagcaatgaaagaaaaggcggtcgatctcgttcccatactcgctcaaaatccaggtctagctcaaaatcccattctagaaggaaaagatcacaatcanaacacaggagtagatcccataatagatcacgttcaagacagaaagacagacngtnnatntannaccccntnnnnnacgcttaattnnngggaga

SEQ ID NO: 25731 - DNA, 458 bp, Homo sapiens
  misc_feature (1)...(458): n = a,t,c or g
tttgaancntgagctncgacatgattacgaatttaatacgactcactatagggaatttggccctcgaggccaagaattcggcacgagttctttttcatccttctgtctctttgtttctgagctttcctgtctttcctttttttctgagagattcaaagcctccacgactctgtttcccccgtcccttctgaatttaatttgcactaagtcatttgcactggttggagttgtggagacggccttgagtctcagtacgagtgtgcgtgagtgtgagccaccttggcaagtgcctgtgcagggcccggccgcctccatctgggccggnnnnnngggcgccgnntgtgtgcccgaggnctnnccctggcntaggcnagnntggaancttnnncgnaattncggngnncntataagcantccttanngcncaacncannntnngnnccnnnncannggcttac

SEQ ID NO: 25732 - DNA, 434 bp, Homo sapiens
gaaatggttatcctagtaagatcactggattcagtggatcaactagtgtaagataacatccccaccagtgaaaactggagggcaatgtcatggagacttcgtgcacaacaaagggctccaaggtcaggggctccaagtcagtttaatgtgaataaaacccagattttcacctaagcttatgattaaacaaacaaacaaaaaaagatggaaatgacattttcttacaaacaaaaacttgttaaaattatgtgaatcatcaggattgcttgatttttatggtattgcagtttttttgacctggaaaattatttttcagatcttaaagtcaaaatatggaaaagactgaataggctgttgcaactctgtttttatattctttctttcctacttgattttcttccctgtttttaattgatcattatggataaaaattt

SEQ ID NO: 25733 - DNA, 221 bp, Homo sapiens
gatggactattagactagaaaaataaaataaagccaagaataaagttaatatagaaatatgttccatcatgtgctgcacgttgctgcaggtggcctcagcttttcctctgaacttcctaaagagagaagtatcatgaaatcttaagagttttcccagtgacagaaatgacaaagccaggtgctctggagaagaatttttcctgaaacgagatgggagggaa

SEQ ID NO: 25734 - DNA, 415 bp, Homo sapiens
gaaaaatagatgaattagagcctcatgagtcaaccaggataaattttttaaaagttcagagtaataaataaggtgcaggcttacatttataatataatatctgaaaacttaaatactaaatacttatccaacataggtaataatagttcaaacatgcatggaatggaaaaacaaattcagggtagtggtaatctctgggaaggaatgagtgaatttgataggagaggactacatagggacttcaactatgtattatttcctttaataaaaaactaagtgtttgtgaccagactggccaacatggtgaaaccctatctctactaaaattactaaagttagccaggcgtggtggcgcatgcctgtaatcccagctactcaggaggctgagggaggagaatcacttgaacccagaagg

SEQ ID NO: 25735 - DNA, 258 bp, Homo sapiens
  misc_feature (1)...(258): n = a,t,c or g
tttgannctttgaanncctctgctatgacatgattacgaatttaatacgactcactatagggaatttggccctcgaggccaagaattcggcacgagaactgtgactctttgagagggaaagaatcgcagaaattaagtatttaatgtgatcctttccacctaaactgttttgtatggaatacaatcagtgtggtggtagtggtggtggttatctgcaaaatagtttctggtgattaaatctgactttttttttttttt

SEQ ID NO: 25736 - DNA, 334 bp, Homo sapiens
  misc_feature (1)...(334): n = a,t,c or g
gattcttcactttaattgtctgtcttaaagtgtgggcctctacttacagggaagaggccagaaaaacaaacaaaaaagtgtgggactcattttttttaatacaggctcttgctctgtagcccaggctggagtgcatgcagtggtgcaatcttggctcactgcagcctccgcctcccgggctcaggtgatcctcctgcctcagcctcccaagtagctgggactataggcatgggccaccatgtctggctaatttttgtatttttaatagagacagggtttcactgtgttggnccagngggnctcaaactcctgacctcaagtgatccacctgcct

SEQ ID NO: 25737 - DNA, 458 bp, Homo sapiens
ggaaaccgctatgacatgattacgaatttaataccgactcactatagggaatttggccctcgaggccaagaattcggcacgaggcaagctatcctggaaagcccagtgtcttcctgtccccccgaactagccaaccacccagatgcccagcataagccaggcaccatcctcaccaagaagcgccgggaagagaccatctttgcctgacacagcactcttcctgtgggctgagggcatctccaaagctgcctgatgcctgtttttcagaaccctcacatccctctttccaggtcctcactcttgggatatgggggcttaggaaaacaatccaactccctagcccagaccctcaggtcaggaggcctgcgtgtggggctgcaaaaggagaggacgacgctgtcggaggcagggagagcaaattaccacagcttcttggcccagttctgcccttctttgct

SEQ ID NO: 25738 - DNA, 508 bp, Homo sapiens
  misc_feature (1)...(508): n = a,t,c or g
acagctatgacatgattacgaatttaatacgactcactatagggaatttggccctcgaggccaagaattcggcacgagggagaaaagaaaagaaaagaatgaattaatgaatttaagggatgggtaaattccacatactctgttctctacttttctatatgtctgattttgtttgtaatgagagtgagaagtggggagaatatgggatgtatgggtgtgaacaagttgtgggtcatccaagtgtccatgcaaggtacttagaggccatgatttaaggatactaactctgaaaattatgtaataaggattaggaaacttcttttaaaaattaaattgggggagaatatgaatactttccctcagaatattttccttctaataacatatatgtaattcataatgccaagtattcctattgtactcttctcaaatatattatccatttaaacttttgtttgngntttangaagctganatgatttccangaacangaccctanatttcttg

SEQ ID NO: 25739 - DNA, 376 bp, Homo sapiens
gagcactttgggaggcaaggcaggatgatctcttgagcccaggagttcaagaccagcctgggcaacacagcaagaccccacttctaaaaaaattttttttaattagccagtgatggtagcattcacctgtaatcccggttacttgagaggctgaggcaggaggatcccgtgagctcaggagttcaaggctgcagtgagctatgatcatgtcactgcactccagcgtaggtgacagagtgagaccccatctcaaaaataacacaaagcatacccactacagcctctgatggtatttaatgtagggatacatatgtcagtcatctcacaagccacctttattacaaaaaattatactaatattgggctttcatgaact

SEQ ID NO: 25740 - DNA, 351 bp, Homo sapiens
  misc_feature (1)...(351): n = a,t,c or g
gttcccaggtgaggtggaaagaatttgggggtgcagatacatttggagtcatgaacatttgggtgcttagggctgtgaatgaagtttcaatgagaagatggaaggcctaaggctagaatggtgggtgcactaagtttggttcagtcacagaaatgggagtccacaaagacgaccaagacacagggccagagaagcaggaagagtggtcagtaagtgtcaaatgctacaaagagagcagaagtaaggatgattgtgatcatcttatatataagccagtgccattctctttctgcagaagcctatttttgtaggttgaggacaaggagatttgcagggaagagganagtaacc

SEQ ID NO: 25741 - DNA, 471 bp, Homo sapiens
  misc_feature (1)...(471): n = a,t,c or g
ttggnnccttganncctacagctatgacatgattacgaatttaatacgactcactatagggaatttggccctcgaggccaagaattcggcacgaggagatgagcttcaataccctggtcaacatttcaaccattatattatatggtaaatctagacagagatgggtggtatgctgttttggataatgatctagaatttagggggaaattctgaactagagatatacatttgagagtcatcgccactggggtgggtgaagccacagatgaggctaagactgtccagcaagaaaacaggcaagaatgaagctggaaaagcactcacattagaacaggagggagcaggggcaggagagctggaaaaggaaactgagatgtggtgatgtcaagggagaatcccatgaagagaatgttgtgtactgcaaaaagcgagaatatgaccagtatataagatctgcaattacaaaggctt

SEQ ID NO: 25742 - DNA, 427 bp, Homo sapiens
gcacccgcctcagcctcccaaagtgctgggattacaggcgtgaagcaccatgcctggccgatacagttgcatttataaactctgacatgggtgacgacggtaagggactcactattcattattccctgtgaattctagcccatagtagtgtcccctctcaccacttgggaggtgcactgtgttcactgctgtccaaacttctgcccagttttaatgtgttccctgtacacttactgccaagcactttctgccccatgtctatggcttaggggaccccaagaaatggggcagggacctctgctgtgcctgatgaggtaggcatcaggctcagtgcagtgtgaggacctaactcctattttcaaactgcaatccccttcggctcctccccagggcttccagtctacaaataaatggagacactggtccc

SEQ ID NO: 25743 - DNA, 363 bp, Homo sapiens
ggaattctttttattaaagcctttctttacctgtattcttattatcagagtgtatttcacaccctggggttctttattatgccctgtcccttgccccataccctttctccacatcaactcccaacattatcaaagcagagagaactttctggtggctaacagaatggatactattttactagaaatctttgtaactttaaaggaatgggaatggcaaataggtttcagtttatgtgtcagttgtaagaaattaatagcagctgcatggaacactggaccaagaagtattatgaaactgctaggctcaagtgccataatccattatcagtcactgtcataggtgtgagaagagtgaatgacagc

SEQ ID NO: 25744 - DNA, 228 bp, Homo sapiens
cagcgccttctgcggtgcccgccgccgcccgtgcgccgttcagagaagcccgaactgggaattaccatgcagaaatacaagcttttggacatcggttacaggaaaacttttccttagatcttctcaaaaactgcatttgttaatggctgctatattaaaagtgaggaggccaaacgccaacaacttgggatagagaaagaagctggtcttctgaatcttaaaagtaat

SEQ ID NO: 25745 - DNA, 333 bp, Homo sapiens
ggggtggggcagcagcctgtgtgtcactcatgcgtggccaggtgtggctgaagataaggaggggacccaagcccagggtgctcttcctgggtacccatggtcccagatgaaacccaaaaatagcttatgcactaccaggcatgggcctagcccaaaagagtttgacctgctctttctctggggtgaacactctccttagcctttcaaagcacgagtaagaaattctacccttgagatgagtaatgcaaagacagcagaggaaagtggctgcccttctagctggcaggctccatgctcggcacgggctcaggccctgctgtggggtaggacacg

SEQ ID NO: 25746 - DNA, 364 bp, Homo sapiens
gctggaagaataataaaatgaaaaagtagttgacatctgtcctcagaagaagtttgcaggttgcatatttgtgtgtaaatacacaggctaaaaggtaatttatgttccttgggaattgaaatggtcagtggcccgttacagaaacttatcagtcatatatcagcaccagttcattcttttgcaccttagggaccatctgtcccctgaggtgacctgagaaacaaccagttgcccacagactgttatttcttcaagtgagccaggatttgatttcactgccttatattctatttttagtgtacagtgctttgattttttggaaaaactaaattttaaacatatttgaaaaatgttataagacttg

SEQ ID NO: 25747 - DNA, 435 bp, Homo sapiens
  misc_feature (1)...(435): n = a,t,c or g
cccacgcgtccggaattgagggactttggagtttggcccgggagccttggcggtttgctgcgagaggagggcgctgggggggagcctagtggctggtgtttgggcgccttggatgtgctgtcaaactcggcaggaggggacagctgaagccagaagggatttcagttgcggtcctttcccagggaaccagagtggctttaatggtgtttgtgtaattgatacaagatgctatgtgttaaaccgttttagctgttaggaaaaatattccttgaaagtatcaaccttgctttagtggaaacctgtgtcctcttcagaggtctgggatcttgttcttcctccccattggttgttttgttgctgctcccttgcaaaggaaagaaatgacacttttgtgctgacatctggatcaaatatttttctagtaaaatgngtttg

SEQ ID NO: 25748 - DNA, 299 bp, Homo sapiens
ggtttttattaatttaaaaaggggaaaatacttagaaatgaaatgtggaagacagctaacttaatctcttctgataaaatttatgtaaaaaaaaataaccagtaaaacttataaaagataaataagaatgaacttcagacttactctgaatttcaactatcagaattcacgtatgaggccctactgatgtaggattttttcttcttggtcactttgcaagctggggacccctggctggcagtgccccacccgggccttgctcggccatgctgatgtgccccagctcgcctgtgttacag

SEQ ID NO: 25749 - DNA, 395 bp, Homo sapiens
gcacacaccacaagggggctggggcatctggtccctggggcctgggccgccccgccgggttccataggccgatgctctgaaagaagagacgtggggctcgagagatttaaagattttatttttacaaatcacagctgatagacagcgaagccttccccatagagaccgtgctccaactcgggcctggggcactgctcgctgctcccaggaagggggtggcgtgacaggcaggaacctgcgaagtccagagtccagggtggagcgcgccagcctcagccagagcagccacgacagccacagtgtgtgcactcgatgatgcggccctgcaacggaggaggacagtgaagacgatgccactgcgccacgctcgcccctgcacactcacatatgtggcg

SEQ ID NO: 25750 - DNA, 538 bp, Homo sapiens
  misc_feature (1)...(538): n = a,t,c or g
ctttgnnnccntgannccctaacagctatgacatgattacgaatttaatacgactcactatagggaatttggccctcgaggccaagaattcggcacgagcctgtcttgtcattatgtttgccaattctctctatgttattcttgtatttcttacatgttttaactctgcaagatctagacttgccaatggcttaacagttctccagtattacttcatcaacttcaacattcttcttagttgcaggtgatatggtttggctgtgtccccacccaaatctcatcttgaattgtaactcctgcaattcccacatgttgtgggaggaacctggtgggaggtgattgaattatgggggtggagctttcccatgctgttctcatgatggtgaatgagtctcatgagatctgatggttttaaaaacaaaggtttcccagcacaagctctctctttgcccctgccatccatgtaagatgtgacttgcttctccttgctttggccatgattctgaggcctccccaccatgtgagactgnaagccctt

SEQ ID NO: 25751 - DNA, 353 bp, Homo sapiens
ctcatggagaagcagaaatacatatttccaagaagttggatgggtgggtactattctgattacacaaaacaaatgccacacatcacccttaccatgtgcctgatccagcctctcccctgattacaccagcctcgtcttcattaagccctcttccatcatgtccccaaacctgcaagggctccccactgcctactgcatcgagtcaaaactcaaatgcttggcttctcatacgtccaccatggggtcctaccaatagattccccattgcctcctccttcccaaaggactccacccatcctatcagcctgtctcttccatatgacctcatgcatctccacctgctcccaggccag

SEQ ID NO: 25752 - DNA, 474 bp, Homo sapiens
ccatcagctatgacatgattacgaatttaatacgactcactatagggaatttggccctcgaggccaagaattcggcacgaggttggtggctcctgtgttagcttctcttggctctgacttttggtggggggctggatgctctccctcccactcttggcctggctaatgtcttctcatccttcagaactcagggctccaggagaccttcccatacccaagtgaggtgaggactccaggcttgtgatcttggagctccctgtgcttatcctcagtccttgccccaggggtgaggtgcttgttggggtgatcagtaactcaatgtctgtctctcccagcaagctccctgaggccaggaaccatgtctttcggtcactgctgtatctccagtgcccaccataatgtctggctcatagtacatgctcaataaatgttcacaggataaatgagcccttctcctaggctgtggctgatatc

SEQ ID NO: 25753 - DNA, 337 bp, Homo sapiens
gaaactgtaaataagttacaccaaaaggaggaacagtttaacatgctgtcttctgacttggagaagctgagagaaaacttagcagatatggaggcaaaatttagagagaaagatgagagagaagagcagctgataaaggcaaaggaaaaactggaaaatgacattgcagaaataatgaagatgtcaggagataactcttctcagctgacaaaaatgaacgatgaattacgtctgaaagaaagagatgtagaagaattacagctaaaacttacaaaggctaatgaaaatgcaagttttctgcaaaaaagtattgaggacatgactgtcaaagctgaac

SEQ ID NO: 25754 - DNA, 437 bp, Homo sapiens
  misc_feature (1)...(437): n = a,t,c or g
gtgtggtggctgatcggcgcagagtcccgtgtgagactgctaagcggcgacacgtatgaggccgtggtcacagctgtggatcccgtggcagacatcgcaacgctgaggattcagactaaggagcctctccccacgctgcctctgggacgctcagctgatgtccggcaaggggagtttgttgttgccatgggaagtccctttgcactgcagaacacgatcacatccggcattgttagctctgctcagcgtccagccagagacctgggactcccccaaaccaatgtggaatacattcaaactgatgcagctattgattttggaaactctggaggcccctggtaacctggatggggaggtgattgagtgaaccnatgaagtcacagctggatctcctttgccatccntcttgacgcttcagagttctgnatcgtgggaaa

SEQ ID NO: 25755 - DNA, 495 bp, Homo sapiens
  misc_feature (1)...(495): n = a,t,c or g
agctatgacatgattacgaatttaatacgactcactatagggaatttggccctcgaggccaagaattcggcacgagaaagttcagctagcactttgggaagccatggcagagggattgcttaaggccaggagttcaagagttcaagactagcctgggcaacatgacgaaaccctgtctctacaaaggaataaaaaaattaggcctggtggtgtgcttctgtagtcctagctacttgagaggctgaggcagaaggattgcttgagcccaggagtttgaggctgcagtgagccatgattgtatgactgtactctagcctaagtgacagagggagaccgtactcaaaaaaaaaaaannnnnnnnnngtntntgtnttgggggtgganatnngacccattaaanattttnacngttncntnaaanactttnnnangggaaanatntttttggnaaaccncttgacannnnaaaaanccngggntttttacncanttggg

SEQ ID NO: 25756 - DNA, 1351 bp, Homo sapiens
  misc_feature (1)...(1351): n = a,t,c or g
ctgaaattttcaaaggctcctgtcctcctcgcaggtttctgccacctctttctgccagatgaacagtttcctgaagggttccagtttgacactgacgatgtgaatttccctatcgataatctgtgctttgttgggctcatctccatgattgaccctccacgggcggccgttcctgatgccgtgggcaaatgtcgaagtgctggaattaaggtcatcatggtcacaggagaccatccaatcacagctaaagctattgccaaaggtgtgggcatcatctcagaaggcaatgagaccgtggaagacattgctgcccgcctcaacatcccagtcagccaggtgaaccccagggatgccaaggcctgcgtagtacacggcagtgatctaaaggacatgacctccgagcagctggatgacattttgaagtaccacactgagatagtgtttgccaggacctcccctcagcagaagctcatcattgtggaaggctgccaaagacagggtgctatcgtggctgtgactggtgacggtgtgaatgactctccagctttgaagaaagcagacattggggttgctatggggattgctggctcagatgtgtccaagcaagctgctgacatgattcttctggatgacaactttgcctcaattgtgactggagtagaggaaggtcgtctgatctttgataacttgaagaaatccattgcttataccttaaccagtaacattcccgagatcaccccgttcctgatatttattattgcaaacattccactaccactggggactgtcaccatcctctgcattgacttgggcactgacatggttcctgccatctccctggcttatgagcaggctgagagtgacatcatgaagagacagcccagaaatcccaaaacagacaaacttgtgaatgagcggctgatcagcatggcctatgggcagattggaatgatccaggccctgggaggcttctttacttactttgtgattctggctgagaacggcttcctcccaattcacctgttgggcctccgagtggactgggatgaccgctggatcaacgatgtggaagacagctacgggcagcagtggacctatgagcagaggaaaatcgtggagttcacctgccacacagccttcttcgtcagtatcgtggtggtgcagtgggccgacttggtcatctgtaagaccaggaggaattcggtcttccagcaggggatgaagaacaagatcttgatatttggcctctttgaagagacagccctggctgctttcctttcctactgcctggaatgggtgttgctcttaggatgtatcccctcaaacctacctgggggtctgngccttccct

SEQ ID NO: 25757 - DNA, 366 bp, Homo sapiens
tttttctttaagttcattattaaaaaggtgaaatctgtgggaaaactctgatgctttaccttttcccattaagaaatgtccatttatcctaaattttatgtcttacttctatcaagtgcttcgcaatagcaaaatgataccaccagagtgtggcaatatgacaataatttgtgtaaagaaaaagaaaatgtgatgaacttaggtttaaataattctacattataaacagctttactaaaacttatgaaagtccataaaacatttcatttacctataaaatctacttcaaccctatatggaatacagatattccatatgtcatatggcaataattataaaaccaatttggtagacagcagtctgttc

SEQ ID NO: 25758 - DNA, 332 bp, Homo sapiens
gaaaaaatcatttcatatctccttataagcctttgtcctctaggttgtaatgactctgacttcccacctgtgatggaaagctaagagtcacaaggtcactatgtttactcttacgtaaaagatagtacacattttggctaggctgtttacttcaaaaggcaacctataggtttctacacaaaaagaggcacacatttgcatttgcattagtataatatgcatttgtacggatattgctttaaaaatttatgtaatctactaatgctatttattactcattccactgatccctgaagtctctcaactagtagagaaaataaccgtgatttaac

SEQ ID NO: 25759 - DNA, 442 bp, Homo sapiens
ggtgtatagaagtgaacgaccaagccactgtagctttagtggggtcttcagtcagggagaaccagggccaggatcttctcttgtcctaattcgtgcagttatgatcttgtcctgtgtttactgaatgccacttctaccaacgctatgttcctgccttgcagtgtgaagattatttccaaattcagatctaggaataaaccccacttctgggggcccattcatctatcagaatttattcttttgtttaaaatccaaattatttgacacctgttgtcccagcccactttatgccatgctgtcaaaatttcacagccttcctttccactcccgagcatctactatctcacctgggagaggggcctgtggaggaaggggctgaagcagctgctgtgacacaggctgcctatttcacagtttggggcacaaaactcgtggtccccat

SEQ ID NO: 25760 - DNA, 422 bp, Homo sapiens
  misc_feature (1)...(422): n = a,t,c or g
gaagcctccaaagggactagagagaagcctcctgctcccctcgcctgcacaccccctttcagagggccactgggttaggacctgaggacctcacttggccctgcaaggcccgcttttcagggaccagtccaccaccatctccacgttgagtgaagctcatcccaagcaaggagccccagtctcccgagcgggtaggagagtttcttgcagaacgtgttttttctttacacacattatggctgtaaatacctggctcctgccagcagctgagctgggtagcctctctgagctggtttcctgccccaaaggctggcttccaccatccaggtgcaccactgaagtgaggacacaccggagccaggcgcctgctcatgttgaagtgcgctggtcacacccgnttccggagagcaccccagcagcat

SEQ ID NO: 25761 - DNA, 490 bp, Homo sapiens
  misc_feature (1)...(490): n = a,t,c or g
attgganacngtttgacatgattacgaatttaatacgactcactatagggaatttggccctcgaggccaagaattcggcacgagggagagtcatgaaataaacccaactgccctagagcaggaaactgccgagggaacatccttctccccagggagggaggatcgaccctgtcttgcttgctattcaggcttcccatctacattgtctctggcatctgtgccatctcattttcggcatctgttgattctcttctcctatgtgagttgagatttccatgtttctttgtgttgccaagtaatctggggttgtgttctagacattttgaatattatgaggccctgagtcttgttgaaatcctttggccgggcgcggtggctcaagcctataatcccagcactttgggaggccgaggcaagtagatcacttgagctcggggagtctgagaccagcctgggcaacacagtgaaaccctgnctntacaaaaaaaaa

SEQ ID NO: 25762 - DNA, 316 bp, Homo sapiens
  misc_feature (1)...(316): n = a,t,c or g
gcaccatccacttctttgggaacgagactagccctggtgggaacgactttgagatctttgccgacccccggactgttggccacagcgtggtgtctcctcaggacacggtgcagcgatgccgggagattttcttcccagagacagctcatgaggcgtgaccggggcccacatctgtgtgtcgtgacttctgaagagtttggcctaggcctaaagagaggtcctggtgttggatagatgccagggcccctcctctggcccaggacgcctgctgcaagcccacccanatggngccagagtctggtggacnancgnccca

SEQ ID NO: 25763 - DNA, 400 bp, Homo sapiens
tgacatgattacgaatttaatacgactcactatagggaatttggccctcgaggccaagaattcggcacgagagtatttttagaatcatatactgtcttaaaatacatcagtgataatgttaacacttcttcctacctgcataaactgatgatcacaatgaaaaaatagattaatgtctttttttaatgctgaactcaagttctctttgttaagtatacttgcacatttttatcttggtatattgaactctcttggtcttatacagaccattccaagtggtctgacatacatacgcctgataaaataggaacattgccaagattatttctactttctttccaaccaaagaatgtgaccgccccacacatacacaccatggaatactatgcaggcataaaaa

SEQ ID NO: 25764 - DNA, 459 bp, Homo sapiens
  misc_feature (1)...(459): n = a,t,c or g
ggagnnnnnnnnnttggnnantttgaatgaccctnttgacatgattacgaatttaatacgactcactatagggaatttggccctcgaggccaagaattcggcacgagcagaatatagtttggagtttggcttcatcttcctggggttcccctcactcccttttttgtcaaccccatctgtagcctcttcctctactcaggcagtcgacccgccacgatgagaagtgggaccagcagagggcgccaacttcaggagtccgctttcccaccaggcttcattcacccagtggacctgaactgtttggtagagccacccggcccttccttcctcatcgttgtttggtatgcgcacagttcctgtgggactgggccgtgagttttccattggaaagaagttcagtggtcccattgttaactcagcctcaaatctcaactgtcaggccctacaaagaaaatggag

SEQ ID NO: 25765 - DNA, 497 bp, Homo sapiens
  misc_feature (1)...(497): n = a,t,c or g
ctctggaancanagagaactcttngctatgacatgattacgaatttaatacgactcactatagggaatttggccctcgaggccaagaattcggcacgagttgatctcctgacctcgtgatctgcccgccttggcatcccaaagtgctgggattacaggcgtgagccaccgtgcctggcccacttatttttctttttaagaaaatattttatctactttaaggagaacttttctgttgtcattaggtgttaccaacagttacagtgagtggtgatgggaaagtaaataaagaatctctacattaagattctaagaacatttaaaaaaatgagaatgaaatagcttgctttattttatattcagagggcttgcatgttttatttatttttttttttaattggttttttganatggagtctcgctntgtcgcccaggctggagtgcagtggccgtgatcttggctcaccgcaagcttcgcctcttgggttcatgccattc

SEQ ID NO: 25766 - DNA, 342 bp, Homo sapiens
gcagagccggagtaacgggactcccagctgcgcgtcgcagtcccgacgcgagaagggctggagtcggcgtccagcctagagcccccggtgggagccaggccgggacgcgtgcaccatgccctacctgctcatcagcacccagatccgcatggaggtgggccccactatggtgggcgatgaacagtcggatccagagctgatgcagcatctgggggcttcaaagagaagagccttgggaaacaacttttatgaatactacgtcgatgaccctccccgcatagtcctggacaagctggaacgcaggggcttccgtgtgctgagcatgacgggggtgggccagac

SEQ ID NO: 25767 - DNA, 314 bp, Homo sapiens
  misc_feature (1)...(314): n = a,t,c or g
gctggaagattaagtgagataagttctataaagtccccaccaagggcaaggcatatagctatcagttactaaatcgtggcccttctgaagctcaaattctgaaataaccttctatgcaattctgattcaaagcttcatggaacttatattcttgtcggagagacaatatatataaataaaatatatgtgtactagttatatgtactaaagagaaaaaaagcagggaaaggggatacaaaatattagaaagaggttgaaattgaataggatgaacagttaagaccccaacanaagaggactcttaaggggaccta

SEQ ID NO: 25768 - DNA, 285 bp, Homo sapiens
gtttgagggctggcgctgtgtggaccgtgacttctgcgccaacatcctcagcgccgagagcagcgactccgaggggtttgtgatccacgacggcgagtgcatgcaggagtgcccctcgggcttcatccgcaacggcagccagagcatgtactgcatcccttgtgaaggtccttgcccgaaggtctgtgaggaagaaaagaaaacaaagaccattgattctgttacttctgctcagatgctccaaggatgcaccatcttcaagggcaatttgctcattaacatccg

SEQ ID NO: 25769 - DNA, 340 bp, Homo sapiens
atcattaggacagggaagctctggttcctgaaaaattccctgaaacaggttgatcgggtgggagctggcagaggggagaaggaagctatgatgcacttttctgaggctttccactgtgaaatctacaaaaagaatttcttgtatacttttacctgtgcatgcttttgggaataaaatcagctttaagaaaataccgtacatttcctgtttaaaagaatataaaacagtaagtctggcttctaccccattcaacatgtaaaacttctatttggaatgaaaggtatcaaaataactttccaatttattactaaacatgaaattccctataattttcaaataa

SEQ ID NO: 25770 - DNA, 375 bp, Homo sapiens
  misc_feature (1)...(375): n = a,t,c or g
tttgaannaccagctatgatatgattacgaatttaatacgactcactatagggaatttggccctcgaggccaagaattcggcacgaggtcccaagggcacagctggcttggacgagttacccatttacagacagagtgctctggttggtggaattcatagggctagttctggggtggctgctcctagcctcctgccacattgtgtagcagggaagaggctgctgtgtgctccactagggctctccaacctttgggtgggtgcctggcccagaacagggttccctgagttgtacagaaattcaatggaaagccgacgtgcagggagggtttggacccacacaggggaaatgccctggcatctgggaggnnnnnntg

SEQ ID NO: 25771 - DNA, 467 bp, Homo sapiens
aacagctatgacatgattacgaatttaatacgactcactatagggaatttggccctcgaggccaagaattcggcacgagccttcatgggctcgcggtccatcgacgacttccaccagggcaccaaggctgctctctcaggaggcaccaccatgattattgatttcgccattcctcagaaaggtggctccctcattgaggccttcgagacctggcgaagctgggctgatcccaaagtttgctgcgactacagccttcatgtggcagtgacgtggtggagtgaccaggttaaagaagaaatgaaaatccttgtgcaagataaaggtgttaactctttcaagatgtttatggcctataaagatctgtacatggtgacagacctggagctgtacgaagccttctctcggtgcaaggaaattggagcaattgcccaggtccatgcggaaaatggagacttaattgcagaggg

SEQ ID NO: 25772 - DNA, 442 bp, Homo sapiens
  misc_feature (1)...(442): n = a,t,c or g
gggnggnnggnngtgtttctccnctactcagttgaaccattacgaanttaatacgactcactatagggaatttggccctcgaggccaagaattcggcacgagattttttgatcaaaaaactgattagcagaatatagtttggagtttggcttcatcttcctggggttcccctcactcccttttttgtcaaccccatctgtagcctcttcctctactcaggcagtcgacccgccacgatgagaagtgggaccagcagagggcgccaacttcaggagtccgctttcccaccaggcttcattcacccagtggacctgaactgtttggtagagccacccggcccttccttcctcatcgttgtttggtatgcgcacagttcctgtgggactgggccgtgagttttccattggaaagaagttcagtggtcccattgttaactcagcct

SEQ ID NO: 25773 - DNA, 313 bp, Homo sapiens
gcttaaagggatggtgacattcacaaaacacttgactgtgtatggcactttatttccacaagtaccaaaaataacacaaaacagattataggataagaggttaatgaggcagaactcttagaaaggggggaaagacagtctttgagcagaaatctgatgaaagtgaagactccttcatgtgaataactgggtagtgtcgaggggtgggagagttcccatgcaaagcatggtgtgtgtttggcatatttagggaagcagaaagtagtctcacaggtgcatgactagagcaactggactgtcagccacatggata

SEQ ID NO: 25774 - DNA, 360 bp, Homo sapiens
ttcaggctggaggtttcagtgagctgagattgcgccactgcactccagcctgggcaacagagcaggagtccatctcaaaagaaaatgaaaaagagtatgtagcacttacttctaaaatataaatttatttcaaatataccagttgagtggtagatatagctgttcagatttgctgagatccacagaatcgcaatgttaaaaataacgagaaagagctccatgtgaaataaacaattttcattctgatgtctcaccagcactccccactcccctcaaacccctgcctttggagtctatctcacttacctgttaccttggaccaaatggaaataaagctttttgatgcaaaaaaaaaaaaaa

SEQ ID NO: 25775 - DNA, 505 bp, Homo sapiens
  misc_feature (1)...(505): n = a,t,c or g
acccttnnnanntttgaanaccgttatgacatgattacgaatttaatacgactcactatagggaatttggccctcgaggccaagaattcggcacgaggttgaaaatgctttagaagtctaaattatattttttgctccgtcccatcttcccaacctcccaaaagaaaacaaagctttggtctgctacaatatggactagtgcttgattgaaacttccatactttaccacagaaaatgaaagaagtaatgtgttgtcaagcacagagtgagctgatgcctcttcattaccctagtaatataaacagcagtaggatgtactttcacatggctgagtgaatatgatttgattggtcctttactattattcactgtaatggagaatgcctatcaaagagaaagctttttattttgataatagctaacccttattgagctgttctagtgtgctctaaaagttttctatacgatgtttctgtgaaaacagtattatttctggtttgtaaaa

SEQ ID NO: 25776 - DNA, 491 bp, Homo sapiens
  misc_feature (1)...(491): n = a,t,c or g
ttgnnntncnnnnntctgganaaccntntgacatgattacgaatttaatacgactcactatagggaatttggccctcgaggccaagaattcggcacgagctttactaatttcaagtataaagtccatggttaatttgcttcgagtcttgaaaaattgagagttcctaaatgattttgaccattttcattttcatttcatacatattaggaattattaaagtcctgtcagagtttatactgaacctctgacttgattttatccagctcatcaaagcaaaattgtcttagtagcactcttttgtagctgtttaatatttaatattcagtgggctccttaaggtgagttcttgaaggcttgtgagtagttgaagagctgtgaatggtggttaacaagctattatcatctccttgaaaagcataacatgaagcagagattcaggaaaatcttagacagtgattagtctatctgcagtgcatcaaaactaaattag

SEQ ID NO: 25777 - DNA, 444 bp, Homo sapiens
  misc_feature (1)...(444): n = a,t,c or g
gtgtnnaanatttgaaaccgnaatgnctgantacgaatttaatacgactcactatagggaatttggccctcgaggccaagaattcggcacgagcagacacagagcgtaggtgagatgccctagtgaaaaaagattgtcaatgtctatctgctaaatgttgacatttattttccagctcccttcccttgcttagctgtcagaatgctggcttccaaatgaatataccccaggtgggattctggaatattttctggagaaactgaaatagcctcagaggaagtccctacaaatctgacatttaggagttgcacaatgaaatgaccaggtttccgcccattcattctacagtgaagctcaatataaacaagctccaattcattcagataaccagttttttagtacctcgcaccaaataggaatgaacatattcaggtattcaaggat

SEQ ID NO: 25778 - DNA, 381 bp, Homo sapiens
ggatggagagtgatgagaatgaggacctcatcaacagtgagggagactctgatgtggactcggagctggaggaccgtgttgacggggtcaagtcctggttgtcaaaaaacaagggaccttccaaggcagcttctgatgatggcagcttaaagagttccagccccaccagctactggaagtcccttgcccctgatcggtcagatgatgagcacgaccctctcgacaacacctccagaccgcgatactcccacagttatctgagtgacagcgacacagaggccaagctgacggagactaacgcatagcccaggggagtggttggcagccctctcaccccagggcctgtggctgctgggcacctctcccaggaagtggtggggt

SEQ ID NO: 25779 - DNA, 367 bp, Homo sapiens
gaagctataaagtgcagcttgtaaattagggtgtcacttttgactgatgtttgaagatattggttcagtataaggcagtggcacataagtgaacaaattcctaagcgttgtgaggaagaggtgtaaaagcacaaggaaaatgattgcaatctccttctaccacaccgtgcttcagtggcacatttactaggtgcagtttgcacactatccttccaagagacataatggacttgatgaagacccagcgaaaggaatgttaaatgactaaaggaattatggcacttctactgataatcattacaattatgtccaacactgctttagtccttactgtatgtaatccatgtgggagttcattttcatgtac

SEQ ID NO: 25780 - DNA, 469 bp, Homo sapiens
  misc_feature (1)...(469): n = a,t,c or g
ntttgnagancgctatgacatgattacgaatttaatacgactcactatagggaatttggccctcgaggccaagaattcggcacgagcccttttttgtcaaccccatctgtagcctcttcctctactcaggcagtcgacccgccacgatgagaagtgggaccagcagagggcgccaacttcaggagtccgctttcccaccaggcttcattcacccagtggacctgaactgtttggtagagccacccggcccttccttcctcatcgttgtttggtatgcgcacagttcctgtgggactgggccgtgagttttccattggaaagaagttcagtggtcccattgttaactcagcctcaaatctcaactgtcaggccctacaaagaaaatggagagcctcttctggtggatgctttgctccctctgagctgcccatgctggctggcaaacacacctttctgctttgccttcaca

SEQ ID NO: 25781 - DNA, 437 bp, Homo sapiens
  misc_feature (1)...(437): n = a,t,c or g
aggtatgacntgattncgaanttaatacgactcactatagggaatttggccctcgaggccaagaattcggcacgaggggattccatatcctcgggtgaatctaaagacaggagttcctcctgacaccaataatgagacatgcacagcgggagccggttccctcctggtggaatttgggattctgagtcgactcctgggggactccacatttgagtgggtggccagacgagcagtgaaagccctttggaacctccggagcaatgatacaggattactaggcaatgtcgtgaacattcagacgggccactgggttggaaagcagagtggcctgggtgccgggctggactccttctatgaatacctcttgaaatcttacattctctttggagaaaaagaagacctagaaatgtttaatgctgcatatcagagtattcaga

SEQ ID NO: 25782 - DNA, 455 bp, Homo sapiens
cgcggccgcgtcgacgggaagacgagtgtgggcagagctgctcaggaccatggctgaggccatcacctatgcagatctgagacccaggggctgatgatgatggggaaatcacctacgagaatgttcaagtgcccgcagtcctaggggtgccctcaagcttggcttcttctgtactaggggacaaagcagcggtcaagtcggagcagccaactgcgtcctggagagccgtgacgtcaccagctgtcgggcggattctcccctgccgcacaacctgcctgcgatacctcctgctcggcctgctcctcacctgcctgctgttaggagtgaccgccatctgcctgggagtgcgctgtgagtaaggctgtccctacttcccacttacaccgaacgactttcgtcccgactctcgccccaaagctgatcttcctcagcagggatcataagtcactaccacc

SEQ ID NO: 25783 - DNA, 515 bp, Homo sapiens
  misc_feature (1)...(515): n = a,t,c or g
ggtcatgagatttttcaataattatataaataacaagtaagtcgtggaagtaaaaggtgttctgatgatttgctctacaacatttttaatcttaaaatgcttcagtgttctcaaagagattttaaagtctattcttaaaaatgtaaagtgccggccgggagtagtggcccatgcctgtaatcccagcactttgggaggccagggcaggtggatcacaaggtcaggagtttgagaccagcctgaccaacatggtgaaaccccgtctctactaaagatataaaaattagccaggcgtgatggcaggcgcctataatcccagctactcaggaggctaaggcaggagaatcacttgaacccgggaggtggaggttgcagtgagctgagatcgaccactgcntccagctgggcganananccaaacttcatctcaaaaaaaananataaagggatttttatnaaccgccngaagcttatcccttnagggggggntaanttacntggcctngcccnnttta

SEQ ID NO: 25784 - DNA, 345 bp, Homo sapiens
gccagcttgataaggcagttgggagatagattatgtcaggagctaccagtccctgttatttgggacagaaggtgatattcagacttgtagattgttacaagtgattccctttttagctctgagggcaagaagctttaagaacaactttaaggctgggtgtggtggctcacgcctgtaatcccagcactttgggaggctgaggcgggtggatcacttgaggtcgggagttggagaccagcctgcccaacatggagaaaccccgtttccactaaaaatacaaaattagctgagcgtggtggcacatgcctgtaatcccagctactctggaggctgagacaggagaat

SEQ ID NO: 25785 - DNA, 478 bp, Homo sapiens
  misc_feature (1)...(478): n = a,t,c or g
ttgtnttttgnnctnagtagatatnctttnngacatgactacgaatttaatacgactcactatagggaatttggccctcgaggccaagaattcggcacgaggataaatgagaagaaaaagaagagaaaaaaattatttttaaaacatgacaaacataagagatacagaggtctagtgtgagaatcatggatgatcctgacaccagaaaatttgaaatggaagcaataatccaagacatgatttttaaaaaaccgcttctggtaggtagagggaagacttgaatttgcagatttaaagttctgtgatccatgcaaaatgagtgaaagtcatcatatatagaaatatctagactctgttcaattccaaagatttaaaaaaccaaaactaaacaaagaaaacctacaacatgtcactccagagtatcataaattggtctatttttctgctattctgaaacacgaaatgccagaagacaatg

SEQ ID NO: 25786 - DNA, 785 bp, Homo sapiens
ctcaactcattattgaaaaggccgaacatggagatcaagattatatctggcactgcattgatctcttcttagatttcattactgtcttcagaaaactcatgatgatcctggccatgaatgaaaaggataagaagaaagagaagaaatgaagtgaccatccagcctttcccaattagacttcctctccttccacccctcatttcctttttgcacacattacaggtggtgtgttctgtgataatgaaaagcatcagaaaagcttttgtactttgtggtttcctctattttgaattttttgatcaaaaaactgattagcagaatatagtttggagtttggcttcatcttcctggggttcccctcactcccttttttgtcaaccccatctgtagcctcttcctctactcaggcagtcgacccgccacgatgagaagtgggaccagcagagggcgccaacttcaggagtccgctttcccaccaggcttcattcacccagtggacctgaactgtttggtagagccacccggcccttccttcctcattgttgtttggtatgcgcacagttcctgtgggactgggccgtgagttttccattggaaagaagttcagtggtcccattgttaactcagcctcaaatctcaactgtcaggccctacaaagaaaatggagagcctcttctggtggatgctttgctccctctgagctgcccatgctggtctggcaaacacacctttctgctttgccttcacaaaagtaatgtgttccctttcccacccatggatggaag

SEQ ID NO: 25787 - DNA, 370 bp, Homo sapiens
gcatgaataatgaggatggactgtaactcctaaatggctctcatgcagcaccccacctgggttgtcaaatgtagattctggccgggtgtggtggcttccagcactttgggaggcagaggcgggaggactgcttaaggcccggagttccagactagcctgggccacatagcgagacccccatctctacaaaaaatagaaaaattagccgggtgtggtggctttgcacctgtcgtcccagctacttgggaggctgaagcaggaggcttgcttgagcctggagtttgaggctacagcgagctatgattgcacctctgcactgcattctgggtgacagcgagacctgtctctacaaaaaaaacattaaccaggc

SEQ ID NO: 25788 - DNA, 371 bp, Homo sapiens
ggaaattagatcatttcagactaagagccttgggggtggggagggagcaggatgatgtaatagagagaaagcagtgagtgtaaggaacttgagcttttacagtaggaaggccccaaaagccttctcccccagctccttcccttaaaaaaaaaaactactgatgtggaaagtggcatctatgggaaggttatctcctaactggcagagcaaggtcacgcagtgagtcagcctctgcgctcactctccagactcttctaaacaaatctcaaggatctgttgggaagggaaaggccatttcagaggggcagcagccagtagagaggggacagagggagcttctccaacgctgctccaagatttttttttttttt

SEQ ID NO: 25789 - DNA, 441 bp, Homo sapiens
  misc_feature (1)...(441): n = a,t,c or g
ttgataccnntntttgacaccgnttgactgattacgaatttaatacgactcactatagggaatttggccctcgaggccaagaattcggcacgagaaaatccgagaggccaacaagctggcggagaagcggaaagcccacgatgaggcggtgaggtctgagaagaaggccaagaaggcaaggccggagtgagtgcctgcggcccctcacagggctgaggccagcccctagcagctggatgtggcagaggcaggccagaggacctaagtgtgatggaccanagtcacttctcctnctcctttctccagccngccctgacccctcatgctctctggcttggccantggnatncctcnctnctttggatggantntgtcntgctggggnctgtnntgttntnanntntntttccntctcttgatgagtntggttccntnngcctc

SEQ ID NO: 25790 - DNA, 483 bp, Homo sapiens
  misc_feature (1)...(483): n = a,t,c or g
annnnnnnnnnnnnnnnatnnannannnnnnnnnagnnnntnnnnnnnnnggnnnnngcnccccccttggcccctangaacccatcgagaatgatacgaatttaatacgactcactatagggaattnggccctcgaggccaagaattcggcacgagggcccggctggcagccctggaagagcagaggagggaggggaagaagcccagggagatggcaggcaccttgaagctggaggataagcagcggctggcccaggaggaggagagagaggccaagcgcctggccattatgatgatgaagaagcgggagaagtaccagtaccagaagatnatgtttggcaagaggcgaaaaatccgagaggccaacaagctggcgganaagcggaaagcccacgatgaggcggtgaggtntganaagaaggccaagaaggnaaggccggagngagagccngcggccctnacagggctgaggccagcccctaa

SEQ ID NO: 25791 - DNA, 328 bp, Homo sapiens
  misc_feature (1)...(328): n = a,t,c or g
agctgactttgagcagttctagaggcagaaaaatctttacggagtgctttatttagcttgagcatgtgagtcatttgttctgtatgagggagagctactggcaacaaatgaggaagagcctttggatcaataaatttcagacagttgacactggttaatagctggggagaaatacacttccctgggatcaaatgacatctgaatttctacaattttactaactaaattcatataacaggttacctcttcccaaatcaggtcttgtggccagttccagtggctaagctcaggacttctaanaagtattttttatagaaaattanaatct

SEQ ID NO: 25792 - DNA, 437 bp, Homo sapiens
  misc_feature (1)...(437): n = a,t,c or g
anacccttttgaataccgctatgactgattacgaatttaatacgactcactatagggaatttggccctcgaggccaagaattcggcacgaggtgcaggagaggtttgggagaagtctgttggaacttggaggaaacaatgccattattgcctttgaagatgcagacctcaccttagttgttccatcagctctcttcgctgctgtgggaacagctggccagaggtgtaccactgcgaggcgactgtttatacatgaaagcatccatgatgaggttgtaaacagacttaaaaaggcctatgcacagatccgagttgggaacccatgggaccctaatgttctctatgggccactccacaccaagcaggcagtgagcatgtttcttggagcagtggaagaagcaaagaaagaaggtggcacagtggtctatgggggcaagg

SEQ ID NO: 25793 - DNA, 420 bp, Homo sapiens
gccggaatttaaattacaaaaattaaaacgttcacagaactctgcgtttttggacataggagatgagaatgagattcagctgtcaaagtccgacgtggtactgtcattcaccttacagattgtcataatggaagtgcaaggcctgaagtcagttgctcccaatcgaattgtttactgtacaatggaagtggaaggagaaaaacttcatacagaccatgccgaagcctcaaggccacaatgggggactcaaggagatttcaccaccacccatcctcggcctgtggtcaaagtgaaactcttcacagaaagcactggagttctggccctggaagataaagaactgggaagggtgatattatacccaacttctaatagctccaaatcagctgaattacaccgaatggtagttccaaaaaatac

SEQ ID NO: 25794 - DNA, 541 bp, Homo sapiens
  misc_feature (1)...(541): n = a,t,c or g
gaanttttgaacccctatgacatgattacgaatttaatacgactcactatagggaatttggccctcgaggccaagaattcggcacgagtttttttttctacaatcagcacaaattaattttaaaatataaaacaaaccagaaaagttttcttgtaaatattattagcccacgctgagaaaagcaggtaaacctgcttgctttaacttttatggactaggcagatccacaagcccttccatcatcccaggcggtgcatacccagaggagctcagaaggaaaaaaactgttcatctctgcaatggtggtgctcacaagactgtagcattgcaaggtagactaagcagcaaggaagcccaaagagtttcactccaaactagctagtttagtcccatcatgagtgggaaagcataaattggtgtttcctgtttatttatcataaatagttataccactctgtggtccagagaaagcaagccatgccttggctgtgcttctggattttccaggccggatggatttcccttgggcatctgtggcgac

SEQ ID NO: 25795 - DNA, 323 bp, Homo sapiens
  misc_feature (1)...(323): n = a,t,c or g
gggtgtggttttcctttgctccttcaatctcctcatttctttcattgcctggatgaagcccctgcaacaggagagcttttgcctcctctgcctcacctcagccccctagacctctgtgtgcaactggagtatggtgttaagtgagcctggagcagtcttaggaaaaggcttcaagtgaggctaggtgggaaggcctgggacagaaataaattcaaaacaacaaccaaagaactgataggtggaataaaagaagtgggacagaaaagattctaaggtggtaattgaaagagagaggtacagtaagantatcnngcgtncagtga

SEQ ID NO: 25796 - DNA, 442 bp, Homo sapiens
  misc_feature (1)...(442): n = a,t,c or g
gagtggcctcgactgcgaaccagaggctcagagacagacggaagagaccagaccattgcccttgaagagtgtaaccaagaaggagaaccaggcacccctgccaattctccttcatcaacctctcagagaatctctgtggaactgcccgttccaatataataatctcctcctttacaagagctttcctctcctctctcttgctctcagagacctataaatccaaccagttaccctgcaagtcagccccatctgctgttccttggtctctaatcacctgagctgggtaaaggggattctgggagttgagagctctgccagggtgagatgtttcctgaagagaggttccccacccctgtaactcctcactgnactgatttactggcgcatgaaattctattaaaaatgcattcttctgaataaangagnattcactatttacttc

SEQ ID NO: 25797 - DNA, 424 bp, Homo sapiens
  misc_feature (1)...(424): n = a,t,c or g
ggggagactcgggagttatgtgcagtggagagacagaatctaataggctgtcactggttgatctttagagagaatacatagtctctaaatactttcctttatttactataaaagggaaaagagtaagtcaacaacagagaaagcttcagtctccacctaatcaaggggtcaaggtgaccatgaccttggatgggacaagccatggtcagcgccacctgtgattcagagatgagaatatgcattaccactgggtgtttctgcagagaggcatcatctaaaccaaatcatcaccacaccttggccagacaacccaagtgaggggtggagagtccaaatccttagtcccttctgacgtgtgctcacagaaccactgtctggcaggatccagccctgattcccgattcctancctcagtgctctgaaa

SEQ ID NO: 25798 - DNA, 557 bp, Homo sapiens
  misc_feature (1)...(557): n = a,t,c or g
ccncttgactgattacgaatttaatacgactcactatagggaatttggccctcgaggccaagaattcggcacgagagcagtggaatcccgtaggcctggttggaatcatcacggcattcaatttccctgtggcagtgtatggttggaacaacgccatcgccatgatctgtggaaatgtctgcctctggaaaggagctccaaccacttccctcattagtgtggctgtcacaaagataatagccaaggttctggaggacaacaagctgcctggtgcaatttgttccttgacttgtggtggagcagatattggcacagcaatggccaaagatgaacgagtgaacctgctgtccttcactgggagcactcaggtgggaaaacaggtgggcctgatggtgcaggagaggtttgggagaagtctgttggaacttggaggaaacaatgccattattgctctcttcgctgctgtgggaacagctgccagaggtgtaccactgcgaggcgactgtttatacatgaaagcatcatgatgagggtgtaaacagacttaaaaagcctat

SEQ ID NO: 25799 - DNA, 491 bp, Homo sapiens
  misc_feature (1)...(491): n = a,t,c or g
tttttaantngccatgncatgattacgaatttaatacgactcactatagggaatttggccctcgaggccaagaattcggcacgagggaaggactttcatgaatagaatctatttcagattggccgtaagtctcgatttattgatccgcaccactggactggggtggggttgtgtccactttttccctgccccttccctgctttggctcttgtgattgtgtcctccgtgtgtcaggcagagccctgtgaaggtgtggatatgtggccatattttacctgcataatctgcagttcatgtgattcagcctaatgggttgcaatgccctgaggacagagaccatactttttcttcctttgtctttttagcgaaattcaatcctgttctgcgcctgcgccacagttgcaggctgtactgtctgccctgtgcatctcacacacccccactgcactgtgcacctagngatggccgcanatttgcttttactcatctcg

SEQ ID NO: 25800 - DNA, 504 bp, Homo sapiens
  misc_feature (1)...(504): n = a,t,c or g
tttgaanctttgnnnccctgctatgacatgattacgaatttaatacgactcactatagggaatttggccctcgaggccaagaattcggcacgagtcataatgtgtgttgtgaccagactctccttataaccccagttaataaaagttaacaggaaaaaaaaaaaannnnnnngatngnaaaataaagtngggnaantttntntgaangtaaancaaaangatanagatgaaangtaggaaaaantaaaaaaanaaaaantngngggtancanttcagggggggcantanttagncantagnctagttcgagagagtttnttttaaaaaantaantttaaactnttttaaaaaatagnctaanatcntttcctacantngaanaatntgantttccaanctgaaanagttcncccantnctgantntaataaataaaaatcctnttngggcncagtttgaaattttaaaaantgaggggaagggagaatntttccagganagaag

SEQ ID NO: 25801 - DNA, 320 bp, Homo sapiens
gatcaacaataacaaaacaagacaaaaacctttccttaacttggcctcttcccttgaactattttttctctctccttcctataattgttatacttctttaaaaagtaattgttactttttgacaaaagtaaatattgtcccttttttccctactttcaagtcctctctgtcttgtgacattctggcctccatacctgcttaattttttttgagatggggtcttgctctgttgcccaggctggagtgcagtggcacaaacacagctcactgcaacctccacctcccaggatcaagcaatcctcccatctcaccctcccaag

SEQ ID NO: 25802 - DNA, 414 bp, Homo sapiens
gagctagctgaggtagcttgcagcatcttttctagttgaaatggtgaactgataggaaaacaaatgagtagaaagagttcatgaagaggccctcctctgcctttcaaaaggctggtcacctacacatgtttaaggtgtctctgcacatgtctcaagcccatcacaagaaagcaagtacagtgtggatttcaaatggtgtgtaacttcagctccagctggtttttgacagctgttgctgtggtaatatttttgacatgtgatggtgatagtctctggttctccccatccccacaaaggctgttgaaccacagcaccaggaagcctgagaatgaatcctgagggctctaacccaggctttgtcccaggctttctggtgtgtgccctcctggtaacagtgaaattgaagctacttac

SEQ ID NO: 25803 - DNA, 456 bp, Homo sapiens
gggaagagttaccccaagaagcccccatcctggtgacatctgtgaccccgcatggggtccagctgagtggcttttgcacaccctggtcgggtggagtgagatcactggggagacgggacctggagcgcaggctgtgaggacacagccagaggccatgagtgctcaggagtgccataaactgtgattttgagactgataaggccaggctaaatagcttgctgggtgtgtcttgtttgcctttttatatttgaggcctataaaaaaatagtgagaaaatagcaagatgcccaggagacaggtgatctgattcagccagggggtgggaggtggaggcaccagtgactcccgctagccagggactggaggcaggcaggtctggggacaagaggatgagggatggggccacatttggagcctggtgcactgagagtaaaagaagaaaacctgctccacaaa

SEQ ID NO: 25804 - DNA, 331 bp, Homo sapiens
ttcttaggttctcacgctttgtttttaacaagaggtgaatgtgtgtatgaaatcaccaataaggtgggatgtttaggctacagcgaagcctggttaaatgtggagacagaataaccaaaactcaccactgtcacttactccatgcccactctgctccgggtaatgtcctggatgctttactttgggactcagactctgcagctaggatcctgcacttgtgctttacacattgtgggggcctggaaagttccataccctttgttctccagggtcctcatctgccaagtgaaaatactaagcacatctatctcacaggaaaaagtattcagga

SEQ ID NO: 25805 - DNA, 308 bp, Homo sapiens
gcattatatgtattaatttgaaattctttgctgttaaggttttggaatgtgtgtttgaatccaaatgtgattggagtatgtaataatgggtattcttagaacatgctgaattgttttacttttttggagacagggtctttctctgttgaccaggctggagtgcagtggcgcgatcatggctcactgctgcctccaacctctcaggcttgggtgattcccgcctcagtctcccaagtagctggaaccacaggcatgtgccactatgtctggctaatttttgtattttttgagagacagtgtttcactct

SEQ ID NO: 25806 - DNA, 373 bp, Homo sapiens
gggtatacatgagtggaattttagtgcctcttctgtcaggggagtgagtatttctaaatttgaagaaagatgctgctttctttatgtgcttcacaattctgatgatttccaaatctatttctgtacagaacttcattgtaaaaagttttttgagatggtgaacaccattaccgaagagaaggggagaagcacagaggaaggagactgtgaaagtgacttgctggagtatgactatgaatatgatgaaaatggtgacagagtcgttttaggaaaaggcacttatgggatagtctacgcaggtcgggacttgagcaaccaagtcagaattgctattaaggaaatcccagagagagacagcagatactctcagccc

SEQ ID NO: 25807 - DNA, 1111 bp, Homo sapiens
gggaactttttgactgacacgaatttaatacgactcactatagggaatttggccctcgaggccaagaattcggcacgagctatgaagaaagggagaagatccaagtactaggaagcttggtgtctttggagatggggaaaatcttagtggaaggtgtgggtgaagttcaggagtatgtggatatctgtgactatgctgttggtttatcaaggatgattggaggacctatcttgccttctgaaagatctggccatgcactgattgagcagtggaatcccgtaggcctggttggaatcatcacggcattcaatttccctgtggcagtgtatggttggaacaacgccatcgccatgatctgtggaaatgtctgcctctggaaaggagctccaaccacttccctcattagtgtggctgtcacaaagataatagccaaggttctggaggacaacaagctgcctggtgcaatttgttccttgacttgtggtggagcagatattggcacagcaatggccaaagatgaacgagtgaacctgctgtccttcactgggagcactcaggtgggaaaacaggtgggcctgatggtgcaggagaggtttgggagaagtctgttggaacttggaggaaacaatgccattattgcctttgaagatgcagacctcagcttagttgttccatcagctctcttcgctgctgtgggaacagctggccagaggtgtaccactgcgaggcgactgtttatacatgaaagcatccatgatgaggttgtaaacagacttaaaaaggcctatgcacagatccgagttgggaacccatgggaccctaatgttctctatgggccactccacaccaagcaggcagtgagcatgtttcttggagcagtggaagaagcaaagaaagaaggtggcacagtggtctatgggggcaaggttatggatcgccctggaaattatgtagaaccgacaattgtgacaggtcttggccacgatgcgtccattgcacacacagagacttttgctccgattctctatgtctttaaattccagaatgaagaagaggtctttgcatggaataatgaagtaaaacagggtattgaagctcaggtgctagctcc

SEQ ID NO: 25808 - DNA, 439 bp, Homo sapiens
taatacgattcactatagggaatttggccctcgaggccaagaattcggcacgagcttcctcctccaggccctcttcggggccgtggacttcctgggccgggccaccactgccctcttgctcagtttccttggccgccgcaccatccaggcgggttcccaggccatggccggcctcgccattctagccaacatgctggtgccgcaagatttgcagaccctgcgtgtggtctttgctgtgctgggaaagggatgttttgggataagcctaacctgcctcaccatctacaaggctgaactctttccaacgccagtgcggatgacagcagatggcattctgcatacagtgggccggctgggggctatgatgggtcccctgatcctgatgagccggcaagccctgcccctgctgctcctctcctctatggcgttatctccattg

SEQ ID NO: 25809 - DNA, 156 bp, Homo sapiens
aattggttgctaacagctatgacatggattacgaatttaatacgactcactatagggaatttggccctcgaggccaagaattcggcacgagaattggcttggccccagttctgggctatttgattattgaagaagattttaatattgcactaggag

SEQ ID NO: 25810 - DNA, 447 bp, Homo sapiens
  misc_feature (1)...(447): n = a,t,c or g
gctgggcaagctgggagtaaccatcaagtagacatgaacactcagagggcaggtttgctctctcgctacagctcactaggttggactctgtcaggaccctctgctcctaaccctgactgattcattttgctctgtgctatggggaggaagttggggggcacttataaggaactattcaagttcctcagggctagaaaggtcacagtaatagaatttgctctgccttcaggatcaaagatcctagtagagttgttcttctctaccccccgcatccttgaaaatctgtgtgaaccatctcaacccacttgcagaaagtcttctctgatcatctccaactccttagtcaagctctatctacttcatgcccccagcttcaaaaaggggaganccttagagaccacaacatccattannnggttccctgcccggnccctgaaattttggaac

SEQ ID NO: 25811 - DNA, 521 bp, Homo sapiens
  misc_feature (1)...(521): n = a,t,c or g
tttgaanatntganacccttatgacatgattacgaatttaatacgactcactatagggaatttggccctcgaggccaagaattcggcacgagggctggtgctggggtcacagcggaggggctggggatgcacgggaggggctggggatgtgagctttcctgagttcccacagttctctgcccctctcctgtctcatggcacaagggccccctggggcttgcggtggttttgcgccaagctaatatcttgttcttcccaacagacggaggcccattgaggcttctgtgtcctccacggggaccagcattgggctaaacctgcagacaccattgcaaagggaattcaggcaaacccgctggtgaaaaatgattccagcgtggggacagaggctgacatttctcgcgtgggtgatttaatgttgggcctcaatttttcactccccccgtaagagtatgacatagccacaaccttgccagggcccgaaggagggtggatggacttatccgtcccataggngtggt

SEQ ID NO: 25812 - DNA, 309 bp, Homo sapiens
tggcacgaggcgctgcctcagcctcccgagtagctgggactacaggcacctgctaccacgcctggctaatttttgtatttttagtagagatggggtttcgccacgttggccaggctggtctcgaactcctgacctcaggtgatctgcccgtctcgtcctcccaaagtgctgggattacaggtgtgagccaccacgcccagccaccactacgcactttaaaaccaaaaaaagctcaaagggatggatcattgtccatggctcaggagccccactgtggggtaagtgtgatgtcgatggattaatttaaac

SEQ ID NO: 25813 - DNA, 743 bp, Homo sapiens
ggagagagctagcaccatgagcttcaataccctgctgtagaattcaagaagagttctacatatctgtgttgcatatttgctttgtcttttgacatagctgccacagcatcttcatgagttgcgaactcgacatctgcttcaccagttactctgccatcaggaccaatttcaatgtgtactctcacagggttgagcggtgaaaaaaaattataaatgtcattctcagtagctctgtaaggtaatccccgcatgtgtacacagtgtcctgttgtgctctggaaagtagagccaccatccccgtatctgtgatcagacattcctgaaaaacagtaattgaggtctcttccaaatctatctgacccaaatccatagccatcattatagccattgtaatcatcatagcctccatagcctccaccataagcaccacgcctcatcctctcaaagccagctcctctgccaatgctgttataccctctaccagccccaggtctgtcataaggacctggccgctgcatggccataagctttcgtggtggatcataatgagttctaacttcagctctactgctcttaaagatttcaatatacctaaagcattgttcataaggaaggggtagggaggggagagaaaacattagttcattttatacaggtatttagttatacaagaaaacaatctagtcatagccatgaaactgactaatatttaaagccagatttcttatatttgcataggcaat

SEQ ID NO: 25814 - DNA, 402 bp, Homo sapiens
gtgacccaacctcaccacccacctttctcctcctggggagtgtcgtgttgaactgtgtctgtgtcagtgcactggtcccagccctggccgcagcctagtcctttctctgtggagtgggctgcaaaacagcagcgcaagaggagacagtcttcgtcaggtgtgggtgtttggtgcctgcatgggtggccttgcacagagcagttaggggaagatgagggggaggcatggggctgggccagctctctgggatacagcctggtcagagagtaaatggagcagaggagcaggtgtggcagcacctgcccttcacctccctgaccaggcccgtccctccttcgccagtgctgtgcagagctcatttaaatgtattcctttctaggtctgggcgcggtggctcacgcc

SEQ ID NO: 25815 - DNA, 344 bp, Homo sapiens
gtgggatttgagtaggtggagaatttattccaggtgggggcaatagcaggagcagagacccagaaatgagggcaagagtgctcctttgtggtcaagaaggaacctggcttggcaggaaagtgcattggtaaagtcaatccaggcagaatagcttgatttgcccttgaaagctctgagtccggcacatcatgggaaaaataacacagaaggaggaagcaagcagggagacttcactgggtaggggagcccctggagtgtgaagctacataagaatctatggttgcaggtctccactagaaaaatgtgctgcgaacccttcctgtccaggaccatgacttactggg

SEQ ID NO: 25816 - DNA, 504 bp, Homo sapiens
  misc_feature (1)...(504): n = a,t,c or g
tgatcccancagctntgacatccttacgaatttantncnacncaatnttantacanactcactatagggaatttggccctcgaggccaagaattcggcacgagtttttttagggctcggcgtggtggctcatgcctgtaatcccagcactctgggaggccgaggcaggcagattgctttgagtccaggagtttgagaccaacctggacnnnnnnntnagaccttgtcgctgcaaaaaaaaattaaaaattagccaagcatggtggtgcatgcctgtagtcncanctactcgagaagctgangtggnaggatcacctgaatctgggaggcagaagttgcntgtgaacctaggntgcgtcactgtactccagcctggncaatggattnanacactgcctcttaaaacaaaaaatgtgctccatccacacaatggaatattatnntgccataaaaaggaattcgccgctaatatatgctaccntatggangaccctcaaaaacatga

SEQ ID NO: 25817 - DNA, 670 bp, Homo sapiens
  misc_feature (1)...(670): n = a,t,c or g
ggctggttccaagtctttgctgttgtgaatagtgccgcaataaacatacgtgtgcatgtgtctttatagcagcatgatttatagtcctttgagtatatacccagtaatgggatggctgggtcaaatggtacttctagttctagatccctgaggaatcgccacactggacttccacaatggttgaactagtttacaatcccaccaacagtgtaaaagtgttcctatttctccacatcctctccagctcctgactctgcctattgttcctccagttcctcctcttcgtccctcagcgtcctgggtggcaaatgtggccaacctggggactctggccggacggccaatgggctgcctgggccccgaagccaagccctttccagctcctccgatgaaggcagcccctgccctggcatgggggggccactagatgcacctgggagccccctggcttgcactgaaccctcgaggacctgggcacggggtcggatggacacacaggcagaccgtaaacccttacgtattcccacgcctcggggcccccgccgccccttcggacccgcaaagctgggggacatgggcatgccctgcactcagtcaccccgagggcctgagccaaatttcctggatggggatggacccannttnactgtttntngattnagggaacccc

SEQ ID NO: 25818 - DNA, 533 bp, Homo sapiens
  misc_feature (1)...(533): n = a,t,c or g
gatgaagatgagctttgcgttgactttcaggtcagcaaaaggccgttggatcgcaaaccccagccagccgtgctcgaaagcctccattgggttatttgtgccagcaagtcctcctctggaccctgagaaggtcaaagagttacagcgcttcatcaccctttccaagagactccttgtgatgactggggcaggaatctccaccgaatcggggataccagactacaggtcagaaaaagtggggctttatgcccgcactgaccgcaggcccatccagcatggtgattttgtccggagtgccccaatccgccagcggtactgggcgagaaacttcgtaggctggcctcaattctcctcccaccaagcctaaccctgcacactgggctttgagcacctgggagaaactcggaaagctgtactggttggtgaccaaaatgtggatgccttgcaaacaaaggggggatccgggcctgaaaaancccaanggttcatggaanggccnttccttggattgtgggaaaaaaccccccgggggg

SEQ ID NO: 25819 - DNA, 416 bp, Homo sapiens
  misc_feature (1)...(416): n = a,t,c or g
ggagggtctggagcaggaagagagggggctttagtgtatagttgagggaccctgatggaaatgcagtcccattgccaagaaaatgtccttttcagtgtccatgggcattccttttcccttcttctcttgctgggtggacagaagcccgaggatactggcagtattccctcagggtcctcggggtgggctgctttcccagctggagcagaggctcagcctcacaccagatccagtagggaagagtgcatttgcactcgaatccttttggctcctctcctgaaagatcctgtccccaacattggagcttcccctggtgaggaaggggaaaggacatggnctttggattaggtagttgtggttcgcaggttactagctgtgtgtccttggaaggtcactggncctctctgagcccctgt

SEQ ID NO: 25820 - DNA, 998 bp, Homo sapiens
  misc_feature (1)...(998): n = a,t,c or g
ggtgaagcaggcaggcctggaaaggatgaggcctggtgcctacagcacaggctacgggggctacgaggagtacagtggcctcagtgatggctacggcttcaccaccgacctgttcgggagagacctcagctactgtctctccggaatgtatgaccacagatacggcgacagtgagttcacagtgcagagcaccacaggccactgtgtccacatgaggggcctgccgtacaaagcgaccgagaacgacatttacaacttcttctctcctctcaaccctgtgagagtccatattgagattggcccagatggaagagtgacgggtgaagcagatgttgagtttgctactcatgaagaagctgtggcagctatgtccaaagacagggccaatatgcagcacagatatatagaactcttcttgaattcaacaacaggggccagcaatggggcgtatagcagccaggtgatgcaaggcatgggggtgtctgctgcccaggccacttacagtggcctggagagccagtcagtgagtggctgttacggggccggctacagtgggcagaacagcatgggtggctatgactagttttgttaggaacatttgagttacttcaatcattttcacaggcagccaacaagcaattaagagcagttataatagaggaagctgggggacccattttgcaccatgagtttgtgaanaatctggattaaaaaattacctcttcagtgttttctcatgcaaaattttcttctagcatgtgataatgagtaaactaaaactattttcagcttttctcaattaacattttggtagtatacttcagagtgatgttatctaagtttaagtagtttaagtatgttaaatgtggatcttttacaccacatcacagtgaacacactggggagacgtgcttttttggaaaactcaaaggtgctagctccctgattcaaagaaatatttctcatgtttggtcattctagtttatattttcatttaa

SEQ ID NO: 25821 - DNA, 355 bp, Homo sapiens
ggcccgggtgttctgcaagctggtcaaaaaggggaagcggcccaaatatgttaagttctatggccgctgcagggtctgtgaaggcggcgttgcaggtggccgaggtgctggaagccatcgtgagctgctgcgtggggcccgagggacggcaagttttgtgtacgaagcccactggcgaggtgcttctcagccggaatggaggccgcctcctggaggcgctacacttagagcatcccatagccaggatgatagtggactgtgtttccagtcatctcaaaaaaacaggagatggtgcaaaaacatttattatctttctttgccatttgcttagaggacttcatgcaatcacagacag

SEQ ID NO: 25822 - DNA, 392 bp, Homo sapiens
gaaactttccaagcatagagaaggaatgaaacaaggtgagctgcatatgatgccctgaggggaggacggtcaggctagtttcacctacatcaaagctgtagatgaggcagtcacagaaccaaaagaggaaacccgagacccttacccccataaggctgactgcatcagtgactacctaagagtcccagctgttgtcaaaaagccatgggaagactacagatgagatgacagccacagagggaccacgaaaagtatgaaggagaatactctcctactgctggggattgaacatctcttctaccctaccaattaaagtaacatcttagaattctgggaacacataggtaactaggttaatttcattttattttggaaacagcttttatgcaaaa

SEQ ID NO: 25823 - DNA, 535 bp, Homo sapiens
ccctttcctgttaggcgagagctgcgaaaggcgagagctgcgaagggccaggtgtcgggcgctgtttctcgttttcatcatatagacaaaacagccctgctgcaaagatggtcaacgtacctaaaacccgaagaaccttctgtaagaagtgtggcaagcatcagcctcacaaagtgacacagtataagaagggcaaggattctttgtatgcccagggaaggaggcgctatgatcggaagcagagtggctatggtgggcagacaaagccaattttccggaagaaggctaagaccacaaagaagattgtgctaaggctggaatgtgttgagcctaactgcagatccaagaggatgctggccattaagagatgcaagcattttgaactgggaggagataagaagagaaagggccaagtgatccagttctaaactttgggatatttttcttcaattttgaagagaaaatggtgaagccatagaaaagttacccgagggaaaataaatacagtgatattcttacgtaaaaaaaaaaaaaa

SEQ ID NO: 25824 - DNA, 511 bp, Homo sapiens
  misc_feature (1)...(511): n = a,t,c or g
tganncttnngaatcccntngctatgacatgattacgaatttaatacgactcactatagggaatttggccctcgaggccaagaattcggcacgaggcttaaaacaacagtcttttattttgctctgcagtttgggagggcttggggtggggtagcttatctctgttctgctcagcattgtctgatgtggctcagctgggggctggcactttcagtgtgactcattcacgtggctggtaggatggtgctagcttttggttcctctgtgtttccttcatgagtgagtatctcaagatacaggaaatggaaattgctggaatcttaggtcctcggctcagaaactggcacagtgccacttttgctgtattctgctgagcgagggtcacagagcccaaattccaggagaggaatgtatcccacctcttgataaaaggcatgtcggctgggattacaggcgtgagccactgcacctggcctatcctcttcccattcttgagtcctcttcccctcgc

SEQ ID NO: 25825 - DNA, 455 bp, Homo sapiens
  misc_feature (1)...(455): n = a,t,c or g
ggtctccccaagacagctcaaaatatccacacctcggcaacagtctaagatgagagcctgtgacaggtggcagcgcccccaggtggggtactggcatcagagcctggtgcgcccctaggggagcctcccactggagtgcccggccaggtctccaagccccaaatgagtccttgtgaaccacaactgatccccccaggtgggtgcttgtggactgcctcggacccagccacgctgctccccgcaatgctgatggggctgtgcattgaggacccctgcttcctggttctcagtcccaccccaaaacctggcacccagaacagttggaagtgtggaaaggaggtttatcggcttcccttggagagggcctggcttcaacattgggccagtaggcatcttacttggcaggtgtccggggaatgggccanatggacctgctagaattggaagggcaccga

SEQ ID NO: 25826 - DNA, 350 bp, Homo sapiens
gagtgttaattccttaagatattctgatgacaatgtcaacccctttaaggtgattttgctgttacctataaaattatcacttgtttgtgaattgattataatggcatattttcaggagtatgttttgtacttttaatttgagattaaaagccctaagaagtgtgggtctttttcttattcttcttggtgctcctgtgcctgacacagagcaggcccttaaaagatgtgatacctggagttcttattcacttggcctcagcagagttggccctttcctgggtgtaggaaactgctgaggactaggagctggggaggcagaaaaggcaatgatgttctgaatgtttctgccc

SEQ ID NO: 25827 - DNA, 376 bp, Homo sapiens
catccctgctgcattttccctgctggaggatggggcagagggacaatgggagaggagggcatgaccccaccccaggctatagcagctccttggccacaaagatccttttgccagtagcagaagggaggaaaacagcaaccaccagggttaccaccacttgtgggatggccaggaccccattatgtcctcttaaagttgtgctcaaagcaattaataaattaaaatgagccttcagcagcaaagctgtcaatcacacaggagaagctgagcagaaagcaaagcaaagaggaatttatagcttctctggctgaggcctaggcccctccctctaggagcagctgtcagcacggactacataggggcctccaaagtactg

SEQ ID NO: 25828 - DNA, 362 bp, Homo sapiens
tttaatgtctacaatacatttagttttcacgtctctgtagcctctcccaacttgtgctgattcttcagccattccttgttccatgaccttgacactttgagagattactgatcaggtattttggagcatgttcctcagtttgggtttgtctgatgttttttcatgagagagtgagtttatgcattcttggaaagaatatcacaggtgtgattttttatttttcatagtgtaacaggaggtatatgatgtcaatatgtgttattactggtgctgttaactttgacatgtggttaagatagcgtctcccagttttctccaatggagagttaccatgcttccctttgtaattagtaagtatcttg

SEQ ID NO: 25829 - DNA, 314 bp, Homo sapiens
  misc_feature (1)...(314): n = a,t,c or g
gccacggtatttacgaatccaaggagataaagaatactgtattactaatgatgaccttttttctctggcttattgccctggcaaaacattaattgtgggtgcctcttatgttgccctggagtgtncacggnttctncctgnctttggcctatatgtcncnncaatcgttcnctnaatnattgtccncnnctttnancnntaaaattgcnnnnaaantcnnttnntacntntcatnnctgnnatttattcnttctntnanatcnctantnatnnnnttnnnnnntaattatnnttncnttnnattcancntctct

SEQ ID NO: 25830 - DNA, 523 bp, Homo sapiens
  misc_feature (1)...(523): n = a,t,c or g
ggctcggcgtgggaggagaaacctgggagaggaaaataattctttttaaatctaatctccaaaaaacaattataaaaaagtagcacagtgcttagggcacagcactggcagagcagatgagacctttgtggcataaggaacatgtatctggtctctgccccctgttcctggaacagaacttctaaaacccctgtaatttctcgggtgacaggaacgtcttttgttctaataaggtgactcttggtgggctcctggatgggggctggtcaccagaaagactgagccatgattagaagctgggaacttccagtccacccccatcctctggggaggggagaggagctggagctggagttaaaaatcgataatgccaaagtgatgaagcctccataacatcctgaaaagaggagattcaggtttcagagtggtgaacacatncatgtgccagganggtggtgcactgaactccccggggcagnagttccacgttaggacctttaacctgtttatagcacctnttatt

SEQ ID NO: 25831 - DNA, 378 bp, Homo sapiens
aagaaagcataaaaaagggacacttggaagaaattcaaaagaaaagaacctgctgagcagtcaaattccagaaggccattactggtgcatctcttgctaatatagtggccaagaggaatgagaaacatgaagttaaaaaggctcaatgaaaacaagctagcagggctgctaaggaagcaaaaaaggctaagctagcatctgaaaagaccgcaatggctgctgctaaggcagcatctacacaaaagatggtgaagcctgtgaaagtgtcagctccccgaggtggttcaaaacaccaagttggcagatcagattcttaaagattggactgtagaaaaatataaattatattacctaacatttgaataacgtattttagtt

SEQ ID NO: 25832 - DNA, 343 bp, Homo sapiens
gctaaaaatgcggataatgctgagagaggttgtgagaatcagatgagccgtggtacagagtaaatgttcagtgaacattcgttaaatcaatgagtgaatgtgagatatccataacatgtatcagccgttcttttcttctgagatggagatcttttcagaccaataaccttccctgcctccaaaacaaaatggggaggtaaagggcgctagcgatggaacagatgttcctgcacgtcttacggatggtccagggtgggttttgtgctcagccctaggaactggcatcttgcttcccaccagtgccaccacctctgtatgctgtatacacatccacttaacttca

SEQ ID NO: 25833 - DNA, 543 bp, Homo sapiens
  misc_feature (1)...(543): n = a,t,c or g
gtgtaaaaaancngnaacccttnngacancacacgaatttaatacgactcactatagggaatttggccctcgaggccaagaattcggcacgagatatctcatagtggttttgatttgcatttctctgatggccagtgatggtgagcattttttcatgtgttttttggctgcataaatgtcttcttttgagaagtgtctgttcatgtccttcgcccactttttgatggggttgtttgtttttttcttgtaaatttgtttgagttcattgtagattctggatattagccctttgtcagatgagtaggttgcaaaaattttctcccatgttgtaggttgaacccaggcactttcttaatgctgaggactttggtaaagcgctggtgtgttccttccctgccaggctgccaagactgtgttttgctcgagtgctcggagacagtcagacaagccggagtgctcgttgcaacatattaattatgtctctggttccacaggcttttcaggaggatttaattaattgcatttatgagcctattttgaaaa

SEQ ID NO: 25834 - DNA, 551 bp, Homo sapiens
  misc_feature (1)...(551): n = a,t,c or g
tttcncctntgaataaatgaataccngttatgacatgattacgaatttaatacgactcactatagggaatttggccctcgaggccaagaattcggcacgaggttacttgagtatattgcatccaggtagggagcacagttaggtagcgagcacatccaggtagtgagcacccaatagtcagtttttcaacccttgcccatatctatcccaaggaaaagaagtaggtagatactctgccctctgacttttcctcagttccactgccaggccatcaggaatgcgatccacctcctagtcacactgctgacccagagttgaggctattcagatcagacaggtacctcttcatctgcaggaacgttggtgttccaagtagagagagagtgtgactctaccccacatgcaagcctgaacctggagggcactcttcctgtggggatgcagtcaccctgacgtgttccataaagactgctaaaggtgcacccacatgaaagctccatgggagaagcccaacttttgctggcatngnanataaanggggaaaagaagtt

SEQ ID NO: 25835 - DNA, 435 bp, Homo sapiens
gaagaactaccaaagggagccaagacaaagggctacagaaggtgttcctaagctgcccaggagccaatcccatctccattatgaggtcatattttgttaaatgatgaaagaacaaagagaatttccccatatcagtgcttcaggatcccagtggtgtgtcctgtcacttagaaagatagtgatcaattagaataatttaagagtattgaaatgcatggtaggtggtctttcctattctcattcaggggacagaaacatgggccccatgccttccacccttctttcctgaaagaatgggaaaataagggcaccgagcagcagctcctacatctctttcaccaatttgaaatctcaagcttctttgtaaataggtgagagttcttatgtgtaactgacattgggggagggctgcccagccagttgtggagggccctt

SEQ ID NO: 25836 - DNA, 333 bp, Homo sapiens
  misc_feature (1)...(333): n = a,t,c or g
gcaaaaggcaggcatttttacagatccttatgtttcaatttcatgctctattcacgtgaagtaaatataacatcacagtgtaccaattaaatggccataatgagaacgtttattcctcaacccctgatttttttttggatgtggggttcctaattcagtctctttggaaaagcaggttacacacagtgtgaagagaccgagcccaccctgggagctgtgggatgtcggaatttcttcctctttgagtaaacttactcagagtccatgttagagatcggcagccacaagctcagataccttgaggtactaggaagagaatncagtgaatgaggc

SEQ ID NO: 25837 - DNA, 370 bp, Homo sapiens
atgttaggcacaggataaaaaggtgtgagacagacatgcgcccaaggagctcatattggtggcctacaagcagaaacatgatgctgccaaaggattctcagattatgcccacatgaaggagccccctgaggttaaacatgccatggaggtcaataaacaccagagtaatgtaaggaagcgcatttctcatgattttctagcgaactgtagttaagtcatattagggcttatgtttattttgctgaaatttaaacattacaacagccctgttcaaaaaagactttaatatttcttatcagtcagaggtacatctgaattattctatccacagtcattaacaccttgccgaatgcctttatgttgtcaggca

SEQ ID NO: 25838 - DNA, 662 bp, Homo sapiens
  misc_feature (1)...(662): n = a,t,c or g
ggtcgccatgaagtaagcacgacccgtggttcccaatccgcttacatcctcgggcagaactcctctctgtcgtccctggcatggctgtagacaccctccctgatggactttcactttttgttgcagggtcgagctgtgcagttttagcgggtacaagatctaccccggacacgggaggcgctacgccaggaccgacgggaaggttttccagtttcttaatgcgaaatgcgagtcggctttcctttccaagaggaatcctcggcagataaactggactgtcctctacagaaggaagcacaaaaagggacagtcggaagaaattcaaaagaaaagaacccgccgagcagtcaaattccagagggccattactggtgcatctcttgctgatataatggccaagaggaatcagaaacctgaagttagaaaggctcaacgagaacaagctatcagggctgctaaggaagcaaaaaaggctaagcaagcatctaaaaagactgcaatggctgctgctaaggcacctacaaaggcagcacctaagcaaaagattgtgaagcctgtgaaagtttcagctccccgagtttggtggnaaacctaaactggcanattagttttaataaagattggttatactctaaaaaagnaanaaaaanatnttntttaac

SEQ ID NO: 25839 - DNA, 445 bp, Homo sapiens
  misc_feature (1)...(445): n = a,t,c or g
tttgnnnnccnnattggannncaacagctatgacatgattacgaatttaatacgactcactatagggaatttggccctcgaggccaagaattcggcacgagagaaatagaaagagtcaagtatattaatatacttggacttcctttcttctgtcttctgagaaggaaaggtggttttttgttttgttttgctttgttttaaaggtagcttccagacccgaatatcttaaatagccttctgtgggaatgagctggtatacagtcattcattaacccctcacttctcttcatcttagcaacctagcattctttggagcacaataataaagacagtcatcttcaatgtaggtttatgtagtagatgaagctttgaacttgggaaattttcctgtgtagtttatatctgcattgtaaccacaaatatcactatttagacttatttaata

SEQ ID NO: 25840 - DNA, 373 bp, Homo sapiens
gcgaggcgctcccggagctgagcgcttctgctctgggcacgcatggcgcccgcacacggagtctgacctgatgcagacgcaagggggttaatatgaacgcccctctcggtggaatctggctctggctccctctgctcttgacctggctcacccccgaggtcaactcttcatggtggtacatgagagctacaggtggctcctccagggtgatgtgcgataatgtgccaggcctggtgagcagccagcggcagctgtgtcaccgacatccagatgtgatgcgtgccattagccagggtgtggccgagtggacagcagaatgccagcaccagttccgccagcaccgctggaattgcaacaccctggacagggatca

SEQ ID NO: 25841 - DNA, 419 bp, Homo sapiens
gtgaaccctagctgtgtcagaatctccatccctgaaatttctcattagtggtactggggtgggatcttggatggtgacattgaaactacactaaatcccctcactatgaatgggttgttaaaggcaatggtttgtgtcaaaactggtttaggattacttagattgtgttcctgaagaaaagagtccaggtaaatggtatgatcaataaaggacaggctggtgctaacataaaatccaatattgtaatcctagcactttgggaggccaaggcgggtggatcacaaggtcaagagatagagaccatctttgccaacatggtgaaactccatctctactgaaaatacaaaaattagctgggccgtggtagtgcaagctgaaggctgaggcaggagaatcactcgaacccgggaggcagaggt

SEQ ID NO: 25842 - DNA, 345 bp, Homo sapiens
gcagttatcaatccacctcctgtggctgggacaatttcatacaattcaacctcatcttcccttgagcagccaaacgcagggagcagcagtcctgcctgcaaagcctcttctggacttgaggcaaacccaggagaaaagaggaaaatgactgattctcatgttctggaggaggccaagaaaccccgagttatgggggatattccgatggaattaatcaacgaggttatgtctaccatcacggaccctgcagcaatgcttggaccagagaccaattttctgtcagcacactcggccagggatgaggcggcaaggttggaagagcgcaggggtgtaattgaatttcac

SEQ ID NO: 25843 - DNA, 376 bp, Homo sapiens
ggaaccagccagttcgctttttctcctaaggtgtggaacttttattttgttttaaaaatatgaatcaaaattcctgtgttgtgtgccaaggtataaagtggagaagttagatgagtgcaaggagctcctttgtgttgtgatgatgtgttttaaaagttgcactatcttaatgttgaaaatatttacaagggaactgttttacgtgaagttctgtatgttgtcttttcacctgtggattgtaatcaggcccaaggaatatcctggagtggtccccagaagcatccaagaaaagatatttggggacgtagcctaacattttaccaacttacgtaaatcaaaaaagtcattattgtgcaggagtttgcatcaaatagca

SEQ ID NO: 25844 - DNA, 264 bp, Homo sapiens
accagctatgacatgattacgaatttaatacgactcactatagggaatttggccctcgaggccaagaattcggcacgaggtcccaaagcaactctttagtgaccagcacactcgcttctgaatcatcatctgaaggtgacttctcagcagatacatcagagataaattctaacagtgacagtttaaacagttcttcgttgcttatgaatggtctcagaaataatcaaaggaaggcaaaaagatctttggcacccagatttgcct

SEQ ID NO: 25845 - DNA, 460 bp, Homo sapiens
  misc_feature (1)...(460): n = a,t,c or g
tggnnaattggtatgncatgattacgaatttaatacgactcactatagggaatttggccctcgaggccaagaattcggcacgagttcggcgtggtggctcatgcctgtaatcccagcactttgggaggccgaggcgggcggatcttgaggtcaggagatagagaccatcctggctaacacagcgaaaccccatctctactaaaaagacaaaaaattagccaggcgtggtggtacgcacctgtaatcccagctactcgggaggctgaggcaggagaatcgcttgaacccgggaggcagaggttgcagtgagccgagatcgcgccactgcactccagcctgggcgacagagcgagactccatctcaaaaaacaaacaacaaaacaaaacaaacaaacaacccaagacccgaaaggatcaaactttttctaagaaacgcagttgtgctgtagataaagctcaa

SEQ ID NO: 25846 - DNA, 479 bp, Homo sapiens
  misc_feature (1)...(479): n = a,t,c or g
aacagctatgacatgattacgaatttaatacgactcactatagggaatttggccctcgaggccaagaattcggcacgaggccaggaagcccaaagagtgggtttcctgtggctcttccgagttgaggactgagaattggagagtctgggtgccctccactggccctcatcacattatccatttgaccttattagaaagggccgttggccaggggcggtggctcccgcctgtaatctcagcactttgggaggccgaagcaggcagatcacctgaggtcaggagtttgagaccagcctgaccaacatggtgaaagcccgtctctactaaaaatacaaaaattagccaggcatggtgacgggcacctgtgatctcagctactcaggaagctgaggcaggcgaatcgcttgaaccanngnagnnccngnttngnnnanctganatcnnccactgactncancntgnncncnnancnnnactcc

SEQ ID NO: 25847 - DNA, 362 bp, Homo sapiens
ttgatactctcatttaaactggtgctttatgtacatgagatgtactaaaataagtaatatagaatttttcttgctaggtaaatccagtaagccaataattttaaagattctttatctgcatcattgctgtttgttactataaattaaatgaacctcatggaaaggttgaggtgtatacctttgtgattttctaatgagttttccatggtgctacaaataatccagactaccaggtctggtagatattaaagctgggtactaagaaatgttatttgcatcctctcagttactcctgaatattctgatttcatacgtacccagggagcatgctgttttgtcaatcaatataaaatatttatgag

SEQ ID NO: 25848 - DNA, 678 bp, Homo sapiens
  misc_feature (1)...(678): n = a,t,c or g
aaccaacatgatctatcacagggaacccggtttctgaggttaagaacctggtatgagttcccctctcacacttctagcccacgccttactcgagaagactcttaccctcctaagcgcccaataatagcttcgacgagctgctacaccatagatactaccccgtttggtaggattcgatttagctttctactacgacttagtttacctctcatctccatcttccctacgggttattagagttagcatctccggacagtagtagtacctcagtcgatagaaccccgtcgacggacatccctccctaaaccgctacccactccggcgagattacagtttagcggttgcaaagtcggtcattaggatacgtttgagcacgaaaatcctaagtattcctcgtaggtattatcggacgacgtctaagaaacctcgtaagtatgtcctttgacgttatgccatactaatatggagtacggaggtagctaggtctgaccttccccgcttaaagcgaatttactcnagatatataacattcgcacgtccggggataggaaatcggggtanttacttcaatcgacgacgcagttcgtaggngctacgggttaccgaagaatcggncggncttncgttcgcaatcgaggcttatttggaaagtatggnntaaacggngctnaaaggcaa

SEQ ID NO: 25849 - DNA, 322 bp, Homo sapiens
aacaccatgcgcctctggtctgctcgggcaccaaatgactttaacctcagagactttaatgttggagactacattcaggctgtgctggaccgaaacctggccgagaacatctcccgggtcctctatcccaatgacaatttttttgaagggaaggagctaagattgaagcaggaatactttgtggtggctgcaaccttgcaagatatcatccgccgtttcaaagcctccaagtttggctccacccgtggtgcaggaactgtgtttgatgccttcccggatcaggtggccatccagctgaatgacactcaccctgcactcgcga

SEQ ID NO: 25850 - DNA, 438 bp, Homo sapiens
ggagtcttggagcatatgggcagtttgaggttctatttaatgtgtcaagatgtactgtgtttttgagatattttagtcaactggacttagtagtgattcactctccacagcatcataaaagtttcagtttgtgccagggaagataaactattttgaagtaagtttgaatttcaattctaccttttccccatatctgcatagacacggctttattgtagtacaggaattttgacactttctttggtttttgtccatgccatgcaactcttaagtcttacagaattaaaccatgttctaccattcaagaagggtttcttttctagttcataaatatttgggtttagagcaaaggaatgagaacatatacttagaaacaaggcaattcatttgacatttatctgattgatggcataaaagaaataaaggagaggtaaagag

SEQ ID NO: 25851 - DNA, 315 bp, Homo sapiens
ggctaaaagctccccaaatttggtgaaagccataatcctacagattcaagaagctacacaaatccccaggagaataaataaaaataaatccacactaagacacataagaattgaatttctgaaaactaaagacaaggaaaaatccttgagaacacccagagagatttactacctatagggaaacaaaatttcaataacagtgaatttatcatctgaaactatggaagccagaaagaagtggcacaattatcaaatgataatagaaaagaactgtcaacctacaatcctacatccagcaaaattatcctttaagag

SEQ ID NO: 25852 - DNA, 395 bp, Homo sapiens
  misc_feature (1)...(395): n = a,t,c or g
attttatcagcagctgttaagttgactttgaggaaattttgaattgaaatactttaggtgacaagtaaaggcaactgtgaaaagcaacatttgattttaggggacagggtacctgtgaaagaagactggttaggagtggaagtcaggcgtaaaggcactgaaatgtccgaggcagggacaatattcagtttctcttcctctatcaccttgtgcaatgtacctgttaaatgtttgttgaatgagtgagaagggctttagagaaattgttttggatatagggatacactttactattggagaaaacacccgagatcagaaagttgctaatgagataggggtgggggatgaatggtaaagacctctacctttttggagttttctaccattgngnttta

SEQ ID NO: 25853 - DNA, 453 bp, Homo sapiens
  misc_feature (1)...(453): n = a,t,c or g
ttgganacctttatgacctgattacgaatttaatacgactcactatagggaatttggccctcgaggccaagaattcggcacgaggtgagaacaagagagctgtaagacgcctccgtactgcttgtgaacgtgctaagcgtaccctctcttccagcacccaggccagtattgagatcgattctctctatgaaggaatcgacttctatacctccattacccgtgcccgatttgaagaactgaatgctgacctgttccgtggcaccctggacccagtagagaaagcccttcgagatgccaaactagacaagtcacagattcatgatattgtcctggttggtggttctactcgtatccccaagattcagaagcttctccaagacttcttcaatggaaaagaactgaataagagcatcaaccctgatgaagctgttgcttatggtgcagctgccaggc

SEQ ID NO: 25854 - DNA, 652 bp, Homo sapiens
  misc_feature (1)...(652): n = a,t,c or g
gcggcacgagaaaaaacaacccaataaaaattagcaaaggggctgggcatggtggctcatgcctgtaatcctagcactttgggaggctgaggcagtcagatcacctgaggccaggagttcaagaccagccgagccaagatggcgaaaccccatctctactaagaatacaaaaaattggccgggcgcagtggctcacgcctgtaatcccagcactttgggaggccgaggcgggcagataacttgagattaggagttcgagaccagcctggccaacatggcaaaaccccgtctctactaaaaatacaaaaagttagccgggcgtggtggcacacgcctgtaatcccagctacttgggaggctgaggcaggagactcacttgaacctgggaggcagaggttgcattaagctgagatcatgccactgccactccagcctgggcaacaagagcgaaactctatctcagaaaaaacaaaacaaaacaaaaaaacaaaaaacaaacaaaaaatcttcttctggggttctctaatggggataacattaatcatctcctaagatgactctcgtgccgaattcttggcctcgagggccaaattccctatagtgagtcgtattaaattcganggagttcagggggttcctgtatacaacncct

SEQ ID NO: 25855 - DNA, 343 bp, Homo sapiens
gaaatatacagcaaggagtaacaggtgaaaaaaattataaatattcaatcagacaaatcccgagtgtgggacattatgcaaaacaatccacctggtaacttaaaaaagtcaatgtcacaaaaaaagttgaagggaataactgttgtagattagataagagttaagaaatatatcaataacttcctagtcatccaggcagctaaaaaaagaaatatatcaataactaatagctaatagaatgtgttatctgtgattggaacatggtttttaaaaggagctatgagccacattttagagcaatttgaaaaatttaaatatggagtgtatttcaaatgtaaggaat

SEQ ID NO: 25856 - DNA, 362 bp, Homo sapiens
gtggtatacatatgtatattccctagctctgtccagtatgaggcctagaggtaacggcaccgcggtagtaatgagcatacctagtgcccaaagggtgttttcaaatacctttctcaagaaggaagaatctctgccctcctttgatatcccttacctctgccctggctctcctaaatttgttttaagattaatgattgtggccgggtgtggtagctcacacctgtaatcccagcactctgggaggcagagtcaggcacatcacatgaggccaggagttcaaaaccagcatggccaacatggtaaaaccccgtctctactaaaaatacgaaaattagcttgggcgtggtgacgcacgcctgtaa

SEQ ID NO: 25857 - DNA, 395 bp, Homo sapiens
gtcgccacgggcagcattggggctgcagtgcaaggcctgggtgcctgctccatgtccggggatgagctcacagagctgctggcagggatcactggcactgaagtggactgcctgcgggcctgtcaggagcagatcgaagctgcactcagggagagcctcagggaagccgctcagaccagctccagcccagcgcccaaagccccccggggctccagcagccaagggcccagccagaccagcactcctacagatgtcacagccatacacctgtagccctggagaggccctctggagtggccactaagcagaggaggggccgctgcacccacctccctgctccaggaaccacaccacatctaagcctgaaggggcgtctgttcccccttacaaagcct

SEQ ID NO: 25858 - DNA, 471 bp, Homo sapiens
acagctatgacatgattacgaatttaatacgactcactatagggaatttggccctcgaggccaagaattcggcacgagtgtggagaatggggtctcgctatattgcctaggcaggtctcaatttcctgggctcaagctatcctcctgcctctgcctccctaagagctgggattacaggtgtgagccaccacacctggcaaggggtagcttcttaaaggtggtgacacctgaagtgaaatggcagggtaagcaaggagagcctaatgaaggtctcaacgtttacatgggaaacagtgatgttcgaatagctcaacctaacggagtgagtaagaacttattcccagctactcgggaggttgaggtgggaggatcccttgagcctgggaggctgaggctgcggtgagctgaaatcgtgccactgcagtccagcctgggtgacagaatgagaccctgtttcaaaaaaaaaaaaaa

SEQ ID NO: 25859 - DNA, 154 bp, Homo sapiens
  misc_feature (1)...(154): n = a,t,c or g
gagaattattctagaaatgagatagctctgtatcaatttcccccagttgtttttgaagataatactcatctttctactgtgaagaaggaaggaccaggcataggatttactttcgttcactttttnactcatgnnttcatttactnatttctta

SEQ ID NO: 25860 - DNA, 331 bp, Homo sapiens
gagctggtgccggcatttcccaccaacgccggtttaggaagacgggaccgatgccggccgccccctgctggaggggatgtggcatctcacgggctgccagggagcggggttggctactcctgcaaccagcgtgaagagggtctcaggggaggctgtggtgggatcccccacgtgcccttgttcctctcaccgttacctctggatgcctcggggcaaaggccttcttccacctatagacagagtctacgcaggggtcttggaacccgggcacaccagtccccagctaacgaaatccccgagttgggggatttgagagggtcacgtttggccc

SEQ ID NO: 25861 - DNA, 471 bp, Homo sapiens
  misc_feature (1)...(471): n = a,t,c or g
ggacagcgacaagacgaatgaattctggaataaatacaaagatggcgaccagtgtgagaccagtccttgccagaaccagggcaaatgtaaagacggcctcggggaatacacctgcacctgtttagaaggattcgaaggcaaaaactgtgaattattcacacggaagctctgcagcctggacaacggggactgtgaccagttctgccacgaggaacagaactctgtggtgtgctcctgcgcccgcgggtacaccctggctgacaacggcaaggcctgcattcccacagggccctacccctgtgggaaacagaccctggaacngcaggaagaggtcagtggcccaggccatatgatgcagnnnnnctggaccccaccgagaaccccttcgacctgcttgatttacccagacgcacctgaaaagggcganaacaacttccaaggattgtgggaggccagnatngcagggacggg

SEQ ID NO: 25862 - DNA, 339 bp, Homo sapiens
gcaaatgtcactccctccctctgcccacagggatctttatccagttacagcagcgtaacttgagcagctgctgcaaactgaggctctcttgacccttcgcctacttatttcagctgctaaaatagggctgaaatctgtcaaggatcctgaagggaaggataagattcctactattcaatttaatttaagcttttattcagtgcctgctgtgtgcacaacactaagctagaaagtctgaggaatgtttagattattaggtcctgttccttgcctttcatagatttacaatctattgatagggagagctaaaaaggagagaaagaggaaggagcaaacaca

SEQ ID NO: 25863 - DNA, 71 bp, Homo sapiens
gtgtaaatactaataaatggctaaagagataaaaagtaatcgtcaggaaagaggagccacaggtctggtgg

SEQ ID NO: 25864 - DNA, 1149 bp, Homo sapiens
gagaatattcataaaaaagagattgaccttcggacatctaccatcaaagtcccaggaaagtggccatccctagccacatcagcctgtgcacccatctccagctctaaaagcaatggcctatccaaggacatggacaccgggctgggtgactccatatgcttcagccccggtatctccagcaccaccagccccaagctcaacccgcccccctctcctcatgccaataaaaagaaacacctaaagaagaaaagcaccaacaactttatgattgtgtctgccactggccaaacgtggcactttgaagccacgacgtatgaggagcgggatgcctgggtccaagccatccagagccagatcctggccagcctgcagtcatgcgagagcagtaaaagcaagtcccagctgaccagccagagcaaggccatggccctgcagtcgatccaaaacatgcgtgggaacgcccactgtgtggactgtgagacccagaatcctaagtgggccagtttgaacttgggagtcctcatgtgtattgaatgctcaggaatccaccacagtcttggcacccgcctttcccgtgtgcgatctctggagctggatgactggccagttgagctcaggaaggttatgtcatctattggcaatgagctagccaacagcatctgggaagggagcagccaggggcagacaaaaccctcaataaagtccacgagggaagagaaggaatggtggatccgttccaaatatgaggagaagctctttctggccccactaccctgcactgagctgtccctgggccagcagctgctgcgggccaccactgatgaggacctgcagacagccatcctgctgctggcacatggctccaaagaggaggtgaatgagacctatggggacggggacgggcggacggctctacatctctccagtgccatggccaacgttgtcttcacgcagctgctcatctgggtgagtcacgtgcctctagcctgccctgacctcgctcttcttagccttgttctttgaaagcaacctcttctttcctcccctacaaccaatctctctcctcccatgtcttgccaactgtcaacatgtgttttctcctacagtacggggtggacgtgaggagccgggacgcccggggcctgactc

SEQ ID NO: 25865 - DNA, 151 bp, Homo sapiens
gcaagagcatccggggtgtcctgacgcagttccgggctgccctgctagaggcaggcatgccggagtgcacagaggacaagtagctgccaggcacagaggaaagagcatcaccgtgggagaggccagccgccgcctgctcactcccccccgg

SEQ ID NO: 25866 - DNA, 326 bp, Homo sapiens
ggacattctgcttgacttggatactcttaaaacaaaattttttttaaatttaaaatttaaattaacattttctttctttttttagaaatggaatcttgctgtgtcacccaggctggagtacattggtgccattatagctcactgcagccttgaactcctgggctcaagcagtcctcttgcctcagtctcccaagtagctgggactgtaggtgcatgccaccacactcttctaggactctcttttatctgtacactggggacaattaacccaccttaatttacctcatagggttttaatatgatagaaagtgagagtccttttttta

SEQ ID NO: 25867 - DNA, 223 bp, Homo sapiens
cttcatagtaagaataaataggtttaactaatgtgatagttttctaaaaggagattgtttgaagacaactattatgtaactgagggaaaagcaacttaactgtatgtgattgtgaatgagaaagttttgtgctatgtgggtcatttatctagacattgctgaggtgaataccagttatgtttgattttattctcaaatcattagttgcctttttttttttttt

SEQ ID NO: 25868 - DNA, 296 bp, Homo sapiens
aagaagcgtggattcggcttcgtgtatttccagaatcacgacgcggcagacaaggccgcggtggtcaagttccatccgattcagggccatcgcgtggaggtgaagaaagcagtccccaaggaggatatctactccggtgggggtggaggccggctcccgatcctcccggggccggccgaggccggccgggggccgccggcggtggtccgagaccagaacggcctttccaaggggccggcggccggccggttacaacaagctaccggtggttaccgggccgggcggcgggagggccg

SEQ ID NO: 25869 - DNA, 378 bp, Homo sapiens
gcggcacgagaatctgggctgcggtatatgtagggggtataaataggggcaaaagaggtgggttctatcctcgggtagctcctatagtgctttgacatatgagaagacccatataaaaaaacaagaaatgttctgtcatcataccaactaaagataggagagagcagatgtgagttttagatatagaatgttcccagaaccctactctctttgaaaatgtattatgatgagaagagaccccaagtgagaagtataaagaggcttcaaatggtcatcaccactctaagaaatctaaagagtggccttacccaactgaagtaccaagaaatgagcactgttactgcccactctttagatggaggaactgagacccagatc

SEQ ID NO: 25870 - DNA, 344 bp, Homo sapiens
  misc_feature (1)...(344): n = a,t,c or g
gtttttgtcagaaactatgatttagcttaccccctccactacccagcaaactacagagaggatggagtgtaatatgagcagtacagagtcttaatgcaattcatgaggaccacttagtccttacatgaatctggttgctaacatttctattatattgtgacaatgactcccgactgttattctctgtgagaaatggggggagtaaattcttaataaaagacaccaggtacaaagcaacattttacttctgttgtgataaaaaaaaaaaaaggncncnttttacagataaaangtaaanccctgaaatacnggcncntttttttatcgggcacaaggctggggtt

SEQ ID NO: 25871 - DNA, 331 bp, Homo sapiens
tgatttgggagcatatgctgctgggggctcatggggttgggctgaacaggggaccccatctgttgctgaaggagtcgctgctgataggcctgtagactggcacctgcctctgctcccaaggcctggggaagctggcctatctgtcccatatttccttgttgcatctgttgcatgtgatgctgcatccgctgctgctgctgtggtgggtagccaactccttggggttgctggaactggttatggttggccattccagggcctattcctggccctgctccctgttgctgctgctgatgcatcatttgctgtcgtctcaagatgtctcggaatt

SEQ ID NO: 25872 - DNA, 422 bp, Homo sapiens
gaatacctaacacaatatttcctccctcccaaaaaactcttgcaggcttccacggagaccaaagattcccttgaacaagtggacaaacctgctgtagggacccactacttgaatgtcattgaaaaagcaatcctttccccaaatattggataaattatcaagtggaggaagcattaatttgccaaaatcaacatagaatatatatttttattctactctattaaatgcactagtaacacttcatttttaaaatgtcttctataagcaaaccatcatgtcttagaatgatatgcatgttaaaatccagtgtctctatctcagcatctactaagagagattcataactagtgatggttattctgttttgaagttcaaactactgcctgtggagatgatgacctctgtacttgcattcgtcatcc

SEQ ID NO: 25873 - DNA, 570 bp, Homo sapiens
caggttcccgccgcactcgcgcagacctagcgcgtccaggtgggaggttagtgtggcccgggcgtccgctcctcagcggatgtggcagccccgagccatggctctcgccgtccgagtcgtttattgtggcgcttgaggctacaagtccaagtatcttcagctcaagaagaagttagaagatgagttccccggccgcctggacatctgcggcgagggaactccccaggccaccgggttctttgaagtgatggtagccgggaagttgattcactctaagaagaaaggcgatggctacgtggacacagaaagcaagtttctgaagttggtggccgccatcaaagccgccttggctcagggctaatgcgccctgaaggcagagtccagggaccttgacccagcccctctcagcagacgcttcatgataggaaggactgaaaagtcttgtggacacctggtctttccctgatgttctcgtggctgctgttgggggcagagattgacgcccccggtctttgcctctgagcgggagagtctgtgtgtatgtgtcttccccggaatccacaccacccc

SEQ ID NO: 25874 - DNA, 381 bp, Homo sapiens
cccacgcgtccgccctcacagaaaggagattgggaaaatagctattttgaaagttattgcagatgtagggaatagcttgtttcccattatgtttctagaatattacacatttggagtaagccttgctttttcaacatgcatcatgtaaaattacatgaaagaaaataatttgaaaattacacaagatttctctttcttgatcttgttgatgatgattgtgttctagctcaaaaaacagaccttcttagaatttcttattttttaaaaaagtgagtactcaacagataatactttggtactgcccgttgcagacatgggcctactaaactagaaagagcatttgaagagcaaaaggcaaaggttccatcaccatcctgtgga

SEQ ID NO: 25875 - DNA, 95 bp, Homo sapiens
gaaacaagcaatcctggcagtagctgctggaatgagaggagggagaggtcatagggaggtcggggacaatggagcatggagttgtgttggatttg

SEQ ID NO: 25876 - DNA, 389 bp, Homo sapiens
  misc_feature (1)...(389): n = a,t,c or g
gagaaaaggagggggagctgctggtgaggggaccctccgtgtttcgagaatactggaataaaccagaagaaactaagagtgcattcaccctggatggctggtttaagacaggggacaccgtggtgtttaaggatggccagtactggatccgaggccggacctcagtggacatcatcaagactggaggctacaaggtcagcgccctggaggtggagtggcacctgctggcccaccccagcatcacagatgtggctgtgattggagttccggatatgacatggggccagcgggtcactgctgtggtgaccctccgagaaggacactcactgtcccacagggagctcaaagagtggccatanacggggtttcaccgtgttggccgactggtt

SEQ ID NO: 25877 - DNA, 440 bp, Homo sapiens
  misc_feature (1)...(440): n = a,t,c or g
gggagttgaatgaattaatgactgattagcagggcactagggcccaggagtaagcccagaattgagatcacaggctgaagatttaaaagcttcatagctcaagagaaacgctctgttaaggctgaaggagaataaatcattcctctttttccccaacccatccccttgtctacactacttttcttttgaaagattcaggagctggatggagaaaattgctaacaaagaaaatgggaccttcagaatattaataatgtccctgtttgttgagcacacacacaccatgtgccacgctctggggttaaacatttacctcatttcatggccggancaactctgagatccataatnttgcccctttttgcnantnaataaactgagaatcantgggtggtaangtatctgantgttanganttancnnaaagtgacatattcagg

SEQ ID NO: 25878 - DNA, 253 bp, Homo sapiens
  misc_feature (1)...(253): n = a,t,c or g
gttgggaaaattgattttcttcctgaataagaagaaagtttagggttaggaaacttaaaaaagcagttaaaggactgttattgtacttgatcttatagaatgtttttatatgtgtttataaggactatatataattttcaagcttttctaagatgaggaagtaaagtcactaacattaactagatatgttctaggtactcagtttctttttttttttttggnaancngngtntaagggnntngttttgccccc

SEQ ID NO: 25879 - DNA, 342 bp, Homo sapiens
tttccctgtatatagaaaacaaatttaaagacaactgtttaagtacctctttaatatcaaaacactaaatttacaaattgcacatttatgcaaatggttgtaccaaggcttctctctgtaccccaattgctcaacacagctccactgttcttaccatgggagaaaaccgtaaaaactcagtattctggaataatctttaaattcaaaagtagaatagaaacagcagagaaaagtataggggataccaaagagagaattcagccaagtcaaatatagaatacactgtcttcctgcttttcctacctaaaccacattattgccctattcttagtccccccaaaa

SEQ ID NO: 25880 - DNA, 372 bp, Homo sapiens
gtgaatttgtcatggaagtcacaaataaaacacgtgcagatgtaaagggcgggacactcactcaatatgaaggcaaactgagactggtggaaattgctcaagtgccaaaagcacatgtagacgagttcaagtctgtatcaaagttcaaaatatttaatacaaacaacctatggatttctcttgcagcagttaaaagactgcaggagcaaaatgccattgacatggaaatcattgtgaatgcaaagactttggatggaggcctgaatgtcattcaattagaaactgcagtaggggctgccatcaaaagttttgagaattctctaggtattaatgtgccaaggagccgttttctgcctgtcaaaaccacatcag

SEQ ID NO: 25881 - DNA, 302 bp, Homo sapiens
aaaggatcttgcaagataattaggataccattaaagagctatgaaaagaagctggcaggggtaagatgaaggggtagatgataactataacgagacaattctaaatccaggtaaggattgattatgtgacttttctatcacaatgatagaagaaaattctattttgagagagatgctgcaataagtagcagaatttggcaactgattcaatattctaagctaaagggtaaaaagaaatgggtgttcaggagttactgaattatgtgatagcgttaaagaattaccagtatgataagaaattt

SEQ ID NO: 25882 - DNA, 832 bp, Homo sapiens
cgaatttaatacgactcactatagggaatttggccctcgaggccaagaattcggcacgagcgtcctcgcgccccttttcctacactttcctcttctccccgaccggaggagccgctctttccgcgcggtgcattctggggcccgaggtcgagcccgccgctgccgccgtcgcctgagggaagcgagaagaggccgcgaccggagagaaaaagcggagtcgccaccggagagaagtcgactccctagcagcagccgccgccagagaggcccgcccaccagttcgcccgtccccctgccccgttcacaatgcagcctgcttctgcaaagtggtacgatcgaagggactatgtcttcattgaattttgtgttgaagacagtaaggatgttaatgtaaattttgaaaaatccaaacttacattcagttgtctcggaggaagtgataattttaagcatttaaatgaaattgatctttttcactgtattgatccaaatgattccaagcataaaagaacggacagatcaattttatgttgtttacgaaaaggagaatctggccagtcatggccaaggttaacaaaagaaagggcaaagcttaattggcttagtgtcgacttcaataattggaaagactgggaagatgattcagatgaagacatgtctaattttgatcgtttctctgagatgatgaacaacatgggtggtgatgaggatgtagatttaccagaagtagatggagcagatgatgtaagtctaaaaattcttttttctgtttactttcatactattaaatagtaagttttctaaaaaaaaaagaaaagggaaaagcaatttt

SEQ ID NO: 25883 - DNA, 528 bp, Homo sapiens
  misc_feature (1)...(528): n = a,t,c or g
attggaaatntgatancgtttgactgattacgaatttaatacgactcactatagggaatttggccctcgaggccaagaattcggcacgagctcactgctctgctccacgtggccagtgaaaggtcctagtgctggtgctcctcaggacgctcccctggtcccccatgtggcccgggctccctgcatgagcccaagaatgctgaaggttcagaggtgcttcccacacatcgctggcaatccggccccagcctcccctctgcacacagatggaacagtctgtgttttcctggcagggtcccgggggcatcaatgggggaggctgggcatcccagggaacctcgtggcttggaggccaagcctcccctgggcctagctgccatcacactgctgagaagtaaataaacccagcctcccagggccacagccagccaccaagccagggaggggactgtgtcccacaccaccttattctcttctccccaagtgagctgtgggagccacaggaggacacagggaggangcttgtgg

SEQ ID NO: 25884 - DNA, 358 bp, Homo sapiens
  misc_feature (1)...(358): n = a,t,c or g
cccaaatccaaaaaaatgaaactgtccaaaaccaaaggttctgcaaaatcatgatttaacagtgtgcccagcttgttttgaagctaaaatgaagcctgaaacgataaaagcattgtaatccccagaataagggaactctgcaagcccaataatgtccaagagcatttatgaaaagaggaaaaataaaaagacttgagtatatacacaatagtgatttcttcagcccaatacaaatggcagcaaaatgctacttaaagatgaaacagttaagccaattttttttttttgaaaaatgtanatttanagccaatcgtattttgccagtntnattttnaagccnttactngcnacttccacg

SEQ ID NO: 25885 - DNA, 178 bp, Homo sapiens
  misc_feature (1)...(178): n = a,t,c or g
gggcagctaaattagttccaatgggtttcaccactgcaactgaattccaccaaaggcggtcagagatcatacagattactactggctccaaagagcttgacaaactacttcaaggtggaattgacactggatctatcacagaaatgtttngncaatcctatntgngaagaccctgatc

SEQ ID NO: 25886 - DNA, 411 bp, Homo sapiens
  misc_feature (1)...(411): n = a,t,c or g
aatttcacatgcacagaggagtggatttagtaattgttaaccttgtgtcgtatttgttttacctattttttgttggacattttaaaggaaattgcaggcatcaggacacttcattcctaaatacttcatcaaacatctcctaagataaagacattttcttatgtaatacaatgtcattgcattgaagataattaaacattattcagtatcatatgatatctagtccacattagatgttccccaaaatatttgattttgaaccaggattcagacaaggctcgtgcatttcatttagttatatttctttagtctcttaatgnnaaactttccacctattatttttcccctgtgtcattgactttctaaagagaccaggcctgttctaccaggatttttaaagggngacattgc

SEQ ID NO: 25887 - DNA, 406 bp, Homo sapiens
gtttgaagagatgattaccaccgcagaggagttctaccagtccctggggattccttaccacattgtgaatattgtctcaggttctttgaatcatgctgccagtaagaagcttgacctggaggcctggtttccgggctcaggagccttccgtgagttggtctcctgttctaattgcacggattaccaggctcgccggcttcgaatccgatatgggcaaaccaagaagatgatggacaaggtggagtttgtccatatgctcaatgctaccatgtgcgccactacccgtaccatctgcgccatcctggagaactaccagacagagaagggcatcactgtgcctgagaaattgaaggagttcatgccgccaggactgcaagaactgatcccctttgtgaagcctgcgccg

SEQ ID NO: 25888 - DNA, 476 bp, Homo sapiens
  misc_feature (1)...(476): n = a,t,c or g
gcggcacgagagttaaccagagccttggaatctactgcctgctggccaggttttaaaatgaaaagtgttttaaggctgccataaaagggaggggggggggaggaagggaaaataaaggcatctttccaagtactcatctaatttaattgtcaaaagattgataggccatgaattacttctccatctcactaagggttaaaggcgtgcaaccccccactggctgtgtcccctgccaccgaagtgantgacctgccctacaaccaggtgggaccacctgtgctgcagtccggaggggcttctgcaggaagcactcaccccccacaccttccccggcctgagcttcccctacctttcgtcaccacctgagggcatgagcacaaggcatgggggngtgcctgggtgaatctgcctgtggttcaggcttagccttgtggccncctgtgtgctgctgcccccatgggaatncgcangggaag

SEQ ID NO: 25889 - DNA, 426 bp, Homo sapiens
ggtggcggtgctttcggagggaataaaatggaaggagaatcaagcagatttgaaatccacactccagtttctgacaagaaaaagaaaaagtgttctatacataaggaaagacctcagaaacattcccacgaaattttcagagactcctccctggtgaatgaacagtctcaaataactaggaggaaaaagaggaaaaaagatttccagcatctcatttcttctcctttgaaaaaatccagaatctgtgatgagactgcaaatgccacttccacactcaaaaagagaaaaaagagaagatatagtgctttggaggtggacgaggaagcaggtgttacagttgtccttgtggataaagaaaatattaacaacacaccaaagcattttagaaaggatgttgatgttgtttgtgttgatatgagcatagac

SEQ ID NO: 25890 - DNA, 377 bp, Homo sapiens
gggcttatacaggcttctgtgctttatgatgggaaaacagttacagaatttcctcagtatgtttcagaaaattatcctgagaaaccgaactgttcaggacactttaaaaaccctcatgaatgctggcagtcccctaaaaagtattgtcgcaaattcaaataaaatttatttttccgccattgccaaaacacagaaaatttggactgcgtatctcgaggctataatgaaggttgcgcagatgcagattctgagacttcagattgccaatgaattaaattattcttgtcggcttgattctaaacatctggcacctgctctggagaatctcaataaggctctcctagcagacattgaagcccactatcaggacccttcac

SEQ ID NO: 25891 - DNA, 448 bp, Homo sapiens
  misc_feature (1)...(448): n = a,t,c or g
ggcagtcttatgcagcaaaacttaccaactattgaagtagcatagatgaaggggttattaataaggttacaggaatgttcacagtagaacttgtctttacacttaaaaagtactcttcttatattctatactttcattagtagcacaactgtgcacacctttgtcaatccagaaatgggcagtctgaaatccttcctcttctctacatccagctgatgggcaaattatacagatgctatttcttactacttaatcctacctgttggtctggttatatcatagtcatcctactttaggttcttgttatttcgcatctctttgtgattcattcattcagtaaaagtttattgaacagcaatatattgtaaacgccttgttctagaaataaaacaggaccccgctggttacaatccagtggatgangcataaacacacaagatgggtatgg

SEQ ID NO: 25892 - DNA, 484 bp, Homo sapiens
  misc_feature (1)...(484): n = a,t,c or g
atttggaattcnntatgacatgattacgaatttaataccgactcactatagggaatttggccctcgaggccaagaattcggcacgaggtttaaagcattatctaataccagcttcagtgtctatattactgtaacttcatgaaagactactaacaatactggctatcatttattaatattaagtagtacttgccagatgccgttagaggtgctttaaatgcattctcatttagtcttcgtgtgtactaccgttatcttcactttttagataaggagactaaagtataactagagctaagaaacatgagaaagacgacctagctactgcctattttgtaattcccatggactaagcttggagaagtaagaactattactacaatagcagaaattgaacaacagcttcatttaggaaatcacagcaaaagtatnaatnaaatgatgactcntaaggaattaaaaggcagtttttgganagtaggga

SEQ ID NO: 25893 - DNA, 353 bp, Homo sapiens
gttctcgcgctggtctcttcggtggtcagggatggcgcggaagtcgaacttgcctgtgcttctcgtgccgtttctgctctgccaggccctagtgcgctgctccagccctctgcccctggtcgtcaacacttggccctttaagaatgcaaccgaagcagcgtggagggcattagcatctggaggctctgccctggatgcagtggagagcggctgtgccatgtgtgagagagagcagtgtgacggctctgtaggctttggaggaagtcctgatgaacttggagaaaccacactagatgccatgatcatggatggcactactatggatgtaggagcagtaggagatctcagacgaa

SEQ ID NO: 25894 - DNA, 348 bp, Homo sapiens
ggaatgcaggatatttttaacacaacaatctgtgcttattacacaaaattactttgtggtaaacagacagtattgtaatcccatcaaaagatgaaagaaaaacaaaaacaaaaaccaacaacaattagccatagttctgaatgcacttcaattaagccaaaacagacagctagtgatctttttatatgctctttttacttaagttttaatttgtcctttaaaaaaaggtgaaacaaaccaagaacaagttctagaaaactgaagcaacctcttatgtatactagatgcttgatttaggaggagtttttaaacgttttcaatgttattatgtagtaaatgacactatta

SEQ ID NO: 25895 - DNA, 342 bp, Homo sapiens
gacagttgttgccaggaatttgctttgtttactgctagtatattagaaatcctagatctcagaatcacaatagtaataaacaacaggggtcattttttcctaacttactctgtgttcaggtgtggaatttctgtctcccaagaggaaatgtgacttcactttggtgccaatggacagaaaattctacctgtgctacataggagaagtttggaatgcacttaatagctggtttttacaccttgatttcgaggtggaaagaaattgatcatgaatctctaataaatttaaatctctttaaacccggaaggtgctaaatattttttgatttgattaatgcccatt

SEQ ID NO: 25896 - DNA, 364 bp, Homo sapiens
  misc_feature (1)...(364): n = a,t,c or g
gtagctaattatccccgagacctatgtaaggtcactgatgaaggtggctatactaaacaacagattttcaatgcagatcaaacagccctgtattggaagaagatgcccatctaggactttgatggagagagaggaaaagtcagtgtccggcgtccaggcttcaaaggacaggctgactctcttgttagggggtagtgtagctggtgatgttaaattaagccaatgctcatctaccattctgaaaatcctagaatttgctaaagctactctctgcctgtgctctgtaaatggaacaaaaaacctggatgacagcacatctgtttacaacatggtttactgaatgtttaaaattactgntcattgc

SEQ ID NO: 25897 - DNA, 329 bp, Homo sapiens
gggggtgtgtacctgtggtcccagctacttggaaggctgagagggaaggatcgcttgggcctgggaggttggggctgcagtgaggtgtgttcgcgccactgcactcccacctgggtgacagagccagacactgtctcaaaattaaaagttaaatcactcatgcgtctagaatttattttggcataaggaatgagaatagggagggagctaacaccatttatgaaataatttgtcttccttccagtgattcaatatgctgtcattaaaatatcattctccaaggagccccgccgttgtcgctgatctgttgaaagagcattttaactagg

SEQ ID NO: 25898 - DNA, 328 bp, Homo sapiens
gctggaacttgatggagaaagcaatggcttacgattcagcaggctttcttggagagtttacctaaagtctatgtggacggtggctcagctcacctctgagaacaatacgatcttcacttttcaatctttctgcagctctaattagtgccacagggaaccatggatgaaaatggcttctcgtgttgatatccatttggggaataggatggatgcagctgcttttgctcaagggcagagttttgacttcaaagaccctgaagagaacccagaaggaaaactctcagaggtcaatggactatattctttacctgggggatcgttgacacca

SEQ ID NO: 25899 - DNA, 392 bp, Homo sapiens
cgaacgcctgaccccaggtgatccgcccgcctaggcctcccaaagtgctgggattacaggcgtgagccaccgcacccagccaagagctgatttttgggaagatctataaaattaacaattctagtaagactgacaataaaagagggaaaacacaaatacaaatattaggaatgaaaacaggggatatcatgacatacctagcagacatcaaaagaatactatgcccatgaatttaataatttagaagaaatggaccaacttttcaaaaaacataaacgaccacaattcatcaatatgagaaacatcatttgactggccctatgacaattaacgaatttgaattcataaatgtgaaaactcccaaaaatcaatctccaggttgggatgatttc

SEQ ID NO: 25900 - DNA, 407 bp, Homo sapiens
  misc_feature (1)...(407): n = a,t,c or g
gctggctatcaacaaactagcaacaattcccatcaacaggagataagatgtggcatattcatagggatcaatctcacagataatgccatacacgagaactcaaagacacatgagtatgtgctgtttgactccacttaatatacagttcaaaaacaaacaaactaaatgtggtgttagaagtcaggtgaggccaggcatgcaggctcacacctgtagttccagcacttcgggaggccgaggcgggcagatcacaaggccaggagttcaaaaccagcctggccaacatagngaaaccccatctctaccaaagatacaaaaatgagcaggccgtggtggtgcatgcctgtagtcacagctactaaggaggctgaggcacaagaatcacttgaacccgggaagtnaaggtt

SEQ ID NO: 25901 - DNA, 556 bp, Homo sapiens
  misc_feature (1)...(556): n = a,t,c or g
gagagacttatctatttgaggagaaaagatctaggcactgtaacagttaaaggttggtttatgtagtagagcactgcttcttttcatgactcacatccttcatttacttagcaaatatgtattgagctcccatttcgtgccagtctaggtacaaagaatgaatgaatgaataagtgttgaggtagggtaggaatcctattttgagctaattacgaactaaaaaaccactttgagtttgagttgttagagaagaaaatgtacatttgtgagggcttaacaggtgaccttaccttagatttgggaataaatgtaaggtatatatctcttttaggttaagttcaccacttgcatttgggagtaatgtgagaggactgagaggctctgttcacttggtgttgatgctcctgctggatggggggcgttgtggggagaanaaaggggagtgaacagaanggcagccatcatgnttccatcccatctgtggggctaacttagtaccaaatttanaagctgaatgggaattgatcctnttaaagcanntagtacttgaatttgg

SEQ ID NO: 25902 - DNA, 405 bp, Homo sapiens
aattcggcacgagaaatggtcataggcgacgattgacttgggaagcgactcctcgatctattcatgaaggaattgcaacagccattatgaatagcgactgtctagtctttgacaccagcattgcacagctttttgcagaaaatggcaatttaggcatcaatgtaactatttccatgtgttgaaatggcaatcaaacattttctggccagtgtttaaaacttcagtttcacagaaaataaggcacccatctgtctgccaacctaaaactctttcggtaggtggaagctagacacatgaaggtaaataaaaagaaaggctgttaaatacaggaaacagttgcatgtagtaacactaatatatttaaaaataagtcaacagtaaaccactggaaaaaatatatgtata

SEQ ID NO: 25903 - DNA, 493 bp, Homo sapiens
ggccaagaattcggcacgaggagagagctagcaccatgagcttcaataccctggcattctatgttaccctccaacttagggaccttgatctactctctggtaaaaagaactaaaatggacatcccctaagtgttgtatattgctttttgcaataaagacaaaaatcaaaactcaatttgattaaagatactgcatagttacagtctctgtggagcaactcaattaagaaaaaaaaaacaaaactgttgagtatacctggaaaccacatctcaagacacttgaatctcgggccaggtgcggaggctcatgtctgtaatcccagcattttgggaggctgaagcaggtgaaattacttgaggtcaggagttcgagaccaccctgccaacatggcgaaaccctgctctactaaaaataaaaaaattagcagggcgtggtggcatgcacctgttgcccactctcgggaggctgagcaggaaaatcgcttgaccccgga

SEQ ID NO: 25904 - DNA, 387 bp, Homo sapiens
gcttactacaagccatttgactttactgcctttatttttccaggctttaaagtgagggcactttaatatttgttaatattcctaaagatccttgcaggaaagatataattctttaaatgctattctcctccttgtgtttagtattgctgtcaaaatgttacaatacatatatataatttaaaagtcatcttgacatatctaaataaggccccgtttaagaatgttactcatttttctttaaagggccctttagatataattacctgaaatatgcatttttctttagtactaaggttggtttgctttgtgttttttaatgttatttctaatgcatcactaaaagacttctatcgagtcaagtaattcattaactgatgataacccttt

SEQ ID NO: 25905 - DNA, 337 bp, Homo sapiens
atcaaatatttatcacacccttcatagcttctccgcactgtgctgggccactggggatgtgaagatgagtgagacaggctcatgtctgggaagaatggagacagatggagaacacagagctctatgctgcgggtataagggcataatgagggcttgcaagaggaacagttcgttttccgggggtgatggctcagagacaagctgggatactaagctgcctggtcgacgcggccgcgaattccagatctatgaatcgtagatactgaaaaaccccgcaagttcacttcaactgtgcatcgtgcaccatctcaatttctttcatttatacatcgttttg

SEQ ID NO: 25906 - DNA, 664 bp, Homo sapiens
cggacgcgtgggctcgtgttcatgggagctcgttttcttttcctctaggcagagaagaggcgatggcggcgatggcatctctcggcgccctggcgctgctcctgctgtccagcctctcccgctgctcagccgaggcctgcctggagccccagatcaccccttcctactacaccacttctgacgctgtcatttccactgagaccgtcttcattgtggagatctccctgacatgcaagaacagggtccagaacatggctctctatgctgacgtcggtggaaaacaattccctgtcactcgaggccaggatgtggggcgttatcaggtgtcctggagcctggaccacaagagcgcccacgcaggcacctatgaggttagattcttcgacgaggagtcctacagcctcctcaggaaggctcagaggaataacgaggacatttccatcatcccgcctctgtttacagtcagcgtggaccatcggggcacttggaacgggccctggggtgtccactgaggtgctggctgcggcgatcggccttgtgatctactacttggccttcagtgcgaagagccacatccaggcctgagggcggcaccccagccctgcccttgcttccttcaataaacatcacaggacctgggactgcacaggaaaaaaaaaaaaaa

SEQ ID NO: 25907 - DNA, 596 bp, Homo sapiens
  misc_feature (1)...(596): n = a,t,c or g
gctaggacaaggctaaaaaattaaaaactgagtcaatttaaagaaaaacattcaataaataattgatgtggcatataggtatggccagattataaacatagtaggcaaataaatgaagtttggggagatacagcagaaatcacaatatgccaaaagtcattttagcccagaatggcattcttagcgtaattctctcacttgggaccccacatccaggtcagaatggctttgagctctttctgaggcgtgcctttgttcattcaacaaatgttacaatttgtcagaccctgctgtaggttcatcagggacaacattcaaaaacccctgtccttggggagcgcacctgagtgtgatgcgtgggttttgaaagcgacaacaccgtaacaaaacanaaaccccgagcaggncacgatgggctgctagttttgggttggggggatggagaaatacagtggctccccanggcntgtctcaccaangtgccatttgggcagaacngcacgnancaagtggcnganggtntttacaacnttgnangcncttgggtcnaccaatggtcncaccgtgntcccagccctttngaaggccgagggggg

SEQ ID NO: 25908 - DNA, 563 bp, Homo sapiens
  misc_feature (1)...(563): n = a,t,c or g
aggnnnttnngttcncntctagtgatnccctaatnaancncntttatnacatccattacgaatttaatacgactcactatagggaatttggccctcgaggccaagaattcggcacgaggagagctagcaccatgagctcaataccctgatataattttatcaattgtttagaaacatagtagaattaatgaaaacaaaaactaaaactgcatttaagatatatatcatagaaatacttcaagaatgttctttgaaattatcagactttggatatttcctcaattccatgacagccgtgattataagatgtaccatcaataatataaccactatttgccaagggaaaaaaagcaaagaaatgttctatttcttaacacagggacttgttacatagggtatatgaaatctgtgcatatccaccaaggtatatacttgatttgtatactttttcaatatatgtttacttcaacaaaaaaaatttaatgtaatgtcctgctacttcacaaacacagcatacatatgctcaaatcaaccaaatgaagtatagatctaaacatgaaaga

SEQ ID NO: 25909 - DNA, 326 bp, Homo sapiens
gcggcacgagggccaagatgctgcagctcagcgagagacaggtcaaaacctggtttcagaatcgacgcgctaaatggaggagactaaaacaggagaaccctcagagcaatataaaagaagaactggaaagtttggacagttcctgtgatcagaggcaagatttgcccagtgaacagaataaaggtgcttctttggatagctctcaatgttcgccctcccctgcctcccaggaagaccttgaatcagagatttcagaggattctgatcaggaagtggacattgagggcgataaaagctattttaatgctggatgatgaccactggca

SEQ ID NO: 25910 - DNA, 358 bp, Homo sapiens
ggtttatgggagatggggaggccaggaagagcagaagaggctggggaacgaactctagggagagtaaatggcacttgtcacagtgcagtcaggagaggcaagcaacaggaggcctgggggatctgaaaggagtttggagaggctggaatggaaagcaggagtagagggccagatgctcccagtctcaaccctgaagagcctggcatgcctgcttcaggagctcagacttttactatagtggtggaaggaataacaaccccagccattttttgagggcctgtgcatgcctaggccctcaaaaacatgtcccatgttagctgcaaactgccagctaccctgcaaagcacatcatgatccc

SEQ ID NO: 25911 - DNA, 428 bp, Homo sapiens
  misc_feature (1)...(428): n = a,t,c or g
ggaaggacacgatagtgatagcagctgatgtttgagtgcttatgtcccagccactgtgctcagacctttatgaatatcatttcaccgaatcaacagcaacctcatgggctaagtcctattactgtttctgtcttgaagatgaggaaactggtacttcataagagggtgggctggctccaagccactcttattcattcatttgacagatattttttgagcacctactacatgccttggtctatcctaattataagaggatacattgctgaactaaacaaattaccttctagcttcatgtcgggtggtttttcaaatgtgggaagnnaacaaaaaaaaantggaccaanngntttcaaatggggccaaaaggctttnaaggcngtcnaacaggggganaggctngctngacttggaaaagggngccagtt

SEQ ID NO: 25912 - DNA, 574 bp, Homo sapiens
ctctgcttttatctcagatgttaaaataaatggcttggtgctttttataaaaagataatctcagtgctttcctccttcactgtttcatctaagtgcctcacatttttttctacctataacactctaggatgtatattttatataaagtattctttttcttttttaaattaatatctttctgcacacaaatattatttgggtttcctaaatccaaccattttcattaattcaggcatattttaactccactgcttacctactttcttcaggtaaagggcaaataatgatcgaaaaaataattatttattacataatttagctgtttctagactataaatgttgctatgtgccttatgttgaaaaaatttaaaagtaaaatgtctttccaaattatttcttaattattataaaaatattaagacaatagcacttaaattcctcaacagtgttttcagaagaaataaatataccactctttacctttattgatatctccatgatgatagttgaatgttgcaatgtgaaaaatctgctgttaactgcaaccttgtttattaaattgcaagaaagcttt

SEQ ID NO: 25913 - DNA, 912 bp, Homo sapiens
  misc_feature (1)...(912): n = a,t,c or g
gtgtggagcccatggaccagttagatgatgaagagggacttccagagaagctggttataaaaaaccagcaatttcacaaggaacgagagcagccacccagatttgcacagcctggctcctttgagtatgaatatgccatgcgctggaaggcactcattgagatggagaagcagcagcaggaccaagtggaccgcaacatcaaggaggctcgtgagaagctggagatggagatggaagctgcacgccatgagcaccaggtcatgctaatgagacaggatttgatgaggcgccaagaagaacttcggaggatggaagagctgcacaaccaagaggtgcaaaaacgaaagcaactggagctcaggcaggaggaagagcgcaggcgccgtgaagaagagatgcggcggcagcaagaagaaatgatgcggcgacagcaggaaggattcaagggaaccttccctgatgcgagagagcaggagattcggatgggtcagatggctatgggaggtgctatgggcataaacaacagaggtgccatgccccctgctcctgtgccagctggtaccccagctcctccaggacctgccactatgatgccggatggaactttgggattgaccccaccaacaactgaacgctttggtcaggctgctacaatggaaggaattggggcaattggtggaactcctcctgcattcaaccgtgcagctcctggagctgaatttgccccaaacaaacgtcgccgatactaataagttgcagtgtctaatttctcaaaacccttanaagaaggaccctttttggactanccagaattctaccctggaaaagtgttagggattccttccaataattagatctacctgcctgtactactcctagggaatatgctggangcaaangggaaaggaaggg

SEQ ID NO: 25914 - DNA, 339 bp, Homo sapiens
gactgaaagctctccacctccagggacaggatatggagcaacaagtggtgttctccatgtcctttgtacaaggagaagaaagtaatgacaaaatacctgtggccttgggcctcaaggaaaagaatctgtacctgtcctgcgtgttgaaagatgataagcccactctacagctggagagtgtagatcccaaaaattacccaaagaagaagatggaaaagcgatttgtcttcaacaagatagaaatcaataacaagctggaatttgagtctgccagttccccaactggtacatcagcacctctcaagcagaaaacatgcccgtcttcctgggagggaccaa

SEQ ID NO: 25915 - DNA, 469 bp, Homo sapiens
ggtggtgggaggtaaaggcccatacccactatgctggtcacaattaatgaggggcgtgtgtgtaggaccctagagatttctcctgagatccagcccaatagcattccaggttaggactctcctttgggggtaggggaaagacttggtactctatcatgagatttgaaagaaaaagatagggagtctggtccctattttcctaaggaatttctataggggtcagctttaatatataaattcttattcagagaataatcatttgggtcttgaaggcctttagagtctccaggagacctctgggtgggctgttgcctgacattgagcaatgtgtaccagagaaatggtgctgggcttgcctgggtagtggtatgggcaggagatctgggttccgagctggctttgtgagctgggttcacacgtaattgtgtgatctctggttgcctgcactttctggagcggcctctgtgga

SEQ ID NO: 25916 - DNA, 385 bp, Homo sapiens
  misc_feature (1)...(385): n = a,t,c or g
ccataatcttaggaaaattactaacctctgtgcctcagttgcttcatcatttaaaatgaggaaaataatagtccctacttaataggtttgttgtgaggattgagttaataacatagttaatgctcagtaagggttagctgctatttttttttcttttttttttgaaagagtctcactctgttgcccaggttggagtgcaggggcatgatcttggctcactgcatcctctgcttcctaggttcaggggattctcatgcttcagcctcccaagcagctgggagtacaggtgtgcaccaccacacctggctaatttttgtatatttagtaaanacgggttctcaccatattgtccaggctggtcttgaactccttacctcaaangatc

SEQ ID NO: 25917 - DNA, 481 bp, Homo sapiens
  misc_feature (1)...(481): n = a,t,c or g
gcaaagataaaaaactgtcctggggtttaactatgtcgagagatgacagtatgttggtctccattgtaataccgttctaaggaatgtttgggagtgatttgattagttttgataccttatggattaactttataatctagtacattatcattcatctattaaataatgagcaacttctgtgggctagacctcagaagattcataaataaggaaaacatactatttttcctttgatgagtgacttactggggagatagatgagaaaatacttgtatacactgcagtgacatggttgctctgataatactggttactgtgcatggagagaatgagcactttaatgaacctgataaaaagtggttgccaggctannacgtnagaatanctatccattnnntcccnaagggttggaaaggnaagcattccnnangggtaaanggnaagntttangtccaagggncanaaggttcccacccaccga

SEQ ID NO: 25918 - DNA, 396 bp, Homo sapiens
atttaaaccattcatgagagcattgtaagtgttaaacaatgatgagatattttcaggcttataaaataatgaaatataaaattaattatctacatagataaatagaaattgatgaaaatttctatgtatattattttcagtaactgttaatgtcttcctataacagcaataaatttaaattaaatatttttaaatttatttcagatatgaagatattatataaaactctacaaagtaatatgaatttaaaaaaactagcagcaaaccatattaaccatattgtgtgtttttagagtaaagctataacaaaagtacaggggattaagttgttttattttaatagctgcttttactctggggtggttttagcaatggcgcctttgggcaaccccgctc

SEQ ID NO: 25919 - DNA, 382 bp, Homo sapiens
gggccatgtggaggcacagctggagtgcagcacggggatctggactccaggcctctcccaagagctgcccttcctacacttgctggtgtcatgcaaccagtctgtgtgggatccatggagtgactagggacggccttgtgtggacaaacctacataagcctgggaacaaaaggcattctgggtacaaatgaaggctttggtttctgggcctttgttctttttctgccgtctcagcctcctcttccacaggaccactccacagcgtttagcaggctgcagaggactgttcaaggcctctctgctgagtctggcctctcagcttccaagcagctcgttccaggagggtggagctgtattgggagggttaccaactgtgctgtga

SEQ ID NO: 25920 - DNA, 322 bp, Homo sapiens
caaagctatagggttttaagttcagcctcccaacttagtcatcctaacatgattattttgtgatttggggtgcttgccctggtgctgttccagtccatgtgcatcctgagctgtgtgatctgcctcgaggctatgatctgagcaagcaggagataacattttcttctgcatcaagtgaggaaaaatgtgcttttggccatgtctcaaagacaggaccaacttcagattcccaaagaagccagctacagagcctctggaacactatggtcttacaagcagtactaaaatcaaccctcagcctcttcaatgccaaaggtatccc

SEQ ID NO: 25921 - DNA, 399 bp, Homo sapiens
  misc_feature (1)...(399): n = a,t,c or g
aattcggcacgaggcgtggatttagatcaggcacgattggccatttattgaggttgctggtgctggagagcaggactattgactcattaaatgatccagtctcatttcgtatgttggaaactctccaaaattaagttttttaaaacctccttatggccaannnnnnnnnnnnnnnnnnnnnnnnnnnnnnnnnnnnnnnnnnnnnnnnnnnnnnnnnnnnnnnnnnnnnnnnnnnnnnnnnnnnnnnnnnnnnnnnnnnnnnnnnnnnnnnnnnnnnnnnnnnnnnnnnnnnnnnnnnnnnnnnnnnnnnnnnnnnnnnnnnnnnnnnnnnnnnnnnnnnnnnnnnnnnnnnnnnnnnnnnnnnnnnnnnnnnnnnnnnnnnnnnnnnnnnnnnnnaca

SEQ ID NO: 25922 - DNA, 280 bp, Homo sapiens
ggttaagtgtatggacccctggtactgtgtgtaggtccagaggaaggcagggagcttatcttcacccaggatatccaagggactgataaacatcaccttgtagtgcaagcactatggacttgacatatcactatgaaatttgtgactttttaacttggatatggctgcttgtattgtagttcttttgcacaacgctgtgaagacaggaaggagggtgagtctgctctgagcacttgagcaccgtcagaaggttgggtgatcgtcaactttttgatcgagt

SEQ ID NO: 25923 - DNA, 440 bp, Homo sapiens
aattcggcacgagggaaaagaaaaaggaaccaaatttagtttcaaattagctatacctatttttagtataaatgatatagcaccttaaatgaaaatcagtgtatcaaaagtgccttagaattttcaaaattctatttcaaatcataaagagttactgattcataaattcatgaaaatgaaagtaccacataaaagtgttttctttttttctttttcctttcccgctaggtttctgtgatggtgagaataatggacatggggaaggtatgaactgattttacctacctatattggagtgggatgctgattagtggacataacctttcaatacctttactaataaatattcatgttttcaggactcccccaaatgctgacaactgctgattggcttacttttcagagagcctctagaaaattaaggctagccatgttcaggg

SEQ ID NO: 25924 - DNA, 397 bp, Homo sapiens
  misc_feature (1)...(397): n = a,t,c or g
aattcggcacgaggcatgtgtctcaacaaagattcaatacatgttgagtgacgctaaaaaagaaatcttggatacagctagaaaagcttgagaagggaaagaaatgtgaaaagtgtagattttaggcccaaggaaaactcgtgtcagaaaccagggactnnnnnnnnnnnnnnnnnnnnnnnnnnnnnnnnnnnnnnnnnnnnnnnnnnnnnnnnnnnnnnnnnnnnnnnnnnnnnnnnnnnnnnnnnnnnnnnnnnnnnnnnnnnnnnnnnnnnnnnnnnnnnnnnnnnnnnnnnnnnnnnnnnnnnnnnnnnnnnnnnnnnnnnnnnnnnnnnnnnnnnnnnnnnnnnnnnnnnnnnnnnnnnnnnnnnnnnnnnnnnnnnnnnnnnnnnnnnnn

SEQ ID NO: 25925 - DNA, 58 bp, Homo sapiens
aattcggcacgagagcatataaatttatgttagtggttttatttattttttttttttt

SEQ ID NO: 25926 - DNA, 407 bp, Homo sapiens
  misc_feature (1)...(407): n = a,t,c or g
aattcggcacgagacaaagtgctgataggcaaaataacctgtttctttatgtttgtgttctgttttctaatatcccatttatgtgctagaactgtgatttttatatccaagcaagcataaatatcaggcagggaacaaatagtaagatatttccctgccatatatcctccatttccttggggattcactttaaaaaagaaaaacaaaaaacaaatcctactgcgtatatgtaagatatacagcatgatgttatggaatacatatagatagtaaaaaggaggttactctagtgaaacgaatgaacacatccatcttctcacagtgttacccatttgttgtttttgtgaaggggactcaccttttaatgttctctatagcaaaggatgtcaganccccagggactgaca

SEQ ID NO: 25927 - DNA, 403 bp, Homo sapiens
aattcggcacgaggaaaaacagctggattctagaaaaccctcaaagaaagtacgagatttgggaaagaagcacaaatgtcccccaagtccctaccccactctctcatgccgagaaaaaaacagcttcacaacacaaagcttttatgaagggctagcagttccagtgatgggctcctgagccctgagcctaactggtgcctgttgacctcactgctgttcaaatactgtcttcttgtcctaaaattagacattacctttatttgattttctctggcactgtctgcctgccaaccagctgcctcccctgccacccccgcacacactggtgatgcattccagatccaaatccaagtcctggttgctgacatgattccagatctcactgactgtgggatttgtctaa

SEQ ID NO: 25928 - DNA, 412 bp, Homo sapiens
  misc_feature (1)...(412): n = a,t,c or g
aattcggcacgagttggattttgtgagcaaaaaaaagtactggatacttatatcagcccccaccctgatcccctaatcccctccaaataactccaacggtatgtttttgtgaaggtacaanttcaaacaaatactgaaaaatataaggcttgctttggcacntcacccctggtctaaaactcattcttcttttttttaanctaaaaantaaagggtttcccacacgggggcacttancctancttagggaaantacaatctgcagtaaaggtggaggacttgggtcctggtttcggttctgctgtgccgccatgtgactttggacaaaatacatcaggactctgtgcttgctcagttggtctnctgtgttgctgtaactnaaataggaaaancactggggcaaanccaaaaa

SEQ ID NO: 25929 - DNA, 414 bp, Homo sapiens
  misc_feature (1)...(414): n = a,t,c or g
aattcggcacgagtggcttgggatggaggaattctcanctgactgggtctccccaccacctgcaccctccaggaccccccagacacccagttctatgtaggatcttcnctgccacaggctggaccctggnanagtttctgcaccccctncagggacccccacagttccccgctgtggtccctggaccatcgctgggaggtggcccnagctcacatgctggcttgggggccacagcagctgctggccccaggatgnaggacggggacactttgagtnataanggataggggttgtctgaanaccttggcttggtaggggctgttctcnggggtgtngtccnccngtcctcatgctccttcgncttgtttgcgggtcgggggctgccctggggngggatgngntgcgagntgaagt

SEQ ID NO: 25930 - DNA, 403 bp, Homo sapiens
  misc_feature (1)...(403): n = a,t,c or g
aattcggcacgaggtgtaatgaagtaaaagagtaacaaaaatggtaaaatggcaaggtgttgtataaaaattgggnnnnnnnnnnnnnnnnnnnnnnnnnnnnnnnnnnnnnnnnnnnnnnnnnnnnnnnnnnnnnnnnnnnnnnnnnnnnnnnnnnnnnnnnnnnnnnnnnnntatgggtacttgtannnnnnnnnnnnnnnnnnnnnnnnnnnnnnnnnnnnnnnnnnnnnnnnnnnaacatttaaagtaaagtaaaaattgggcagataattgagaattgtccgaaatatatagttataaagaaaaattgaaattaaaaagtcaatggatgggttaaatacatattaaacaacaagagaattggtgaactatgagacttaagtctgtgactgtgctgtca

SEQ ID NO: 25931 - DNA, 403 bp, Homo sapiens
  misc_feature (1)...(403): n = a,t,c or g
aattcggcacgagttttttttttncacttgttaatccgttatgatttattanctgtacagcantaaatcctcctccccagctttcaaccccattacatattttattacaggtctcatnttggcntcctaaaataatgaaaaatatcncacagtacagctaattacaaaatgcatcaacctaaatctgatanctaactgatggctctcttaaaancaatacncaaaaaaaaaaattgtttgaaatcantaanactgaggctctctaaaaaacacatttttaaacatgttacagtcatntngcaaaaatcactttttantnggttttgctncncattattttattttttgaaaanccnaggtttaaattactgacctantgaaattttccgggcccacttataag

SEQ ID NO: 25932 - DNA, 418 bp, Homo sapiens
aattcggcacgagattaaatgtgtacacagaatttagtgttttaatcaaaccccacagcagagctgggaccctgtcgaatgatgcaccatctttgctgtgctgggtagttaacagacatgaataccactgtctggtcaaacccaagctggggctcgggtggccctggggcagggagggagaaggggaagcagcaggagctggtctcaggcccctggagcccatccgtgatgctctgcccctggggctctcgagaccctcgaatcaccttctcccctaggaatggtgacccagggattccaggtataggggctgcccagggcttggtacctagggtaggattgtctgatgggtctggacacctgggaagaaatcacaggcatttcggggggagagagcagctcactgacaagccttggc

SEQ ID NO: 25933 - DNA, 137 bp, Homo sapiens
gttttttttgagactgcatagggctcggcgtgggggggggcggcggcggcggaaaggccgtgtgagaacatagcaagaagacagctacctgcaagcccaggaagagacccctcaccaggaaactgaaattggctggc

SEQ ID NO: 25934 - DNA, 378 bp, Homo sapiens
aattcggcacgagagagatatgtgtgtacacatataggtacatatatcctaaaaatactgccctggaaagccaggttggcacacagttggccgttcgctgtactcatcacccctcagctatatagcaattctctctcagccttcgacctctgcaggtacaatccaggaagtctagatatgtcaccattccaagaatcccattcatagataggagcaaaggagagatggagagaagcggtatagaaaattgtaagcacacagagtagtttatcactgagaaaaattagactaggaggcaattttttttcccttgaattctgccaggtctggaccctctgtatgaggttcagtaggtccttcctttcatcagactcctat

SEQ ID NO: 25935 - DNA, 447 bp, Homo sapiens
  misc_feature (1)...(447): n = a,t,c or g
aattcggcacgagaaattagaaagcactaggatgatataagccaaagcattaatgagtcaaattaatggtgggaagaagtattttcttttgttttatcgatatcttctaaacgttctataataaaaaatttattttgcaataagaaaacacnnnnnnnnnnnnnnnnnnnnnnnnnnnnnnnnnnnnnnnnnnnnnnnnnnnnnnnnnnnnnnnnnnnnnnnnnnnnnnnnnnnnnnnnnnnnnnnnnnnnnnnnnnnnnnnnnnnnnnnnnnnnnnnnnnnnnnnnnnnnnnnnnnnnnnnnnnnnnnnnnnnnnnnnnnnnnnnnnnnnnnnnnnnnnnnnnnnnnnnnnnnnnnnnnnnnnnnnnnnnnnnnnnnnnnnnnnnnnnnnnnnnnnnnnnnnnnnnnnnnnnnnnnnnnnnnnnnnnnnnnnnnnnnnnnnnnnnn

SEQ ID NO: 25936 - DNA, 415 bp, Homo sapiens
  misc_feature (1)...(415): n = a,t,c or g
aattcggcacgagctggaagtcattctcaatgttcccttctccctcaccactcacacccatctaatcaatgactgtcgattccaccttctgttgctggaatccattcattcctctccatccttacctctcactagacaactcaaatggccttctcatccaacctcctcacccagttctaacctgagggtgaagatgtgaagtacaaactctatcatgtcactccactgcttaaagcctctcattgactccttccccctaggatagtttaaactccttaatgtggcacttcttgatttggtttcaactgacctcaccagtctcagctcttttctctttgcacgtgcccttctcttcacctggaaactcttcttcccaattctcaccccactcancatctttcactggatcactccc

SEQ ID NO: 25937 - DNA, 437 bp, Homo sapiens
  misc_feature (1)...(437): n = a,t,c or g
gatgagacacatngtccctnttttccaantaggaaaaccaaggatanagagatgagaagtgatttgtctaaagcagggtttttcaatnttggcattatgaacatttgaacatttgggacnaggnnnnnnnnnnnnnnnnnnnnnnnnnnnnnnnnnnnnnnnnnnnnnnnnnnnnnnnnnnnnnnnnnnnnnnnnacgcaggagtacctctctccagttgtgacaaccnaaaatgttgtcaaatgtccctgggcctggggcagttgggggganctcaaattcatcttccnttgagaaccactggcatgaatcttgtgttggcaatcacagtttgnnaactggncntctanctctaaatctagttnctcttnnntttncctgnatttgggntcacattcccattctgangggggaaaactggtccatgtangnntgtt

SEQ ID NO: 25938 - DNA, 404 bp, Homo sapiens
  misc_feature (1)...(404): n = a,t,c or g
aattcggcacgagccggttcaataaagcacaaagaacgttttacagttttctgctattcactgtacaactatttacaacctgctttcattttgtgaaaagaaaattttaagaaaatcaattgtttctttcattctaggattanagatgaanatggcaatgttctaccacctggcaaanaaggggaaattgccctcnccactaaantctacacagcccttctgtttcttctctgaatatgtgatatgaggatagaaagtgctantcatgtcttaatacagactttggtcnaaatttcatttccaccatgtcttgctatgtnacctcaggcaagcaacgnaatctntttcntcggntagtaaaatgcagagactatcgcctatcacctgagtnctnangaagatga

SEQ ID NO: 25939 - DNA, 94 bp, Homo sapiens
aattcggcacgagagtaactgtattaataagagataaaagacactttaagaccaaaaaattactagagccaaactgcgactttatttttttttt

SEQ ID NO: 25940 - DNA, 416 bp, Homo sapiens
  misc_feature (1)...(416): n = a,t,c or g
aattcggcacgagctgtagttctcagtcagccattatacctaaggtcaaattctctcacaatacaaagtaatgtttggtatccctcaaagccaaagagatcaggtaatgtgatacaaaagagggtagagttttagacctaaaaggaatctgtgcatttacaagttttgtggttccacganaaaaaacagaaatttttccccaaaaaagaggagcttatggcattttttctgttttccttgagggaccctaggctgtaagaaatttcctttgtaggtcccttcatgtggcatgagggtggcaagagaaaggagacacagacagaagtaaatgggagaatgactgttaaaaaaaacaagtnnnnnnnnnnnnnnnnnnnnnnnnnnnnnnnnnnnnnnnnnnnnnnnnnnnnnnnnnn

SEQ ID NO: 25941 - DNA, 391 bp, Homo sapiens
  misc_feature (1)...(391): n = a,t,c or g
gggctcggcgtgggtaaaaaagtgaattttgnnnnnnnnnnnnnnnnnnnnnnnnnnnnnnnnnnnnnnnnnnnnnnnnnnnnnnnnnctagactgtgcaaacccaaattacattccctgggcctaggaagaattaaacagacttgttaagggttgtcttaaaaaccttaacnnnnnnnnnnnnnnnnnnnnnnnnnnnnnnnnnnnnnnnnnnnnnnnnnnnnnnnnnnnnnnnnnnnnnnnnnnnnnnnnnnnnnnnnnnnnnnnnnnnnnnnnnnnnnnnnnnnnnnnnnnnnnnnnnnnnnnnnnnnnnnnnnnnnnnnnnnnnnnnnnnnnnnnnnnnnnnnnnnnnnnnnnnnnnnnnaaaatcattttgaacccaggaagcggg

SEQ ID NO: 25942 - DNA, 399 bp, Homo sapiens
  misc_feature (1)...(399): n = a,t,c or g
aattcggcacgagacaataaagatcnnnnnnnnnnnnnnnnnnnnnnnnnnnnnnnnnnnnnnnnnnnnnnnnnnnnnnnnnnnnnnnnnnnnnnnnnnnnnnnnnnnnnnnnnnnnnnnnnnnnnnnnnnnnnnnnnnnnnnnnnnnnnnnnnnnnnnnnnnnnnnnnnnnnnnnnnnnnnnnnnnnnnnnnnnnnnnnnnnnnnnnnnnnnnnnnnnnnnnnnnnnnnnnnnnnnnnnnnnnnnnnnnnnnnnnnnnnnnnnnnnnnnnnaagtgtggctggtttgatcttctacccggacttactgaaattttcttccaatcatcaataaggctgttttgacttcttatcattatatgttcacaggagtagcacttttgattttcttcaggaaatt

SEQ ID NO: 25943 - DNA, 411 bp, Homo sapiens
aattcggcacgaggcaaaatggaatatgtttttgaattggatgttcccgggaaagtggaagatgttgtggagacgttgcttcagcttcacagagcatcctgccttgacaaattgggtgaccaaaccgccatgataacagctattttgcagtctcgtttagctagaacatcatttgacaaaaacaggtaagtttctaatgatctttcctaattagaaaagtggtggacattttcatctgtatgcctcattcagcaaatccaagcctgctgtcatcattggtctcacccaaaacctgcttgtcttagagaatggctcagcctcagtgcaggagaactctctagggcttcctcaactcttctccatcctgatgtctgtcagtcagaaaggtctgttagatgcttcggtttctgc

SEQ ID NO: 25944 - DNA, 141 bp, Homo sapiens
aattcggcacgaggaaatctttagctttgaaatagaatggccagtgagaagcatgcctatatgaagaatctcatatagagagaaaatttaaatttcaatagagtgtttttcttaaacttagaattggccactttttttttt

SEQ ID NO: 25945 - DNA, 378 bp, Homo sapiens
  misc_feature (1)...(378): n = a,t,c or g
gnnnnnnnnnnnnnnnnnnnnnnnnnnnnnnnnnnnnnnnnnnnnnnnnnnnnnnnnnnnnnnnnnnnnnnnnnnnnnnnnnnnnnnnnnnnnnnnnnnnnnnnnnnnnnnnnnnnnnnnnnnnnnnnnnnnnnnnnnnnnnnnnnnnnnnnnnnnnnnnnnnnnnnnnnnnnnnnnnnnnnnnnnnnnnnnnnnnnnnnnnnnnnnnnnggattnacaanaaacnaatagcctnaacaancccaacaacataagncnccatcaacctccttaaactccangtntnncttagnntaaatcnantccannctcaaanacaactaattcccaaatttttaaaannnttaaattaaatgnnnatttnggncatatnaaacc

SEQ ID NO: 25946 - DNA, 365 bp, Homo sapiens
gcaagaaattaaggacactaaggagtgtgtacagaacaaagaagagcaaaacagactagttataaaaaatctggaggaggaaaacaagaaattaagtacccgctgcactgacctgctaaatgacctggagaaattgaggaagcaggaagcacatttgagaaaagaaaaatatagcactgatgcaaaaataaaggcctttgaagacaatttaattgaagcaaggaaagaagttgaagtatcacagagtaaatacaatgctctatcattacagttgagtaataaacagactgaacttatccagaaggatatggatattaccctggtcaggaaggaactgcaggagctgcagaatctttacaaacaga

SEQ ID NO: 25947 - DNA, 358 bp, Homo sapiens
  misc_feature (1)...(358): n = a,t,c or g
ggccttccaccccatgcctccccttccctctctgtccaaagacaggtctgaaagctctgtgccagaaagcggacagtgagcagggagtggagctgccagattttcagcctcctggaggtgtcttggaaaatccccagtgatccttgtcgctcgaaactcccagataaggagattgtggggcaataaacctgtgtggagttttggtcagggcttgatttgggggattaaacagaaagaagctctgctctgtctccagaaggtccaggcaggacaanaccttctcaggacagctgatggctggacagctctgtcgcccttgtggtcctgtgtgtgtctggtgtgtgcaagctgcagcacc

SEQ ID NO: 25948 - DNA, 382 bp, Homo sapiens
  misc_feature (1)...(382): n = a,t,c or g
gnnnnnnnnnnnnnnnnnnnnnnnnnnnnnnnnnnnnnnnnnnnnnnnnnnnnnnnnnnnnnnnnnnnnnnnnnnnnnnnnnnnnnnnnnnnnnnnnnnnnnnnnnnnnnnnnnnnnnnnnnnnnnttctggcctgagccctgtaattttgccttttccactgtgtcatttaaatagaattgnaantcaatttttaaaatgggcttttattttcttgttaggtttttagatttttaaaaaattattctaggtacaaattcttcatcagaaatgtaatttgcaggtatcttctcctagtctgtggtatatcttgtattttcttaacagtatcttttactttcgatgggatttcagtgtatccgttttctcnaatgggattgtg

SEQ ID NO: 25949 - DNA, 379 bp, Homo sapiens
  misc_feature (1)...(379): n = a,t,c or g
gatttttagaaagaatatcacagagtaaagtgcccttctcatcacatcacatcaaggagtgaatgaatggtttcagcgtgacatctgatgtcatgttgatggtgacacgaatgatgttgatctttattacttggttaaggaagagtttgccaggttcttcctcanaagttactgtttttctctttccctcctctattatttgagagttagtcaccaagtctagcccaaggggttatatnaatagtgatgccccatgcntttgtggtacatacttctctgtgtacaacagccaatggtgaggcaatgacctatccactgccatcccccaactaccangaatgttnccatgctccgaaanagancagccatccgtcctcac

SEQ ID NO: 25950 - DNA, 381 bp, Homo sapiens
  misc_feature (1)...(381): n = a,t,c or g
gcaggtttcgaacatgtcactcaacctcaaaacatggtgcaggcttcttggtggatgagcttacattatctgaggggcggtaggaaagcgtgctcatttttgttgaaaggtttgagtgggatttggcttttgggggaatatattttanaagctggagaaaatatcttttaaattttttccccagaaagccataaaaaagaggattcaggcaattgttaanataagctanacaaatggtgataggcatggccgtgtccacaatatctgcaattctacagtcacgtatgatgcctagttgaatcaatacatccagaagaagtgaatatttgggtgngggaatccaggnnaaagaancagaancgcacaattgccanaagtatc

SEQ ID NO: 25951 - DNA, 359 bp, Homo sapiens
  misc_feature (1)...(359): n = a,t,c or g
gaacgtctgaggttatcaataagctcctantccagacgccatgggtcatttcacanaggaggacaaggntactatcacaagcctgtggggcaaggtgaatgtggaagatgctggaggagaaaccctgggaaggctcctggttgtctacccatggacccagaggttctttgacagctttggcaacctgtcctctgcctctgccatcatgggcaaccccaaagtcaaggcacatggcaagaaggtgctgacttccttgggagatgccataaagcacctggatgatctcaagggcacctttgcccagctgagtgaactgcactgtgacaagctgcatgtggatcctgagaacttcaagctcc

SEQ ID NO: 25952 - DNA, 331 bp, Homo sapiens
  misc_feature (1)...(331): n = a,t,c or g
ggatttcacttagcggnnnnnnnnnnnnnnnnnnnnnnnnnnnnnnnnnnnnnnnnnnnnnnnnnnnnnnnnnnnnnnnnnnnnnnnnnnnnnnnnnnnnnnnnnnnnnnnnnnntcacacatcattnnnnnnnnnnnnnnnnnnnnnnnnnnnnnnnnnnnnnnnnnnnnnnnnnnnnnnnnnnnnnnnnnnnnnnnnnnnnnnnnnnnnnnnnnnnnnnnnnnnnattacnaacctnngnctnaaaatnanntntcatatggtaactgtctatttttgangnncngnnanactattttcccacggcnatgnaccanttcacatnnccaa

SEQ ID NO: 25953 - DNA, 350 bp, Homo sapiens
  misc_feature (1)...(350): n = a,t,c or g
gtctacccacagggtaagtggtcaaggaatggcacagtacctcagagagactgaggagcatgttcttgtttttctgtgcttatagaaatcatcagaaatctaaaaattggaaccaaaaatagaataccagatgaggcattttattaattagatcttatttcatgacttccaaaacacattttttttcttggaccttccttgaaatgaagacatagaatgattgaatagtatctagcaattttctgttgcaaaaaaagattatcttaatttcatagctaaatgaatgtcttaacagattgtgatttacacttgtaagtgaaatgtgttcagagaggagaagtangcagggg

SEQ ID NO: 25954 - DNA, 336 bp, Homo sapiens
ggaattttgttcattatgtttcttaaggattaacaattccagaagaactggaaaggggaaatagatgtttgagctgagaagttattatcttaccagttttaaaaaaatactgcaaatactctgataccttgtttttcatgtcctgccattttgtaaataaataacacttttcatatacagagactgtattatataccttctaaatattacatgtcaggggcttaagatctgatttttttaaagcacaaaatatgctcttaagatcatagtgtttgcaagataattcatttctatatccttggggtttagcatggggcctggcacatcacactgccc

SEQ ID NO: 25955 - DNA, 333 bp, Homo sapiens
  misc_feature (1)...(333): n = a,t,c or g
gacgccttgacagcggctttcaacccccacctcagcccagcaattcggcagtttggagcatgtgaacaccttgagccttgatgagttccagtatgtggtatattatncagagcattcagagcaaatactctctctccgagcgcttaatccgaacaattgctgccatccgttccttcccacatgataatgtagaggacctcatcagagggggagcagatgtganctgcactcatggnacactgaagcccttgcactgtgcctgtatggtgtcagatgctgactgtgtggagttacttctggaaaaaggagccgaggtgaatgccctggangggt

SEQ ID NO: 25956 - DNA, 340 bp, Homo sapiens
  misc_feature (1)...(340): n = a,t,c or g
ggacagggtaagttccagttcaagtccgaaggcacgagagccaggtgagccagtgtctcagctcaagcagtgagacccagaggagttctctcttaaactcannnnnnnnnnnnnnnnnnnnnnnnnnnnnnnnnnnnnnnnnnnnnnnnnnnnnnnnnnnnnnnnnnnnnnnnnnnnnnnnnnnnnnnnnnnnnnnnnnnnnnnnnnnnnnnnnnnnnnnnnnnnnnnnnnnnnntaatgtttgaccaaacatctgggcactctatgctgtagtccaagttgatgcataaaattaaccattacagaaccttttcttcacttgacatttagaacaggatgc

SEQ ID NO: 25957 - DNA, 364 bp, Homo sapiens
  misc_feature (1)...(364): n = a,t,c or g
gggagtttaaaatgagacaatataagtgaaggccgaaggctttttgtctattgcaaaacaccatacaaatgtacaaatgtaaggcatcattgttgttattggtgccaatgaggctgatgggacccagctcccagggtagtgcattctgtagttagcgtaattagtgtgtgttctgcatactgaattagattttcttaaaaacatacaatcatttttattttcttantaattgtatttaagtatacttttgcatatatcctcattccagggccactatgttgcacaactccagggggcaccattcaattgtggtggctctgattcatccagtagcattccttcccctagagccagacattgataa

SEQ ID NO: 25958 - DNA, 360 bp, Homo sapiens
  misc_feature (1)...(360): n = a,t,c or g
ggggctggcggggagaagcagacannnnnnnnnnnnnnnnnnnnnnnnnnnnnnnnnnnnnnnnnnnnnnntgatttcaggattttaaatgtattatatttggaatcctgaaatcaggccgagcacagtggctcacnnnnnnnnnnnnnnnnnnnnnnnnnnnnnnnnnnnnnnnnnnnnnnnnnnnnnnnnnnnnnnnnnnnnnnnnnnnnnnnnnnnnnnnnnnnnnnnnnnnnnnnnnnnnnnnnnnnnnnnnnnnnnnnnnnnnnnnnnnnnnnnnnnnnnnnnnnnnnnnnnnnnnnnnnnnnnnnnnnnnnnnnnnnnnnnnnnnnnnnnnnnnnnnnnnnnnnnnnnnnntat

SEQ ID NO: 25959 - DNA, 351 bp, Homo sapiens
  misc_feature (1)...(351): n = a,t,c or g
gcacaagtgtaagaacagcctgtgtgtgttgaacatgtgtgtgttgtgtgtgatggtcctgaggcatcatggaatcctctgtgcctcctgggttacttctgttgtttagtggctggaagagagaagacacgtccattgcagataggcgttttcaaggcagattgaaaatcactggggtttctgaaggtgtgaatctatgacttgcacacttcatttggaagcaggtgaagatacaaaactgaagccaactttggatttgtacattcaaatctttttttttttttcantcacccaatgaatatgaccttttgggggcnaggaatnccttaaagggttgtttttttttttttt

SEQ ID NO: 25960 - DNA, 473 bp, Homo sapiens
  misc_feature (1)...(473): n = a,t,c or g
ggtttgtatctttttacagccttatttcaaacgccatgtgttagtataagatccgaaatcaaaatatgcacagtactgtattctaagcanaacctcaaaccttctcgttgtcttcaatacagctctatctccaagatgaggctgaaattttcaagagagacttaactaagaggcttaagtatgtntgggagttcagccgcttctgcnggnctcatggtgtggctgcngctgtcaagtttgaatgttagctgttgaagggtatcaattcancagccatgagcagntccagnnagacaggtgagctctgctgtttctgggtggatcatcacagatttagccgggcaggcagtaaggtgtcctcttacnattcaaaaagtgtnnactttcttacatattcccaatacgttcacagtgtgtgcattttagaataantcntaaaggagtaactgaaattttaccttgagtgaatgggc

SEQ ID NO: 25961 - DNA, 473 bp, Homo sapiens
  misc_feature (1)...(473): n = a,t,c or g
ggtggggatagagaaatacattaaacatcaaaagatgcacccagacaaacctagaatgtgggacactctgttaggacaactggcttgatctttccaaaactaaagataatgacagaaaaagggaaggagggaccacattctagattaaaggacttgagagcatttacaggtgaagtatcatgaggtctaatttactttgtagtagctcaactgaaagaacagataaagcaaatacagaaaatgctaactgttgaaagtaggtaggagagtgtatcttttacactgagtctctttgctttgtatatgtctgacattttttcataataaactgtgaagctattccacattagaggaggagtggctttctgaacaggacagttgaggcagaagctctcactggatcctaatctagctaaacagattctgcttctaatctccaacctcangctctcccactgaagtggggtccaagg

SEQ ID NO: 25962 - DNA, 566 bp, Homo sapiens
  misc_feature (1)...(566): n = a,t,c or g
aattctatgcnccgatgacgaagtntntacggncccactataggtnanttggccggcccaggccaagaattaangcacgagnnnnnnnnnnnnnnnnnnnnnnnnnnnnnnnnnnnnnnnnnnnnnnnnnnnnnnnnnnnnnnnnnnnnnnnnnnnnnnnnnnnnnnnnnnnnnnnnnnnnnnnnnnnnnnnnnnnnnnnnnnnnnnnnnnnnnnnnnnnnnnnnnnnnnnnnncnnnnnnnnnnnnnnnnnnnnnnnnnnnnnnnnnnnnnnnnnnnnnnnnnnnnnnnnnnnnnnnnnnnacggtcaggtgnnnnnnnnnnnnnnnnnnnnnnnnnnnnnnnnnnnnnnnnnnnnnnnnnnnnnnnnnnnnnnnnnnnnnnnnnnnnnnnnnnngtnatctcanctactcaagaggcctgatgcanggntattgcntgaccccgggganncggaggttgcngtgannccgncgatcacgncatttgcacactccangcctgggctaatntgangtgaaactccgtctcannntgnnggntccngcgnngntnctctnntntttt

SEQ ID NO: 25963 - DNA, 462 bp, Homo sapiens
aattcggcacgagtgagcttcaataccctgttaaacacagaaagtttttccagttacaactctaatataacaaatatttgttgtgttatgatctgatacaacaacacactaccaccaggatgagcgagagctgggatttatagactcccacccaccaccaacgtggggcactcaagagaacccaccactgaccataggcggccgctgctttgaattcctgggtggggtcacatattaagagagatggaaatggtttaagcttgtcttcagacactcactgtccaaagctgctaggcattctaggctcctcctgttgcaggcctgagctggacagccagcatacaggtaggcaggggatgcagtcaaaccgtcaaacacctgttgaatggccatgaagtcaatacatctctgtaccaggtaggaaataccttaataattaagacaagggacagatcaacttga

SEQ ID NO: 25964 - DNA, 351 bp, Homo sapiens
aattcggcacgagcagctccttaagcataaggtagaacaatctttaagaaataaatattaggccacaggagttaaacataaagtatcatccaagcacagattcaaagcatttaaacacatacattattctcaagtggaccagttcttcactgagtatgtgttctttaggtttgcaagactaatcttatgtctcacccctcctcaattgaacagtattggcactttgattattcagtcagtgtaggactttttaactccgtgccaggctcatttgcagctatcagtgctgatacaacttcatgccatataatacttttaacagactacttccacacccctgcaaaaaaaaaa

SEQ ID NO: 25965 - DNA, 404 bp, Homo sapiens
  misc_feature (1)...(404): n = a,t,c or g
aattcggcacgagctcgtctctactaaaagtacaaaaataaaggaagggcacagtggctcacgcctgtaagnnnnnnnnnnnnnnnnnnnnnnnnnnnnnnnnnnnnnnnnnnnnnnnnnnnnnnnnnnnnnnnnnnnnnnnnnnnnnnnnnnnnnnnnnnnnnnnnnnnnnnnnnnnnnnnnnnnnnnnnnnnnnnnactggataatcctgtgtccggaatttattccggcctnnnnnnnnnnnnnnnnnnnnnnnnnnnnnnnnnnnnnnnnnnnnnnnnnnnnnnnnnnnnnnnnnnnnnnnnnnnnnnnnnnnnnnnnnnnnnnnnnnnnnnnnnnnnnnnnnnnnnnnnnnnnnnnnnnnnnnnnnnnnnnnnnnnnncggtatttaagcccccgacct

SEQ ID NO: 25966 - DNA, 443 bp, Homo sapiens
  misc_feature (1)...(443): n = a,t,c or g
gcaaaacacagcacctgganaacagcttangtgcaganacganaatcaagctggacctgttctccgcactgggcgatgcaaagcggcagctcgagattgcccaaggacaaatccttcagaaagatcaggaaatcaaggacctaaaacagaanatagccgaagtcatggccgtcatgcccagcataacatacagtgccgccaccagccccctgagccctgtttccccccactactcttccaaatttgtgganaccagcccctctggacttgaccccaatgcctctgtttaccagcccctgaanaaatgaangccaactgtgtgttgtgcccaaaaatttggttaccggaaggcattgcaaaggagcgtctctggcagtcaanataaaaaaacantntctattgtattttgtggaactgtatctgttgtcatttttaaaaagggg

SEQ ID NO: 25967 - DNA, 441 bp, Homo sapiens
  misc_feature (1)...(441): n = a,t,c or g
gactgagcaggacattcatatgatcatttaaggaagtgtnnccctntatgtgttagcnantataatcngctanctcctgaatcccanngaatagtcctaggctggacagcaatgggctgcaattaggcagataaagacatcagtcccagtaaatgaatccatagactcatctagcaccnactaccattagcactatgttaggagctgcaaggccccaaagtagaagatgtgcatantgtctgctcttgtgtagctcaggagacaattccagcacagacactacagttaacgctgaactgcagctgcaagtnatagcatgaacagtcngaaaaataccttatgaaggggcagggctgaagctgggccttgaaggatggatgaaatttggatagagaatgangaagacagaaggcctccnngtgaganaagcatgaaaaatga

SEQ ID NO: 25968 - DNA, 404 bp, Homo sapiens
aattcggcacgagcgagggactgccacctccactgtgtgcacactcagctacgggacacatttcaggtatccaaggcagcagaggtgagtgggtcccccgagctctgtgaccttatgctccacactaactctggcagagcctccgtttcctcatagaacaaagaacagccaccatgcagctcttcctcctcttgtgcctggtgcttctcagccctcagggggcctcccttcaccgccaccacccccgggagatgaagaagagagtcgaggacctccatgtaggtgccacggtggcccccagcagcagaagggactttacctttgacctctacagggccttggcttccgctgcccccagccagaacatcttcttctcccctgtgagcatctccatgagcctggcc

SEQ ID NO: 25969 - DNA, 412 bp, Homo sapiens
aattcggcacgaggaatgcaggtcgttttgtggagagggtgtttcgctttggacatgctgcctttgaagtgacagagagccctgaagcaagaaccagttgagtcatctctggggcttagtaatggagtaagtgatctttctcctgagtatgcggtcctgacttcaactataaaaaatgaagtggatagtacggtgaacatcatagttgtaggacagtcccatctggacagcaacattgagaatcaagagattgtcaccaatccgccagacatttgccaagttgtagaggtgaccactgagagcgacgagcagccggtcagcatgagcgagctctaccctctgcagatctcccccgtgtcttcctatgcagaaagcgaaacgactgatagtgtgcccagcgatgaagagagtg

SEQ ID NO: 25970 - DNA, 391 bp, Homo sapiens
aattcggcacgagggtagggggagggagggggaagttaagggggtcacctccattctggggaatttatatttgaattgaggctttggccttaacacccaggaacttttctattacaatcgcttaggaagtaaagccttgtctccctccctgttctctgcctcttgtacccctctgacccacccgctctgccccactcccagccctcctcagccccagccctgcctgccctgcccctccagggggccatgagtgcctaggtttctcataccccacaaggtcacagcaggggagggagggacaattttataatgaaccaaaaattccatgtgttggggggtgggggggcggaggaagggtgaggggttgccgcccattgggccacaaatctct

SEQ ID NO: 25971 - DNA, 405 bp, Homo sapiens
  misc_feature (1)...(405): n = a,t,c or g
gctcggcgtggagacacatatgaagtgtgagatgcctattatatccactattacacatgcacatagagatgttaagtggccagtgggatacacaagtttggtgttaatattattttacattatgattgttcccagtatatgtttgctctctccaactgtgttataaaatccttaagaataagaacgcctcactttcacttcattcacaggtgatagtatcaagacgaattcttacttttttttttaaccaaatctgccttgatcttggaactcttattttatacacaattttaatagggttatagttctanttcctgaatccaccaaaaaataaaattagcaaatttaaaatagggggaaaaaagcagctatcactgaccgctgacaaagggantnaacagaaaa

SEQ ID NO: 25972 - DNA, 345 bp, Homo sapiens
  misc_feature (1)...(345): n = a,t,c or g
aattcggcacgagnnnnnnnnnnnnnnnnnnnnnnnnnnnnnnnnnnnnnnnnnnnnnnnnnnnnnnnnnnnnnnnnnnnnnnnnnnnnnnnnnnnnnnnnnnnnnnnnnnnnnnnnnnnnnnnnnnnnnnnnnnnnnnnnnnnnnnnnnnnnnnnnnnnnnnnnnnnnnnnnnnnnnnnnnnnnnnnnnnnnnnnnnnnnnnnnnnnnnnnnnnnnnnnnnnnnnnnnnnnnnnnnnnnnnnnnnntttaaaaaaagagagaccaatttcaagtgtagtgacaccataggctcaaagtaaagggttggagaaggatctatcatgcaaatggaaaatataaaaaa

SEQ ID NO: 25973 - DNA, 427 bp, Homo sapiens
aattcggcacgaggccccatctgccctgtgtggggtggcagagttctgtgtacacagagttacatttcgttgttcctggcttctctatggatgacagcagcactgataaatgccacacctgctttctcagcagtcttgcggggtgatttttcctcttaaggaagtcacctgatgtccatgctgagtaagaaatgcatccaaagctttgggagctcagtgttggcccctgggctgcagcccgagccccgttttagagctgtgtctcccaggcagctgtgatgactgctcgaaagcccactcagggggaaggtaaacctgatgcccgggtgtttggacagtgaacatggcgagtggacagttacctgtgcatagaattgttcatatgtggtgacagatgttggctgttattttattaacttccaattgt

SEQ ID NO: 25974 - DNA, 176 bp, Homo sapiens
  misc_feature (1)...(176): n = a,t,c or g
aattcggcacgagtttagttgtattaaaattttttgttaaaatggaagcctgattattttgtatatactaccctaagtgttggaaagtatagtttttctctcatgcggtacaacagaaactatattattgtttgcttctaggattttatcagcctgtatcantncctacatctaaa

SEQ ID NO: 25975 - DNA, 416 bp, Homo sapiens
  misc_feature (1)...(416): n = a,t,c or g
gnnnnnnnnnnnnnnnnnnnnnnnnnnnnnnnnnnnnnnnnnnnnnnnnnnnnnnnnnnnnnnnnnnnnnnnnnnnnnnnnnnnnnnnnnnnnnnnnnnnnnnnnnnnnnnnnnnnnnnnnnnnnnnnnnnnnnnnnnnnnnnnnnnnnnnnnnnnnnnnnnnnnnnnnnnnnnnnnnnnnnnnnnnnnnnnnnnnnnnnnnnnnnnnnnnnnnnnnnnnnnnnnnnnnnnnnnnnnnnnnnnnnnnnnnnnnnnnnnnnnnnnnnnnnnnnnnnnnnnnnnnnnnnnnnnnnnnnnnnnnnnnnnnnnnnnnnnnnnnnnnnnnnnnnnnnngaccaatctatcccctatagaanaactaatgtttagtataaattacctgaaaanattctcctccgcnttagcccgccttcaga

SEQ ID NO: 25976 - DNA, 217 bp, Homo sapiens
aattcggcacgaggaccgcaggagaagttttgtgctgcgctgccttcttccccgggcgcccgcaggacgtgcagtcgttcccgggtgtatccattcccgctccccactctttggcaacgagtgtgaatagcggaactggaaaggattaggggcgggagacatctgtctgtctgccgcgttctcccacgctcaggaaggagggttcgaactcgattta

SEQ ID NO: 25977 - DNA, 442 bp, Homo sapiens
aattcggcacgagattccttgttgttgtgttgagatccagtgcagttgtgatttctgtggatcccagcttggttccaggaattttgtgtgattggcttaaatccagttttcaatcttcgacagctgggctggaacgtgaactcagtaactgaacctgtctgacccggtcacgttcttggatcctcagaactctttgctcttgtcggggtgggggtgggaactcacgtggggagcggtggctgagaaaatgtaaggattctggaatacatattccatgggactttccttccctctcctgcttcctcttttcctgctccctaacctttcgccgaatggggcagcaccactgacgtttctgggcggccagtgcggctgccaggttcctgtactactgccttgtacttttcattttggctcaccgtggattttctcataggaagtt

SEQ ID NO: 25978 - DNA, 412 bp, Homo sapiens
aattcggcacgagcacagattgttggtcctggacccaagccagaagcctctgcaaagcttccttccagacctgcagataactatgacaactttgtcctaccagagttgccatctgtgccagacacactaccaactgcatctgctggtgccagcacctcagcatctgaagacattgactttgatgatctttcccggaggtttgaagagctgaaaaagaaaacataggtctcttaaaccaggcaactttcacgttttgggagttgagactgagcaatttctccttgtaacaaagaatctccatgaaattctgtttcatctgttaaccgtcactcagcacaacactccctctgggctctcttcctgctcctccagattctgctgctttccagttctctgttgatcctgagactaa

SEQ ID NO: 25979 - DNA, 435 bp, Homo sapiens
  misc_feature (1)...(435): n = a,t,c or g
aattcggcacgagtttttgaataatgggtaggaaactcttcaaaattatttgttcctccaagtaacactaatgtgagactggaagaacatatgtgtatggcagaaatgcttggataattgggttagacttgatgagaggggtgagaccatatatgtggtgagacatcttgtcagggcagggcaggatgctctctgaaaagcaagttttagacttaactctcccactctgtgtgtgtgtgtgcgcgcacataaataactttatttctctggataacaattttctcaactttttaaaancaaanattagaccantgtttatcaaatttgggttgatactcattagtaaccaatattaaaataacagtgtgtcacatgtagtacagctaantattgtttcataattcttttgattcaccnctctgtttctcttttgta

SEQ ID NO: 25980 - DNA, 435 bp, Homo sapiens
  misc_feature (1)...(435): n = a,t,c or g
aattcggcacgagagatcataggtttaccttaacaatatgtttaccctaaaaagggttgttggataaaatacaggtattcagttaaatttgaattacaaataaacaataggtaaatttttagttataagtatatcccagatattgcatgggacgtatttgtactaaacaaattatttattatttatctggaattcatatttagctgggcatcttgcatttttatttgctaaatctgatgaccctaggtccctaagaaacttctcatgtctcattttatgttttttgttagcttacctggcctaagattctttgctttggagaggtgctggggagtggcacggtgggcaggatattacacttgtgtgaattaagagagggcagggcataaataaagtattggccaancagctgcttggtggcctcangacggaata

SEQ ID NO: 25981 - DNA, 347 bp, Homo sapiens
  misc_feature (1)...(347): n = a,t,c or g
aattcggcacgagcggcgtggggtatattagattaaatatttaacaaagaaagggattacacactacgnnnnnnnnnnnnnnnnnnnnnnnnnnnnnnnnnnnnnnnnnnnnnnnnnnnnnnnnnnnnnnnnnnnnnnnnnnnnnnnnnnnnnnnnnnnnnnnnnnnnnnnnnnnnnnnnnnnnnnnnnnnnnnnnnnnnnnnnnnnnnnnnnnnnnnnnnnnnnnnnnnnnnnnnnnnnnnnnnnnnnnnnnnnnctatttcccatnnnnnnnnnnnnnnnnnnnnnnnnnnnnnnnnnnnnnnnnnnnnnnnnnnnnnnnnnnnnnnnnnnnnnnnnnnnnnnca

SEQ ID NO: 25982 - DNA, 429 bp, Homo sapiens
aattcggcacgagggtaaatcaatatctaattcctgaactgctcagtatccagtgaactagatttggaagcaaactacccagagattcaaactctgctttctgggttctgtgtctctttgaggaaacatagaaattgaaactctatgcctgggccaaactggtgacttatcctgctcatctgatgtctgacacacaatcaaaggacactctttagaagggtacaactgaaagtctgagtgagtaacccttgtggaagaaacaccagtggcacaacggtccctcttttagggatccatgttcctattgactctagtcacacatgtcatcccatctactccaaatccattaaaaccacttcctcgacatcttcatgggctggcactattagtgtactgctaaattcttggtagcatcctacccaagggatt

SEQ ID NO: 25983 - DNA, 440 bp, Homo sapiens
  misc_feature (1)...(440): n = a,t,c or g
aattcggcacgagacgagaggaggacttcacccgaattctccagatggaggaagagtacatccagcagctctgtgaggacattatccaactgaagcccgatgtggtcatcactgaaaagggcatctcagatttagctcagcactaccttatgcgggccaatatcacanccatccgcagagtccggaagacagacaataatcgcattgctagagcctgtggggcccggatagtcagccgaccagaggaactgagagaagatgatgttggaacaggagcaggcctgttggaaatcaagaaaattggagatgaatactttactttcatcactgactgcaaagaccccaaggcctgcaccattctcctccggggggctagcaaagagattctctcggaagtagaacgcaacctccaggatgccatgcaagtgtgtcgcaatgtt

SEQ ID NO: 25984 - DNA, 399 bp, Homo sapiens
  misc_feature (1)...(399): n = a,t,c or g
gcaaagagttcattttctgttgctgggcacatatataatactgtaaacacatttctggatatgacgacataatgatgaagagagacctttgaatattttcttaaatgaagattgaaggagtagtaagctgtgagaggagatttttctactatttcagtcctaagattgatcttttttgtcatggatttatccctttgtctctatgcatttctatgtgtctgctcagcatcttatcttctacatttgccctagttccatccttccttttttccatgcttgtttttccatacacctgcccatccaccctccngcctctctatccagtcgtccgtctaaccatttctggcaattcttacctcccngtttcatgtatatctctccatttttacctgtcattta

SEQ ID NO: 25985 - DNA, 406 bp, Homo sapiens
  misc_feature (1)...(406): n = a,t,c or g
gcagccttgaaccccagttctctgcacccccaggggaaaaaggcctttgaacgcatcaacagcctcacattcaaaaaatctctggatatgaaggcgcggctagaggaagccattctgggtaccatcggagctcgacaagaaatggttcggcgaagtcntggtaagagggtgacatacccacgtgtccccatcccaccanctgctcccaccttgtgtcaaggggaccccatgaagggggccatccctancttactttctgcctcacttttcctggagagaagtccacaaatcatcaccgtacacatgcgcctgtgcgtccccatctgtcactcgtgtttgcccctgtgcgtccacccggcaggcttctgctccacccagtgccctcatgggtcagcccacctgaata

SEQ ID NO: 25986 - DNA, 455 bp, Homo sapiens
  misc_feature (1)...(455): n = a,t,c or g
gcattnnnnnnnnnnnnnnnnnnnnnnnnnnnnnnnnnnnnnnnnnnnnnnnnnnnnnnnnnnnnnnnnnnnnnnnnnnnnnnnnnnnnnnnnnnnnnnnnnnnnnnnnnnnnnnnnnnnnnnnnnnnnnnnnnnnnnnnnnnnnnnnnnnnnnnnnnnnnnnnnnnnnnnnnnnnnnnnnnnnnnnnnnnnnnnnnnnnnnnnnnnnnnnnnnnnnnnnnnnnnnnnnnnnnnnnnnnnnnnnnnnnnnnnnnnnnnnnnnnnnnnnnnnnnnnnnnnnnnnnnnnnnnnnnnnnnnnnnnnnnnnnnnnnnnnnnnnnnnnnnnnnnnnnnnnnnnnnnnnnnnnnnnnnnnnnnnnnnnnnnnnnnnnnnnnnnnnnnnnnnnnngcttgtctcacataanactttggacttggacttttgggttaatgctgggaatganttaanactttgg

SEQ ID NO: 25987 - DNA, 472 bp, Homo sapiens
  misc_feature (1)...(472): n = a,t,c or g
aattcggcacgagtacttcctttgttatgttcctgcctcttaaatctttctgctttaaagaactctccaagaaaatattttcagagtatacttttcagaggccctgtggaagccaagaataaatggcctcctttttngggtaaagagtcatatgtttaagatagttttatttgctccccccacctcctgccccgcatgcacacacgttgatatggttaactatcttctgctctgaatcagtattaagaatgggcacagagatgactaaaagccagaatttaccatattatcccacaaagcagtaacttttcaattttaggatacataatttcagcatttttcctatcactagatgtttagagctccctccagtgtctctatattgtcatatttactttgagatctttttttttncccaaanatcctaaaaattcttttaaccatagcagggaaattatgttattgtctttaa

SEQ ID NO: 25988 - DNA, 186 bp, Homo sapiens
  misc_feature (1)...(186): n = a,t,c or g
aattcggcacgaagttttaaaaccttaccaacatgtagtgttttcctgtctgtagtttgacttccttctgagacaaaaataccacacaacttgacaaatgcttctgacattattactnccactatcaactccagaatgaacagcactnacntttaccgaatgtttactaagttcccnggttagtgc

SEQ ID NO: 25989 - DNA, 482 bp, Homo sapiens
  misc_feature (1)...(482): n = a,t,c or g
aattcggcacgannnnnnnnnnnnnnnnnnnnnnnnnnnnnnnnnnnnnnnnnnnnnnnnnnnnnnnnnnnnnnnnnnnnnnnnnnnnnnnnnnnnnnnnnnnnnnnnnnnnnnnnnnnnnnnnnnnnnnnnnnnnnnnnnnnnnnnnnnnnnnnnnnnnnnnnnnnnnnnnnnnnnnnnnnnnnnnnnnnnnnnnnnnnnnnnnnnnnnnnnnnnnnnnnnnnnnnnnnnnnnnnnnnnnnnnnnnnnnnnnnnnnnnnnnnnnnnnnnnnnnnnnnnnnnnnnnnnnnnnnnnnnnnnnnnnnnnnnnnnnnnnnnnnnnnnnnnnnnnnnnnnnnnnnnnnnnnnnnnnnnnnnnnnnnnnnnnnnnnnnnnnnnnnnnnnnnnnnnnnnnnntgacanctcggacanacgattactatcacctcctaaaagaactnnaagaagctccaaacgctgatggggaagctggaaanacgcac

SEQ ID NO: 25990 - DNA, 478 bp, Homo sapiens
  misc_feature (1)...(478): n = a,t,c or g
gctggaaggcaattttcaataaacttggtctangacatcangaaattacctttcanaagttagatccaagataatatacatcattgaaaatattaatttattgttaattatccaancagtatacctatgatattaatactgctggtagaacactggaaaacctgcatcatctaaanctcttgagaaccataatctactcccaacacattctatcatcctcactccccaacctaccccatccctcatgaagcagaaattaaaaggacatcgctgnnnnnnnnnnnnnnnnnnnnnnnnnnnnnnnnnnnnnnnnnnnnnnnnnnnnnnnnnnnnnnnnnnnnnnnnnnnnnnnnnnnnnnnnnnnnnnnnnnnnnnnnnnnnnnnnnnnnnnnnnnnnnnnnnnnnnnnnnnnnnnnnnnnnnnnnnnnnnnnnnnnnnnnnnnnnnnnnnnnnnnnnnnnnnnnnnnnnnnnnnnncg

SEQ ID NO: 25991 - DNA, 381 bp, Homo sapiens
  misc_feature (1)...(381): n = a,t,c or g
aattcggcacgagaagatgagttgtaactacaacccatcttctcagtgggacatgttctactcccttgccccatggagagagcaaaagctggaaaaaacccaaagaagaaaagccctcacaacagcagttctggggcaggacaggtctgaaacattccaggtggatgagtgaacaatattcaacatanaaaattcccaaagacaggaaataacatcctctaggtctagttgtagaattattttctaaggagtgatcaagtgaggcanaanaagganggganaaacccntccgtgtgagttcctttgaatgcttactgtgtgctggacacttgcttggtgcttttgaaatattnaccgttgaatgaaatntgggttatcccc

SEQ ID NO: 25992 - DNA, 457 bp, Homo sapiens
  misc_feature (1)...(457): n = a,t,c or g
gaggtgagagtggagatgctccagggagtttgacagcaagcacttggcagtgatacaggggcaggggtacagtctgaaagtgctggactggggtactctggtagccaagttttgcaaaanccagggtttccancanggatggtatccagcctgggcacacttttctgtattgtatttgaacctcatttcctgatgctcatccaaaaattcctggctgggtgagtangtgaacagttcaaggctgtgtggatgaaactctggcatctctttacagtgctgtccggcagggcagtgtgaggccactctgtcctcctttgacctctttcttcttcagcanccaaatggaggctctctaaangtgatgattaacttggcataaacatgccaagctttcctgancgtttgccctgaattgggctgtctcttgctgctctganacaaggagactggctgtctg

SEQ ID NO: 25993 - DNA, 461 bp, Homo sapiens
  misc_feature (1)...(461): n = a,t,c or g
ggccccaatcnctaaagcttttgaaatctcncanagttctgaantggaaggccgataaatctctttcttataactcanggttctggaagaaccttctttacttaatgcctgcnnaaacngtcnagccaggtananaccanccggaagtcttgcctgttctttccgagtcttggtctncaaaaacagtgaacgccnaaaanaactctanatattctggggactgagcatatgaacctgttcataacnanggctgtgactccaaatanttaactttgtcnaaatcctgctcaccatttgnanatgaatcttgtcnttangttggcgggaatganactaaagattgcgctgtgggctgtggtcacgtgctcccanaaganctggaaattcccaagaaatggagctattctttttctccctctttcataactggatgcngctgctcatactcaatcccatattca

SEQ ID NO: 25994 - DNA, 524 bp, Homo sapiens
  misc_feature (1)...(524): n = a,t,c or g
atttttnnantgagccaatttaataaaactcactatagggaantggccctcgaggccaaaaatcggcacgagcagatctgttttttcctcttctgtctcagcaagccttgctccagccttcatagtgccatgtgctgtgccaggctgtgggctgtagctgcttgccgctcaaccttggtgacatgctctccaactagcanangcggaaagctggtgttgggaangantgtggcactggagctggtancaactccctggggagtctancaggctctgggttaatcctggcagtcctctcaggctgggcacaacttaacctgcattgancctgggtgaatgaatgcctgccacaccactggtgtccagaancctttactgtatttccttaatattgatgtaatcatgatgagccaccacttctanaaaactctgaacatttttggcctttaagggaacaagtttctaattttaaaactaaaaaagccgggcttggtggcttggcaaggcgtngtggctcatncctg

SEQ ID NO: 25995 - DNA, 465 bp, Homo sapiens
  misc_feature (1)...(465): n = a,t,c or g
gggctccgtggaaaagtgtaaattgtggttttagaaaccaactcttgatagttgtactgtgattataaaaaacaattgttaaataatataatggaagtttgtgataattccttagcagtaatgtaaaattattaannnnnnnnnnnnnnnnnnnnnnnnnnnnnnnnnnnnnnnnnnnnnnnnnnnnnnnnnnnnnnnnnnnnnnnnnnnnnnnnnnnnnnnnnnnnnnnnnnnnnnnnnnnnnnnnnnnnnnnnnnnnnnnnnnnnnnnnnnnnnnnnnnnnnnnnnnnnnnnnnnnnnnnnnnnnnnnnnnnnnnnnnnnnnnnnnnnnnnnnnnnnnnnnnnnnnnnnnnnnnnnnnnnnnnnnnnnnnnnnnnnnnnnnnnnnnnnnnnnnnnnnnnnnnnnnnnnnnnnnnngtctcaanaaaaaaaacaaaaattcctcccaaaaactanaaagaaccc

SEQ ID NO: 25996 - DNA, 190 bp, Homo sapiens
  misc_feature (1)...(190): n = a,t,c or g
atcttttgactnatcncncttntacgactcactatanggaacnggccctcgaagccaanaattctgcacgagtcatngtcatactgctccnatcacgctttgnactnctcactggcctgctcttcttccacatcntcggggcttcangataggggcangggaaattgatgancaggtgccccttttctcc

SEQ ID NO: 25997 - DNA, 470 bp, Homo sapiens
  misc_feature (1)...(470): n = a,t,c or g
gtgtctaaggtgccttaggaanaaaaatttaatattttttctgcatctgccagaaataatttaaaacctccaattccagccaatctaaattcagtcttcttcananatttccttaacatttaggtcaaatgccaggaaaccagcttcttggaacaaaactacctgagcagaagtggcaagtcctttttttcttctggctgggatnaaaatgcaggggggagggagggtgatanaatgagtctttttcttgcagttgtgattccaaanaatccctatcctgcctccgatgtgaatactgagaancccancatccacagcagcaccaaaactgtcttggaacatcaaccagggcanaaggggcgtntaccangaaagaaacggggccggacaccccaaaacctaatttcccatccccatctctgncccatccaanaacagctgaacctttgaaattcccaaaaaaaaaaaag

SEQ ID NO: 25998 - DNA, 446 bp, Homo sapiens
  misc_feature (1)...(446): n = a,t,c or g
gagttttttaactgccagtgtgtttaataatcatctagtataaaagtttgcagtacttgtgctttcaagtttctatggaatannnnnnnnnnnnnnnnnnnnnnnnnnnnnnnnnnnnnnnnnnnnnnnnnnnnnnnnnnnnnnnnnnnnnnnnnnnnnnnnnnnnnnnnnnnnnnnnnnnnnnnnnnnnnnnnnnnnnnnnnnnnnnnnnnnnnnnnnnnnnnnnnnnnnnnnnnnnnnnnnnnnnnnnnnnnnnnnnnnnnnnnnnnnnnnnnnnnnnnnnnngtgtctgtcaatgaaatgnnnnnnnnnnnnnnnnnnnnnnnnnnnnnnnnnnnnnnnnnnnnnnnnnnnnnnnngaatgaaattcnnnnnnnnnnnnnnnnnnnnnnnnnnnnnnnnnnnnnnnnnnnnnnnnnnnnnnnnnnnnnnnnnnnnnnnnnaaa

SEQ ID NO: 25999 - DNA, 435 bp, Homo sapiens
ggcattctacaagttttgagttagcattacattttaatatttactattgctacattgtataattgagtttgaaataaaacccagcttatgacaatgcattccctgtgcaagaaactgtttggctttcaaattacccaggcattgaaaatgaatgataaaaagttgctgtgtaagggaaatacagcctaaattgtttttgaaagccagaaatgatacaaagttcagtcatgccaaagtgaaatactttctagtgccagctttaacttaaatcatacgttttaaaaggacagatacagaaaattataggaaacaggcttaaattttgctccatatttaatgtagacgtttatagaagtttcccttaatttgtaattgcattcaaccgagaatttctcataaaagactaatttctgtgtaaagatattacgggctggg

SEQ ID NO: 26000 - DNA, 439 bp, Homo sapiens
  misc_feature (1)...(439): n = a,t,c or g
gcttactaccaagangcgtgtgaaaatgcttttgaangcaaatgaaaatggaatgcctttaaaggaaatctgtgtctnaatgatagaagattagtaacnaggattcaanaatagcatccctttccaaccaattctcatactatttgaagagtanataccacagagacagtaantaagtgaaacacctgcacgtcaagcaagtgctgcagcacctttgcctgtgatgtcactttccacatgactgcaacctgcttacctgcaaggaanctatgggtcttgctcctttatatattacactaattgctcctatggaaaaaccgtggggangggttgggggaagaaggtcttaatattgancctggttttatatacccttatagcttgataacagctggttcctttcttcccaaaaattggtngttttaaattgttttngggt

SEQ ID NO: 26001 - DNA, 460 bp, Homo sapiens
  misc_feature (1)...(460): n = a,t,c or g
ggatanaactagtcagctgctaacatgtgcnatttttcatgaaaaaaggaaagatgactcagagggtgtgaaccnanagctatggtgaantattcccancccttgaaatctaatcaaagaatncngacngaagtttgntatgctgggttttaaaactnctttggactgtaaatccttttnatcttcnattgcccacctctcctgactctttataactgtaaatgtctataacnattttactatatncattccttcnttgtgcnttagganctanacnatttntctntacttttataggattgacaggaantacgctcaagggagcctcatgcntaccntgagacctgatttatatgatgagatgntggacttcangcanatgctgtaatgatatgaagttctcaaggaccntgggaanggactaaatgtntttngttgtggtgaaaagggaactaatctt

SEQ ID NO: 26002 - DNA, 387 bp, Homo sapiens
  misc_feature (1)...(387): n = a,t,c or g
gaatgattcttttaatatattttatgtttttattaactgtcttacataaccatgctttgtaaaagaagacacaatttatttcctatattgtggcattttgcctttcaaatctttggtgctttaattcctcattttaccactatcaaaagctaaagtgaacagaaaaattaaaattttatctattaaatataaaagaaagcactgcacaaaaatctaataatttttttatttaacttgacagtgatatatatgtgggagctgaagtatgcatttcaattcctgaagaaacttattttagaaaacgaactaatttttttagcttatccaagcttttacattnnnnnnnnnnnnnnnnnnnnnnnnnnnnnnnnnnnnnnnnnnnnnnnn

SEQ ID NO: 26003 - DNA, 451 bp, Homo sapiens
  misc_feature (1)...(451): n = a,t,c or g
gcgangtaaaccattttaacnnnnnnnnnnnnnnnnnnnnnnnnnnnnnnnnnnnnnnnnnnnnnnnnnnnnnnnnnnnnnnnnnnnnnnnnnnnnnnnnnnnnnnnnnnnnnnnnnnnnnnnnnagcccctgggaagcagcattctacnnnnnnnnnnnnnnnnnnnnnnnnnnnnnnnnnnnnnnnnnnnnnnnnnnnnnnnnnnnnnnnnnnnnnnnnnnnnnnnnnnnnnnnnnnnnnnnnnnnnnacctgtctatgtggtagcatgtatgacaatttccttcctttttaaggntgaaaaatgcctaatatctgtgttgtatggatagaccacatggcttattctttcatcccttgctggatctgactcagtgtttttatactgagggtcacagcccgcattttaaaacgtaaagtanattaagaaatgtgtgcccatatggggtat

SEQ ID NO: 26004 - DNA, 445 bp, Homo sapiens
  misc_feature (1)...(445): n = a,t,c or g
gggtcggcgtggggaatgtgacaactgagtgattactgcctcgaaacctccaatatcatatcttcctcctcaagtactttatcaaatcctagcaagaatgaactttttctccaatanaattatgggcttagattatggtaaanaaatcaatctgaaatattttatctctaatcattaaaactaagaagcctgcctacctagcttaggcaaataaaagttagtgggggtggggattaggaatttagaantggggattcacctanaaaaaaggaaatctgaagtantcctggaagtgcaaaaggcacaggcaggaatancaatcaggggtcagaaaanaccaangctgtggggcaggganatcacacagaggttgtcacgatgatcccaggaanaactgatgctgacccacanaaancgganacancaggattaaggcagggggatc

SEQ ID NO: 26005 - DNA, 427 bp, Homo sapiens
  misc_feature (1)...(427): n = a,t,c or g
atggggggatggatgggganggggccatgcttccttctgcanggganaaaacgaagcctcatctgcggcaggggcattgggcattgaaagtnnatggatgaagacattccagaagcngaaaggacagaactgggcaactgcctggctgtggggggcaaaaggcggggccctccggaaagtccctctctcctcagtgtgcatgggctggctggccgtgtnaccttnggaaaagtccctcnaactctgctcctcatcttctaaccngtttagttgggaaaatcatattccntccttcgtagcnttgttttngaagcntcgatgaatttccacctgtttaaatgcacnggggccngttattggttgaacctntccccatnttnanggttctttgatgggaaaactgggcccggggaaaaggcntcctccc

SEQ ID NO: 26006 - DNA, 416 bp, Homo sapiens
  misc_feature (1)...(416): n = a,t,c or g
ggagagagctagcactgatttttttttgantcagccttcattctaaaccacttcctgaaagcccactcagaccctgtgctaggattcagggatgcnncggtcaccaanacanaatgctctaccttcacnaggctttcgccagtctagtaaggtattctcaggtgttcagaggagggaaaaaatgagggctggggttggcctatgacctttgcatggagacagaggcaaaactgggcttcaagtgggtatcatctgagcattcantggggtgatggacncantggttaattgctgagtncngtantaataanccatgaggttctgaacacatancccaagcccagttctactaatccgctcntcnttantgaagggaattantttgcttccnaaaattcngcccnaattcnnatcct

SEQ ID NO: 26007 - DNA, 415 bp, Homo sapiens
  misc_feature (1)...(415): n = a,t,c or g
ggtgaganagctctctggggtctctttatcataagggcactaatcccattgatgagggctctaccctcatgacctactcaccccctgaaagctccacctccaaatagcgtcacattgtgtgattaggtttcaacttatgaatttgggggaaatacaaccgtttagcctatagcacatgggaggggcctgcgtantggtaggcttatgggtgggctttaacaacccctttccctattctactanaatataattttttttaagtctgaaaatagccgttctaaanaatgctgtatgtattccaccctaatataagcttcagaaaagcactgactttcagaagcttacagaagaaccaggggcttataaaaggtgactctacaacacaaggtggccaccaactactgcgttgctggaa

SEQ ID NO: 26008 - DNA, 416 bp, Homo sapiens
  misc_feature (1)...(416): n = a,t,c or g
gcggcacnagaaacaataaaaacataatgaacagttgtgcacccgcaggagctggagcaggactaattacctgcatctccaaaactgctgacagccatgtctgttccactgtgtggcattagccattttgaaggccaaagggatttttttacnnnnnnnnnnnnnnnnnnnnnnnnnnnnnnnnnnnnnnnnnnnnnnnnnnnnnnnnnnnnnnnnnnnnnnnnnnnnnnnnnnnnnnnnnnnnnnnnnnnnnnnnnnnnnnnnnnnnnnnnnnnnnnnnnnnnnnnnnnnnncccgcatgccaccatgcccantaaaatttttttagattnnnnnnnnnnnnnnnnnnnnnnnnnnnnnnnnnnnnnnnnnnnnnnnnnnnnnnnnnnnnnnnnnnnnnctgtccttggggcctc

SEQ ID NO: 26009 - DNA, 409 bp, Homo sapiens
  misc_feature (1)...(409): n = a,t,c or g
ggcgtggactgagtcacttcctatgggttgctgcaccttagtgagatttcgctgttacagtcctcccccactcctggccctctgttctgtggttttcggtcttgctgtactgtactgtgttgaagtagcctttctttttgttcagctgcctacaactatacatgtatttgttggggctcanaaaacgacaccccttggcatgctgagtgcttcgaaccaaaggagatgggaaggtttcagaagcagccttggaagcaaagtcttcctttggccttctcctgccctcctgtctcccgctcctctttctccccctgagtgagtcatanaaattagaattcctcttccccacagtgggtcagananactagaanggtcactatgggggaagccaaggcaggaagattactcc

SEQ ID NO: 26010 - DNA, 411 bp, Homo sapiens
  misc_feature (1)...(411): n = a,t,c or g
gctggaatgttgacttgattcccaagttccttatggctaatggtcagctggttaanatgctgctttatacagaggtaactcgctatctggattttaaagtgactgaagggagctttgtctataagggtggaaaaatctacaaggttccttccactgaagcagaagccctggcatctancctaatgggattgtttgaaaaacgtcgcttcaggaaattcctagtgtatgttgccaacttcgatgaaaaagatccaagaacttttgaaggcattgatcctaagaagaccacaatgcgagatgtgtataagaaatttgatttgggtcaagacgttatagattttactggtcatgctcttgcactttacagaactgatgattacttagatcaaccgtgttatgaaaccattaata

SEQ ID NO: 26011 - DNA, 414 bp, Homo sapiens
  misc_feature (1)...(414): n = a,t,c or g
gagcacagaattctcagttcctttattatttgagcactgcagaaccagtgtgaccgcataaactagcatctcgtggaatgtctacacatgagcaaagttctcctcaccagtctacagtagggtcaattcagtggggtgganatgggaatggatatggaacaggtaatgagtctcatcagcaatggatttttatagagtctagttcttttctgtgcataatctatgtaggaattctcagtttgttaaggcctgtggtataacccacttacatgttttgctcattgatggcatctataaacatatagttatttaggcatttggatgtatgagtcnaataaaatatataatcagatgtttattaaaagcanactcagaanaaaaataatttagtttgtccagaatgattaaaatcct

SEQ ID NO: 26012 - DNA, 261 bp, Homo sapiens
  misc_feature (1)...(261): n = a,t,c or g
gaactggaaatcatggtcaaatttagtaaagatgtcagggcagggaatggatatttgggagtcactgctataactacagtactttgaaataataattgtgtaaganactgacacataggtagcactcatgccatcttatgtgtaaggctggtcttaacactgagaatatactggactctgaaaataagcagggccgtaacatgtccccacaaatcaaatatgcccatcacctccatctttacngaagaaaaaaaaaaaaaa

SEQ ID NO: 26013 - DNA, 499 bp, Homo sapiens
  misc_feature (1)...(499): n = a,t,c or g
ggtaatttnaggnttgagcgctttttacaaanactcactatnggccatttggccctcagaggccanttaattcggcacgaggtggaagttcccgccccggagagcggcgaggcggcagccacagttgattatggaagattcccacaagagtnccacgtcaganacagcacctcaacctggttcagcagttcagggagctcacatttctcatattgctcaacaggtatcatctttatcagaaagtgaggagtcccaggactcatccgacagcataggctcctcacagaaagcccacgggatcctagcacggcgcccatcttacagaaaaattttgaaagacttatcttctgaagatacncggggcagaaaaggagacggagaaaattctggagtttctgctgctgtcacttctatgtctgttccaactcccatctntcagactagcancggacagtntntttgccattgcccccaattggacctttcagttgggcnagtc

SEQ ID NO: 26014 - DNA, 176 bp, Homo sapiens
  misc_feature (1)...(176): n = a,t,c or g
gcaaagaggctcatgatcaaagagttttaaaactganatgtttgagatccatgggcttgagaactaagtttcagtccataatggaaaaaccattgaacctgaactccagtcctgtttctacatttcatcagctgggtgactaggcaagacctgtcccttctctgggcctcattttg

SEQ ID NO: 26015 - DNA, 176 bp, Homo sapiens
  misc_feature (1)...(176): n = a,t,c or g
gacacatttacagaaaattcctctccaacaaaggcagcaagaacatacaacaggggaaggaaagtctcattagtaaatagtgctgggaaaacagaataacccatatgtggaagaaataaactcgtcccctatctctcatcacacacaataataaaatcaaaatggattgaanactt

SEQ ID NO: 26016 - DNA, 173 bp, Homo sapiens
  misc_feature (1)...(173): n = a,t,c or g
gctcggctggggcaggaanaccacccgagcccggaaggtcaaagctgcagtgagctgtgatggtannnnnnnnnnnnnnnnnnnnnnnnnnnnnnnnnnnnnnnnnnnnnnnnnnnnnnnnnnnnnnnnnnnnnnnnnnnnnnnnnnnnnnnnnnnnnnnnnnnnnnnnnnnn

SEQ ID NO: 26017 - DNA, 165 bp, Homo sapiens
  misc_feature (1)...(165): n = a,t,c or g
gttgaataggagtccataagtagccctggcatttgaaacananaaaaacancccgggccgggcaccaggtagggacacaggacaaacctgaatttgagagatttagtccctgtcctctaaganacangatatagaccccaaatggccgtgacagcacatgcatgg

SEQ ID NO: 26018 - DNA, 406 bp, Homo sapiens
  misc_feature (1)...(406): n = a,t,c or g
gggnnnnnnnnnnnnnnnnnnnnnnnnnnnnnnnnnnnnnnnnnnnnnnnnnnnnnnnnnnnnnnnnnnnnnnnnnnnnnnnnnnnnnnnnnnnnnnnnnnnnnnnnnnnnnnnnnnnnnnnnnnnnnnnnnnnnnnnnnnnnnnnnnnnnnnnnnnnnnnnnnnnnnnnnnnngccagttaaggtctcttactgagcaaaaaataataatagcaatttgggctnnnnnnnnnnnnnnnnnnnnnnnnnnnnnnnnnnnnnnnnnnnnnnnnnnnnnnnnnnnnnnnnnnnnnnnnnnnnnnnnnnnnnnnnnnnnnnnnnnnnnnnnnnnnnnnnnnnnnnnnnnnnnnnnnnnnnnnttanctggacatgggtggtgtgcacctgtggtcctaagttacttggg

SEQ ID NO: 26019 - DNA, 498 bp, Homo sapiens
  misc_feature (1)...(498): n = a,t,c or g
ttgaccttctnanganccgctncctntttagaaacgactcactccggcccaatttggccancgatgccntttaattcggcacnagagcatgtgcaagagcaagctttcctgcaatacctaaagaaaagcaaggggaatngtaggacctggggacagcantcctaggcccattaattccccttgcccctctgacagaatttcgaactcagtattcttccgaatactcagatnccagggttgccattgtaacaaaataacagtggctggggggacncccnttcagtgggctcttcagaaanaacaaattncactggggtgnatattacactttaaggganaatgctcaatangccaccccattgagtctcagancaacctnaccaactntgtgaantccattttaaaagacactttgtcttgctngaaaaacctcctccccctnggttttcnccttgggaacttncnccttacctttaattatggggccnttnatttgga

SEQ ID NO: 26020 - DNA, 401 bp, Homo sapiens
  misc_feature (1)...(401): n = a,t,c or g
gggccggagaggctccaacccggtcaaacgctacgcaccaggcctcccgtgtgacgtgtacacatatctccatgagaaatacttagattgtcaagaaagaaaattagtttatgtgctgcctggttggcctcaggatttgctgcacatgctgctagcaagaaacaanatccgcacattgaagaacaacatgttttccaagtttaaaaagctgaaaagcctggatctgcagcagaatgagatctctaaaattgagagtgaggcgttctttggtttaaacaaactcaccaccctcttactgcagcacaaccagatcaaagtcttgacggaggaagtgttcatttacacacctctcttgagctacctgcgtctttatgacaacccctggcactgtacttgtgaga

SEQ ID NO: 26021 - DNA, 496 bp, Homo sapiens
  misc_feature (1)...(496): n = a,t,c or g
gggttnntnnnngtatatttttntgattngctntcgnnctttaaaacaactcactatggcccaantggccnncgangccntttaattcggcacgagaataacataggctttgtactcagggctaggttttaacctcagttatgccacattctcagtgaatgaccttagagaagatactttatttctgagtcatttttctcatctataaaatcaaagatggttgaaggactaaataatataatgcctaaaaatgactaatcctaatacctgacatacaggaggtacttaataaatattttatatgggtatgaaatagggttggcccaaaagagacataaggaattacatagatggggtgagaaaagtcataatttggttaaatataactattgaagatgttagcaaaagcaatttaaatttcattgctaaaggctgttctcaaccagagttcttcatctgaatcaccgaccactgaaaatagagtgaatattttctc

SEQ ID NO: 26022 - DNA, 397 bp, Homo sapiens
  misc_feature (1)...(397): n = a,t,c or g
aactggagttaatgatttttttcctttacttagtgttccttgtacctgttgctaaatcaccccactcctcctaatanattcccagtacacataagataattgatcannnnnnnnnnnnnnnnnnnnnnnnnnnnnnnnnnnnnnnnnnnnnnnnnnnnnnnnnnnnnnnnnnnnnnnnnnnnnnnnnnnnnnnnnnnnnnnnnnnnnnnnnnnnnnnnnnnnnnnnnnnnnnnnnnnnnnaaatnatttatcagttctgtttttttccactggtgacatctctcctgaaggcctctgttctccttccgtaggtactggctgtcctctangcccctacatcaccantgttttggggcttccctttgctgacatccctanaattcccttttgcctttcc

SEQ ID NO: 26023 - DNA, 401 bp, Homo sapiens
  misc_feature (1)...(401): n = a,t,c or g
ggtttataaagctatataaattattcttacctaattattacagtggtaacactttaatcataattttctggtaatgtttattttaaaacagcatttttntccttttaaaattgtttctgtttcacagttttcactaatataaaggctgatttttatcccagtcaaatacaattaagatcagttgattaaggatcagttcanatcttagatttcttttgcagtgatttagacatggctttttttctagatagtattaggaagggtatattgttccttaggagtattcactctgccgactcaagtggatactccttattggtatattatttctaccccattttgtcttatgaaanatgtaggatggttatnatatatgtgatacngaaaatangataangttt

SEQ ID NO: 26024 - DNA, 397 bp, Homo sapiens
  misc_feature (1)...(397): n = a,t,c or g
gggaaattttaagccatattttaactgggggaatttgttantcagtagtccataactaacatantctccagaagccacctgttgtattgcccttctggggacaactatcaataggcgcatctccttaggggctccagcttagcctcaganaggcctgtggtggtcttcaatctgtataatttgtggaacatttaaagcataagcccaggcttcaatctctggagatttttactcagtaggactgggacagggtccaaccatttatatttaactgaatgattttttaaaaagaagcctattaaaggatatctgaagaatacttttggttgagaaccttgctgttctttttgatgataaaaagcaacaggcctctctgctctatgtcttttgtattctt

SEQ ID NO: 26025 - DNA, 384 bp, Homo sapiens
  misc_feature (1)...(384): n = a,t,c or g
ggttgtnnaatattattgagggatgcanatatncaacctncancncttatgtggttctgctgtntcntactctagtanatacttcgcagagctacaaaaatgtaaacgtntgattctctgtcgatgatggatgaccttacctgtcaagtgaaatgagacatntttttgttgttggttatttgcnatttaaanggattttaaaatccttcgtaatcactncananttnntgtgntctgcgtctggattctaccttacngcttctataaagttgaatcttttcagccaaattatatataggttctgcnaaatgggttggtggaaatnctcattgaaaacaatattnntanaacctagatcatnttcttttcttcncnttnagacaa

SEQ ID NO: 26026 - DNA, 108 bp, Homo sapiens
  misc_feature (1)...(108): n = a,t,c or g
ggtgnnnnnnntccttttnangatagngcttcctttttnaaaangacncactanggcccaatttggccnncgaggccatttaattcggcacgagtttttttttttttt

SEQ ID NO: 26027 - DNA, 485 bp, Homo sapiens
  misc_feature (1)...(485): n = a,t,c or g
ggggtggggggggaaatgggggggnggggcncctcttttaaaacgactcactangnnnnaatttggcaacgaggcnttttaattcggcacgagcggcacgagnnnnnnnnnnnnnnnnnnnnnnnnnnnnnnnnnnnnnnnnnnnnnnnnnnnnnnnnnnnnnnnnnnnnnnnnnnnnnnnnnnnnnnnnnnnnnnnnnnnnnnnnnnnnnnnnnnnnnnnnnnnnnnnnnnnnnnnnnnnnnnnnnnnnnnnnnnnnnnnnnnnnnnnnnnnnnnnnnnnnnnnnnnnnnnnnnnnnnnnnnnnnnnnnnnnnnnnnnnnnnnnnnnnnnnnnnnnnnnnnnnnnnnnnnnnnnnnnnnnnnnnnnnnnnnnnnnnnnnnnnnnnnnnnnnnnnnnnnnnnnnnnnnnnnnnnnnnnnnnnnnnnnnnnnnngcnaaatcncctagaagtcccnctccnaaaggcatccggtattnctcgcatc

SEQ ID NO: 26028 - DNA, 400 bp, Homo sapiens
  misc_feature (1)...(400): n = a,t,c or g
ggannnnnnnnnnnnnnnnnnnnnnnnnnnnnnnnnnnnnnnnnnnnnnnnatagattaggnnnnnnnnnnnnnnnnnnnnnnnnnnnnnnnnnnctgagagccagaaccagnnnnnnnnnnnnnnnnnnnnnnnnnnnnnnnnnnnnnnnnnnnnnnnnnnnnnnnnnnnnnnnnnnnnnnnnnnnntgctaaagcaagacctgtctnnnnnnnnnnnnnnnnnnnnnnnnnnnnnnnnnnnnnnnnnnnnnnnnnnnnnnnnaaaaaaaatatgaanccatttgaatcattantgccttaataannaanggcncctttncttngggggngcccncaanannttcnctctttntgtgtntagntgttgngttanganaaannccgngaatttatcaggg

SEQ ID NO: 26029 - DNA, 411 bp, Homo sapiens
  misc_feature (1)...(411): n = a,t,c or g
gctgattcttgtcanggaggctctnntagatgcnatttccanagcataagtgacaggccagcattttcaaagcttgcaacttattctatnatatatccttcttanaacaattcgtgtacattatatgcncacccagtctgggatcactcctgcagaagatcnnaagaactgaattatttgtgacatnggcctcctggctttgtaaatgttttgttgaaaccccatttgttttcttccattaatgtcgaatggcngcttttcattgcttcagcanaatttaaatagttgggagaaaaaccgtgtngaccnttaaatttgaantttttgnttctnggnccttccncagaaattttgccaattcctnggnattggtttaatnaatnttttntttccccanaatntcccctcccc

SEQ ID NO: 26030 - DNA, 396 bp, Homo sapiens
  misc_feature (1)...(396): n = a,t,c or g
gtgaaggttttcatttttttaaaagcattgtggaaagaggaccagacgaggagtcaagagactgactgacataaattagcaatgaaattctgaataaatcacttaatttctctanagcttgtttcccaggatcatcctttataccatatcatcctttggtatgaaatttttcttaaatccattctaggggatcggaaactatctagtgggttgagtaaatganagtaggcccttagaggcttccattaattaggaaatacaggaaaagaatctattcatttccagtctctttttatattanaaatcctgactcaattttagttttccctggttctgtaccaggtgttctctganttcctaaaaacaaatcatgccttaaggatttaggagaaaagg

SEQ ID NO: 26031 - DNA, 397 bp, Homo sapiens
  misc_feature (1)...(397): n = a,t,c or g
gaataatcantaaatgggaacctttgagggacagctctagaattcggcctataacatctcagtattttttttctttttgcattaagcattttcaaatcagttctttacccccgnaaatcatgttgtttanaatgtactaggtgctttcaacttatgttattcttatggcatctgaatgggatgganacagtcatccccatttcttcgataanaaagtaaaggcaacaagtttaaaaggttttatcagatacacagggagtataatttaaagtatatcaganttcttctcagtgtaaagtacgtctgctantttttaacataatanaagatnacnagcccttantttattctttctgttttaatcatttatgtaattgacttgttctntccatatttc

SEQ ID NO: 26032 - DNA, 400 bp, Homo sapiens
  misc_feature (1)...(400): n = a,t,c or g
ggtcccctggaggtcagaagccatgcaggtccctggaagtgtgagcagattgttaaaatggtatcaaagatgggctggcatgaggccagantctatccttgatgctcacctgaggtctagggctaaactcttgcctttacctgttccatgcttagccgttcctgctttttgcctaaaacctcagtgctattgctcacacagacccagttcatgtccccaggccatgaccactgcctccccttctcccacctgtgcaggtgttaagcatcagtacataactgaggagtaggagggcagcagcccaaatctttgatgaanaacctctttcgtatcaacttatgctttggaacganacactgttggatgggaatctggcttctaacaaactgattggttggac

SEQ ID NO: 26033 - DNA, 404 bp, Homo sapiens
  misc_feature (1)...(404): n = a,t,c or g
caataggagatggtgtggaangggaaacatgctgtgganaaaaacaaaccttgattcctgtggattaggcccatgcttttatttcatttcattccancagtcctgnaataatgggtggnntnctccccantnnatgtccanggaaacncaaccccgaagangatntcagcttgcccatatcatgcaccgtgctaagtaacgtancatgaagtgcaacccanttctcatggagtgctccccgggctaggcttccnannggatagttgcccanantaggcccccgaatgnaggnngttggngcnngttcttggtaaccctgncngtctgctnctaaantgngncnnccccanaaaanttttgntttttgaaacnggaatccggttttnaatttanggggngggccc

SEQ ID NO: 26034 - DNA, 391 bp, Homo sapiens
  misc_feature (1)...(391): n = a,t,c or g
gcggcacgaggcaagaccttgnnnnnnnnnnnnnnnnnnnnnnnnnnnnnnnnnnnnnnnnnnnnnnnnnnnnnnnnnnnnnnnnnnnnnnnnnnnnnnnnnnnnnnnnnnnnnnnnnnnnnnnnnnnnnnnnnnnnnnnnnnnnnnnnnnnnnnnnnnnnnnnnnnnnnnnnnnnntcccagtctatctctctcacacacacggagagagagagagtgatttctttantgaacagataagtattatgaatttgatatganaaaaatctgaatatnaaggcatggaacttgtnctgtacanntaccccaagagagaaattactgtgctttcttcctgtaatctacccatccccgccatggctgatgtttcatggttaggtcnntggatcta

SEQ ID NO: 26035 - DNA, 401 bp, Homo sapiens
  misc_feature (1)...(401): n = a,t,c or g
gtcttgantccttcttaaaccagtgccttcttgatgaatggaaactctttgaatttaatcnccataatnatgttaccntttcntgttaccttactaggaggatngcttaaaaccatggncnctaaaaataaattgcngggtttnaatcctggctctgcctgttattanttgtataatttnaggcaatttctttaactgctctgtctcatttnccccatctgtaaaanggggggtnntncnaanccctgnnaataagngtntttanaaaaaaaaaaggggcnaaccacttntaatacttantggcgtngtngcntgtaaatgcncaaaaaaatgttgtcnntatatnctangggnctngctaanaaanattacattccanttccccncattttccncaaaaa

SEQ ID NO: 26036 - DNA, 393 bp, Homo sapiens
  misc_feature (1)...(393): n = a,t,c or g
gcaggctgcaagggccaagcacgctgttccagttccccacactgcttaatggccacatgccantgccaatccccaatctggacanagctgcttctccagtactgctttcttcaaactctcagaaatcctgatgacgtctggccacaattaaggactcattaactgatgaaacaaatttgtccccacgggctagtttacctgtgtcgtganaaagacattgtgaaactcttgttaatttggtttgcacttttcataacatggatagtctagatttatgttancatnttaaaaactgtttttgatatattcaagtntatatgaaaaatctgttnggcattaantgaatttnaatgtttngggttttnatatccttnacctcttaagttgtngaaa

SEQ ID NO: 26037 - DNA, 398 bp, Homo sapiens
  misc_feature (1)...(398): n = a,t,c or g
gggatgaggcgtcctaaatacagagctgttaaagaacttacacaagctagtgaatggcagagcttaggatttgaacccaggaagtctgacttaccatcccacatgcttaaccactacactctgctgagtgaatanananancgggtgaatgaattgttgaatgagggaatgcacgtcatcanaatggangggtangctttatggtanactgggggactccgggatgaaactgaangacttacnnatctagaaattggggtccaagttatcctaaggtngttttaaggccttaaattgcnttgggaactttttttaaaattctnggggnctttggtttaaggtttccaaaanaagaataatgggccggggtttccnnttcccccctccccnttnnaaag

SEQ ID NO: 26038 - DNA, 405 bp, Homo sapiens
  misc_feature (1)...(405): n = a,t,c or g
gggatcagagagtccttactataacacaatctatgtccatgaaaagttccatgaaagttggggcagctcaagctgctgatccaggtaagtaggggaatccaaatgcctgggattccctgttctangaattggaattggaaaaagggcccnctgcatcatgatctcaggaaaacagctgggggcaccaancaatggcatgtgcctactgggttccaggtngccaaggtggccctggctgaaantcttgttgctaaananaaactgcagctgtagcanctctcctcctgccccaggcatgcagtgggggacaacacaattctancatgttctgctgaagtactttccacagttccggctatggaaaccttaccctactccaaaaaaaaatctgcaatttctgaaccg

SEQ ID NO: 26039 - DNA, 674 bp, Homo sapiens
  misc_feature (1)...(674): n = a,t,c or g
gaagttggctgtgggtgccccattaaacctcaggactgcgtcatgatcatcgatttctctgcctagttgggaggacttcagagatcccgctgacgacacaacagcacacctgccccaaggcccagccttggtcctaatgctctccttgggcagataaccctcccattcagaggtattgaagggaaaatctgtgacctctaccatggatacattcacatggtcccggaggtggcagcgcagggcctctgcactgaacttgatgcctggtcctggccccttgtaggacactttgtacttgttcatgcttaaggtaattcttccagatcttttgcagcctanggataaggtttttggaaaaagctgtcctttgttccacacctgggaagaaggcccctggtttgggcttggctaaggcctcctgaaaatggccgangggtctggccggcccctgtnggggggtccctggggttgcngcttnaaggatacanaacntgggaattcaagaccccatgggcnaatttccccaagacccctttaacaacctggaaantnccttgggtttgcaattttaaaaggaatcanagtaactcccttttctccntttcctttcaacaaacangnttactncaaacaannntaaatgccagggccaccaactgaacttttnttcaggt

SEQ ID NO: 26040 - DNA, 127 bp, Homo sapiens
  misc_feature (1)...(127): n = a,t,c or g
ggtccttcnctcttttatctctctgtctacccattcttccattcattcaacagaatcagagaactccaattgagtctggtgccttgattgtgaatctaggcatgtggcaggcanacccctgtcccat

SEQ ID NO: 26041 - DNA, 126 bp, Homo sapiens
gtaaatgtcagcattctgctgttgctgctgcttgtcagcattagaagcttgaagcaagcgcagtgcctgtattttctggtgtagagcctgtagggggcactcaagaggtatcagctgtggagggcc

SEQ ID NO: 26042 - DNA, 636 bp, Homo sapiens
  misc_feature (1)...(636): n = a,t,c or g
gaaacagatgttcaaacaaaaacttgtgcaccaatattcatggccactctattcgcaataaccaaaagatggaagcaacgcacatgctgatcagcaggtgaacagataaacagnnnnnnnnnnnnnnnnnnnnnnnnnnnnnnnnnnnnnnnnnggatctctttctaattcctgtttttgttggcagatttcatttccttgtgggggcagcgttagactgagggtctcggttcctagcagcctccattcctaggtgagagaatacactcaattccttgccatgtgtgactctctagtgtggcagtttgcttcataaaaacttgcgtactnnnnnnnnnnnnnnnnnnnnnnnnnnnnnnnnnnnnnnnnnnnnnnnnnnnnnnnnnnnnnnnnnnnnnnnnnnnnnnnnnnnnnnnnnnnnnnnnnnnnnnnnnnnnnnnnnnnnnnnnnnnnnnnnnnnnnnnnnnnnnnnnnnnnnnnnnnnnnnnnnnnnnnnnnnnnnnnnnnnnnnnnnnnnnnnnnnnnnnnnnnactccgggccttggcaacanantgagactgtgtccaananaaaacnnnnnnnnnaaaanantttttttgggggggccattttatcccctttngggggggtatttt

SEQ ID NO: 26043 - DNA, 123 bp, Homo sapiens
gcgcgggtctgtctcttgcttcaacagtgtttggacggaacagatccggggactctcttccagcctccgaccgccctccgatttcctctccgcttgcaacctccgggaccatcttctcggcca

SEQ ID NO: 26044 - DNA, 339 bp, Homo sapiens
  misc_feature (1)...(339): n = a,t,c or g
gccactttattgacanatccnaaactgactgatgtcactgatagtgataggcacttatcattttcaacattccacnactgtgcnaacctcngtggtctcctgcccctggctgttggtaganagcttctggttctttgagttctttgaaaaacactgtctcctcattcctcatcctttcctgtgtcnttgcgcttagtcaggagcctctgcagctcctctcatcaagagatggancctntttccttgccctttggtnccgatatcatctgtgtnatntgctttggncnntgggatgtccgcagctgtgactcnaggcanaancttgataaaaacttgttc

SEQ ID NO: 26045 - DNA, 203 bp, Homo sapiens
  misc_feature (1)...(203): n = a,t,c or g
ggcctantntntggtntcnttgcccgttatnatacgaatnggccnagggnatttggcnctcgnggccanganttcggcacgagcactgtgtacttagtatttggnnncatnatcattttcttactgacttagaagancactttaaatantaanantattgggcatttttagacaangatttttttaatttcagttgtatattt

SEQ ID NO: 26046 - DNA, 100 bp, Homo sapiens
  misc_feature (1)...(100): n = a,t,c or g
attccacactnnatgggtcatttcacacacgangncaaggctgttatcacatgcctgtggggnanngtgaatgtggtagntgctncaggngnntncctgg

SEQ ID NO: 26047 - DNA, 435 bp, Homo sapiens
  misc_feature (1)...(435): n = a,t,c or g
gtgcattgttaannnnnnnnnnnnnnnnnnnnnnnnnnnnnnnnnnnnnnataaacacaganngttgggaaccatggataactangtganntcattttgtcactcacgatttgaattttctacangctatagagtgcantttggctaancgcaanacctatgtacantcaggactacacanntccanttcgctgtgggttgngaagggatgggtggggcagtgctggcaagccttgatcttngcccgggcttntncntctggggagaattanctgcttctgcgggacngagggtgccctcntctctggntagngcccgtngcggtctatggggacgnctcttctcgggtgcccanctaantccnttgantgtncnaccttgtcccnctgcnccncaggnggannttangnccgggacnccccccntcccnngggg

SEQ ID NO: 26048 - DNA, 432 bp, Homo sapiens
  misc_feature (1)...(432): n = a,t,c or g
gaactgggagaaaatattcacaaaacatatagtcaacaaaaatcttgtatccagagtatgtatangaaactgttaaaatgaaatactattgttacacaaaggtttcttagaccagacaccaacatntgnccataantgaaaaaaaaatttaanctncattaaantgaanaccttcnacccttaanggggatttgttnnnncaaattaaganntttagccacaagactggggaaaaagatatttgccnaatgcttatatgattaaagggcttancatataagntcaggtantangctttaaatcatcattctattcaggnatatangaaaaggtcctcaaaacagttatttnggaaaccccatnccaacnatngggcaaaanggnttngcaaaggacatttnccccnngggagggttttcnagantggccaag

SEQ ID NO: 26049 - DNA, 410 bp, Homo sapiens
  misc_feature (1)...(410): n = a,t,c or g
ggaagtaagcttatagcattaacttttaaattaatttaaagttgattttgtcaagtttttaaaataattaacttgataataatcatcaggttaaaaattcaagctctaaagacaaacgtatagatcccagctttgctgttcactaattgtataatcttagggaatgtactaaactgctgtttaagtttccgtatcggttaaatgcagatgataatagtacctctcatggcatttttgtgaggattgagatatcctgtaaaatcttctagctcaggacctgggacatatagtaattattcaataaatgttggccgggcgcagtggnnnnnnnnnnnnnnnnnnnnnnnnnnnnnnnnnnnnnnnnnnnnnnnnnnnnaaaatatgcattattttcttacaatgcctaaagg

SEQ ID NO: 26050 - DNA, 394 bp, Homo sapiens
  misc_feature (1)...(394): n = a,t,c or g
gcggcacgagtttttnnnnnnnnnnnnnnnnnnnnnnnnnnnnnnnnnnnnnnnnnnnnnnnnnnnnnnnnnnnnnnnnnnnnncaataactaataataaaacagantagagccaggtgcaannnnnnnnnnnnnnnnnnnnnnnnnnnnnnnnnnnnnnnnnnnnnnnnnnnnnnnnnnnnnnnnnttcaaaccancctggncaacatggcgagacctgcctctaaaaaaattttttttaattagcaggttacagtgccacatgcctgtataatgccagctactcagaaggctgtggtgggaagattatttganccatggaatatnaggctgcaaggagttatgatcatcatcatggnaattccntcctggncaacagagcaaggactctgtt

SEQ ID NO: 26051 - DNA, 399 bp, Homo sapiens
  misc_feature (1)...(399): n = a,t,c or g
gagactattcagtttgtcttatatcactccacctcttagatgattattattattatattannnnnnnnnnnnnnnnnnnnnnnnnnnnnnnnnnnnnnnnnnnnnnnnnnnnnnnnnnnnnnnnnnnnnnnnnnnnnnnnnnnnnnnnnnnnnnnnnnnnnnnnnnnnnnnnnnnnnnnnnnnnnnnnnnnnnnnntncnantnngtggnacaacgcctggtngnttttgnanntttanngtatnaangttncnccacnttggatcntgnngccttgttnattnccaacgtncggatgatngncccggctnatgccncannaacngtgancgcgcntgnanccngcgtnngcaccatccttncnnggacctntcagncntttngtncgttnngcncatc

SEQ ID NO: 26052 - DNA, 391 bp, Homo sapiens
  misc_feature (1)...(391): n = a,t,c or g
ggaatttaaagacagaaaccaaggtaggttttaaagctatactcagggaaagggaaagtcaaagtctattttctttgtgctaaaacgaatggaaatggtgcttcaggtggaaaaacacaatgaggaaagaggcatggaggtgaagaagtacacagtattatgacagtaagatgtatgttgggggaggaggcagaaacgaatggaaggaataggacggtgaagaaagggacattactgaagttgagcattggtatagtgagtagtaaataaaggtacaaaatattaggtctattctttaatagactgagaagtaccagcttgatctaattgaccaaaaaaaaaaaattgatttaaganaaancatttggcccnaaangacaanttggnatcc

SEQ ID NO: 26053 - DNA, 391 bp, Homo sapiens
gccttagagttcatattcatggtatctgtttcccaactctaagtctgtccttggatgctcctggaagcatatttcacataaataatagcaacagcagcagcagcaactaacacctattgagcatttactgtgggccaaacactgtttcagtgctctacacgtgtgtatttgatccttacaaccatcctatgaaggagatactattgtgaatggagaaactgggagcagagaagaaaaataacttgctcaatgtcacagctactaagcagtcaagctgagatgtagattctgactttagaatctgtattcttaagccctgtgatatctttcttttgaatagcaatatttgggaagaaaggatgcttcccaagtgatatggattagttcactg

SEQ ID NO: 26054 - DNA, 364 bp, Homo sapiens
  misc_feature (1)...(364): n = a,t,c or g
gcggcgtggggaggtaattactgaggcctggagagctaaggaaggtgcctgacccagcccgcgtggaggaaatcttggcagccttccaggaggaggtgacatctatgccaaaatanaaaagtgaannnnnnnnnnnnnnnnnnnnnnnnnnnnnnnnnnnnnnnnnnnnnnnnnnnnnnnnnnnnnnnnnnnnnnnnnnnnnnnnnnnnnnnnnnnnnnnnnnnnnnnnnnnnnnnnnnnnnnnnnnnnnnnnnnnnnnnnnnnnnnnnnnnnnnnnnnnnnnnnnnnnnnnnnnnnnnnnnnnnnnnnnnnnnnnnnnnnnnnnnnnnnnnnnnnnnnnnnnnnnnnnnnnnnntgacctgtt

SEQ ID NO: 26055 - DNA, 510 bp, Homo sapiens
  misc_feature (1)...(510): n = a,t,c or g
gtaaaaaggaaacgcaagtctctgtccccaccctggaatcttggagctgaatgaccccctgcaggagctgtttgggccaggacttggggggggtggctgcaactcaggctgccananggcaaattgangggganangatgnngcaccaactgtgtanaccttcccaggagttangntgtgcaggggatagtgcacanaagggctctggcancaagcacaggtgtagactcgggatgggagccacctgaacangttgcaaactcctggccaatagattggtggggccggcgcgctgtcagtcgcctcctgtctcatattggnatactcganctcagtgccatggtgtgaggcccaggntaatcangactacnncctcacctcccanctttcaatgccctctggccctccttattggtgcccaccctcctangcttgtgncncctctcaaaggcccttggnactgncagntcctctgagtccctnggcctccntganaanggggccttaata

SEQ ID NO: 26056 - DNA, 366 bp, Homo sapiens
  misc_feature (1)...(366): n = a,t,c or g
nnnnnnnnnnnnnnnnnnnnnnnnnnnnnnnnnnnnnnnnnnnnnnnnnnnnnnnnnnnnnnnnnnnnnnnnnnnnnnnnnnnnnnnnnnnnnnnnnnnnnnnnnnnnnnnnnnnnnnnaattgtatgattgctgggctccttggcacttgcaagaggtacttgccaagacctggggaaagccctggatttgngaactcaacagatagcttgtgntgtccccaggnatgcgcagtcatcaagtaaaactgaagcattaacgatcacgagaatcagctcagcacgggaaagacgtcactttaggaggcatctcttcaccttcatgcctatcancagctctagcagaanggccatgtttcagaaggga

SEQ ID NO: 26057 - DNA, 367 bp, Homo sapiens
  misc_feature (1)...(367): n = a,t,c or g
ggagatggactttcactcagtcacctaggggctgggtgcagtggtgcgatctccgctcactgcagccttcagctcgttgtagnnnnnnnnnnnnnnnnnnnnnnnnnnnnnnnnnnnnnnnnnnnnnnnnnnnnnnnnnnnnnnnnnnnnnnnnnnnnnnnnnnnnnnnnnnnnnnnnnnnnnnnnnnnnnnnnncaattgttatctttatgtaaacataagagggagaacagaactgtgaaaagaacatgagatttggcatcaaaagaagtatattcaagtcctggcccaatgtgacctgnactgncttcncctaacaagttttttcanttgattacancaagtanaagtacctgtctcacagggg

SEQ ID NO: 26058 - DNA, 372 bp, Homo sapiens
  misc_feature (1)...(372): n = a,t,c or g
gctccccctcacacatgcgcacncacacacacatatacacacactcttctccacccccattttcccggctggccttctgacagcttaaaatttaaccagtacaaacattatgccttaaggctaggcccacgtttacgtgcaaatgccccacaaggggtaacacaaaatttctgcctctgtggaaataatttatcaaccaacatgctctctaacaaatggcagggggtggcaccagggtgcanggccctggctgaccccaggaagcagacccagatgctaaagcgcaagacccancantggggttgtnggcacgaagggactggagacagtancanangtgatgaggccagaggcttantgactcacaccatc

SEQ ID NO: 26059 - DNA, 365 bp, Homo sapiens
  misc_feature (1)...(365): n = a,t,c or g
gctggaggagagcttgtgggagccaaggagcaccttggnnnnnnnnnnnnnnnnnnnnnnnnnnnnnnnnnnnnnnnnnnnnnnnnnnnnnnnnnnnnnnnnnnnnnnnnnnnnnnnnnnnnnnnnnnnnnnnnnnnnnnnnnnnnnnnnnnnnnnnnnnnnnnnnnnnnnnnnnnnnnnnnnnnnnnnnnnnnnnnnnnnnnnnnnnnnnnnnnnnnnnnnnnnnnnnnnnnnnnnnnnnnnnnnnnnnnnnnnnnnnnnnnnnnnnnnnnnnnnnnnnnnnnnnnnnnnnnnnnnnnnnnnnnnnnattaaanttttcaanacntanancnacggtcnggacccaattaanntncaaaattat

SEQ ID NO: 26060 - DNA, 406 bp, Homo sapiens
  misc_feature (1)...(406): n = a,t,c or g
gcggcacgagcaggactcagcggctgttaaaccatcaggactcagcaattatttcatgtggagacaagtgatggcaaagccaaaaggccacgggtgttgagctgttgacgagaaactgaaagtgccattgtgtttatacaggaagctgccattagtagggatttgaaaaagcaagaggagaggatgagtttagtggggagttcttacacttcaggtgctagtggataccaccaagtcaatattgagtagcaggaaaccagggcctgatgttccgtcaggccatcagggcgganacattgtggagaggaagttttgaggctgtgagattaggagagaagcatggagtgtagagcaggaactaggcctctctttacccaaaatccaaaaccccacttatgccagacac

SEQ ID NO: 26061 - DNA, 403 bp, Homo sapiens
gcaagttggatgattacagattgtgatgaatgccgagaaaatgaaaatgagcaatgaggtagactaggagggggatgagtagactttagcagagagatgagggatagcctctccaaggaggtgacatgtgacttgaagcctgagccatgaggcagtctgagtgaacagtagtatttcaggcagaggaaacagcaggtgcaaaggcctgaagtcatgcatcagtcagcttttgtgtaggaaaacactctgacctcagtggcttaaaccaaataattgtttataattcatgtgtctgtgggtcagtggatccaggctgggccctacgccatgtgcctgtagggtgattggtaggtagcagaggtatcccagcccactgacaggcaatttcccattggcatcaggt

SEQ ID NO: 26062 - DNA, 410 bp, Homo sapiens
gggatttttttcaaattttctacaatatatatgctttattcttagaatttaaaaaaattgaaaattcctcaaaaagttcctgctagggtaggaatttcctcaggaaccaccagcgccttcaaacctgtttccaccccagcttttacttgttatgaccacagctgtggtcttctcttggccaagggccatgttgtggatggttcaggacacattccccagtgtgctgtccctgactctgctagacactgctatttggaagagcccagctttttccagagagtgggcctctgacagggatggaagtaccctgccttgaggttctctccacttggcccagggctctgggaaccatcccacctatctgcacaccaagcagggcctctgccagggtatggtcctggccatggccc

SEQ ID NO: 26063 - DNA, 483 bp, Homo sapiens
  misc_feature (1)...(483): n = a,t,c or g
ggcccantctntgaggnncntacgaattgntaacgactcangnccccggaatttggcccaangaggccaannnnnnnnnnnnnnnnnnnnnnnnnnnnnnnnnnnnnnnnnnnnnnnnnnnnnnnnnnnnnnnnnnnnnnnnnnnnnnnnnnnnnnnnnnnnnnnnnnnnnnnnnnnnnnnnnnnnnnnnnnnnnnnnnnnnnnnnnnnnnnnnnnnnnnnnnnnnnnnnnnnnnnnnnnnnnnnnnnnnnnnnnnnnnnnnnnnnnnnnnnnnnnnnnnnnnnnnnnnnnnnnnnnnnnnnnnnnnnnnnnnnnnnnnnnnnnnnnnnnnnnnnnnnnnnnnnnnnnnnnnnnnnnnnnnnnnnnnnnnnnnnnnnnnnnnnnnnnnnnnnnnnnnnnnnnnnnnnnnnnnnnnnnnnnnnnnnnnnnnntgacnagnacggcggtttttgaatactacgggtattaaaccgttcnggcccg

SEQ ID NO: 26064 - DNA, 393 bp, Homo sapiens
ggagagaggaatgcactcaaagggaattgaaatgtaccgtttgtgtctgcttccaagattttaagccctagcaaaatgcctgtgtgtggacactgctgtacacttctgtacaacttgaagctgactcctcagactgataaagctgactgttgtcaagtctacattggaaaagagaaaaagttacacttaccaacataaagtggacctgtgtataccactaggtttttcagcatggttaaaatagatgctggcctgacatccaacttcagtctcattatccttggaaatgtcttttgatattctctgcattatgcaaaaaatgataattgacctgttctttcagggcaaacatattttgattggaaagagttggggaggattcagaacaaatga

SEQ ID NO: 26065 - DNA, 592 bp, Homo sapiens
  misc_feature (1)...(592): n = a,t,c or g
nnnnnnnnnnnnnnnnnnnnnnnnnnnnnnnnnnnnnnnnnnnnnnnnnnnnnnnnnnnnnnnnggtacgagaaagatctgaaatctgaactgtcatgaaactttganaagacantcttggctctgatgaagaccccantcctcnttgacatttatgagataaaggaagccancaagggggttggnactgangaancctgcctgantganatcctcgcttcccgcancantgancacatccnagaantaaacanagcctacaaagcatanttcanaaagaccctggaagangccattcnanncgacacntcagggcacttccancggctcctcanctctctctctcanggaanncatgatgntaagcacanncgtgaacatgtcnntcnctccatagganatgcccagnnaggctntanncgggcnggngaggnncagcctntcgnnaancgngnngattccccgnncccntcngcancnnggcggngacngggaggncgngngcnagggncctnntngngtnnncnngtcgntcntccnnncangcccncggcggntncgcgnggcnccnncngggncngtgacctngagc

SEQ ID NO: 26066 - DNA, 506 bp, Homo sapiens
  misc_feature (1)...(506): n = a,t,c or g
gccctgctgccaanaatgcaagaancattgtaaaactgttaaatttttagagaatctatggtaaagaaaagacaaaagctaagctatccctgggatgagactcctactttaagataaaaatgatttctgggacaattagggggtctgttatgcaattatacctcantgtgacttagttcanccaaactggttcttcctcatgctaagctgaaccanggttgcagagaggtaaatgatcctgantatgaantggcttgtactatcaggcanactcaagtggaaaaacactggtgacctgcanaaaattgcatcaggcantgcactatgggttacaattgtagaagccaatgccatgtgggtgttcaccaactatttctcntgcctcctgaagcacacaggngagctacctttcccnggtcccctcangtctaangaggggaccaaggggactggttctacccantagcctatgggnggaaggnctgggccanttgctatncntggcg

SEQ ID NO: 26067 - DNA, 411 bp, Homo sapiens
  misc_feature (1)...(411): n = a,t,c or g
ggttagtacaagtaacgcccaggtttcggaggctgaacacagtcaggtgtgtttctcattcatatctgactccgttgcaactcagggacttggcagaggccaaagatgatgccaggatgcctcctttcactcatgtctttagggcctcactatcctccactggattctccgtgggaggctcggggacaggcctggaactggcgaacgtcatttccacccacaatccattagccagcacccggtcccaggaggccacttgactgcgggggaggctgggaatcataggcttagctgtgtgcccataaatgcagactgccagggaaccctcccttacaacgactcatgttactgatggagaaccaggcacaagaggcaaagtganttccccggggccacacatggagtaagcga

SEQ ID NO: 26068 - DNA, 392 bp, Homo sapiens
gcataaagtaaaggacataatgggaaagtttggagagaattaaaactttccagttatttgagtgttattctattttgtcctaaaagattgtatttggttagtcttatcaaacatctaagaataccaaatcattcactaggagttgaagatacaaaaaggttaatactcatgggcctgtattctagttgctcaccatgtaataggaaagaaacatataaacttctcttccacttaggaaaaaagtctaaatgatgtatgtaatggaggtatgcatatcttggaaggacattttttaagtttacaaaaactaattttgtcatctgatcatacttaccacagagttgcgatagaacagacttagaatagactgtcaaaaacatatttctgtgtgg

SEQ ID NO: 26069 - DNA, 403 bp, Homo sapiens
  misc_feature (1)...(403): n = a,t,c or g
gtttttaaagtattcaagatactaccagtcaacatctttttggaagaaaatgccttgggtttagaagattttcttaaaaggggagtagatggttgtagattgactaaaaagtctaccatacttcaagggactacagggacataatgaaagcatcacattagtagaatgaggggacagctgagcagacaccagaaaccacaccaaggattctactcgagatctcaatatgggattcaggtcttagcaaccaaaatctgaaaacgctcctaaaggggatgaaaaggtaacataatnnnnnnnnnnnnnnnnnnnnnnnnnnnnnnnnnnnnnnnnnnncccatgaattgctattatttcggactgcttaaaatccaaaagattctcttcaaattgctcgtttttt

SEQ ID NO: 26070 - DNA, 390 bp, Homo sapiens
  misc_feature (1)...(390): n = a,t,c or g
ggaaattgtcccatcacacacccatcatattcaaaacttcagttagctctcctactggacgtntttccantgnaaagaatttanaacaaatcccccctaaatttantttacattctttcacagtntgaaaganctgttgaaaacaaattttcttcngttgggaatatgttaagatttgggatcnaacaggctaaggaccattttgaaggcccacttgtaattgtcantgntttataaaatatcagatctatacagggggaaaccactggntangagaaanctgtttgagaaccatgtntaaactaatcnaaaggggnttttttnggnttctacaataaaattcgttttgcncnttantgtcggtcgccccccntgtattanggaaggaaa

SEQ ID NO: 26071 - DNA, 647 bp, Homo sapiens
  misc_feature (1)...(647): n = a,t,c or g
gtgggcatgacatactacatgaccactggcagaaatcccttatatacaattatgcaaaatagctgaagcacttattaatttanataaancatttaagcccttactgtctgtggaaagttgtcataggacacactcctatgaaatccaccactgtccctttgaagccttatgagaaatgtttcttttaaaacagttgcaaatttaaacacttccagagtgttgcacccaaacccccagagctatagtggtttgggtgcaagtacatgttggtattcagactattgtgaatcggaaagcacatttgtgcattcgccatctaaatgagattcagtcaacaaatacttactgatggtcagatatttatttactatttgtcacgcatttttttcaaanncaagatnttacaatttagagcacaaatttaagctttggcttaatgtggaaagaagtactgcttggcncaaacaaaataagtctgtgaaacngtcagttttgccatttgccaanttaanaantnaattacctacggaaaatttcaacntcaagagatgtcnacaantcctaagtaantaaaagctgtgtntgtntgtntgtggcgnnctgtgtgtgcgagtgcagttgggtgntgagnanngncnccctgggcg

SEQ ID NO: 26072 - DNA, 652 bp, Homo sapiens
  misc_feature (1)...(652): n = a,t,c or g
ggggatacaataaggtagggccaggctatggccctggggagggggctccggagcaggagaaatccaggggtggctacagcagcggcttccgagacagtgtccctatccagggtatcacgctggaggaagtgagtgagatcattggccgagacctgagtggcttccctgcacctcctggagaagagcctcctgcctgaaccacgtgaactgtcatcacctggcaaccccagccccagcctcagccctgccccctttccctccttcctggagtggtggctacagaagcttggggccaaccctggctcctctttccccagcttctgtctgtctcactgtcttccctcccctcccccagctgangtgtggccctcaagcctggtgctgccttggagggctgggggaangantgtgtggnggagggaaggagggtgaaagactgaggctaggtgccagaatggactggattgaanggcttgtccaaaagtgtggggctggctgttgtgctggnaanctggggacaggttnatgggtaataaactggctcaaatgnccaattngnaaaaannnnnnnnnnnnnnannnncttttnttttanngngccnnaatttntnccccttttnngggggggttnnttttncctttggccccgggc

SEQ ID NO: 26073 - DNA, 716 bp, Homo sapiens
  misc_feature (1)...(716): n = a,t,c or g
gactcttcacaacactgcctagttcttgtgtagatacactataagcattaagacaatttatccttactgtacaagactatggagtgtagatgtggtagacctaattctgagatggccttcagaatcccatccgttggtgtccatgccctgcccattaagtgtgggcaaaacctaaggtttgcttctacccggtagaatatgacaaaggtgaagggattttgcagctataattaaagtgtcatgtcagttgattttgagtaaatcaaaagggagattatcctgggtgagcctgacttaattaggtgaaagcccttaaaaaaggaactgggcccttctggaggcaatagactgttcttgaagacttgctgaagttantggctcttttgggagaancctacatatcaanggaaatatgacagcctccggaactgcaaagcagcctcctggtatccaaaggccccaacaaaaaagccagaagccctcagtcacaagagctcaagaaaatggaattcnaccgtcaacctgaatganccttgggaantggattaatccccaatcaaagcctccaagacnttaacccaatcctgggctgaancccttaagttacaagccttatgagacattgccaagganaattgggttttanacgttaananccaattccgttacaagaatatactgcaaaganagnnatcanttttccaagggagttgtgc

SEQ ID NO: 26074 - DNA, 711 bp, Homo sapiens
  misc_feature (1)...(711): n = a,t,c or g
agacagaatacagttgagaactacagaaacgccagtgtgctggcacaaggtcagggacggggagagtggtttgagggagcagcaggggaagaggtcatgtagggtcttttaagccagattcagaagtttggtttctttcaagaacagtgggtagtttaaagggtttagagccctggtgtggactggagagagtacaggagaagcccagagaccattttggctgcttcattatcatgtgagagatgattttcgcttacattagggtggtgacagtgcagatagaagnnnnnnnnnnnnnnnnnnnnnnnnnnnnnnnnnnnnnnnnnnnnnnnnnnnnnnnnnnnnnnnnnnnnnnnnnnnnnnnnnnnnnnnnnnnnnnnnnnnnnnnnnngtnggcaaagattcccgtctccacaaaattacaaaatatagcctggtgttggtggccccgccccctgtgggccccaacctgccttgggaagggctgaggtgggaanaaacccttgagccgaggaattcnacgnntgcaatgaanctganatcacaccactacactccaancctgggttgacanaaccanaccctngtcnncaaggaanaaaatnccnnnnnngctcnanaaaaaggtcttttnttaaaccgngcnaaanttnnccccttanggggggcaattttacntgggacacgggccncctttaaanncccgggggg

SEQ ID NO: 26075 - DNA, 667 bp, Homo sapiens
  misc_feature (1)...(667): n = a,t,c or g
gcggcacgagctgatacacatggtatgataatgacctcgtgataaacccctatagtttactaatatttttatgcagcatagtgggcattgtggtaatcttctaaacatgcattctaccccatcagcaacctctggtttgagtgggattggccctacttatagttctaggatggagtctaattaagttaaactgatcaggatttcaatatggatcacacattgatgggatctgatagctcaggcccaagccaaccagaacaaggtattccctagacacggagatggttgcagtagttgggattctcgtccagtaactgcgggacaggacacagttgtcttctatgggttgtgaatgagaaaacagagaccccctaattgctgccagcagccatccaacaaccacaaggagagtccagccttaaaacaaagctgacacaagaggacaacaaaagttggagcaactggatccaaggacaccatcaaagccgctgggtcaaacttctccaaagcccaacctaactttgggacttccaattaantttcaacacaagttcnccctggttaaancagtttngantnggntgggtttgttacttcaactggaaaggtacctacaatcacaatgtgaccttggaanccccttcattacgngtaatgataagntatg

SEQ ID NO: 26076 - DNA, 676 bp, Homo sapiens
  misc_feature (1)...(676): n = a,t,c or g
gnnnnnnnnnnnnnnnnnnnnnnnnnnnnnnnnnnnnnnnnnnnnnnnnnnnnnnnnnnnnnnnnnnntgtnnnnnnnnnnnnnnnnnnnnnnnnnnnnnnnnnnnnnnnnnnnnnnnnnnnnnnnnnnnnnnnnnnnnnnnnnnnnnnnnnnnnnnnnnnnnnnnnnnnnnnnnnnnnnnnnnnnnnnnnnnnnnnnnnnnnnnnnnnnnnnnnnnnnnnnnnnnnnnnnnnnnnnnnnnnnnnnnnnnnnnnnnnnnnnnnnnnnnnnnnnnnnnnnnnnnnnnnnnnnnnnnnnnnnnnnnnnnnnnnnnnnnnnnnnnnnnnnnnnnnnnnnnnnnnnnnnnnnnnnnnnnnnnnnnnnnnnnnnnnnnnnnnnnnnnnnnnnnnnnnnnnnnnnnnnnnnnnnnnnnnnnnnnnnnnnnnnnnnnnnnnnnnnnnnnnngcaatggggnaactacatttatgaaaatgtggcacatatncaccaatgggatactatggcagccataanccgaaatgagttcagtcccttgtnggggacatgggtntaagcctgggaaacctcantccaagnaaacctaattacaagggncnganaaccantccctgcanggtccncaccttgtagggtggganttaaacanntttnacacatgggcccaagggcnagggaa

SEQ ID NO: 26077 - DNA, 661 bp, Homo sapiens
  misc_feature (1)...(661): n = a,t,c or g
gagggacttgcatatctatgtgtgtgggcacacgtatatcctattgtttttacttgtaaaaatcttttattnnnnnnnnnnnnnnnnnnnnnnnnnnnnnnnnnnnnnnnnnnnnnnnnnnnnnnnnnnnnnnnnnnnnnnnnnnnnnnnnnnnnnnnnnnnnnnnnnnnnnnnnnnnnnnnnnnnnnnngaaacaattgttttaaattggctgggcatggtggtccgtgcctgtagnnnnnnnnnnnnnnnnnnnnnnnnnnnnnnnnnnnnnnnnnnnnnnnnngctgactggactagtaaaaatattaatattttaaggaatgtggttggagagctgcctttacacttactttggaagatttctttaggtttggttatatttttctgaaaaacagtgaatgctatactaaaactgctattantgatttaaaaaaatgctaanttgagcccgggtgttgtgcccaccctgtaatcccacactttggaaggtcaaggtgggtgggattncctaaccccaggggttcaagaccaaccctgggctanaatggggaatccccatctccaccaaaattccaaaaaatttacccggggcctgttatccctgggnnacccaggaagcttaaggccaaggaatttctttancccagggaaaaaggtt

SEQ ID NO: 26078 - DNA, 678 bp, Homo sapiens
  misc_feature (1)...(678): n = a,t,c or g
gaggtgttgaagccccatggcctttgattatgtatgaactttttttcagccagtctccctatttgagaacacttgagttgcttctagtcttttgctattatgaatagttgtgtaattgacatatactgctacgttaatcattccataattttgcctgtgtgactgtgatggatgcctgaaagcccccttcctcccttttaaaaacagcttcatgatattccagagagtggctgaaacataattattgaagcaggccttttgtgatgtattgagtgcctactatgtgccggactctgtgcctgatattcctcagagctgtgtttttaaaagtttactctnnnnnnnnnnnnnnnnnnnnnnnnnnnnnnnnnnnnnnnnnnnnnnnnnnnnnnnnnnnnnnnnnnnnnnnnnnnnnnnnnnnnnnnnnnnnnnnnnnnnnnnnnnnnnnnnnnnnnnnnnnnnnnnnnnnnnnnnattanctgggcaatgggggcatgtgncccgtaatcccaatttacnttgggaaggctaaggcaaggngaaatcacttgaacctgggaanggaaaaaggttgcattnanctganatcgcacaacaaaactccaaacctnggggtgacaaagcaaagantcaaccccaaaaaaanaaaaaaaaaaagntctttnatttagngggccc

SEQ ID NO: 26079 - DNA, 676 bp, Homo sapiens
  misc_feature (1)...(676): n = a,t,c or g
gggtttataactgtacacacttgcaaaagggaagcatttttnnnnnnnnnnnnnnnnnnnnnnnnnnnnnnnnnnnnnnnnnnnnnnnnnnnnnnnnnnnnnnnnnnnnnnnnnnnnnnnnnnnnnnnnnnnnnnnnnnnnnnnnnnnnnnnnnnngctctcaaaaaaaaaaagggggggnaaggaaaancaattanggggcagcggaancnaggtgaacacataaaanaaaatgccnatgtaaantcggtatgtcaaanngggtgataccacctgaatgcttcangcncagcaaatcatttgatttaanggtttggcccacaanacatgtcttttgattgaaaacttataataggacatttcattgggctggcaanttacaggancnctttggaaatgtttaatttcngcatgtcccttaaaggctgtccccttnantncccngcctcnttggggaatgtgnnccaacaattgtgaccantttccnccnttaatncaananttttcaaccnagnaaanngttttcctnaaggnggngnttaaaaaccccaaannttccttgccaattttnccanngaagaanaatccccccanttttccaaaaanttgaaaacantttccttgggggagcccttnaaggcnctggtttcaattagggagggttaaaaaccctttc

SEQ ID NO: 26080 - DNA, 406 bp, Homo sapiens
  misc_feature (1)...(406): n = a,t,c or g
nnnnnnnnnnnnnnnnnnnnnnnnnnnnnnnnnnnnnnnnnnnnnnnnnnnnnnnnnnnnnnnnnnnnnnnnnnnnnnnnnnnnnnnnnnnnnnnnnnnnnnnnnnnnnnnnnnnnnnnnnnnnnnnnnnnnnnnnnnnnnnnnnnnnnnnnggcgagagccaccgcgcccagcctgaagtcactgtcttccttcaggctatgcctctgggtaaaagtcaatgcctcattgctctgggactctcctttgctgagcgctagcttgaaactccagatcctaacctgtaaggcaggggaatggcccagcaggagccactaccacctggtgctgtgagtgtcagacgctttttagcatgtgagaagttcaatgcnggggctaanggctgactttgattgtcgaaaacaac

SEQ ID NO: 26081 - DNA, 404 bp, Homo sapiens
  misc_feature (1)...(404): n = a,t,c or g
gtcaataccctgattctaagataaaagtcaaaattagaaaaaaaaaaaaacnanaaaaantgatttanctattcaatancctggcaaaataatggaaaaaaanttaaagaanacnatcncctcaatanataattaatcaatacacacactgtnttttaaaatatgcctcaaganaaaaaccatanacncactgaaanaaaataaatggtttccanaaaagganaatncaattaataaatttcnanaganantaagattaaaaaatncannttattaatatcgggaataaaactagaangtngaccnacaatttctncagccactannaaatntattnncggnanngncantgaananttctacacttanngaantttggncaatttangtgaancganccaatt

SEQ ID NO: 26082 - DNA, 392 bp, Homo sapiens
ggtatggagttgatgttgactgattttgcttttttctgtttcctctgagtttttgtcgtcgtttttaaaaatttgcaatagagacattaaggaagataattggtttgtaatttacatttctgatttattacagtcttctttctaaatttacatagaatttgagttatttttagtttctttttaaaatagattcccaagaatatcagttaggaattcctttggttgcaggttcacagaacccagtttacaatacattaaacaaatagaggtttatttttcttccgtaacaagaagggttcttctgttgagtgactccaccagatacccagagtgcttgcctcttcccacctgaatgttggctcttgctgcctcatagttataaggtgccccca

SEQ ID NO: 26083 - DNA, 397 bp, Homo sapiens
  misc_feature (1)...(397): n = a,t,c or g
ggaatttttagggacctaaaacaccataatatgactcttttctttggagaagccaaacacaaggctgcatccctgatagttttaggggatgtcttcttatcacnnnnnnnnnnnnnnnnnnnnnnnnnnnnnnnnnnnnnnnnnnnnnnnnnnnnnnnnnnnnnnnnnnnnnnnnnnnnnnnnnnnnnnnnnnnnnnnnnnnnnnnnnnnnnnnnnnnnnnnnnnnnnnnnnnnnnnnnnnnnnnnnnnnnnnnnnnnnnnnnnnnnnnnnnnnnnnnnnnnnnnnnnnnnnnnnnnnnnnnnnnnnnnnnnnnnnnnnnnnnnnnnnnnnnnnnnnnnnnnnnnnnnnnnnnnnnnnnnnnnnnnnnnnnnnnnnnnnnnnnnnnnnnnnnnnnnn

SEQ ID NO: 26084 - DNA, 402 bp, Homo sapiens
gcctgctacagtgtctgattgagggtctcagtgctgaacccagagtggcttcaaatgtgtgctgggctttctccagtctggctgaagctgcttatgaagctgcagacgttgctgatgatcaggaagaaccagctacttactgcttatcttcttcatttgaactcatagttcagaagctcctagagactacagacagacctgatggacaccagaacaacctgaggagttctgcatatgaatctctgatggaaattgtgaaaaacagtgccaaggattgttatcctgctgtccagaaaacgactttggtcatcatggaacgactgcaacaggttcttcagatggagtcacatatccaagagcacatccgatagaatccagttcaatgaccttcatcctttactc

SEQ ID NO: 26085 - DNA, 401 bp, Homo sapiens
  misc_feature (1)...(401): n = a,t,c or g
gaccctggatttcctgacactggaattttctattaatttccaggttttccatttcatttataaaagggtgtgtgaagtgcattctacctgcgtggagacatctctaatggctgcagatgaagtcctgcctccctggctattctccaccactgtagagaatggccacagttcacctggaatgtcttttttctaactggctagtctcatagaaaggcatttactgctcacacagactgctcctcctggctagtactgtggacccttcattcacaccagtgattgcagtggggtgttgacttctctgtcttacccactaggtggtaagttctgggagggcagtgatcgggctggcacagagagagcattcaacaaatattaattgagagaagaaaaggncagaa

SEQ ID NO: 26086 - DNA, 382 bp, Homo sapiens
  misc_feature (1)...(382): n = a,t,c or g
ggagaaacttactaccgatcatgagaaagataaattgaagaagcaattttttacccccaaagttctgcaggactacagaaaactcaagaacacagcangagcaattcttgtcccgaagtggctactccgaagtgaatctgagcaaactcttcgctggttgtgccgtgaaatcctaagggaatcccaggagtaaccaaggagggggtagttgaaaaatcccagcttcctctgtgcctccactctggccctaaatgctcctccagcatctgtttctcccttgggactgtgtctcatgtttgtgtgaatgtacaccaggaaanggggctgcaaaaatgttgagtctaatgttcgtaagcatcatagaaattcctgtcttcatatt

SEQ ID NO: 26087 - DNA, 378 bp, Homo sapiens
  misc_feature (1)...(378): n = a,t,c or g
aaatggtaggtcaaacgttaatcgcctgcccttggacttccaggccattaccattttgtaccactgtgtcagctctttccagatgactgaccctctctgctctgcacatccactactaatgatttnaatcaccattgnnntcatnttgacntanacatgggtcttanattatagacttgcaaataggactccccttcanctttangtgtatagctcgaanctttcattgcagtattctantcacatgtgatanggtactggtcnanctcaacttttcttgtcgttccacagtattcacaggcctccactgggctctcagtaatgtgggatttgncagcanttcccaatggcnngatannanccantgctccctccttt

SEQ ID NO: 26088 - DNA, 370 bp, Homo sapiens
  misc_feature (1)...(370): n = a,t,c or g
gggaagaattaatttatttggaacatacgatggtttctcttatttgcttagtatatttcttgtatgaaattgtgtctgttttttttttattttgtattttgctgtccagcttttatnatccanttacttacctgcatttcanaagtatngttctttaanagtanggcancatgaaatctttgtatttgtttttaaancngcngancangtaagacaaaccancttttattttcntgaaaatanaccattgaaagcngtgaagtcttttccanacttcnanaaantgtcananttatgcaancctctccgctttgtgattaantggtataaccnacaggccnaggtttggaaatgcnccaataangggggg

SEQ ID NO: 26089 - DNA, 377 bp, Homo sapiens
  misc_feature (1)...(377): n = a,t,c or g
nnnnnnnnnnnnnnnnnnnnnnnnnnnnnnnnnnnnnnnnnnnnnnnnnnnnnnnnnnnnnnnnnnnnnnnnnnnnnnnnnnnnnnnnnnnnnnnnnnnnnnnnnnnnnnnnnnnnnnnnnnnnnnnnnnnnnnnnnnnnnnnnnnnnnnnnnnnnnnnnnnnnnnnnnnnnnnnnnnnnnnnnnnnnnnnnnnnnnnnnnnnnnctggagtacagtggtatgatcctaatatgtnnnnnnnnnnnnnnnnnnnnnnnnnnnnnnnnnnnnnnnnnnnnnnnnnnnnnnnnnnnnnnnnnnnnnnnnnnnnnnnnnntctggctaaatttttttttaagagatgagttctgactatcttgcccgggctggtgttgaa

SEQ ID NO: 26090 - DNA, 373 bp, Homo sapiens
  misc_feature (1)...(373): n = a,t,c or g
ggaatcgcgctcggcttcttcctctgtgctgagtcatgaaagttgccggagcaggtgcagttacacaacctccaggtatgatcctgtttaaggactggatttaggataactacttanagtttaaaagtcacaagggtgtatggatgaggctggagtgatctgggaccaaagacatctaggcttgctgtcaaggcttctgatcaacatgagatgaccgccgtgtggtaaactgatgaaccccgacnctgatcaacatgagatgaccgccgtgtggtaaactgatgaaccctgaccctgatcaacatgagatgaccgccgtgtggtaaactgatgaaccccgaccctgatgaacgtgagatgaccgccgtgtggg

SEQ ID NO: 26091 - DNA, 449 bp, Homo sapiens
  misc_feature (1)...(449): n = a,t,c or g
atnnnnnnnnnnnnnnnnnnnnnnnnnnnnnnnnnnnnnnnnnnnnnnnnnnnnnnnnnnnnnnnnnnngcacaaggtttcagaaacaccataggaagtgaatattacctcttgctataggtgactttgtgaatacttcaaactgtaaaatcacaactttcaggaaatgtgataaatttantgggaaaaaaatttaatgcacgccttgcaaaggcttctttgagggtagcacaggaggaagtgccaatatagtgtgtttgtcttttgctctgcaattctgcaggtactggatcatgatgtttcaaaggaagaaccagtcacctttcacttcttggccaaattttatcctganaatgctgaanaggagctggttcaggagatcacacaacatttattcttcttacaggtacatcaagtcaaggctaccccccagttctgagagaacttgc

SEQ ID NO: 26092 - DNA, 436 bp, Homo sapiens
  misc_feature (1)...(436): n = a,t,c or g
nnnnnnnnnnnnnnnnnnnnnnnnnnnnnnnnnnnnnnnnnnnnnnnnnnnnnnnnnnnnnnnnnnggcangagtcgggctagtgcaagcccttggtgcccatctctancatgaatgtctttgcgtgtgtgcgacagccttctcagggccccacctttggnataaaaggtggngctgcangaggcggctactcncangtcattcctatggaagagtttantctccacctcanangtganatcnatgncatcactgnagctaataacctcnttgctgnggccattgatgctcggatatttcatgaactgggccaaaaaanaaaaggttcnctttaatcgtttggtgccatcagtaaatggantgagaaggttctctgacatccanatccgacagttaaaganactaggcattgaataagactgaccctaccacactg

SEQ ID NO: 26093 - DNA, 397 bp, Homo sapiens
ggggataattctttattatgatttatcagcatatagagttcatttacttttgaacccaaaaaggctccaatctgacctaccttgctgctctgggaaggaacctgggacctagacggccacacagcaggcaccaacacctgcacatgtgtgctgagctgccttgaatggaccatgtgtgcagtttaacccctggaatgatgaggagacactggtggttgtattccttctgcttcacgctgaagctacggagcctcagcaaggaagtaactcgcccagggcctgagtcctagacccagactgcctgaccttgaggccgatgtgtttcccacctcgctacatcgggagccagccctgcggctgaggccttcatgttgcatccggcagtgccttaccctgt

SEQ ID NO: 26094 - DNA, 394 bp, Homo sapiens
  misc_feature (1)...(394): n = a,t,c or g
gagaagacatgtattactatgccaagttttaaaaaatattttgataatgactttaatattattgggttttatagtaatcctaattattgtatacattttatgcttacctggcttctaaactgttttgcctgtttttacatttcatttaaatggaatcatacattgtatactctttgatttctaagtttctttcagcattgttaatgagattcatctaagttcctgcctatagttgtgtcttgtagaatttggaaaagcatgacaagtgacgttaaattaattcctcttgtatgataccttgccctatgttgagaactgctactttaaagttgattaagtggnaattttctgtttttgatatancctgaataaatactttcatangtcctgcatg

SEQ ID NO: 26095 - DNA, 415 bp, Homo sapiens
  misc_feature (1)...(415): n = a,t,c or g
gttgcagttgtctggctagccaagccatcctgctgggtatactgctcaaaagagaaggccccaacttcatcacaaaggaaggtaccgtttctgatcacattgagagagtctatagaagagctggcagccaaaaactttggtcggttgtacgccgtgcagcaagtcttttaagtaaagtagtggacagcctggccccatccattactaatgttttagtgcagggcaaacaggtaactctgggtgcctttgggcatgaagaagaagttatctctaatcctttgtctccaagagtgattcaaaacatcatctattataagtgtaacacccatgatgagagggaagcggtcattcagcaagaactggtcatccataattggcnggatcatctccaataaccctgagttattcagtggca

SEQ ID NO: 26096 - DNA, 417 bp, Homo sapiens
  misc_feature (1)...(417): n = a,t,c or g
gnnnnnnnnnnnnnnnnnnnnnnnnnnnnnnnnnnnnnnnnnnnnnnnnnnnnnnnnnnnnnnnnnnnnnnnnnnnnnnnnnnnnnnnnnnnnnnnnnnnnnnnnnnnnnnnnnnnnnnnnnnnnnnncttaccattaggagggcagttagttgagagagatatgtttattattctgtgatagctaggataattatctgtgatgctagaataaatatatttcctggtagacattaaggcaagtctgtagaaattctaataatctagagctcttattttcccacctgagaataatatgttatctgacctctaaactatatacagtgaaaaagttgggggggaatgtnaaagaattactatgggatgatgtattcatgggtaaangtanggagtgggtaatgaagtatttcacttaacc

SEQ ID NO: 26097 - DNA, 419 bp, Homo sapiens
  misc_feature (1)...(419): n = a,t,c or g
gnnnnnnnnnnnnnnnnnnnnnnnnnnnnnnnnnnnnnnnnnnnnnnnnnnnnnnnnnnnnnnnnnnnnnnnnnnnnnnnnnnnnnnnnnnnnnnnnnnnnnnnnnnnnnnnnnnnnnnnnnnnnnnnnnnnnnnnnnnnnnnnnnnnnnnnnnnnnnnnnnnnnnnnnnnnnnnnnnnnnnnnnnnnnnnnnnnnnnnnnnnnnnnnnnnnnnnnnnnnnnnnnnnnnnnnnnnnnnnnnnnnnnnnnnnnnnnnnnnnnnnnnnnnnnnnnnnnnnnnnnnnnnnnnnnnnnnnnnnnnnnatcacacacaaaaaaagtcaggccgggtgcagttatcagcactctgggaggctgangtgggagaactgcttaagcacgagttcaacaccaacccgggcaacatagtgagaccacat

SEQ ID NO: 26098 - DNA, 403 bp, Homo sapiens
gatccttaagacatggatggaaaccactggaagaggaaatctatacccaatacctttgagaaattgttaagctacattattggttctctaagaaatagcagtttatagatgacattttagaaaagcaagctcctatcttaccagaggcttacacaggggtgactctgcaaatacatgtaaacaaagtggaattggtgtgagtttgttttaattccaacagctgatgatgctaagtagaaacctagtgaaacaacccttaataaataaaaagcaatagtttgttcccccagtttaattcagtaaatattaagtattaataacatgtgatgggaatagtatctgaaattctcagcctgtggtctgggccttgctcttagaggaagaagatgcctcctcttccaag

SEQ ID NO: 26099 - DNA, 420 bp, Homo sapiens
  misc_feature (1)...(420): n = a,t,c or g
gagagaactaatgatagggagatgtcaatgaagaatgaggagggcctacgtttgtcttcaagattggacgggtgcgggtgagggccactgagtaccttcacgtcgtactcatgctctctagggacagccaagttctgattaaacccaggagtgtgaggaacgttcagaggtttgtttttcatgaaacagagtgccagangtctcngtggaaggaggtggagacagagagggaaggggttggagatagggttggtggaagaagaaacctgcctgaagaaatggtagtctgagggagcatgtgttgccagggtgaatggaggacgtgcctgacatgagagaggacttcctctttctgctggtgccaaactgcnacatncctccatgttctttgtggcaanggagggntaattttgtgccaac

SEQ ID NO: 26100 - DNA, 396 bp, Homo sapiens
  misc_feature (1)...(396): n = a,t,c or g
gaacaaaaaaaaaacagatccaaagcctgagcanttantantgtacaggaagttcagggtttcactggggaagtcanccccatttgcactgctaataggaagcaaattcttggacancttttgaggagggaatctaaaccccaggcncccaaattaggccattanatcctggaagggctttctcaaattanccccttatattcttcacantttaaggtcaaccanctatggacttaaaatcanngatcananaatgcacgagggaanaaaccactgtaagtgaaaaatanaaactagattgacctcctagggactttagttattaaaattaccataaaggacaanatttgaaaggtttaaggaaataaagggatganaaaattccaanaagggacg

SEQ ID NO: 26101 - DNA, 466 bp, Homo sapiens
  misc_feature (1)...(466): n = a,t,c or g
ttgatctnnnccggnacccanacgananatnaacnggccgggccnaggaatttaagccaacnaggccaatcaattcngcacnaggtttctagagaagtccaaacttagtttacttattcctcttctttattattatttccatcattaaaaatatgatccttatcttagtttctgctgctgtgnnnnnnnnnnnnnnnnnnnnnnnnnnnnnnnnnnnnnaccattttggaggcaggaagtccaagatcaaggtgccagaagatctggtgtctagtgacagcctgcttcctggttcataggcancaatttacctgctgtgtcctcaagtggcagagagtatagagcgacgagagagagcaanctctcaagtctctttttgtaagggcactaatcccattcatganggcttcactctcataaccttattaccttcnaaagcccttacgtcctaannntantaaattgg

SEQ ID NO: 26102 - DNA, 389 bp, Homo sapiens
  misc_feature (1)...(389): n = a,t,c or g
gcggcacgagctggctcatcacccttttctaaaacaaactaaaatcacagacttttatttctgtattattttttatttgtctctctcctctatttgcttcttatttttatgcaccttttaccttgtccaccaattaaggacatacatccgtcccatagggcatangaacaagacgtggtcctttttgttaangaggttggagtttggtgagagacctaatcatcatgaggaatgctacttgcaaagcatcaangcataatgactaattgtttagtctctcaaattaaagtaactgggtggaatctctctgcttagctgaatgtgtgcatgaccttagattctttgcttgtatctctaggtctcagtctcctgtgagtaccangaggaaa

SEQ ID NO: 26103 - DNA, 369 bp, Homo sapiens
  misc_feature (1)...(369): n = a,t,c or g
gagcactgcagcctggccagcctggcactaccccaccacaggacgcagcccaggacccaaacctgagccccggcccttccccagcagtggctcggtgagccatgtgcacctatggcccagccactgcagcacaggaggctccgtgagcccttggttcctccccgaaaacccccagcattacgatcccccaagtgtcctggaccctggcctaaagaatcccacccccacttcatgcccactgccgatgcccaatccaggcccggtgaggccaaggtttcccagtgagcctctgcgcctctccactgtttcatgagcccaaacaccctcctggcacaacgctctaccctgcagcttggnnaactccgctgg

SEQ ID NO: 26104 - DNA, 369 bp, Homo sapiens
  misc_feature (1)...(369): n = a,t,c or g
gagagcacaaggttaaaaatattcccggcccacatgtggcttttgaactttgcatgcagctaatctgaattgagatgcgctgtgtcagttatgcaccagatgccaaagacagtgtgaaaaattacaatgtaacatatatcattaatttttaccttcattatatttggagtgatattattttggatatactgggttaaatcaaacannnnnnnnnnnnnnnnnnnnnnnnnnnnnntaatatggctactagaaatatatttatttattttttgaggctaggacatcactgtcacctaggctggagtgcggtggtacattcacaagnttcttgcagccttggtctcccaaggctcaagtagtcctcccatt

SEQ ID NO: 26105 - DNA, 355 bp, Homo sapiens
  misc_feature (1)...(355): n = a,t,c or g
gcttgaaaatatgaatatcccgcctggaaatgatggtattgctgtgagttttattattactagtaatatttataaggctttacaacttataaaatgctttcctataaattacctcatttgattcttgtggcttgcttttcttttttatacccaaagagaactagtatgcactttttcttttgttctcctggcaattccaattttttgaacatgaatgagnnnnnnnnnnnnnnnnnnnnnnnnnnnnnnnnnnnnnnnnnnnnnnnnnnnnnnnnnnnnnnnnnnnnnnnnnnnnnnnnnnnnnnnnnnnnnnnnnnnnnnnnnnnnnnnnnnnnnnnnnnnnnnnnnnnnnnnn

SEQ ID NO: 26106 - DNA, 633 bp, Homo sapiens
  misc_feature (1)...(633): n = a,t,c or g
gtgnnnnnnnnnnnnnnnnnnnnnnnnnnnnnnnnnnnnnnnnnnnnnnnnnnnnnnnnnnnnnnnnnnnnnnnnnnnnnnnnnnnttgcttaagaatcaaaacccnnnnnnnnnnnnnnnnnnnnnnnnnnnnnnnnnnnnnnnnnnnnnnnnnnnnnnnnnnnnnnnnnnnnnnnnnnnnnnnnnnnnnnnnnnnnnnnnnnnnnnnnnnnnnnnnnnnnnnnnnnnnnnnnnnnnnnnnnnnnnnnnnnnnnnnnnnnnnnnnnnnnnnnnnnnnnnnnnnnnnnnnnnnnnnnnnnnnnnnnnnnnnnnnnnnnnnnnnnnnnnnnnnnnnnnnnnnnnnnnnnnnnnnnnnnnnnnnnnnnnnnnnnnnnngactctgtctcaaaacaaaacanaaaaatcaaaacccatttgccataaaagcagagatgccatananganganggcctccgtnangggaangtgcattcattaaaacagctgtnggaaaaagccagtnnnnnnnnnnnnnnnnnnnnnnnnnnnnnnnnnnnnnccctcactcctagcaagancctanggtcttcncaagngtntnccactggantccaccttgggcaacaagngcaanacccgtccccaagaaaaa

SEQ ID NO: 26107 - DNA, 628 bp, Homo sapiens
  misc_feature (1)...(628): n = a,t,c or g
ggattaaagctatggcagctgcatgagacatgatgcgggtggcacatgcctcttgctgagcatctatttctgatctcttttgcattctggagccagggctgagcagtgggccatctgtcgctggaaaaatgtctcttccttcctaggcctacctctgttggtgcttttgtcttccaacctccctatgtagtaagaccagccaagcccacatgcccactgggagccctgaaaccagatctggttttctgtcttacctgaacaggttcccagaacccacaccaggcctctgaatcagtctctgagaatctgattgatttaaagccacttggttgcttccattgcactacctgggttgcgatcccctcaattgatttagtaaaaagaaaacttagnnnnnnnnnnnnnnnnnnnnnnnnnnnnnnnnnnnnnnnnnnnnnnnnnnnnnnnnnnnnnnnnnnnnnnnnnnnnnnnnnnnnnnnnnnnnnnnnnnnnnnnnnnnnnnnnnnnnnnnnnnnnnnnnnnnnnnnnccgggcgtnatgggcgcaagcctgtaatccaagctacttggaggctaaggaagagaatncctnaacctgggaaancngaggttntggtganccgagacat

SEQ ID NO: 26108 - DNA, 629 bp, Homo sapiens
  misc_feature (1)...(629): n = a,t,c or g
agttttttttttttaatgataatacccantgctgggacggacataatgaaacaggcaatcncanatgttcnaatancaatgtaaacaatgaattccttttggaacgttattaggcaantggtatgtgtcaaanaccanaaagatatcnggaaattaaccctgaanaaanaatttcngctttananaaaatgctgtattcatgaanatattggcccttgcaccacttgtaanggngaaaaattggctacngcttaaatcncnaaatacgaaaaaggctaaatgaattatagtacatccatttcatgcagtattcngtanctattaaacatcanggttaatatcanccatgtattaacatggaaaaaataaaaagttcnctttatttagcctttcagcattaaaggacctgaaacggtccctgccctgtgaanaaaattacttaaataagaagccacttggaatacattgtacttgtaacnanttttgaaattanaanagttttgtgangggggggggataangggcttttttttncccnttcccnagttncaaaattcctttangggggttannccccnggttccnnacnnngggaaanaaantttttttaatcgncaanccccattttg

SEQ ID NO: 26109 - DNA, 641 bp, Homo sapiens
  misc_feature (1)...(641): n = a,t,c or g
ggtgaaatagaagggataatccaattatattttctttanaatcctgttgtttatctcattcctttctgattctgaagagtacctaacttctgaataacttatnactaactgaaattattcaggacttatgaactaaanaacatatgtttaatttaaatacnttanccanatctancttttgnctgttagaaaatatttttaggttttacaaatttatcttggnaccatgangtcatttattttaccacactaaaatattcangggtcaaagatttaattttttaatttttnttaanagttgntntgtttgaatccagctcnaanagntgtcacatttttattttagtggcgtgtttacntanccncttgggcgcttttcangggcnatatcccncagtttcctgggagtcaggcacatnncggccactagtcttgccnangacttntnantnanggtttccctntnggaccngntnnnctggantntgncgaatgggccngncnnttacnaagngagnnccncagatnttagncncaaagggcgtggtntttcgnaagctggntaanggngggcacnctgccgcnnggnnnncaccannnntggantcaangntctgnccctgnnnnggcnanacccaacc

SEQ ID NO: 26110 - DNA, 639 bp, Homo sapiens
  misc_feature (1)...(639): n = a,t,c or g
gggcagctctctatgtccttgtagtagcatagaagatggtgttcttctcagatcagtggactatgccatgttattttgttcttggactaaggccctgtgaggtgcaactggtccactttcatttttggtcagagatggagaataaggaattatatgttggtactaccactggaatatgttactttgccagagtctctggtgttgacctcctggcccatggcagcctctttacacagacccaaggcctctgctgtctaatggcatgcttatgtccatttccggacatgggactcccaggtccattgctgccatgtgcgggtcatagggaaacacagtgtttgccacagtctcatccacctctttcctctcaataatgtcattggcccatcctcccaaccaaactagaaagtagcntctaagagtcttctagaatcctgcagtctcatgcaaggtatctccatataagagttncncanntaactgtgtnctgggaaaaccnntaccnnaganggcnnctgngcctnngaactgggagttncncantncagtgnggtnnnnanangtgccncnnnncncaagggggccttacagtcnantnncttggggnangttctnncnngngnntnnnccgnnnttttg

SEQ ID NO: 26111 - DNA, 615 bp, Homo sapiens
  misc_feature (1)...(615): n = a,t,c or g
gcaaacctataaatgccacatgaatggatttaggaaataaaggaacaacattctgatataaatattaagaaggtgaccagaaaatatcagaaaaaaaaatgggcaaaatgagggaaaatagcaaaggaactggtgaaactgtcaaacatgaattcnatacacactgggtatctgttttgttttcttttctttttgctattggcctgtttttgatgtgatggttggtggggcggggggggccgggggagtgttcaatgtttggcatcggctggatgattgcctcatcaaanaaggcttcctcaacaattctgagaacagagataaacattcctggtatcataataaaacaataagataataaataaataagctgaaaccaatcatgtnacctgtaatattaagaaagcaaggtaaggctgggtgcantggntcacacctgtcttcctangaccctgggangctgaggcangtggtcacctgagggcaggagttcangacanccttggccatcatggnaacccccatttttncnnaantcaancanttcccnggnntangggtaggtactgtatcccaanntncccangngcttaggttcnnanttnnnnncccctg

SEQ ID NO: 26112 - DNA, 401 bp, Homo sapiens
  misc_feature (1)...(401): n = a,t,c or g
nnnnnnnnnnnnnnnnnnnnnnnnnnnnnnnnnnnnnnnnnnnnnnnnnnnnnnnnnnnnnnnnnnnnnnnnnnnnnnnnnnnnnnnnnnnnnnnnnnnnnnnnnnagcccgaaanaatanctttttaaatattganttactaattaaagnngttggaaacaaccgattcaantanaaanctttgngattanatgcnatttttttcnccaaaagaanagctctttctttnnagctttttacatnaantctctacanatcaatcnagctctcctttcacgtcanntcccaangnccgctncngcccccttangtngaantngtnccgggcaatagttttangnnntttcctggctaacaccanncgcacatactctccnagcgccaagggagtanngaggta

SEQ ID NO: 26113 - DNA, 460 bp, Homo sapiens
  misc_feature (1)...(460): n = a,t,c or g
actctatgagcnnnnnnnnnnnnnnnnnnnnnnnnnnnnnnnnnnnnnnnnnnnnnnnnnnnnnnnnnggnacnagaanaactttangacctctaaatatttacagacnacttgganattctggnccatatatattttaaaagaanaaccagtantttaaagaataaacagcacagacataaggatcaatggtgctcactggggatgtaanggcatcngtaatgttgcgttttgtgatctggtttctggcttcatggatgtttattttaatatcattattgtatctcacagccactgttcacacacatgttaaatatgtatttatttatggaatggttcatattataaatatgcaatagtctggcaaaaaacaatccatagtttctaatttagcaaantgaaaacagancaacgtccaaaagaaatgggaaaagtttcttggngacagcggcctttgatt

SEQ ID NO: 26114 - DNA, 391 bp, Homo sapiens
  misc_feature (1)...(391): n = a,t,c or g
ggagagaaagctgccggagccggagagccggggcgtggtcatcgtggctgtgattgtgtgcatcctggtcctggcggtgctgggcgctgtcctctatttcctctataagaagggcaagctgccgtgcaggcgctcagggaagcaggagatcacgctgcccccgtctcgtaagagcgaacttgtagttgaagttaagtcagataagctcccagaagagatgggcctcctgcagggcagcagcggtgacaagagggctccgggagaccanggagagaaatacatcgatctgaggcattangccccgaatcacttcagntcccttccctgccctgggaccattcccaactccctgctcantcttctctcaagcnaaaggcctccaaagggacta

SEQ ID NO: 26115 - DNA, 379 bp, Homo sapiens
  misc_feature (1)...(379): n = a,t,c or g
ggaaaaccactctccatgtggctaanagtgttttgaacaacagacatatagtgaagatgctggaaaaatacctcaaggtttgtgcttgcaagtaccacagacaggaaaagctttcaaaagggaagatgaaccccaggagcagggagttgaatccagagtgcagcatttagcatttctgagtcttttgacagttgagggacactggnatgcatcaagctcaggaacatgacaactgggatttctaatgagtcaatgcttgcctggggactctggggatgtggcgctgcttgattaatcagtgcgtaatggatttttaccatgaaaaatcctgattgtttagccttaaaattctgagcaaatgatggttaggtgatttttt

SEQ ID NO: 26116 - DNA, 364 bp, Homo sapiens
  misc_feature (1)...(364): n = a,t,c or g
ggcaagttcttcaccaggagagcaatgcatgacttctttaggtagtgacaccaagtcctcagagaaatatagcagcagctggggcagccctgcagcaacttgggaattgaagtagcacctgagaaactggggaagccagcagtatgtatgacagtcccatcataaggcaactcagctctcccctcaggttggtgtgtcctaggggaattcctgttagatgatgtgccaatacacaccagcatgctttttgctaaaaggcagattctgcagtctaccatttttccatcatatgtctcagaagaatntgggcaattgtatgtgatgtggcttgttctacagatagtcctanagcnggagtccctca

SEQ ID NO: 26117 - DNA, 362 bp, Homo sapiens
  misc_feature (1)...(362): n = a,t,c or g
gcggcacgagaggaaatgagttggaaatgaggaaataacagtaattacagaaatggatttaaaaaattgatgatttgaatcccannnnnnnnnnnnnnnnnnnnnnnnnnnnnnnnnnnnnnnnnnnnnnnnnnnnnnnnnnnnnnnnnnnnnnnnnnnnnnnnnnnnnnnnnnnnnnnnacccccatctctttaaaaaaaaaaaatcagtantattggtaacttaganatatnaaaantttcaaaagtacacanaancantatataangaaccttccangtacccctttcccagctttagcaattatgaacaccctgcnattcttgttncctttatttctaccatttaaagttttattttt

SEQ ID NO: 26118 - DNA, 362 bp, Homo sapiens
  misc_feature (1)...(362): n = a,t,c or g
ggggatgtgttcaggtcttcaacagtgagttcgttccatcaatttcttctatttcagcccattttcactctttacattttgcanctgtgttgtcatgtttataggtccatgattgctaccttttcatagtgcattantgcttttatcaatattgaagataagtgttgctaccataaccctgttctactactgttattcatnattgcacaaccttgatcaanctcaatccaatcaaatattcatttctcttanccttatgtctctcatcttcatcaaacaaaccaaggcaacagcaacaacatcaaactaatgcatctaagcatctaagtcatgggttaatgtgctctcatttggctcacaat

SEQ ID NO: 26119 - DNA, 362 bp, Homo sapiens
gaaaagagggagcaaaaagagatgtaattcctttgtgacatttccagtccatgggtaggacaagcagatcagtccaataattacccaaagacatgtaaaattgcaactctgatgatcaaacaaggttatacataccagcacatacttagcactcaatacatgtgagctcttgttagaaatattacacaataagtccttttctgctgacaaatctaaatgaaataaaacattactcccatttatttaacacagatttgaggagctgctgtgagtcttcagctgtgtggtaagattacatgtctactgggggcactcacagcttaattaggaagaaagacaaagaaaccaatcatagtccagtg

SEQ ID NO: 26120 - DNA, 359 bp, Homo sapiens
  misc_feature (1)...(359): n = a,t,c or g
gctattttttccttatttatttataggggtactttgtgttttctgaatgctaattctttgccactgatatatattgtgaatgtcttatctcactttgaatttcttatgaatagcagctcaattaaaattatcaatcttttatagtttctgttttatgtttcatatttgtgaatttcctttttactctaagaacataaagattttctcatatatactctcttaaatgtttcataagttatgtctttaagcctcctcaaattgatttttttggtatggtgtgaggtagaatctgtngtaatntgtgntatttgntcacagttcnttctntccttccagccagtgccaggaatcactntggg

SEQ ID NO: 26121 - DNA, 359 bp, Homo sapiens
gaatgtagtttagtatttattattccacttagatgaacaagtatgaataaaaacttaaaaggtgccagtggttatcatgactgtattttcagaattgaaaatagaaaaaaagggcaattggacaaaggacatttgtatttaataagagtagctatcatttattgagtacttatatgctaggcattatactaagtgctttatacatgattcatttctcatagcaacgatttgaagatataattatagctctatcctataaaaatgcagagtctaattcccattcccttgacttttggcaaggcttggtgactcactattgaatagaatgcagtgacagttatacagcgtgatttcccagg

SEQ ID NO: 26122 - DNA, 356 bp, Homo sapiens
  misc_feature (1)...(356): n = a,t,c or g
gattcttgtctataaagacccgtatgcttggttttcatgtgatgacagagaaaacannacactgcagatatccttcaggacctgacaggaagaaacatttcggnttatctggtgaagacgtatgtgcagatcatagccaaaaggtgactttttactaaacttggcccctgccgtattattactaattagaggaattaaagacctacaantaacagactgaaacagtgggggaaatgccagattatggcctgattctgtctattggaagtttaggatattatcccaagctananaagatgacgagagggactgtgaacattcacttgtcagcttcaaggctgaggcagcctggtcta

SEQ ID NO: 26123 - DNA, 492 bp, Homo sapiens
gggaactccaaagaattcttgagcttatccctgtgttagactattgtagagttgtcagcgcagataattttgtaagcatgtttttcattgggtcagcatcagcataagtttaacccatgataattcttttgttatgaggcactttcataagaaatttctgaataatggcatttttgtggttctttaaataaatatggttaatgaatcctgagtgttagcatcagtctaaaggccagcacctggaagggaagttaatctgcagaaagattagctgacagtaaccatatagtctccattgtgactggtgagttaagcagaaaatcttgtccattgacaataccctcctctcaccaatagctggtgtttccaccaaatgtctcaagctcctacccttttgttatttgtgttaactgcctcaaaagcagtccttcaccctgactttttgggaggtacccacaccactgtttaccagctctacctggtcaagtgttt

SEQ ID NO: 26124 - DNA, 514 bp, Homo sapiens
  misc_feature (1)...(514): n = a,t,c or g
gnnnnnnnnnnnnnnnnnnnnnnnnnnnnnnnnnnnnnnnnnnnnnnnnnnnnnnnnnnnnnnnnnnnnnnnnnnnnnnnnnnnnnnnnnnnnnnnnnnnnnnnnnnnnnnnnnnnnnnnnnnnnnnnnnnnnnnnnnnnnnnnnnnnnnnnnnnnnnnnnnnnnnnnnnnnnnnnnnnnnnnnnnnnnnnnnnnnnnnnnnnnnnnnnnnnnnnnnnnnnnnnnnnnnnnnnnnnnnnngnnnnnnnnnnnnnnnnnnnnnnnnnnnnnnnnnnnnnnnnnnnnnnnnnnnnnnnnnnnnnnnnnnnnnnnnnnnnnnnnnnnnnnnnnnnnnnnnnnnnnnnnnnnnnnnnnnnnnnnnnnnnnnnnnnnnnnnnnnnnnnnngacngnangcatnctagtcacaggccctatannccnctcctacatnttttaccaccncacaanggangctcaactcacncaccnccatttnncannataanaacccctnaattcacganggggnaaaag

SEQ ID NO: 26125 - DNA, 517 bp, Homo sapiens
  misc_feature (1)...(517): n = a,t,c or g
ggtagaaggggaaatggagtggagtgaattagggtgggcagttganaacttggngaacatttgagaanaaagctgggccatggccaagggatgttctgtcactcttggcctgtgggaancatgtggnatgttanaagcattagaatgcgaattatagtgcatctagacctgcccaacccatatacaaagtcttgggtcagacagttaatantattaatcaagcaccaatcagaagcacaaatactgcacaggtaagcaacacctggaaacctcaatagatagactcataaccggagcggtcaatatgaagggatacttccttaagcagagttttgctcaagcatgctgatatctgttgtcacaagtacaactcctgaagaccacgaaaatgttaattgccaacatgcaaaaactgttncccttctataactggtgaangtttgaagaaaaagggatgttacctaaaaaatgggcnggtcaagggcccccaanangcaaatttatangnggggggcgg

SEQ ID NO: 26126 - DNA, 506 bp, Homo sapiens
gctggggtctaggattcaggcaagtcttccgaaagagccacttggtttggtgaaggaaaaggcatactctaggcagaagaatgtgacaacacaaaggccaggcctttccaagcttgatcaaagccaagactggggagaagtgacactggcagaggccagctcagtgaattggaggctggaatcagggagacctatgagaaccaacacaacagctaggtgtaagcaggcaagctcatgaatgagcataacagaaatctccaatgcctaggaggccaggccatttctacaatgagtgaagcaggcctgatgggtactatggcaaaccacagggcacatgccccagctaaagaggggcagccgctgctcaagtccagccaactgtagccaaatgtaaaatgcaagcaaaggatgccaaatctgctttgtcgagataagcaggaaatcccaattttgatgggatgtctcccaagttttaaatgttcacagctaatttatttcattaaaaa

SEQ ID NO: 26127 - DNA, 508 bp, Homo sapiens
  misc_feature (1)...(508): n = a,t,c or g
gggtttttctttattttgatggatggaattcttaaagaaccctttagctaacatttattgagcatttactacatgctagctagtcatagtacatgcatttcatttaatcctcagcaatccagtgaggttgggattatccctggtttacagatgaagaacactgaaaacagtcattaccttggggagtcagtatgcataccagcctctgtgacttaaacctgtgtactttatcattatgctaaagatattgacaaatacaagacatcctctttannnnnnnnnnnnnnnnnnnnnnnnnnnnnnnnnnnnnnnnnnnnaaagggatgttaaataactgatccagtcacatgcaaagccattgatagatgaggatatggcaagaagtagactagttggtaattaactaangagaaaatccataagtattacgggnaaggcactccagaaggggaacaaatttgcatattatnaattagactcctgggagaaattgtaaacccttcagttt

SEQ ID NO: 26128 - DNA, 504 bp, Homo sapiens
  misc_feature (1)...(504): n = a,t,c or g
gttccaagtctaatccttctattttataattattaaaatgagcttagacagattaagtgtcttgctcaatgctgtacaactacataggagctaaatgggattctaggactacttttgtttaattctatgttctttataatataaagaggtctggaagcagctatcaaggattccaagacctgggagaattggtgtgttggagcaggatacaaagcttgggacttaggtataagagaaggttatgctaccttatataatactcagtcttagaaaatcagagctagagatttttcttgagggcttgaagaaataagcggccattttggagaagcccacatggcaaactataggtagcttctaagaaactctangcaacctctagaaactgagggtggcttccatctgacagccagcaaaaagctggggctctcagttatacactgcaagcatatgaattctgcccacagtctgaaggagcttgggaanaggattttttccccactt

SEQ ID NO: 26129 - DNA, 355 bp, Homo sapiens
  misc_feature (1)...(355): n = a,t,c or g
gctggaagaannnnnnnnnnnnnnnnnnnnnnnnnnnnnnnnnnnnnnnnnnnnnnnnnnnnnnnnnnnnnnnnnnnnnnnnnnnnnnnnnnnnnnnnnnnnaanggncagngncaggctacacttncccctcactnnggggnannngcttgcggtngcttnnntcantcttccagctcgngncgntnttcttggactcgggggcaagcancnntntcgggcgccgcaancaccccncnanccangcgcttctgtnctccngcnntcngcagtaaacccctttgcntnnccccncgggcnactcctccannaatcctgcnncttgncgctncnggatttntgngccttgtntttt

SEQ ID NO: 26130 - DNA, 372 bp, Homo sapiens
  misc_feature (1)...(372): n = a,t,c or g
nnnnnnnnnnnnnnnnnnnnnnnnnnnnnnnnnnnnnnnnnnnnnnnnnnnnnnnnnnnnnnnnnnnnnnnnnnnnnnnnnnnnnnnnnnnnnnnnnnnnnnnnnnnnnnnnnnnnnnnnnnnnnnnnnnnnnnnnnnnnnnnnnnnnnnnnnnnnnnnnnnnnnnnnnnnnnnnnnnnnnnnnnnnnnnnnnnnnnnnnnnnnnnnnnnnnnnnnnnnnnnnnnnnnnnnnnnnnnnnnnnnnnnnnnnnnnnnnnnnnnnnnnnnnnnnnnnnnnnnnnnnnnnnnnnnntgaagtttcccnacccncnccaggnaanncccttcaggttcatgngnncccattcngaccccccntncaaggagccattc

SEQ ID NO: 26131 - DNA, 386 bp, Homo sapiens
  misc_feature (1)...(386): n = a,t,c or g
ggcattttgatgtangggaggtatccattcacaaaatgaatgtgggtgaagccgccctaaggattttcctttaatttctctggagtaatactgtaccatacnggtctttgcttttagtaatannacatcaaattaggtttggagggaactttgctcttcntaagaattaaagttgccanattattctnattggtctttaatctcctntaagtcnttgncatatataacttgttagnnaatgaaacgcantagntgactgccnttttccnttcnagtcncattgccccaccccattcccatcgtccaaccctanccttccatttcctccncgcnantcnccantgnntcaatgggtgcancgaggannnatgccangtcnntaccta

SEQ ID NO: 26132 - DNA, 542 bp, Homo sapiens
  misc_feature (1)...(542): n = a,t,c or g
gctttgccgatttctctcacctcacctttcaaacctaaactcgagcctgctgttcaccggcctagcattgctctcgccatggctctcagcgatgctgacgtgcaaaagcagataaagcatatgatggctttcattgaacaagaagccaatgagaaagcagaagaaatagatgcaaaggcagaagaagagttcaacatagagaaaggtcggcttgtgcanacccaaagactaaagattatggaatattatgagaagaaagagaaacagattgaagcagcagacgaaaattcatgatgtccaatttgatgcatcaagcggagactcanagtcctcagagcaagagatgaccttatcacagacctactaaatgaatgcaanncagagactcangnanggtggtaataaggatncnaccagggtaccangtgctgctgggaagggatgggntcctccatgggnnttgtaccaagttgctgggaagccccgantngnttgttcnttgcanggaacgaacganttccctccgngtnaagggntgcatg

SEQ ID NO: 26133 - DNA, 497 bp, Homo sapiens
  misc_feature (1)...(497): n = a,t,c or g
gttannnnnnnnnnnnnnnnnnnnnnnnnnnnnnnnnnnnnnnnnnnnnnnnnnnnnnnnnnnnnnnnnnnnnnnnnnnnnnnnnnnnnnnnnnnnnnnnnnnnnnnnnnnnnnnnnnnnnnnnnnnnnnnnnnnnnnnnnnnnnnnnnnnnnnnnnnnnnnnnnnnnnnnnnnnnnnnnnnnnnnnnnnnnnnnnnnnnnnnnnnnnnnnnnnnnnnnnnnnnnnnnnnnnnnnnnnnnnnnnnnnnnnnnnnnnnnnnnnnnnnnnnnnnnnnnnnnnnnnnnnnnnnnnnnnnnnnnnnnnnnnnnnnnnnnnnnnnnnnnnnnnnnnnnnnnnnnnnnnnnnnnnnnnnnnnnnnnnnnnnnnnnnnnnnnnnnnnnnnnnnnnnggatgagccnctcaantangggggccctttgacaanaaccctcggnggaatcaanatccgcacanggagggcgatcctcctgcnncggggccanaanantttgggggg

SEQ ID NO: 26134 - DNA, 525 bp, Homo sapiens
  misc_feature (1)...(525): n = a,t,c or g
gatgagcttcaataccctgggatcatggtgtatatctatgttttactgtgggtctagttaaaaaaaaaaaaattgaaaatcananatgtagtanancacctttctttccaanaaaggtgaggtgacctgcccaaagtaattaancagtggtacacncanacattanaatttggatcngccncatttttaaacattctttcatcaacagaaaactcaacacagacatccagtgggatgaatttanaaacagaaccatatttganaaattaagggagccactgacacaaattcngcttttaactgtgcctttanaccaaatgccctttaaataggcccttgngatcccaaaactttttaattacaatancatgggacctgcanacanggggttacaagtganaacnggggcnttccaaggggttttncangggnaaacctttatcaaggcctgcaanaaancacatgacattttcanggccattnacannggaanggacacantcacanaaatcgngccanggggaa

SEQ ID NO: 26135 - DNA, 518 bp, Homo sapiens
  misc_feature (1)...(518): n = a,t,c or g
gcgggatcttgggggcctcggcgctgaccagggggactgggcgaccctccgttctgttgctgccggtgaggcgggagagcgccggggccgacacgcgccccactgtcagaccacggaatgatgtggcccacaagcagctctcagcttttggagagtatgtggctgaaatcttgcccaagtatgtccaacaagttcaggtgtcctgcttcaatgagttagaggtctgtatccatcctgatggcgtcatcccagtgctgactttcctcagggatcacaccaatgcacagttcaaatctctggttgacttgacagcagtggacgtcccaactcggcaaaaccgttttgagattgtctacaacctgttgtctctgcgcttcaactcacggatccgtgttaanacctacacanatnanctgaccccaattganntcggcggtcnccggtgtcaangnaaccaaactggtattgaaagggannattggggacatgtttggagccctctttgcnaagcnacctga

SEQ ID NO: 26136 - DNA, 543 bp, Homo sapiens
  misc_feature (1)...(543): n = a,t,c or g
gatgggattataggtgtgagccaccacacctggccctcaagttcttatttagggaaaatatatttacctgtaatggtgtaatctatatatccatttggttctcattcttcccctccaccctatacagaataaacatccctcctacaatccttcagatatgtgaagacaatcatcatgtcataactgttctataactgagccatcactaacaaagacttgtctcctaagcctatcagagccaggatgtttattcatccttgccactcagcaactgaaagatcctcatctctagagtagattggtggtggtacttctcagatgaaaagcctgtgatgtggntgtgttgtgttgntgagttactgctgaagacactagagccanagaggaaatcctaatcctagancccaggnangagccgcagatttgncttaagttggtggcaacagaggnangggncatgangntttnnctgcagcaagangcanngcaagnaacntncaatttggggcantggcaattcancnggncnngtnntttccaggt

SEQ ID NO: 26137 - DNA, 543 bp, Homo sapiens
  misc_feature (1)...(543): n = a,t,c or g
gaaacaattagccctatatttcagattatgaatattatgatgtttgttttgcaacattgagatttcctaccattacatgtcattaaaggctggttttatagaaaaggcaatgtctcttgataaacagaaattaagtggaaagcattatcgtaaaaagatacatgatagttaaataggaaaaattgaatgacttcagttttgaatttgttcgttaaccctgaaagaattgttgttgttatttttnnnnnnnnnnnnnnnnnnnnnnnnnnnnnnnnnnnnnnnnnnnnnnnnnnnnnnnnnnnnnnnnnnnnnnnnnnnnnnnnnnnnnnnnnnnnnnnnnnnnnnnnnnnnnnnnnnnnnnnnnnnnnnnnnnnnnnnnnnnnnnnnnnnnnnnnnnnnnnnnnnnnnnnnnnnnnnnnnnnnnnnnnnnnnnnnnnnnnnnnnnnnnnnnnnnnnnnnnnnnnnnnnnnnnnnnnnnnnnnnnnnnnnnnnnnnnnnnnnnnnnctaaagcggttctgaatgagaccaaacgcaggaaatta

SEQ ID NO: 26138 - DNA, 522 bp, Homo sapiens
  misc_feature (1)...(522): n = a,t,c or g
gggaagaaccttagagttcatctaatctatcagatgtgggaataatgatttagaatgaggcaagagaatgactgaatgaaagtgctaagagatagcatatgggtttgaattactggtgttttcaaaagctctgtgtgtaataaacatttatttannnnnnnnnnnnnnnnnnnnnnnnnnnnnnnnnnnnnnnnnnnnnnnnnnnnnnnnnnnnnnnnnnnnnnnnnnnnnnnnnnnnnnnnnnnnnnnnnnnnnnnnnnnnnnnnnnnnnnnnnnnnnnnnnnnnngttgtcaccgcgcccggctaatcttcgtanttttggnnnnnnnnnnnnnnnnnnnnnnnnnnnnnnnnnnnnnnnnnnnnnnnnnnnnnnnnnnnnnnnnnnnnnnnnnnnnnnnnnnnnnnnnnnnnnnnnnnnnnnnnnnnnnnnnnnnnnnnnnnnnnnnnnnnnctanncctaaaaanngacagnctaagaanctacnatnnnggtaatttccnnatgctagaatcatcat

SEQ ID NO: 26139 - DNA, 539 bp, Homo sapiens
  misc_feature (1)...(539): n = a,t,c or g
gcgaaaaacaaaaaacccnnnnnnnnnnnnnnnnnnnnnnnnnnnnnnnnnnnnnnnnnnnnnnnnnnnnnnncttaacaacaaagcacggggtagatgtagcatanttcgtgtttcttttttanttttatctagtttttttgaaatggagcctggngacatagcganactcngtctcaaaacaanagcananacaaaaaanaanaanccnnannnaaagaaaaangaaattttnggaaggntannnnnggttgcnganacntcnaaccncanaantttggnaggcanctnggggaggctcncttaannccnngnnttnaagnccaacctggggtcatgcanangancnccaccggcnnaaatgaaannttnngcgcatcgggggggcngcatggngaaaaggnccnacccaaggggggaggntcngncctngggggaggcttngcnggcnnggcccgaaccnccgncttntnnnnaggggggcnnacattncaccgggggcacagggngnanccntgnnatcanattgnagnttagca

SEQ ID NO: 26140 - DNA, 525 bp, Homo sapiens
  misc_feature (1)...(525): n = a,t,c or g
gaaaacagataaatgtgccctggtctaagttactcaaaggccatatcttcaccaggccagagattcagttttaaacctcagcagccatcagtttggccaagtggttggtaccaagtggaatgaagtctttgatgggtangagagagagggaaaacctcaaactacatcatanaagtangttaanaccactttaaattgttgacacaaagtggtaaggaagttttgtctgactcagcctgacaagcctggatanaaatggacctcanaatacacgaatggagtccttgagtgncagttggtgaggaccatggagtcctgcnagctcaacctgtcatttacagactaagaaagggaagtacacacctggcttgtggccaatctcctgcccctctctgggcnttcctcactgttctctcccttgantctcanttttaggaatcacgagactccnagtcatgggacntttaaatgntnatggcacntnnannngntccaaacgcaaaantttgggtgctcnacctgaga

SEQ ID NO: 26141 - DNA, 535 bp, Homo sapiens
  misc_feature (1)...(535): n = a,t,c or g
ggnnnnnnnnnnnnnnnnnnnnnnnnnnnnnnnnnnnnnnnnnnnnnnnnnnnnnnnnnnnnnnnnnnnnnnnnnnnnnnnnnnnnnnnnnnnnnnnnnnnnnnnnnnnnnnnnnnnnnnnnnnnnnnnnnnnnnnnnnnnnnnnnnnnnnnnnnnnnnnnnnnnnnnnnnnnnnnnnnnnnnnnnnnnnnnnnnnnnnnnnnnnnnnnnnnnnnnnnnnnnnnnnnnnnnnnnnnnnnnnnnnnnnnnnnnnnnnnnnnnnnnnnnnnnnnnnnnnnnnnnnnnnnnnnnnnnnnnnnnnnnnnnnnnnnnnnnnnnnnnnnnnnnnnnnnnnnnnnnnnnnnnnnnnnnnnnnnnnnnnnnnnnnnnnnnnnnnnnnnnnnnnnnnnnnnnnnnnnnnnnnnnnnnnnnnnnnnnnnnnnnnnnnnnnnnnnnnnnnnnnnnnnnnnnnnnnnnnnnnnnnnnnnnnnnnnnnnngaattttattgtcaagantgctatcagcattttgggcaaaagcaatcancacgtatcc

SEQ ID NO: 26142 - DNA, 199 bp, Homo sapiens
ggcttattccaggggtgtgtttcgtcgagatgcacacaagagtgaggttgctcatcggtttaaagatttgggagaagaaaatttcaaagccttggtgttgattgcctttgctcagtatcttcagcagtgtccatttgaagatcatgtaaaattagtgaatgaagtaactgaatttgcaaaaacatgtgttgctgatgag

SEQ ID NO: 26143 - DNA, 199 bp, Homo sapiens; identical to SEQ ID NO: 26142

SEQ ID NO: 26144 - DNA, 186 bp, Homo sapiens
  misc_feature (1)...(186): n = a,t,c or g
ggatttttcttctctggnaangtgnncatttgtagnatngntttcgnggntctggnaagatngcaaannatgccngncaangtgnngccancgggtaactcanggtcttcataaacgaannncttattcccgggaanngcntngtgtcnctcgtggnnnttnanccctccaccgtnaacccgctcg

SEQ ID NO: 26145 - DNA, 652 bp, Homo sapiens
  misc_feature (1)...(652): n = a,t,c or g
ggaangaaccctccacacanaangagagaccaaggcccactctgatttcatcttgagttgcctantgccttctccattggcatatctgccatctcatcccatagatcctttctccccaggtccacaccagtattcntgggccatganctaanaccccanatcacaagaatctctccccatgaatggcagtaaaacatttctcttaaatctagagactactgacctttcaagcttgaattcctgttctgttccaactattcatgattccctttgntctcctctgacctgtanaaagggaancacccaagtccatanccctatggncaaatctcaagctggggttaacttttttttancttattcatcgtctttcttattcacagactggattttctcacatgtaaagtgggccaataagccaggcgggccatctcnttcaagttanactnaacaanggccagggacacacnntgggttnnaatgattctaangctanggangggaaggnnccnantntccaaaatttccnaaggggggantaagggcccttttcctncgnnattngggncaaaaacggtggggttccaagggttaaaacngggggaacnggtttantcaaangnnnnctgnccaaggcantttanagcnaagg

SEQ ID NO: 26146 - DNA, 548 bp, Homo sapiens
  misc_feature (1)...(548): n = a,t,c or g
gnnnnnnnnnnnnnnnnnnnnnnnnnnnnnnnnnnnnnnnnnnnnnnnnnnnnnnnnnnnnnnnnnnnnnnnnnnnnnnnnnnnnnnnnnnnnnnnnnnnnnnnnnnnnnnnnnnnnnnnnnnnnnnnnnnnnnnnnnnnnnnnnnnnnnnnnnnnnnnnnnnnnnnnnnnnnnnnnnnnnnnnnnnnnnnnnnnnnnnnnnnnnnnnnnnnnnnnnnnnnnnnnnnnnnnnnnnnnnnnnnnnnnnnnnnnnnnnnnnnnnnnnnnnnnnnnnnnnnnnnnnnnnnnnnnnnnnnnnnnnnnnnnnnnnnnnnnnnnnnnnnnnnnnnnnnnnnnnnnnnnnnnnnnnnnnnnnnnnnnnnnnnnnnnnnnnnnnnnnnnnnnnnnnnnnnnnnnnnnnnnnnnnnnnnnnnnnnnnnnnnnnnnnnnnnnnnnncgttttgccaacatatgnngggtcaatcacnggttccctantcccaagncaanccctnaacaaanctnngccaaatccnatttatttcaaaattnaccggggtaactaattt

SEQ ID NO: 26147 - DNA, 528 bp, Homo sapiens
  misc_feature (1)...(528): n = a,t,c or g
gnnnnnnnnnnnnnnnnnnnnnnnnnnnnnnnnnnnnnnnnnnnnnnnnnnnnnnnnnnnnnnnnnnnnnnnnnnnnnnnnnnnnnnnnnnnnnnnnnnnnnnnnnnnnnnnnnnnnnnnnnnnnnnnnnnnnnnnnnnnnnnnnnnnnnnnnnnnnnnnnnnnnnnnnnnnnnnnnnnnnnnnnnnnnnnnnnnnnnnnnnnnnnnnnnnnnnnnnnnnnnnnnnnnnnnnnnnnnnnnnnnnnnnnnnnnnnnnnnnnnnnnnnnnnnnnnnnnnnnnnnnnnnnnnnnnnnnnnnnnnnnnnnnnnnnnnnnnnnnnnnnnnnnnnnnnnnnnnnnnnnnnnnnnnnnnnnnnnnnnnnnnnnnnnnnnnnnnnnnnnnnnnnnnnnnnnnnntaatcccaaggtanaccctanaccaaaacctangccaaaatccattnacaacanaatcaancggggttaatcnaaatttnttccaaaaaaantttnccgggctaacccggaatgccccangtttttccgggc

SEQ ID NO: 26148 - DNA, 134 bp, Homo sapiens
gacaaagatgatataatagagtggatttattccctgcaggtccttcccacagaagacagatcaaatctaaatcgctgtggtttccgaggctcttcatacctgggtgacagagcaagtctcaaaaaaaaaaaaaa

SEQ ID NO: 26149 - DNA, 640 bp, Homo sapiens
  misc_feature (1)...(640): n = a,t,c or g
gcgcggagcggacggattcgattcaacggggttccggaccgcgctgcgctatggagcaggtcaatgagctgaaggagaaaggcaacaaggccctgagcgtgggtaacatcgatgatgccttacagtgctactccgaagctattaagctggatccccacaaccacgtgctgtacagcaaccgttctgctgcctatgccaagaaaggagactaccagaaggcttatgaggatggctgcaagactgtcgacctaaagcctgactggggcaagggctattcacgaaaagcagcagctctagagttcttaaaccgctttgaagaagccaagcgaacctatgaggagggcttaaaacacgaggcaaataaccctcaactgaaagagggtttacagaatatgganggcangttggcaganagaaaantcatgaaccctttcaacatgcctaatcngntcanaanttggaaantgatcccaaggacaaggacactactcagtgatcctacctaccgggagctgatanagcagctacnaaacaagccttctgacctgggcacgaaactacaagatccccggntcatgacactccancgtctccttggggtcatctgggcaatnnnggnnggggnnncttnnnnccccac

SEQ ID NO: 26150 - DNA, 526 bp, Homo sapiens
  misc_feature (1)...(526): n = a,t,c or g
gnnnnnnnnnnnnnnnnnnnnnnnnnnnnnnnnnnnnnnnnnnnnnnnnnnnnnnnnnnnnnnnnnnnnnnnnnnnnnnnnnnnnnnnnnnnnnnnnnnnnnnnnnnnnnnnnnnnnnnnnnnnnnnnnnnnnnnnggggtggcggcgatgtaacacgagnnnnnnnnnnnnnnnnnnnnnnnnnnnnnnnnnnnnnnnnnnnnnnnnnnnnnnnnnnnnnnnnnnnnnnnnnnnnnnnnnnnnnnnnnnnnnnnnnnnnnnnnnnnnnnnnnnnnnnnnnnnnnnnnnnnnnnnnnnnnnnnnnnnnnnnnnnnnnnnnnnnnnnnnnnnnnnnnnnnnnnnnnnnnnnnnnnnnnnnnnnnnnnnnnnnnnnnnnnnnnnnnnnnnnnnnnnngtatcatcacgngantcacanagtcaatanaanacaactggaagaattatttagcggcccaagcttatcccttaanagggtaatttaacttgggaccgggcngnngtttttaacgtntgacngnaaaaaaa

SEQ ID NO: 26151 - DNA, 624 bp, Homo sapiens
  misc_feature (1)...(624): n = a,t,c or g
gnnnnnnnnnnnnnnnnnnnnnnnnnnnnnnnnnnnnnnnnnnnnnnnnnnnnnnnnnnnnnnnnnnnnnnnnnnnnnnnnnnnnnnnnnnnnnnnnnnnnnnnnnnnnnnnnnnnnnnnnnnnnnnnnnnnnnnnnnnnnnnnnnnnnnnnnnnnnnnnnnnnnnnnnnnnnnnnnnnnnnnnnnnnnnnnnnnnnnnnnnnnnnnnnnnnnnnnnnnnnnnnnnnnnnnnnnnnnnnnnnnnnnnnnnnnnnnnnnnnnnnnnnnnnnnnnnnnnnnnnnnnnnnnnnnnnnnnnnnnnnnnnnnnnnnnnnnnnnnnnnnnnnnnnnnnnnnnnnnnnnnnnnnnnnnnnnnnnnnnnnnnnnnnnnnnnnnnnnnactcctaaacannnnnnnnnnnnnnnnnnnnnnnnnnnnnnnnnnnnnnnnnnnnnnnnnnnnnnnnnnnnnnnnnnnnnnnnnnnnnnnnnnnnnnnnnnnnnnnnnnnnnnnnnnnnnnccattttacctcctanaagctcaangtacttcgagtcncccttcacaattccgagggatctacggtcaanatttttgtaccacaggnttcangganttacgtcattatggctcaactttcccac

SEQ ID NO: 26152 - DNA, 616 bp, Homo sapiens
  misc_feature (1)...(616): n = a,t,c or g
tttatgaagccattatgacatgcnannnnnnnnnnnnnnnnnnnnnnnnnnnnnnnnnnnnnnnnnnnnnnnnnatataatgacgctcctgtgtgtcgcangacacacaggagctgnantttccattttggcttatcctgttgganagcannnacttcactatanaattccttgtgtaaacccgggtcntcanctacaggctgctcggatatcaaccattcctccctcttaaaagctgctgggaaagatcctctgatggacccgtctcttttccagagccccaggcttcggcttgttgccctttgganacggtgggctcctttcccgttggtcgttggtgtttcacaaatgtgctcanctccctgcctctgcccttgacggttgaggttttccattaaatctttaatcacttanntgtctgtcaggcacttggagtgcttggaggtcatgggcagcccggagattgggcnaacgggtgtcnngatgacnangnnntgggaangcncccnggggnannggnnnnngtntcatctggtcncaggggccccngantcngaggngnnagggttngganacggngnnttcnatctngntgnaggagnttnnntnannagcc

SEQ ID NO: 26153 - DNA, 546 bp, Homo sapiens
  misc_feature (1)...(546): n = a,t,c or g
gggggganaaggcacatcacatagtgaaaagcaggancaagcgagagagggccaggtgctatacacttttaaatgactagatctcccaagaactcactattgcaacaacaatnnnnnnnnnnnnnnnnnnnnnnnnnnnnnnnnnnnnnnnnnnnnnnnnnnnnnnnnnnnnnnnnnnnnnnnnnnnnnnnnnnnnnnnnnnnnnnnnnnnnnnnnnnnnnnntgaggacacagatctaaaccatgtcctgtcatccttgactcctttcttgtctacattcttgactcttcttttctgtatcttaactcctgtcatatcccacttataaggcgtcaacaaattgtgttgactctactttgaaagtatatttgaattctcaccacttttcatcaccttcactgttctatggnccaagttacaatcatttcttggntatttgtaatancctctanggcttctgctcctantcccaagagtctaatatcancatagcaaccaaagtgatcctcntaaagctaaatcagntggcacattggtcacncctg

SEQ ID NO: 26154 - DNA, 541 bp, Homo sapiens
  misc_feature (1)...(541): n = a,t,c or g
gcacactgctagtcacatgggggagccagcattgaaacccataccctctgactccacaggttatgttcctaagcatcatattaagtggactaagaagttaatacatggagggagggaggacagggtgaatgagagagttgcgtgactttatgtgtatgtagttttgaacgatgtaaatgtgttacctattgaaaaatatttagaaaaaatgtgtatgactttgctcaagttactttccatgtgagaggcagacatctcaagataagtaatagtagtagcttgtagtgagggtttaccaaagtcttatctatagtcctctgagactttagggagagaatccttatttaacctcatgagatagattccccacccccgacctgagctgagcagctaaagcttggggtgctgcaagctggggaagctgagcgcaccagcgcccatgacctacagctctccccttcgcagaccccttcttcangagcgcccanccctggatcgcaaccctggnaaggaacctgcctancntgctgctgcttccccc

SEQ ID NO: 26155 - DNA, 706 bp, Homo sapiens
  misc_feature (1)...(706): n = a,t,c or g
tttggnnactnnccacntaggncccgntnaataatactaaancacnagngggaccnttggcccncggagtgcgaaatnaattcggtcacgnaggacggtggtntcactatttatccctggtaaaaatctgcaaaagtatttgaaagggaacaagggacagaaaactccctccttttccaagttagccttatagtctagggcttaaaatactggtttaatggtgaagataaaagactgtcgtagtaaaagagattcagggcacagggaaactccaccacaangcgtggtaccatttcccacagaagctaaatggacgggaagcctgccaccaggaaaggtccagatttctgttcattacgctatgggctggctcttatcatgcacttctcaaacttcaccatgataacgcagcgtgtgagtctgagcattgcgatcatcgccatggtgaacaccactcagcaagcaaggtctatctaatgcctccactgaggggcctgttgcanatgccttcaataactccancatatccatcaangaatttgatacaaaggcctctgtgttcaatggagcccanaaactcanggtatcatctttagctccatcanctatgggataatactgactctgatcccangtggatattnncaaggannttgggcanaananatgcttgggctggntgctgnccntccctccanctcttaag

SEQ ID NO: 26156 - DNA, 703 bp, Homo sapiens
  misc_feature (1)...(703): n = a,t,c or g
cgtgntnactccnacntgtcnacgaatnncctatatnacactataagggcccttgggccncgaggcaaaataattcagcacgaggatagctagcaccatgagcttcaataccctgatttcggagacgttgacttttttaaaaaaacagcanaagtgctacttagaatgaatgacatgtggtggccagctggcctgtgtctctgcatcgcccatgtctagaattgtgtttgatttgcagcaagcattcaggaaatgtttctgtttgcttttttcggggttctagtgaggagttccagaggaggaagtagagaaganagctgggctggaggaagatgatggngagacccnagggactaagacttganctaacanacacatcancaagaantangcaaacanccacataanaagtgggcaaaggacacnaacacgacacttatcaacacaagacgtananctcggccaataaacatganaaaatgttcancatcactaantatcatagagatgcatcgtcaaaactatgaagataccatctcacacattcagcatggctactattagtcaacaantaccagacgttggccantctgnggagaaannggatgttacncancgtgngtnataangctggtnncatcccnttnccttaatntagntccnttctgcntggcctgtntgnanccnncgcactattctcttg

SEQ ID NO: 26157 - DNA, 659 bp, Homo sapiens
  misc_feature (1)...(659): n = a,t,c or g
gcgtccctgcacttctttgtcacagctcgcatcaatgagaccagggatgttctggccaagcaaaagtccaccgtgctaaccatccctgagatcatcatcaaggtccgtggcactcaggtagttggttctgacatgactgtgacagttgagtttaccaatcctttaaaagaaaccctgcgaaatgtctgggtacacctggatggtcctggagtaacaagaccaatgaagaagatgttccgtgaaatccggcccaactccaccgtgcagtgggaagaagtgtgccggccctgggtctctgggcatcggaagctgatagccagcatgagcagtgactccctgagacatgtgtatggcgagctggacgtgcagattcaaagacgaccttccatgtgaatgcacaggaagctganatgaaccctggcatttggctcttgtagtcttggctaaggaaattcaacgcaaaaatagctcttgctttgacttacgtgtgaagaccagacaggactgcanagggncccagagtggagatccacatatttcaaaaacntggttttcanaccaggntattcggaaggaattagttttaacccctcacctcaagagtgtancattacnttantngcgggcggnnctatnccttatggggtaattaacttgcc

SEQ ID NO: 26158 - DNA, 830 bp, Homo sapiens
  misc_feature (1)...(830): n = a,t,c or g
tgaanactatgttctgattacgggtactaatacgactcactanaagggaatttgtggcnccaangccaanaattcgggaacgaagaaaaaaccaagaaaannaaaaagantcagcccttgggcttctgcttcaaaccctcaagaggggaagcaactccntgtgcctggggttcccgagggagctgctggctgacctgggcccacagagcctggntttggtccccagcattgcantatggtgtggtgtttgtaggctgtggggtctggctgtgtggccaaggtgaatancacaggttagggtgtgtgccataccccatgcacctcagggccaagcgggggcntggcngncctttcaggtcnaggccattggncctggnacaacatntctgtcctcagagnaggggccagntnatttnccnccctggtttgcancnnttttcaaancccccganaatcgctcttttccattccanggatgccntcanaacccaatgtngnaannctacgggnttctancaatggtactctagntcantcttattancctnncttgttnaggngatacanagagntccttcccngggcanagntatttcaannggtaattgngncggnganggngaataatgnntcnnctgtgggcgaggggcggnggncccannccanctggttngncacgncccnttcagggttgncncgtgnnggggnacntcatttnnctgggggggtttnnnngnnggtcctngngtnncgncggtncnttgcngnaannggcacatggggttnntgggggtnttggnccnggttctcnatcacgnggttgnnctggc

SEQ ID NO: 26159 - DNA, 825 bp, Homo sapiens
  misc_feature (1)...(825): n = a,t,c or g
ggagactatgtcctgattacggntntaatacgagnccctanaagggaatttgnaggnccnaggccangganttcggcaacgaggaacggcgagagagggagtacagcgaaaggtggggaccgcagaatttggaatctctgcggagaccggaaagaaaattaatcggagcacttcctacatgcagagccacggaaactgccttggaaagagaaagtggcagcgtctgggtgccctcggtcagcccgggccagtcggctgcgcgtgcgaagtctcctctagcggagcgggaccggccgcggcggtggatcntggcggtccctgcacttctgctccagccgcgcctggaaacctgagcccggactcgcggctgctgcaaaacccgcttccagcccacctcactgcgaactttgcttccgaggggctggaaggagtcccangcagctgtttccaagctgtggaacacttcctttcccctangcactttctgctgattccaactttctttcctgtgattttcgtcttttcccgtgcatttcattctccgactccagctctgtactaaatctcacaagtttctcgttttatacgggaactgggttggnatatcccaaanataagctttatttccanatactgaccccanagcacatcaataataantttnatgaccttcaanntagtaacacaagggttgtntaaggnttganttannctgtaccgggtaanttgactnccnngnggnnnttntgaaaattntttcgatgncttaaggtttcanaagnctanaggtgnnnnnnnggcncttcggggcnngggnttttacct

SEQ ID NO: 26160 - DNA, 741 bp, Homo sapiens
  misc_feature (1)...(741): n = a,t,c or g
gcagagtcagcaactgagtccttgtctctcacttctaatccagcactccctcttgttcatatgaaaaggaaaaaggaaatcaggtattgccatactgaccatgatcagggtaaactgcangtctttgtgcttctgtcttccctatagtaaaacaattcngcaattaaccnaattgtgtttttagaacaacactctaattagacactactgcnnnactgcnttaatctganatnctngtgatcaagttctgaagaacctgctgnnggngtgtgagganggaatcccacaggaactccatcatnatgnctcnttttnagaactcnnacatcacgtcatgtcnatnatcctgtcctngcatgggtgcagngggacatgtcntnaaanntgtaaatannttttcnttttggacggtgaacntcntgncangtgtatnncntcnnngacnattcaangncgttncacnctntntcttaacntnctactcacaaaattcagttcnttcggccnttggnaggncttnncataccggangngcananacangcgggatagttnngnccnancggnnntntcannaggtnatnncattctnnttgctntntgagatcngntttacgnnggntgcgaanngggtcggggnannttnanggggnctttnantngnnttccncgntgtttnntngccccgncntnggtggttgcngcnggacgtngagtgcggctacttgngggcgtcctggc

SEQ ID NO: 26161 - DNA, 688 bp, Homo sapiens
  misc_feature (1)...(688): n = a,t,c or g
acgagntntantacggnccttaaaacnactaagnccnagggngcctggcnatcgaggcnaanaattcngcacganatgggctcgggagagaaatgaatgagagaaangacagatgaatgggtcaggtttcctggggtttatgaattaggatatatatcatggcatttgttaacctatggcagcatgtcagggcaaanagtgttggaaggaacagataanaggaaatgtgctggtagatatggctggaaaaggtttttcangatgagtggctgacaagattatacattaacctatcagattatctgttcangaaggtattannantggctgccagagaaagactggagatttcaatttcaatgtancttcanagtgtaagatgagaaaacatggctttctcaancaggcactttnactttggcaaaatgataanaangggnaattaaacangctggatttntccaaagcacttgctantanattccaattagnatacctgnagtcagtttanngnactcanaagcacatanctancanacaantgncnananntcnttacccnactactncanngttaagtanacttnaatcagtnccgnnacactgggnnagctgttcgnagnangtccccacattgaccacccnggtagnttttaacccnagtcattntnnctcaagganaangaca

SEQ ID NO: 26162 - DNA, 682 bp, Homo sapiens
  misc_feature (1)...(682): n = a,t,c or g
ctttggcctggttttnatgagcgccatnacnactgntnaacnactcnggccnagggaatttggcaancgaggccaagaattnngcacnagcatggctagcagganggcntacntgcagtatctccacganccgcccctgtgccagtgcctccagaatgtggcagctcacaagcctcctgctgttcgtggncanctggggaatttccggnaaaccagctcctcttgactcagtgttctccagcagcnagcgtgcccaccaggtgctgcggatccgcaaacgtnccaactccttcctggaggagctccgtcacagcagcctggagcgggagtgcatagagganatctgtgacttcnnggangccaaggaaattttccanaatgtggntgacacactgggcttctggtcnaagcacntcgacngtgaccnagtgcttggtcttgcccttggngcanncgtgcgctagcctgtnctgtgggtatngnacgtgcnttcacnggatccacagcttanctgcgactgcngcatnngctnggacgnccgcttctgccagcgcnaaggttgagcntcatcaactgcnctctggacaacggnggctgcacncatactgcctatangagtnngctngtncngntntcntnnttgcgnggnttgnaanntgtggnnnnccgccnnagnntcatg

SEQ ID NO: 26163 - DNA, 594 bp, Homo sapiens
  misc_feature (1)...(594): n = a,t,c or g
gccttcacctttgtccccaccgcagacaggaccagggatttccatgatgttttccatgagtcccctgtttgtttctgaaagggacgctacccgggaagggggctgggacatgggaaaggggaagttgtaggcataaagtcaggggttcccttttttggctgctgaaggctcgagcatgcctggatggggctgcaccggctggcctggcccctcagggtccctggtggcagctcacctctcccttggattgtccccgacccttgccgtctacctgaggggcctcttatgggctgggttctacccaggtgctaggaacactccttcacagatgggtgctggaggaangaaaccagctctggtccatagagaacaagacgctgtgctgccctgcccaactggcctctgcactcccctgctgggtgtggcgcaacatattcaggaanctcaaggcctgggctcangtggggtcactctggcagctcanananggtgggantggggtccaatagaactttgttcnggctcttccacgatgggaaaccttcaggggnnnggaaccctgttangggnctcgccctttnttnnagaaccctc

SEQ ID NO: 26164 - DNA, 587 bp, Homo sapiens
  misc_feature (1)...(587): n = a,t,c or g
gnnnnnnnnnnnnnnnnnnnnnnnnnnnnnnnnnnnnnnnnnnnnnnnnnnnnnnnnnnnnnnnnnnnnnnnnnnnnnnnnnnnnnnnnnnnnnnnnnnnnnnnnnnnnnnnnnnnnnnnnnnnnnnnnnnnnnnnnnnnnnnnnnnnnnnnnnnnnnnnnnnnnnnnnnnnnnnnnnnnnnnnnnnnnnnnnnnnnnnnnnnnnnnnnnnnnnnnnnnnnnnnnnnnnnnnnnnnnnnnnnnnnnnnnnnnnnnnnnnnnnnnnnnnnnnnnnnnnnnnnnnnnnnnnnnnnnnnnnnnnnnnnnnnnnnnnnnnnnnnnnnnnnnnnnnnnnnnngtatttaccctatagcacccctctaccccctctagagccnaaannaanannaaaaaaaagncntttanttaagnggccngnaagcttatccccttnaaggggggttatttttacgttggnnacgggccgtntttnaaaaagtcgnagcgggnnaaaaaatnnctcccncntgnggnncccgnnccnnnngcnggngnnnnnnacnngggggggtgggcactctcctcgcgnnnnntcaagnatngctaga

SEQ ID NO: 26165 - DNA, 533 bp, Homo sapiens
  misc_feature (1)...(533): n = a,t,c or g
gctccctgggctcantccnnnnnnnnnnnnnnnnnnnnnnnnnnnnnnnnnnnnnnnnnnnnnnnnnnnnnnnnnnnnnnnnnnnnnnnnnnnnnnnnnnnnnnnnnnnnnnnnnnnnnnnnnnnnnnnnnnnnnnnnnnnnnnnnnnnnnnnnnnnnnnnnnnnnnnnnnnnnnnnnnnnnnnnnnnnnnnnnnnnnnnnnnnnnnnnnnnnnnnnnnnnnnnnnnnnnnnnnnnnnnnnnnnnnnnnnnnnnnnnnnnnnnnnnnnnnnnnnnnnnnnnnnnnnnnnnnnnnnnnnnnnnnnnnnnncccataattcaaacacatgggggctacagaagtttaaaaaaaaagatagtcaataagagaaaagtaacctctaaaaggctatcattaatatcctcaaagngaaaatagatgngtccaatnntcnttaaancaggaanaaaantgcattgaaaanggnacagnnaagaaaagcncttggaaattaaaataatatccaaaataggaattttaatagacgagataaa

SEQ ID NO: 26166 - DNA, 513 bp, Homo sapiens
  misc_feature (1)...(513): n = a,t,c or g
gtgcgttagtggtaaagagcacaggactcacaacaggaggaggaaggaggaggcttaggttccacatacagctccagattaagctgtgtgaccctgggcaggtcatttgctttctctatttttcattttctccctcatcaataaaatgaagttggtctgcatggccttctcactctaagatgctacatatctgtgcttccatagctggcttgttatgaaggcagctttctgtacataaatcaggggtcttgagaccatctttcttcccctggactgaaggaactcaaagctattttctcctgggattcacaggaacaagctctgaacagttgggtgccattgtggtctgtagacttttacagaaaaagctctaccanactgttgccttgaactggtaaactgtttgtcataagcatccaacctgggtnggggtttaaaccccaaataaccttggaaanttaggtaaattnattaangcnnnnncttngaaaaaantgcttcaggancccaggg

SEQ ID NO: 26167 - DNA, 525 bp, Homo sapiens
  misc_feature (1)...(525): n = a,t,c or g
gatctttggggtcatcggtgccacatctgccccattcctcatcttcatcttccctgccatcttctacttccgaatcatgcccacggagaaggaacctgcaagatccacccccaaaatcctggccctgtgttttgctatgcttggcttcttgctgatgaccatgagcttgagcttcatcatcattgactgggcctcagggaccagccggcatggaggaaaccactagggtgaccctcatcctgttctgtctactcaccctagcagccctgcccagactcttcagcccctgctcccatccagtggccagtcgggggaggagaaagacgcgattaacactgtggcattcagccangccccatgtcctctctgtggaaggttttgttcaagaaccanggacaaaggccnttggccaatacctgcaagctctgggcttnaaggctcctgaactggaancaggttangggcttccnttaaatccncccannccctcattccccccttgcacagatngcatnnacggggcca

SEQ ID NO: 26168 - DNA, 765 bp, Homo sapiens
  misc_feature (1)...(765): n = a,t,c or g
ggtgtggagttaaatcaaattatgtatatttactttaggatcaacaaaaaattttagtatattctaagaatagtaaagaaaaagcaaaaacatggacagatatttccaaaaacaatccataagttctgtggtcatagcaactctacaaaacaccagcaaggcatcagaatggccataagcagaacttagtttgtatagaatcaagcatacaaaccaaccagnnnnnnnnnnnnnnnnnnnnnnnnnnnnnnnnnnnnnnnnnnnnnnnnnnnnnnnnnnnnnnnnnnnnnnnnnnnnnnnnnnnnnnnnnnnnnnnnnnnnnnnnnnnnnnnnnnnnnnnnnnnnnnnnnnnnnnnnnnnnnnnnnnnnnntaccccngttggnggtgtgacctgtagncctagctacccaggaggctgaggtggnnaggacccttgaccngannatttgggnggcttcnttgnggcaanaattcggccangggtannccancctggggtgnaagtnnnaacctgtcccncaagannccannggncagnncannncgngnngngacccccccnngnggnnngnggncgagnntcttttannnncnggggcgnnnanntgannccccttgnagggggggntaantnaagacttggccccggncgngctnttncanngnnnnngncnnngnnanannnnnnnnnngcngccgggnnnngggcgcnnngtgnggnnnngggnncnngccgnagnngcnnncngngnnnngngcngggc

SEQ ID NO: 26169 - DNA, 741 bp, Homo sapiens
  misc_feature (1)...(741): n = a,t,c or g
gctttgaaatacatttccaaatanaatctcattttttaatatgaatatgatctggaagttactaatgttatttatgtgcaagtgcaancnccagctcacccacgaaatgtccgtncngtgtctcttgccccacaggtcattancagnatcngggctctacggctacaatgccancctggtgggagtactcatggctgtcttttcggacaagggagactatttctggtggctgttactccctgtntgtgctacgtccatgacttgcccanttttctcaagtgcantganttccangctcancanatgggacctccccgtcttcaccctccctttcaacatggcgttgtcaatgtacctttcagccanaggacattacaatccattctttccagccanactgggtcatacctatanctacagctccaaatatctcctggnctgacctcaggtgccctggagttggttgaatctagaccncttggnagttgggnnggtggngggngtnnngtgncnngnccccngnggggnccntnggannncttcngngggnggnggcanncgncgcgnngncnnnnggcnnggagngccgggtgngggggntggctcnnggggcncngcgatggcgncggnngcngangtngggggcnnnngcgnnggggnggcnaggggngnngngncnggcacntncgngnccgcggtggcnncngnggntnntcggngacngcnngngcncnnnngcgc

SEQ ID NO: 26170 - DNA, 599 bp, Homo sapiens
  misc_feature (1)...(599): n = a,t,c or g
gctggaaatgtggaaattcaccatgattacaattattattttttaaaaaattgaaaatatgttaagaggtctttcattctaaattatactactgaactcatgtttaaattcacacagaagcttgctttacatggtatccacaagttaaattaccaaacagccaacaaccttactgaaataatcctagcagacaagagaccatgtgataaattaactaaatcccattccattctcccttcccgggcacaagaggagactgtatttcccagcttccttcgcagttaggctgggcccatgtgactatgcactggccaatgaagatcttatcatgctctctcttcaccttccacagcaatcttaaaagccannnnnnnnnnnnnnnnnnnnnnnnnnnnnnnnnnnnnnnnnnnnnnnnnnnnnnnnnnnnnnnnnnnnnnnnnnnnnnnnnnnnnnnnnnnnnnnnnnnnnnnnnnnnnnnnnnnnnnnnnnnnnnnnnnnnnnnnnnngctgggcgcaatggtcacgcctgtatcccancactttgggggccaggcggggggccacgangnnggggacggnccatccnggnnaaacgggaa

SEQ ID NO: 26171 - DNA, 580 bp, Homo sapiens
  misc_feature (1)...(580): n = a,t,c or g
ggtctgtagtatgatgatcaagacttaatgctctctaatatgtaatttctttttcttcttaangacaatgnnnnnnnnnnnnnnnnnnnnnnnnnnnnnnnnnnnnnnnnnnnnnnnnnnnnnnnnnnnnnnnnnnnnnnnnnnnnnnnnnnnnnnnnnnnnnnnnnnnnnnnnnnnnnnnnnnnnnnnnnnnnnnnnnnnnnnnnnnnnnnnnnnnnnnnnnnnnnnnnnnnnnnnnnnnnnnnnnnnnnnnnnnnnnnnnnnnnnnnnnnnnnnnnnnnnnnnnnnnnnganggagtccgtgtctcttanaacaacancagaaatgtaananagtntnngaggggtnanattnttttcttcactttcnttncaggcacttcanaacttganangggccangtgtggtggctcaggnntgtagcncancatntngggacgccagangggggnggagccncnggagtcangagttccngncagnntggggnnnnttgtngnggnccgcntcncngngngccggngggttnngggggnngngggancctncgcngtcagctcannnnaggncgatccggga

SEQ ID NO: 26172 - DNA, 516 bp, Homo sapiens
  misc_feature (1)...(516): n = a,t,c or g
gcggcacgagatggccaattaattangtgcngcattttatgcanataaccaggccangtataatangcctaaaacttgttttgcacncanattggtcttactataatttctctttaatagaaaagganggctagagaaagagaaattgtttcanaggaaaagtgtaacacttgataatagatttcanccctaacttttgtttttttgagtgcanatcaaatcantanttcttggccacaataatcctctacagagtaccccagtttanaatttttcttcanattnttaagttggtaccctacnganataggtttctttttcagttctaacacacaattactcttttgattgtcaaantngcggatggtatttatcnagncttgntttacttccaangaaaccnancaatatgggantcngantaccncactgctanctccctcattttggcanccacnggcccnnatctgttttngctcnagtgcnctgctcctannnctancangcnctctcccc

SEQ ID NO: 26173 - DNA, 513 bp, Homo sapiens
  misc_feature (1)...(513): n = a,t,c or g
gcaccgcgtnagatctgcagcttcactcctgaagcnnnnnnnnnnnnnnnnnnnnnnnnnnnnnnnnnnnnnnnnnnnnnnnnnnnnnnnnnnnnnnnnnnnnnnnnnnnnnnnnnnnnnnnnnnnnnnnnnnnnnnnnnnnnnnnnnnnnnnnnnnnnnnnnnnnnnnnnnnnnnnnnnnnnnnnnnnnnnnnnnnnnnnnnnnnnnnnnnnnnnnnnnnnnnnnnnnnnnnnnnnnnnnnnnnnnnnnnnnnnnnnnnnnnnnnnnnnnnnnnnnnnnnnnnnnnnnnnnnnnnnnnnnnnagagggagtgaggtctgtanaaacattcagcaaaaagcacgctgactagagggatctatcccctttctttcatggcctggatgtgtttggcctcactctgggttgtatgttgtgctgangcccancagaccatcttgnggacaaactgggcctttggntgtacttgggacaactccncccccagtattatttaagnngtcantcgtcagg

SEQ ID NO: 26174 - DNA, 512 bp, Homo sapiens
  misc_feature (1)...(512): n = a,t,c or g
ggaaagagagacgcctggtgttgaggtggaggaaaggggccccgcctttgcttggttgcttctttcttagcctggtttcagcctaaatgccacctcctaaatgaagccttcctagataacccagtaaatcaattcctacccaacctctaaccccattactctctagaccagaatcttccttctagactgtaagcaaagggaggccagggccaagtctgttttgtttaatcttgcacactcagtgctctcagaagcacttggcatttgataagtgcttgattaaatatttaagagcatcaagaagtaaatgtaggctgtaagtaaaagtattcttctagaagcactttaaaatcattttataaagtcttcacaaattccacagactgccaggatttttattaggattgaattaaatctacacatctctttggaagatgtaacatctaccctgaactcccctgcangagcctggtcacctgtgttaangcccagcaggaactgaggatgtgtta

SEQ ID NO: 26175 - DNA, 505 bp, Homo sapiens
  misc_feature (1)...(505): n = a,t,c or g
gctggaggagagcttgtgggagccaaggagcaccttggnnnnnnnnnnnnnnnnnnnnnnnnnnnnnnnnnnnnnnnnnnnnnnnnnnnnnnnnnnnnnnnnnnnnnnnnnnnnnnnnnnnnnnnnnnnnnnnnnnnnnnnnnnnnnnnnnnnnnnnnnnnnnnnnnnnnnnnnnnnnnnnnnnnnnnnnnnnnnnnnnnnnnnnnnnnnnnnnnnnnnnnnnnnnnnnnnnnnnnnnnnnnnnnnnnnnnnnnnnnnnnnnnnnnnnnnnnnnnnnnnnnnnnnnnnnnnnnnnnnnnnnnnnnnngatnaaanttttcaaaanctanaccaacngtanggncccnatnaaggtacaaaattanncccanaanaaaactatangtcattatnaantttanggttaaaaaacttgatcnaaactttttnccccttagaanncctttaacngtgcttcnaaaggngccaaaaaaatgaatttngcttaaaaanccaaaacanagcg

SEQ ID NO: 26176 - DNA, 512 bp, Homo sapiens
  misc_feature (1)...(512): n = a,t,c or g
gacaaggtcttggcnnnnnnnnnnnnnnnnnnnnnnnnnnnnnnnnnnnnnnnnnnnnnnnnnnnnnnnnnnnnnnnnnnnnnnnnnnnnnnnnnnnnnnnnnnnnnnnnnnnnnnnnnnnnnnnnnnnnnnnnnnnnnnnnnnnnnngacaaggaatactactggagaaaggaggatatcccataatgatgagtcagcacacccgaaagatataacaattataagtacaggtacctaataacagagctctaaaatacgtgaaacaataactgatagaactgaaaggagtagacaaattcacagttatagttggggacattaacaaccctttctcaataattgatagactactaaatanaaaaccatgaaggatatacaagaactgnnnnnnnnnnnnnnnnnnnnnnnnnnnnnnnnnnnnnnnnnnnnnnnnnnnnnnnnnnnnnnnnnnnnnnnnnnnnnnnnnnnnnnnnnnnnnnnnnnnancaacatggcgaanccacatctctac

SEQ ID NO: 26177 - DNA, 505 bp, Homo sapiens
  misc_feature (1)...(505): n = a,t,c or g
ggtaaaggcttgtagttttgtagtttattttgcgccgtggcggctgctgtgtgtaagcagcagcctacctatgaggttttcatcgtcctgggcttccacttgagagaactccagcaccgcgggtgaagaagccgcacctgcggcctccgtgactgcccttgagctgctcttccttactccggatggaaatctagtcagactgcgtctgaacgttgcaaatgaaatgaggaaccttgtaacnnnnnnnnnnnnnnnnnnnnnnnnnnnnnnnnnnnnnnnnnnnnnnnnnnnnnnnnnnnnnnnnnnnnnnnnnnnnnnnnnnnnnnnnnnnnnnnnnnnnnnnnnnnnnnnnnnnnnnnnnnnnnnnnnnnnnnnnnnnnnnnnnnnnnnnnnnnnnnnnnncatgcctgtaatctaagcactttanganggcgangcaagcggtcacctganatcgtagttcgagaccaacctgacaacatggagaaacccgtctctactacaa

SEQ ID NO: 26178 - DNA, 508 bp, Homo sapiens
  misc_feature (1)...(508): n = a,t,c or g
gccaggtggggtcaagctgtttttagttttaagaggatgtaggggttgtagaagtggctcttaactaaggggcctgtatttccaaagaattgacaaaaagtgttttaaacagtcaccacataaatgtgtagattccatgacagcagagactacaagagctttattcactagtgtccccagcacttgaacccttagagatgctcagtacattttgagtgccggtgaccatttttaaggacaaatcctttttgcctgtattttacttaagaatgtacatatannnnnnnnnnnnnnnnnnnnnnnnnnnnnnnnnnctggtccacttttgttggggggtggggtgggttattcacataacctctgacttcactcttgatgtggagagagacgcacagaggttgagagcactggggacattttgaaactccagcaggcttcatcttggtagatagttcaacagtggacttgagcatanttagnattcagaaggaatttnagtagtaccttc

SEQ ID NO: 26179 - DNA, 487 bp, Homo sapiens
  misc_feature (1)...(487): n = a,t,c or g
ggatggatcacanttggtttgtctgtntanccattgatgcacacttgggttgtttccaattctgangtggttatnaataaaactgctacgaacattcacattcgggtctttttgtagatacatgtctttgtttgtcatggatagatactcaggagtggtattgatgggtcgtttaaacaattactttaaaatggtatctttacatggaatagttttgcctcttgattgtggtggtggtnacacaaatctaaatgtgtgataaaatggtaaaaacacgcacataatgaatgcatggnaaactagtgatatctgaaanaagttggtgcattgtgtaatgacaattttcngantttttgtttttantttttacagacagagtcnnnnnnnnnnnnnnnnnnnnnnnnnnnnnnnnnnnnnnnnnnnnnnnnnnnnnnnnnnnnnnnnnnnnnnnnnnnnnnnnnnnnnnnnnnnnnnnnnnnnnnnnnnn

SEQ ID NO: 26180 - DNA, 490 bp, Homo sapiens
  misc_feature (1)...(490): n = a,t,c or g
nnnnnnnnnnnnnnnnnnnnnnnnnnnnnnnnnnnnnnnnnnnnnnnnnnnnnnnnnnnnnnnnnnnnnnnnnnnnnnnnnnnnnnnnnnnnnnnnnnnnnnnnnnnnnnnnnnnnnnnnnnnnnnnnnnnnnnnnnnnnnnnnnnnnnnnnnnnnnnnnnnnnnnnnnnnnnnnnnnnnnnnnnnnnnnnnnnnnnnnnnnnnnnnnnnnnnaccgcccgcctcagcctcctaaagtgctgnnnnnnnnnnnnnnnnnnnnnnnnnnnnnnnnnnnntgaaatcagcttttttagtgagtgatagctccttctggtttgcttgatttattaataatggagagagatgtgttgaaatctcctatccaaatggtgggtttgtccagttctccctgttcnttcagtttttatttcacatgttttgaagtttctttatattggatgttttcatgtttaaaatctttctgatggattgaatatttanttacctt

SEQ ID NO: 26181 - DNA, 482 bp, Homo sapiens
  misc_feature (1)...(482): n = a,t,c or g
gtcagggtcctgtggacagctcacctagtggcannnnnnnnnnnnnnnnnnnnnnnnnnnnnnnnnnnnnnnnnnnnnnnnnnnnnnnnnnnnnnnnnnnnnnnnnnnnnnnnnnnnnnnnnnnnnnnnnnnnnnnnnnnnnnnnnnnnnnnnnnnnnnnnnnnnnnnnnnnnnnnnnnnnnnnnnnnnnnnnnnnnnnnnnnnnnnnnnnnnnnnnnnnnnnnnnnnnnnnnnnnnnnnnnnnnnnnnnnnnnnnnnnnnnnnnnnnnnnnnnnnnnnnnnnnnnnnnnnnnnnnnnnnnnnnnnnnnnnnnnnnnnnnnnnnnnnnnnnnnnnnnnnnnnnnnnnnnnnnnnnnnnnnnnnnnnnnnnnnnnnnnnnnnnnnnnnnnnnnnnnnnnnnnnnnnnnnnnnnnnnnnnnnnnnnnnnnnnnnnncgannantagcatctcctaaangacctacaggaangcatccaaacgcg

SEQ ID NO: 26182 - DNA, 476 bp, Homo sapiens
  misc_feature (1)...(476): n = a,t,c or g
ggtcagtcttgtgggattgagtatttaacctgtggagtctgcactaaatgccaggtggtatcagaatttaattgaattgtgggacacccggttggngttggagaactgggtttaggaaaaatggaacagacaagtctttcctattgggaaaaaccaactcataatatgaaaacgttggggctggnataatctctctgaaattgcatantttactatttacaanataaaggctcaaaagtgtttttaaaagatttagtggggnnnnnnnnnnnnnnnnnnnnnnnnnnnnnnnnnnnnnnnnnnnnnnnnnnnnnnnnnnnnnnnnnnnnnnnnnnnnnnnnnnnnnnnnnnnnnnnnnnnnnnnnnnnnnnnnnnnnnnnnnnnnnnnnnnnnnnnnnnnnnnnnnnnnnnnnnnnnnnnnnnnnnnnnnnnnnnnnnnnnnnnnnnnnnnnnnnnnnnnnnnnnnnnnnnnnnnn

SEQ ID NO: 26183 - DNA, 556 bp, Homo sapiens
  misc_feature (1)...(556): n = a,t,c or g
nnnnnnnnnnnnnnnnnnnnnnnnnnnnnnnnnnnnggcggaatttggccctcnattgccaanaattcngcacnagagaggattccctggatacccaggaccaaagggtaacccaggtgaacctgggctaaatggaacaacatgacccaanggcatcanaggccnanggggaaattcgggacctccagggatagttggacanaaggganaccctggctacccaggaccatctggtcccaagggcaacaggggcgactccatcgatcaatgtgccctcatccaaancatcanagataaatgcccttgctgttacgggcccctggagtgccccgtcttcccaacagaactagcctttgctttagacacctctgagggagtcaaccaagacactttcggccggatgcgagatgtggtcttgagtattgtgaatgacctgaccattgctgagagcaactgnccacggggggcccgggtggctgtgnnanntacancannnaggtagcacngnnantnggntgccnnntcncnatcnanntncgctttctngncctngctg

SEQ ID NO: 26184 - DNA, 489 bp, Homo sapiens
  misc_feature (1)...(489): n = a,t,c or g
ggggnannanatcaagacttcnncncaaananaantaaatacatggaaataaanaatgttataagaaatattttatgtgcacgtntntnacaattataatatttcgtcaagtggtgttaagagtaaaataacatgaaattanatttattcatggatagaaaattttatcttgtcanaatagngatacacaaaattggttcacantnacacaggngttaagtatttcctctnantacactggncactgtgttttgtcaantgagatgtttcactgtttcttgttcgtgctatgttantaactgttatcctagaaatgaaggagaaacagaccagggattcccatgngaggttactatagtactctacaattcnttgtttangtcngtatctgaatgccaangcaagacctctcactgtataattactccctggggaatancagagctacagnaaaaccccacatcaccataccagccttcaaagggctta

SEQ ID NO: 26185 - DNA, 499 bp, Homo sapiens
  misc_feature (1)...(499): n = a,t,c or g
aattantatttctttcaggaaaactttttaaatttaagttgatatttccataattttgtcactgtggaccagtatttaccatttgaaatattctgcaggtaatgttganaatatagattagtttgcagatagataanaattaantgtaaacaatgagaccaacaaactggaanaanatgtaggtgaatgtttaactgatcgtgagtagaaagactttatgtgcanaaaagcaatggacagaaatcacagtggcacagtttttgctgttaacaangttaaatttttggcatccagacatcagacaanatttananngcagatgaatacctngcaaaagatatttgcagcatatctcataanttnanaatcttaangatttngcaaantggggannaanacanannngaanacggacacagagnnggcaggcctccannatgtgaaatctaagggntagtcaaatacagcaggatgcnanntttnanctnaccnngttgct

SEQ ID NO: 26186 - DNA, 520 bp, Homo sapiens
  misc_feature (1)...(520): n = a,t,c or g
gcaattacatgtcctgagattttcacagtgttctcttgtgagcattttatatcttttaaaaaatagttttnnnnnnnnnnnnnnnnnnnnnnnnnnnnnnnnnnnnnnnnnnnnnnnnnnnnnnnnnnnnnnnnnnnnnnnnnnnnnnnnnnnnnnnnnnnnnnnnnnnnnnnnnnnnnnnnnnnnnnnnnnnnnnnnnnnnnnnnnnnnnnnnnnnnnnnnnnnnnnnnnnnnnnnnnnnnnnnnnnnnnnnnnnnnnnnnnnnnnnnnnnnnnnnnnnnnnnnnnnnnnnnnnnnnnnnnnnnnnnnnnnnnnnnnnnnnnnnnnnnnnnnnnnnnnnnnnnnnnnnnnnnnnnnnnnnnnnnnnnnnnnnnnnnnnnnnnnnnnnnnnnnnnnnnnnnnnnnnnnnnnnnnnnnnnnnnaanttgccacctgaggggtgggaattcganaccatcctgatcaactggnnaaaccccgtctctactaaaagtaaaaaattaccaagnnagggggtgca

SEQ ID NO: 26187 - DNA, 514 bp, Homo sapiens
  misc_feature (1)...(514): n = a,t,c or g
gcggtgtaaactgcagtgaatcattagtgtattaggtaaaagccaacattgcagaatatagtttatttgaaaggccgcttagatgaaaattctagggtgatctggaaatgttttacacttttgtatatgtgatcattggatgctacttaggagaatttgtactagtgtgtctagcagttgtagcaaggtgagggnggtggccacatttgattatgaagtaaatttattctagagagtttatatagcatgaagaatattacaatcaaagaagtgttacactacatatcttaaacttttaacatgactcttatctagctataaaaatatgtctgacattttgtgttttaggaatgaagtaagtatgcagtggtaatgaatgtttgatcatgatttcaggtgagtangacgtcagggaaacctatcacagttccataagcaannatgannanaactcactgaggtatantgctacaaaatggcttctttcccccaagaatacctgtaactgtgactg

SEQ ID NO: 26188 - DNA, 514 bp, Homo sapiens
  misc_feature (1)...(514): n = a,t,c or g
gctcaatnnnnnnnnnnnnnnnnnnnnnnnnnnnnnnnnnnnnnnnnnnnnnnnnnnnnnnnnnnnnnnnnnnnnnnnnnnnnnnnnnnnnnnnnnnnnnnnnnnnnnnnnnnnnnnnnnnnnnnnnnnnnnnnnnnnnnnnnnnnnnnnnnnnnnnnnnnnnnnnnnnnnnnnnnnnnnnnnnnnnnnnnnnnnnnnnnnnnttttgacatttgtgatctcactagccatttcaattaacaacatttctgattaatcagtcttttcactgcttttgttcancaagtgtccactgagcactttcaatgtnnaaggcanattctaagaaattaggatacagtggngngtantgcanntacangggccctgagttcgcggggtnanaatccanntcgnggaactnccgaaccanngaatttccacannncactttacanncnagttttcaaagacantgagtantnaggatcnagcagtnccatnnncgcanggtaccctactttggnnccgaact

SEQ ID NO: 26189 - DNA, 444 bp, Homo sapiens
  misc_feature (1)...(444): n = a,t,c or g
gggcgtgctcgtaaattgtgaangtctttcttggatctttaaggagttggaanggatctcctctgaggggcagtcccatcttgattggtggtggccccaggagcctccccagcgggctctggttggaatgcacgtgttatacggganacggtcttcccctgcanggctgaggcacatgtcctggntccnagctgaccaacactgctggcaccatgtgaagggtgccatccgtgacttctcggacgntttcgtncancaactngcncaccgagacnagcnggnatttgataatgaattnaanaantcctttancacngtgcttantgangntcanancaancanaaggancannnanaactgatnaanannangcgnnnnnannnangntgancctgcnnnncanncnnntnnnnanngnnnnncnnnnnnnnccaancnnttca

SEQ ID NO: 26190 - DNA, 513 bp, Homo sapiens
  misc_feature (1)...(513): n = a,t,c or g
ggaagaatgccagcaggctgggccatttgttacacatccgagatgagaaaaagagccttgggagggtgtatggctacttcccaccaaacggccaaagctggtttaccatttctggagacaaggtatgacaagccctccccacacaggagagtggacactccaaggaagttttctcacctatacaatattgatttattgtgtctcacaggcaatggggaaactgggtacttccctttccagtggccacgtactgatgaatggnactctgaaacaagtgctgctggntggancccctacgtatgatgacgtctcnaangngncattcctgancgtgaccctanaccannggggagncaatcgcgtgtacgcccgcagntctgacgcaacancctcctnctgcgtcannacnntcagnggntganngncgcgtctccccgtttggtggngttccngcncnncnntgngggggangatnctgctnccctggngnccgncnngncgccccncngaggg

SEQ ID NO: 26191 - DNA, 515 bp, Homo sapiens
  misc_feature (1)...(515): n = a,t,c or g
ggaggcaaggggtttgggattgttccatcattggaatagactgtctaaaaatttcataaactccttgtccctanaagtggttgaaatggcaaaatgttgaaaggaggaaattctatttggggtgggaagttggatttaatgactcattcctttttaactctatgactgtgcctttatttttgatttttaaatggaatttctttcattaatcgattcagtacatttattgagctcttagcatgtgccactgtgaggggctgggggatatagcagtgaactaaacaaagacccttttcttacaggagctcaagaagatacacattaacaatttattacactgaggcnnnnnnnnnnnnnnnnnnnnnnnnnnnnnnnnnnnnnnnnnnnnnnnnnnnnnnnnnnnnnnnnnnnnnnnnnnnnnnnnnnnnnnnnnnnnnnnnnnnnnnnnnnnnnnnnnnnnnnnnnnnncccctcccctgcantantgggactacaggtgcatgccaccacactgg

SEQ ID NO: 26192 - DNA, 511 bp, Homo sapiens
  misc_feature (1)...(511): n = a,t,c or g
ggttttatgtgtatcaacttatttaaacttcacaaaacccctacaaggtaaatactgctgtccccattttaaagatgaggaaactgagacagattaatttgccagtgtaactctgcactacacaatgttgtacaacggtagatgccacaaatatctgctgtcatgaagctcagtgttttattttttgatacctcagagtatctccagttgtttttatcgttagtttcttcatttattcaatataaagacattgcgctagatacagaaaacatggagaaacttctagaagatgacaatttataaggcaagtcaaccatgtacatcattagtagatgtataagagctacatatgcccaaacaggaaaccttttaaatgangattattatatatgttttaacatacngtgtgtatgtacgnnnnnnnnnnnnnnnnnnnnnnnnnnnnnnnnnnnnnnnnnnnggggttttgtganacacctggtttantcttcttcctcccaattctgcaaaa

SEQ ID NO: 26193 - DNA, 508 bp, Homo sapiens
  misc_feature (1)...(508): n = a,t,c or g
gcgatnacgttgttgagtcccctgtgtcctcttctgggtggaggaactgcaatgtctggtgganaacagaaaccacagaggtactatgtgggtgtggacgttggaacangcagtgtccgtgcanctctggtggaccanantggggtcctgttggcttttgcagaccaaccaattaagaagtgggagccccanttcaaccaccatgagcagtcctccgaggacatctgggctgcntgctgtgttgtcacaaanaaagttgtnnaanggattgntttnaaccanattcnaggacttgggtttgatgccactgttctctggttgttttggntaaacagtttcaaccattaccantcaaccnnggnngggattccatcgaaacncagcaagtngcctggaccatcnanncagtcntccantnnacangctcaangagancantcacagtgtctccattaaatcctgggggtgnacnnnggnngcagcnngncccnnnnnancnnnggnctca

SEQ ID NO: 26194 - DNA, 518 bp, Homo sapiens
  misc_feature (1)...(518): n = a,t,c or g
ctcttacacngangaagatnanaatcacacanccaaagattgccttctggtttattctcaggaagaaactgaatcgctgaatgcttctattggttgttgcanttttattgnaggananctagatgaccgcttcttacatgatttgggacttaanttcaaaacgctncctgaantttgcctgggtcaaaaaatagatatanataaggaaattgagcatagacaaaaacctgccacagaaacangtatgaacacagcttcacattcactctgtgagcanactatggttanttcagagaatacctactcctctgggagtancttcccacttccanaatctttgcaagaanccanngcatgagancgtnnctcacggaannatcactgnnagatctgtgtcttctangcangcncaaaaggnanctacacccgtcctgaccaatgggttctaaaaangtgnttcaaccaaaacttccatgtcacaaggtccacaatgccaccaannacngtnatcctnggtc

SEQ ID NO: 26195 - DNA, 523 bp, Homo sapiens
  misc_feature (1)...(523): n = a,t,c or g
ggacttatgtcctccactgccctgttttatcaacaagcttnacttgtttgtccccaccactagagtgtgggcangcttgagtagantgtctggttcaccactgatctcagcatcagcctcagtcactgctgctgaaccaagtggctcgtgcgcacacggtctccagctccgccttgggtctgctttccatctctaaaagtaatcagtcagcactgcctcctgtaccctctgggggctacacgtgggaacccaccagcactccaatccaatcctcagggtgaggacccanaggcaggtggcgggatgcaaggaccagtcagtttgagggtcgccccaccacccttttctccagctacatcttcaaacgactcaagttccttgggaaataaagaactctctcaaggtctctcgttgctattcctgggcctctggcacggctngcactcaggatactggnctgcttcanatggaatccccaattgttattntggaanganaggntgccaggctcattcaagaaagc

SEQ ID NO: 26196 - DNA, 568 bp, Homo sapiens
  misc_feature (1)...(568): n = a,t,c or g
gagagagcgnnnnnnnnnnnnnnnnnnnnnnnnnnnnnnnnnnnnnnnnnnnnnnnnnnnnnnnnnnnnnnnnnnnnnnnnnnnnnnnnnnnnnnnnnnnnnnnnnnnnnnnnnnnnnnnnnnnnnnnnnnnnnnnnnnnnnnnnnnnnnnnnnnnnnnnnnnnnnnnnnnnnnnnnnnnnnnnnnnnnnnnnnnnnnnnnnnnnnnnnnnnnnnnnnnnnnnnnnnnnnnnnnnnnnnnnnnnnnnnnnnnnnnnnnnnnnnnnnnnnnnnnnnnnnnnnnnnnnncccggacatccaactctgaaatgagttttcccattcaagcaaagtgttgttanctttaatatcggatgcttctgggttctcaacccaagtggagtgtggtctggactcntgggtgcctctgggaggctctaggnggcactgaaacctntgccnannccttcataggtcnacttgtctcctgcatgattcatgcntctttgatgtantcatttgtcagtcantagttagtnancggaaccaattgaccagntcnnngtgggtanttnnnacnttttnatctt

SEQ ID NO: 26197 - DNA, 571 bp, Homo sapiens
  misc_feature (1)...(571): n = a,t,c or g
gggaattgttgggtgctgtgataaccttttgaggaactgccagacttacggaaagcagttgcactattttgcattcccaccaagcaatatgagggttccagtttccctccatcctcattaacactttattatctttttgattataggcatcctagtgtcaagtggcatcttattgtggnnnnnnnnnnnnnnnnnnnnnnnnnnnnnnnnnnnnnnnnnnnnnnnnnnnnnnnnnnnnnnnnnnnnnnnnnctggagaaatgtcttttgaaatactttgcccatttaaaaatgttatttgttgtttagccacccctccttaaaaaataaataatataataatccatcatcccttgccttttcaggaccatccgggaggcaaatctttcttagtctgtgcttcatacatccctttagttcccagcctaanangaagaaacactgtaaccaaaatctggtgagttcccanaaaggcaaggataagctgtccaacaccnagtncttacatgcctngaaaattgacaatgtggtcnnnnnnnnnnnnnnnnnnnnnnnnnnnnnnnnnnnnnnnn

SEQ ID NO: 26198 - DNA, 309 bp, Homo sapiens
  misc_feature (1)...(309): n = a,t,c or g
gctcatactttaaaaatatatcattttaaaataaagaaagttaaaatgtcttgtgaccatgaggctgtgttaattcaattcagaagtaaacagaatttgtcattgccattatcacataattcaaactaatataaaggtattacattttgataaatgattgttaaaactattaaatagttattggaaatgtatctcaatgaaatgcataggactgtggctttttttaanttaantaantgagctcttcatacatgggtgaatattgattattgccagaatggggatttagcaccaatttttttttttttt

SEQ ID NO: 26199 - DNA, 570 bp, Homo sapiens
  misc_feature (1)...(570): n = a,t,c or g
ggatggaaaggcagatgtaaagtccctcatggcgaaatataacacggggggcaacccgacagaggatgtctcagtcaatagccgacccttcagagtcacagggccaaactcatcttcaggaatacaagcaagaaagaacttattcaacaaccaaggaaatgccagccctcctgcaggacccagcaatgtacctaagtttgggtccccaaagccacctgtggcagtcaaaccttcttctgaggaaaagcctgacaaggaacccaagcccccgtttctaaagcccactggagcaggccaaagattcggaacaccagccagcttgaccaccagagaccccgaggcgaaagtgggatttctgaaacctgtangccccaagcccatcaacttgcccaaagaagattccaaacctacatttccctggcctcctggaaacaagccatctcttcacaagtgtaaaccaagancatgacttaaagccactnngcccgaaatctgggcctactcctccaanctcagnaaatgaacaggaacaagcgtttccanattgactggggttaaagggaaattatt

SEQ ID NO: 26200 - DNA, 563 bp, Homo sapiens
  misc_feature (1)...(563): n = a,t,c or g
ggaagaatgtggatcttacagattcagacatgcctgggtttgaattctagctccaccaccttgggcaagtcccgtcacctgtgggccccattttgcacatcagtgcgatgcagcaatgacacctcccttgcaggcgatgcgtgaagaatgcccggcacagtgggcatcatcatttcacaaacacgtatactgctgacacaggaagacagagcaggagcccaatatacacggactccgtttgtcccttgccctcctcgagtctgtgcggctanaattagacttagcacagtgggctgaggggccctggatggggtgctgcattgctggcctgagtggaagccctctgcttccacccccatgtgtctccggagcagggagacgagcacccgattgggaggaggaaacaangtttccagccttggcttggccacgcacttgctgagtgcccttgagtaagtcacttcacttctctgggcttcagtttaccgtgggtaaagttggggggaagtacanggncctttcaagnctgnnttggcngcgctggggcatggtctggggactgg

SEQ ID NO: 26201 - DNA, 625 bp, Homo sapiens
  misc_feature (1)...(625): n = a,t,c or g
tttctganncccntagccntttaaaaagganacactnnccggaatttggccctcaaaggccaanaattcggcangagggaggtgggaactaaaacagaggcggtggaagaagttgcacaaggctagagagatnactgctggngggaaaagcatgatgggctctcgggttttgagaactggcaagttgttggaggcanctggagcggggcctgggtcgccggcactggctgtctttgcgtttgggcgtggccagtcactcctcttccaggttccagnctgaactgtctgcccctgatctgcggcgatttntcnatggtccaaaccgggctgtggccctgcttccgganctncgggaggtcgtctcctctatcagctacatcgctcgacagctgcaggaacaggnggacnacgatgcgctgaaggaggactggcagtttgtggccatggtagtggancgcctcttcctgtggactttcatcatnttcancancnttgggaacctantcntcttcctggaanccacntngacntgcccctcanacccctttccntgaanatgnganggttganaccannnnccnngncattcaagcnnngttngagggnnnnccangncaannctccc

SEQ ID NO: 26202 - DNA, 514 bp, Homo sapiens
  misc_feature (1)...(514): n = a,t,c or g
ggcggggtgtgagaaagagaacagttagggatgactccagggttattggcttgaacaactgagcggagatggctgtgggcagttgggtgtgggggtaagatcaggagctcagtttcacacctgttgagttttgggatgtcttttcgacattccagagcacatgtggatgggcagttgggaagggtgctgggctagagatgtaaatttggggtggtgtttacagccttcacgttggatcagataagcattgagtcattttagattgcttagaaaagaggaccanggtctggagcctggggtgtctctgcattcagaagggtggtagaggagactgagaggtggcagcgagttangggnaattaagcaacataacacaccaaatatctaaaaactacttttgtagcctttaaaaaattatnatgtgggaataagcggttggatcnacacaanngnncgtngnccttttntnggggggggantttccccttngggggntaanttnnctnggacgggg

SEQ ID NO: 26203 - DNA, 523 bp, Homo sapiens
  misc_feature (1)...(523): n = a,t,c or g
ggaaggctgggttctgatcctagttccaccatcaagccaccaacatactcccatctgtgaaaggaaagagggaggtaaggaatacctgtccccctgacaacactcattgacctgaggcccttctctccagcccctggatgcagcctcacagtccttaccagcagagcaccttagacagtccctgccaatggactaacttgtctttggaccctgaggcccagagggcctgcaagggagtgagttgatagcacagaccctgccctgtgggcccccaaatggaaatgggcagagcagagaccatccctgaaggccccgcccaggcttagtcactgagacagcccgggctctgcctcccatcaaccgctaagagggaaggaaggntcagacacatttcaagaagccaagnaagntccnaggacanncacattcctggtgctcctnnacnaanctgnangganccacgggnnaancccctnggnccaaccanaaangccaaantnttcccnaagggngggccccttcc

SEQ ID NO: 26204 - DNA, 539 bp, Homo sapiens
  misc_feature (1)...(539): n = a,t,c or g
gcagaaggctgttggataaggcaaaggagttagaactgacgtatgcttttcacaataaaggggacttgtctgtgttgtgagaagcctgttggcctccaggataggcagctatgtcagagccatgtggaatgcacacagagtgtacccccagggccaatgctgagattctggctgcaccacgtccaacttggaccattggttgcaagaacatcctcttgcttcccttctctcccttttacctaaaatgcaaatctaatcaggctcctgctctgctgaataccttgagtcatctccagatctttgagatacaatccaaacagccagacatcaaggcctctaacgactgaggtactgaggtacacccttgctctaaaatctcatctcacgctgttcctggagcttccccatattctagccattccaaagggtgcatcagtgctcttgcctctccctactcatgctgttttctgaccagaanggcctttccttcctttaacctagacaacttctactttttctccaaagctgcntatgccatt

SEQ ID NO: 26205 - DNA, 532 bp, Homo sapiens
  misc_feature (1)...(532): n = a,t,c or g
ggagctatcaccatttcaataccctggaaatccttattcattgagtctttatctcattcggtggctccagttccagaccaagtagagagagacagggttttgttttagaaactctctggtgagtacctgccttatactaaggcaagtcctcctctagggaggacacganaaactcctctgcttaagtctatactaataatttgttaatcggtttataagttgtcaataaagttctggcatagcctancagtggagtaaaaaataaagagaattataataatctcttaaggcgcacttttgggtacgtattannatatanttaccatatgggatacttttttttgtactaaaagtatccctcctacttttgttttgggaaagcacacacagcaagtaggcaattganagatgagtgttttggnaaatcnattanacctgcaagaangctaaaagacccattgtggtacagaagtaaagaaaganagagttgcanccaggcgcantgggtcacgcctgtnantccagcacttgg

SEQ ID NO: 26206 - DNA, 526 bp, Homo sapiens
  misc_feature (1)...(526): n = a,t,c or g
gtttttttttttccanagannctcncncngttgccccagttggngcncaatggtganatcncanctcatggaaacccccgcctcccaggttcaancgattcncccnnnnnnnnnnnnnnnnnnnnnnnnnnnnnnnnnnnnnnnnnnnnnnnnnnnnnnnnnnnnnnnnnnnnnnnnnnnnnnnnnnnnnnnnnnnnnnnnnnnnnnnnnnnnnnnnnnnnnnnnnnnnnnnnnnnnnnnnnnnnnnnnnnnnnnngagtgctggggttagggtcaggcaanttttatcgcccatttcacaantgannganannaggttcacanacattaanttgcttctcnaggggtttcactattaanaagtggngccatagttgacattgnantctncagaangctgntcctgngncatgtgtctttattccaacacaangncaattttcttttgncaaagggggacnncaaaaggcngatcanggtnggcngggtgggncacactgtgctggantcntntgnggccnagggg

SEQ ID NO: 26207 - DNA, 597 bp, Homo sapiens
  misc_feature (1)...(597): n = a,t,c or g
atgcacggcnnnnnnnnnnnnnnnnnnnnnnnnnnnnnnnnnnnnnnnnnnnnnnnnnnnnnnnnggcacnangattnaacacagaaatanaaaaccaagtatcacatgttcttacttataagcggaagctaaacaccannnnnnnnnnnnnnnnnnnnnnnnnnnnnnnnnnnnnnnnnnnnnnnnnnnnnnnnnnnnnnnnnnnnnnnnnnnnnnnnnnnnnnnnnnnnnnnnnnnnnnnnnnnnnnnnnnnnnnnnnnnnnnnnnnnnnnnnnnnnnnnnnnnnnnnnnnnnnnnnnnnnnnnnnnnnnnnnnnnnnnnnnnnnnnnnnnnntccttgaacccangaggtggaaattgcagtgagccgagatcgtgcactgcactccancctggatgacagcaagactgtctcaaaanaataaaataacnnnnnnnnnnnnnnnnnnnnnnnnnnnnnnnnnnnnnnnnnnnnnnnnnnnnnnnnnnnnnnnnnnnnnnnnnnnnnnnnnnnnnnnnnnnnnnnnnnnnnnnnnnnnnnnnnncactannnntntaaaagttgtcaagcctggtgctcncacttgtagtctcgg

SEQ ID NO: 26208 - DNA, 677 bp, Homo sapiens
  misc_feature (1)...(677): n = a,t,c or g
acactttgacatgccacnagcnnnnnnnnnnnnnnnnnnnnnnnnnnnnnnnnnnnnnnnnnnnnnnnngcacgaggnnnnnnnnnnnnnnnnnnnnnnnnnnnnnnnnnnnnnnnnnnnnnnnnnnnnnnnnnnnnnnnnnnnnnnnnnnnnnnnnnnnnnnnnnnnnnnnnnnnnnnnnnnnnnnnnnnntttctagcaatatancaacaataacancanaatagcnnnnnnnnnnnnnnnnnnnnnnnnnnnnnnnnnnnnnnnnnnnnnnnnnnnnnnnnnnnnnnnnnnnnnnnnnnnnnnnnnnnnnnnnnnnnnnnnnnnnnnnnnnnnnnnnnnnnnnnnnnnnnnnnnnnnnnnnnnnnnnnnnnnnnnnnnnnnnnnnnnnnnnnnnnnnntagggtgagatttcaactgagtctacctagagaagctataacnancnactaagtgncattgctgccctatttgtatacttatctcctggaactatgtctcgcttctgttcaaaactctcctatagttccccttttaatcagggncaaacccanagttcttacgatgggcnacaagggcctaaatgccttgctcccantgggctcnaatcatctcactganccactgnattncaaacaacntgggcttccaaanaaantanacctggttanncaagg

SEQ ID NO: 26209 - DNA, 684 bp, Homo sapiens
  misc_feature (1)...(684): n = a,t,c or g
cgtgnttntcggggctttgatgtnncggngcccaatnanactcannangggccnattggnccctcgagagnatttaattcggcacgaggagcttcataaatgctaactgcttctcatgacttcagaagcaaacaagcagaatcattantcaaatgggaaattaagctgatcatcagaagtacagagaggatntcctttcttaaaggcggcacntctaagggagtgtctgagacctggcttcttcattcangatggaggctgctgctactctttaaaagaaatgttcacatccttacttcctgacttccttctataacacagtctgcttcacaacactatgactttatatgtcagagcgggttangaggagctgaatcttaaaaatttaagaanatgccaaggtctacaaaccactcttancaggggaaaattanaccctgcttgcntttgggaaaatttgttttccantcanatgtttgtcaaggttaaagaaattcacnggcctctgttcgaattggnannaattnggagccctncancttnatgattantcctganctcccacttanaatgggctttaaantntgtcctgtngnttctcatngaaaggcntccnttgggganannannncttgggtccnntntctgtgttgncccanntnngtgnnggatcaaannnngttg

SEQ ID NO: 26210 - DNA, 567 bp, Homo sapiens
  misc_feature (1)...(567): n = a,t,c or g
gcacagtgcagttatttgcacctggcctggatctccttattgccctcctgtcagggaatctgtattcactacagtccacattcactccatgtctctaccttcccatacaacaagcacaagaaagtcactaaaagtggagcatcaaaatgcttttacctctagctaattttaaaggtaaaatgaaaatgtactgactgcaaacaagaaatctgctccatggtcaacattaatgatgagtctttggcatttgacaatacaggggagtgatattcctcagctgttatgaactgcgaggccctctgattattccaagaattatctggtacccttgattctggttaatantaagttacccagctaattttctgttaactgaaatttggacttcagctgttatttggagggcacgcatcttactgcctcaacttcttttaaggcagatgtgaaattctaatgtggggtccgtggggcatgaacctctgaatgcatcacttggnagaaacctctggccatcggcgagtacttacccttagtcccatcaaaacanataaggccggcgcaatgggc

SEQ ID NO: 26211 - DNA, 559 bp, Homo sapiens
  misc_feature (1)...(559): n = a,t,c or g
agcaatgaaaaccttcttttctgtgtggggtttcctaaggcagatgatctcatggtactgatcttcttggtatctacatgtaatttatatttcaggacttgtcttgcatacatttctcacttccagaaaaatctgcacattaagaaactcttgggtattttattgagggacttttgataattatgtcattccattaggttaaaaatancttagagganacngtagtgtagtgtataataacttctttcaggtttcnaatccaaaatttgattttacaacaagtttacttagaaaaattactggggggannnnnnnnnnnnnnnnnnnnnnnnnnnnnnnnnnnnnnnnnnnnnnnnnnnnnnnnnnnnnnnnnnnnnnnnnnnnnnnnnnnnnnnnnnnnnnnnnnnnnnnnnnnnnnnnnnnnnnnnnnnnnnnnnnnnnnnnntcactgggtgcgccaccgtgcttgagccaancaggcaaggcattnccgcacttggaaaacccaangggccnggagntcccttcnnantcanaaaaanggnttcaaangggaccg

SEQ ID NO: 26212 - DNA, 561 bp, Homo sapiens
  misc_feature (1)...(561): n = a,t,c or g
gagctcctaggacaatgcctgccatatggtaagtgaccgataaatgcttgccattatcattattacaaggagacttgcaactcttcangtgatgaataaagggcctagtgtagaagcatgggaaactggaagagaaataatacatgtctgagacttttctgaaggagaatcaaaagagacttggtgatttgttgtaattgtgggagtgggcaggactaaggagagaggggagtggnctgatgattccccagttcatagcttgggcanctggttggatggtgatggcagtaatgaagttgggaaacagganaangagcntgtacttgataattgtatngtcctggtangtttggaaaaccgctcancatcccctgaaactgtgangtccatgaagtaagatgtgatggtcacattcatcactgtgtcnccaccacctagcacagtgctttgcacatggttantcggcagcatttgttaantgnaacaaacatcctgnggtaattcgttatcccattgtncacagacgaaattncggtcacgacgggacaagncactcaagac

SEQ ID NO: 26213 - DNA, 574 bp, Homo sapiens
  misc_feature (1)...(574): n = a,t,c or g
agtggtangaaggccaactaatatttaatggttggaatgacagagtcatacaatcatcatatggtaaccagcatggtaataatttgttcaggcaagaatcatcaatctgtgctaaaacaagtaggtaaaagtttgttgaataacaggatatttacgtagtttcaaaacgtatcccccaaaaatacatattaattacaatgaaaaaaatagtatctttccagtggagaaacatggaagatacttcctccttaaccaagtgaccgaagttaacctcaccaaaaatcaacagtgtgtacctcctgatatcatctgctgagaaggacacaggattacttctgtggtgttcctgccaaaaagtacatgatttgactctaatgacatggaaacatcagacgaatccaaactnnnnnnnnnnnnnnnnnnnnnnnnnnnnnnnnnnnnnnnnnnnnnnnnnnnnnnnnnnnnnnnnnnnnnnnnnnnnngccgggcgtgatactcacacctgtaatcccagcatttgggatgccatgggcgggtgggtcaactgaaggcnagagttcngacaanctnggca

SEQ ID NO: 26214 - DNA, 556 bp, Homo sapiens
  misc_feature (1)...(556): n = a,t,c or g
ggacatnncngcatttttctacttactgtgtcccgatgcaactgnncctgtttttcacanccanggnttctcctccatggcactactgacgttttgggctgacgaattctttggggacaggntngggcannnnnnnnnnnnnnnnnnnnnnnnnnnnnnnnnnnnnnnnnnnnnnnnnnnnnnnnnnnntgaacctnnnnnnnnnnnnnnnnnnnnnnnnnnnnnnnnnnnnntccaaaccctgttcacccctagttgagacccantgctcnattcagttggcttttgncnctanttccctctggttccttttctatgctatcctatactttgtccanttttangcaaatgtttcacctatagttattaaaaactgtatctaagccgggtgccgttggtcacatctgtaancncaacacttttggaagcngntatggacacatcccttgaggcacgatttganacagcctgggcaacatggngnatatcancccacnaaanctaacangnanccngcgtggnggcnnagnctgtanccanctancaggngcnaagg

SEQ ID NO: 26215 - DNA, 557 bp, Homo sapiens
  misc_feature (1)...(557): n = a,t,c or g
gcagaattaaaatggaaacttttgcataaatgtgatgcataaatatataatatttgcttacaaaataccttagcaaattgtcaaataaatgttttcatttatttttgtttttccaatcaatggaatgacaaaaaggatgtcattctgtcattatattatgatcaaaccattttctaatatattcttagggattacaaaataactaaaatagcactatatgtgtgtgtatgtgtgtatatatgtatgtatatatacacatatatatannnnnnnnnnnnnnnnnnnnnnnnnnnnnnnnnnnnnnnnnnnnnnnnnnnnnnnnnnnnnnnnnnnnnnnnnnnnnnnnnnnnnnnnnnnnnnnnnnnnnnnnnnnnnnnnnnnnnnnnnnnnnnnnnnnnnnnnnnnnnnnnnnnnnnnnnnnnnnnnnnnnnnnnnnnnnnnnnnnnnnnnnnnnnnnnnnnnnnnnnnnnnnnnnnnnnnnnnagatggcctgagtcctgacctcatgatccgcctcctcnnnnnnnnnnnnnnnnnnnnnnnnnnnnnnngcaccc

SEQ ID NO: 26216 - DNA, 449 bp, Homo sapiens
  misc_feature (1)...(449): n = a,t,c or g
gctcaaactcatgagtcctggaggcaggtataggcacttgtangctgaggacccgtanagcccggtgtgccctgcccaagccccacctgggaatggagttatctctgtaaagatcttgctgcctttgagcaagcactgcaaacggggtaactggaacanccttgtcgcgtgtttccacccttcgtatgaggcaggtaccatgggtcttcaccaacagcacggcctgttgtctccaggaaatggtancccctcacagtgctttcngtctgcttgtttagctttggcatttgaatgtgcanaatggtggactttgaaattaatgtccttctgttgactgcagagtttctgctggaaatgcagggacgctgcttgtggggttcgcgtgctgtgggangtagggaaaatgactgggttactttgtgtctttttgtgcatgcanactgtttggt

SEQ ID NO: 26217 - DNA, 582 bp, Homo sapiens
  misc_feature (1)...(582): n = a,t,c or g
ggtaagctccaaagagaatgatttcaacgcaccttcttttttctatatgaaaccaaatagccatgacattgtctagctgggtttcctcagttgggggttttgagattctctggaacaaccataggatcttttaggagatattacccttgtcngatcttgattttaaagccaggaacattgtgcaggaaagagctccatttagtttgagtggacactcactcattgctatgggatactgggtttcaaaatccaaatacagtaatgctaaaatgtagagaaacnnnnnnnnnnnnnnnnnnnnnnnnnnnnnnnnnnnnnnnnnnnnnnnnnnnnnnnnnnnnnnnnnnnnnnnnnnnnnnnnnnnnnnnnnnnnnnnnnnnnnnnnnnnnnnnnnnnnnnnnnnnnnnnnnnnnnnnnnnnnnnnnnnnnnnnnnnnnnnnnnnnnnnnnnnnnnnnnnnnnnnnnnnnnnnnnnnnnnnnnnnnnnnnnnnnnnnnnnnnnnnnnnnnnnnnnnnttgangttgcancactgcattcaacctgggcaacanagcaagattctgcctcaaaaaataatatatt

SEQ ID NO: 26218 - DNA, 703 bp, Homo sapiens
  misc_feature (1)...(703): n = a,t,c or g
tttgaggcggncnttgactnggcgccaaaattttaattanactcattangggccaatttgagncctcgagnacattcaattcggcacgagcatacttttacactaactttagatgatttttaaaaactggtctgatcggacttctcgtcctgggacactgtttactggagtctggccggctctccgtgctcctcttggtacctcattttggggagaaccttaaacccactcnagcagataatctccgccttgaccggtgccaccaaagaanccttggaaccatgtggacttttctgggcattgccactttcacctatttttataagaagttcggggacttcatcactttggccaacagggangtcctgttgtgcgtgctggtgttcctctcgctgggcctggngctctcctatngntgtcgccaccgaaacggnggtctcntcgggcgccagcagagcgggttcccaagttcgccctcttctcggatattctctcangcctgccttcattgggctcctccgggctaaatcccccccngaatcangnnaatanangngcanntccaagncacgaaggtcanaaancggaccaatatttacncnnaactaatnaggaaaacctnctgtnacangancctccnagatgatcaatnattannagccncaactgctttcttgttctgcttagcannnganccttcaaa

SEQ ID NO: 26219 - DNA, 621 bp, Homo sapiens
  misc_feature (1)...(621): n = a,t,c or g
gaaaagtggaagttgcagctacatgagctgactaaacttcctgcttttgtgcgtgtcgtatcagcaggaaatcttctaagccatgttggtcataccatattgggcatgaacacagttcaactatacatgaaagttccagggagcagaacaccaggtcatcaggaaaataacaacttctgttcagttaacataaatattggcccaggtgactgtgaatggtttgttgttcctgaaggttactggggtgttctgaatgacttctgtgaaaaaaatnatttgaatttcctaatgggttcntggnggccaatcttgaagatctttatngaancaaatgttccagtgtatatggttattcagcgaccctggagatttggtcctgggatanatgcaggcactgttcattgggttcangctattggctggtgcaacacactgccttgggatgttgggccactctagcntgcccagttaactttgnnaatngganngtaccaatgggatanattgcacaagtgngnantcacaagnacccagagttaccttncnggnatatngnacnaatagcnggccanntcaacctttttnaangngtaatcatgnccccanaacnccgaagcaatt

SEQ ID NO: 26220 - DNA, 610 bp, Homo sapiens
  misc_feature (1)...(610): n = a,t,c or g
taaaggcaaattaaattttaggcctgaccnnnnnnnnnnnnnnnnnnnnnnnnnnnnnnnnnnnnnnnnnnnnnnnnnnnnnnnnnnnnnnnnnnnnnnnnnnnnnnnnnnnnnnnnnnnnnnnnnnnnnnnnnnnnnnnnnnnnnnnnnnnnnnnnnnnnnnnnnnnnnnnnnnnnnnnnnnnnnnnnnnnnnnnnnnnnnnnnnnnnnnnnnnnnnnnnnnnnnnnnnnnnnnnnnnnnnnnnnnnnnnnnnnnnnnnnnnnnnnnnnnnnnnnnnnnnnnnnnnnnnnnnnnnnnnnnnnnnnnnnnnnnnnnnnnnnnnnnnnnnnnnnnnnnnnnnnnnnnnnnnnnnnnnnnnnnnnnnnnnnnnnnnnnnnnnnnnnnnnnnnnnnnnnnnnnnnnnnnnnnnnnnnnnnnnnnnnnnnnnnnnnnnnnnnnnnnnnnnnnnnnnnnnnnttgctgggtgtggcacgggcgtctgtaatcccanctactccggaatctgaggtgggaaaacntttcaacccggangtaaagttcattanccaggtccacaantgnnnccaccngggananaantgancccctnccaaatnaaaaaaaaaaaaa

SEQ ID NO: 26221 - DNA, 615 bp, Homo sapiens
  misc_feature (1)...(615): n = a,t,c or g
gnnnnnnnnnnnnnnnnnnnnnnnnnnnnnnnnnnnnnnnnnnnnnnnnnnnnnnnnnnnnnnnnnnnnnnnnnnnnnnnnnnnnnnnnnnnnnnnnnnnnnnnnnnnnnnnnnnnnnnnnnnnnnnnnnnnnnnnnnnnnnnnnnnnnnnnnnnnnnnnnnnnnntagnnnnnnnnnnnnnnnnnnnnnnnnnnnnnnnnnnnnnnnnnnnnnnnnnnnnnnnnnnnnnnnnnnnnnnnnnnnnnnnnnnnnnnnnnnnnnnnnntagtaataatatacttgatcttanccaaaaggccgagaagtgatgaaaaaagttattattattattattantattacatcacctagcccatataggactggccttgtagaaacttaacctagactcttgaatttgttgagtctttgagcggcactcccatccttgtcaatgcaattagnagccaaacagtaaaggtttccagcctcagcactgttgacatttggggctgggtaaatcttgttggggggctntcttgtgcattgtgaaatgtttancanntccttggcctgtaccactaggtggcagtagnacctgngaaacccaatcngggntcccctncccngcgcat

SEQ ID NO: 26222 - DNA, 613 bp, Homo sapiens
  misc_feature (1)...(613): n = a,t,c or g
ggcctttgcanaacaccaagcatcccaaggaactggtagggaagtggcgcctgtctcctggagtggaagaggcctgctccctggctctgggtctgctgggggcacagtaaatcagtcttggcacccacatccagggcanagaggtctgtggttctcagcatcagaaggcagcgcagcccctctcctcttcaggctacagggttgtcacctgctgagtcctcaggttgtttggcctctctggtccatcttgggcattaggttctccagcagagctctggccagctgcctcttctttaactgggaacacaggctctcacaagatcagaacccccactcacccccaagatcttatctagcaagcctgtagtattcagtttctgttgtaggaagagagcgangcatccctgaattccacgcatctgctggnaacganccgtgtcanatcgcacatccctgcgccccatgccccatgcccctctgagtcacacaggacagaggaagcaaaacttctgccacngttatcntcacttcnttgtcaatccttggttttaataagcantggcctcctaccctcttttaatgatttgnaattgattnnctgaatgnggtacgg

SEQ ID NO: 26223 - DNA, 607 bp, Homo sapiens
  misc_feature (1)...(607): n = a,t,c or g
gggcattttctatgttttatagggataaaaacatctttcatataattctggcctgttttaggggtatcagatatatatatctaaatatgcacgttgttgtttgacaaagaacatttcacacctaattgagcttttcagccgggatactccacctagagtactttgcacatacatgagatctaaggttcataaaccactttggcagtgcctgccacattcacaagtgtccactgaatgtcaatttcttgccttttctttgccctcctccttttgtgaaatgatatttggcttccagggcctgtcagggctgccggtgcaccacacttccctgagattcagcattcctttcctatgagcaaggaactggaacaggcggctgactcttgtctaaatcagatccccaggactcctagcctgtgacttcattgctgaaccccaatgctgcagtactctttggatgcagagaatgttgggtaaatgccactgaggttcttctgcatccattttattcatgttcctcagttttaantttttaaatttacaattttacctgcacagaagaacataagaanagaaactcattataaacctgngttttaaaanttcc

SEQ ID NO: 26224 - DNA, 522 bp, Homo sapiens
  misc_feature (1)...(522): n = a,t,c or g
gacttgaaatattcancangaaagtggctctaaactttangttggncaaacacaanaccantgcccatcacggaaagaactcaagaacatgggcatantcttgcctcttatatttgacgttttgcataactccantcttttancaanttttggacttatancttttagaanttttatttcccctgcantgagggggcttgatcttgnccttagtcatctctcccaccatcaggatttaccanctctggcttaactgtttcttcctccanttaatggcttgccnttgtccttaggacagtaangctggctttaacacattccnnatcccagngctgggcacagtggngcacgcctgtaancccangcactttgncaggcatngtgggcagatcacttgaagccatggnttgcctgntcancanggcgaaactccgtngctantananatggncanantagccgggnacggagggggcatncttgtantcccantaatcngcgngccgntgcacgagancactt

SEQ ID NO: 26225 - DNA, 504 bp, Homo sapiens
  misc_feature (1)...(504): n = a,t,c or g
gggaatgtgtgggtggggaagaggccctgctgagagcagagagatggctgatttatcacacccagcactgttggggctggggggagttcccaagctatggtggcagcagatggcaaggccttctgttaaagagaagacaggggatagaggaggttgatgggagaaacctttaaaaaatgggagcggaggacacaaacaataccaccttgtatttagtcagaaggcagaaagtggctggtgaaggtgacaacccagtgtcatgttttgagactgagagatttggagaagtcattcacagaanaagagggggtaaaccctcctctcctgtactgcagctaccttcccttccccctcanccttgtgcagtccttgtantgattgatgaaggctgtctgccaagaactgatccangcttgttaattgcatttgtcaaatgcanggaaattgggaattantgaaatcgganaaaggggtttggaaaacaaatgactcgtgccnaaggga

SEQ ID NO: 26226 - DNA, 559 bp, Homo sapiens
  misc_feature (1)...(559): n = a,t,c or g
ttttngcagngcgccgccaaggctttantgcaaaataatgccagtattagccngatattntntgaaagttaacggntancnttcnatcgtttagtgangcgngtatantttntggaggcacgcatacnngtatgtgnctctatagnctatactgttcagngggccacccgcgaaggcnancgagagcgagtgtctgtcgctctgtgnnagatggnanctatgananantgnattttcnccacttantccangcnacgtncntgtgttgagaantgccttgtggnacgccagnncccgcngtncnatacncctattgngncntatntgctcngttggccttgctangcttcntccaccgggaaggngataagtccnttgngnggaggcgctaagttncnanangtgggcngngtnancgcgaagttggnttggtttccaaaactnttntnaantggncacnggacngggatntgttgngttanccaangtganctgtctacctcatgggagcnnccatacccactgtggtggctaagggttnttcttaacttggtgtttg

SEQ ID NO: 26227 - DNA, 479 bp, Homo sapiens
  misc_feature (1)...(479): n = a,t,c or g
acctantaanantgncatctntatattctntnaanntaaccgcaacgtctactttatttatntgcgnnatantntntgagactcncantccgntacgtgtctctatatgtatatttccgagactanctncacgtactcnggntggcgcgccacttctaantcacctgcgnttntgtggggatatttatatgnanatgtgtaattccntttccgagntanantgnattgtatgcccancnagcgacaagcgccngagnggaaggccgttaagncccnanaagtantgncatatgtccaagngggaagncccngngnntgngacacagcnccntgggaaacgcaaaagnggccaagatangcaattaagtgggggctanatanccaagcgcaatctgcgtctgtcctctttgtggggggcttanccaatgtggnaagcttggttntccaaggcnaaanaaggaaccccaaaatatgnaatt

SEQ ID NO: 26228 - DNA, 549 bp, Homo sapiens
  misc_feature (1)...(549): n = a,t,c or g
ttttggccnnggcccanacnaagncnttaatgcnaacgantgcnagtnttagcnggatactntntnanantnanccggnancnctcctagcgattagttatgcgcggatattnttgtgcggcncncgctctggacgtggctctatatgntatantctcngnggcnaacnggatgcgtgagatgtgtgcctntntgttgtgtctctctgtctgtntgnntctgtctcnnantgtgtnctctntctntgtctctctgnactctcttctanccangaganntctctctgggangttctccctgtgannncacacnganctctntcnngactgtgngnacnncaagtgnntgtntganaggcggagtgagtntntgcgctgnngnatgcgctnnnnnatacantctgtangttgtgtgngttatctctacactnttntgtgatctgtgncctctnccaantcttggcatgtgtactgtgtnacgtcngtgtgnntntnnantccagacttgtgntgaganatnntctcantgcannnntggtgngntcntatg

SEQ ID NO: 26229 - DNA, 480 bp, Homo sapiens
  misc_feature (1)...(480): n = a,t,c or g
nnnnnnnnnnnnnnnnnnnnnnnnnnnnnnnnnnnnnnnnnnnnnnnnnnnnnnnnnnnnnnnnnnnnnnnnnnnnnnnnnnnngctnnnnnnnnnnnnnnnnnnnnnnnnnnnnnnnnnnnnnnnnnnnnnnnnnnnnnnnnnnnnnnnnnnnnnnntctagatcatttccatccctctagaaactttcctcacataagctcttaaatatcttaattcctcatttttgttctttttatttatcaatgcataannaagaatcattggaaaggggacaatttgataagcaangaactttcacagctacctgcaagaaaacgattttccctttgaacttgnctcaaaatattgactgcttttcttgaacanaatggncacatgtgcnttcttttttcatnttcatnctctgtggtggncatnacaatgnggacataaatatntggggngtncnanttgggggttagtgaanacttanaagta

SEQ ID NO: 26230 - DNA, 514 bp, Homo sapiens
  misc_feature (1)...(514): n = a,t,c or g
gtgactttgaggtcctcanaaacctgganccatggacaacttattgtgttcaagttcgagggtttcttcctgatcggaacaaagctggggaatggagtgagcctgtctgtgagcaaacaacccatgacnnaaacggtcccctccnggatggtggccgtcatcctcatggcctcggtcttcatggtctgcctggcactcctcggctgcttcgccttgcngtggtncgtttacaagaagacaaagtanaccttctcccctatgaattcacttcnacaacancatgacagagtttttgggncancctcaccanaacacaattctgtntttctccnttccaaagtcnggtattaannaagntttgtaanactnagtgtnattgcagnnnactctcacaacgggnngcaattatcccggtggtnccttnnnncctcnnggaaccgtctnggcancgggcccaaaaggtangnnnntngaaaggnannaccccccgcnngtgcncanttnagntncccaa

SEQ ID NO: 26231 - DNA, 529 bp, Homo sapiens
  misc_feature (1)...(529): n = a,t,c or g
ggtctgacacctacagttggagtcatttgggcaaatgtttaattgctctgagtttctgtttcttcatctgaaaaatggagtaatgataattatatcctccagtttgttgatcaatatttgttaaccaccaggcacaggggtacaatggtgactgacatggctcctgaactcgcagagttcacaaataaaaacanataatcacatcaatggtcaattcatcatatttgtgctaaacgctgcggagaaatacaggtgaggtgggaagattagaagtaaggtatgtaaagtgcctggcacaaataaatgaatcagcaggtcaagtantggngtangtaangaacatggtaggaacctagatgtcaaagaaattgatgaagcttagagctcttggcaaagttgtgtcctaataaaaactgaatggttgagccatcaaccaagcntttggcatctcnatggtggcaganaccctgaagtatccantggtcgcnnaatgggaanannngannccacangnttccagcctccttcc

SEQ ID NO: 26232 - DNA, 449 bp, Homo sapiens
  misc_feature (1)...(449): n = a,t,c or g
gctgtcatgattttttcactgttataatttttgcaggagtggtttcaagacagagggaagagaattagtaattagtgaacttgaaaatagatcaatagaaattatccagtgtgcaaaacagaaaaaaaaaatgaagggaaaaagaaaggcagggatttagggacctgttaaattacatcaaaccatccagctgttggtaattggaatcatagaagggaagcagaggaagagtgggacagaaaaagtatttgaacaaataatagttgagaattttgcacattgaatgaaagatagaaatttatagatgcnnnnnnnnnnnnnnnnnnnnnnnnnnnnnnnnnnnnnnnnnnnnnnnnnnnnnnnnnnnnnnnnnnnnnnnnnnnnnnnnnnnnnnnnnnnnnnnnnnnnnnnnnnnnnnnnnnnnnnnnnnnnnnnnnnnnnnnnnnnng

SEQ ID NO: 26233 - DNA, 447 bp, Homo sapiens
  misc_feature (1)...(447): n = a,t,c or g
gcttctaatgntttctttctatntatgtngtanatgataanacctgntttttgnctaanngatnttgtttttgacnacacggtcttgttctgttgcccacagctgganagcactgctgcagtcatggcttactgctggtccaacctccngggctcaagtnttcctcccatctcaanctttccaagtgccnagnactgactactggngtncancaccacaccnggcnanattttaataaatatttgtgtananatnatgtctcaatgtgtngtcanggctgntcntggactcccggnntcnannantnctnccgcnttggacccacanantgncnngnttnnaggcgtcacnannaagcctgactcncagtnttntgtgcatntnttggtcgtntntaaccccaggganntccancccntagncagcnnacatgcnggtnagtntccg

SEQ ID NO: 26234 - DNA, 445 bp, Homo sapiens
  misc_feature (1)...(445): n = a,t,c or g
nnnnnnnnnnnnnnnnnnnnnnnnnnnnnnnnnnnnnnnnnnnnnnnnnnnnnnnnnnnnnnnnnnnnnnnnnnnnnnnnnnnnnnnnnnnnnnnnnnngttaaggaagaaaaanattantcctgggctagtgataacataagttgtcagatataagcaaaccccagggggtgctccaacaacctaagctgaaaggaatagaaaaagtactcatgaaaatttaaaactcagcacccaagtttaagataaggacaanaaatttcagctgaananagaagtggtaaacagaanaataagcctaaagaaatcacccagaatgtagcacananagntaaagggatggacaagtcncnnnttgntcnctnnnncntcngtaagagnanntcngcttccgccangcacttgnantntntgnnnngncnntanaannggtcangngtcgccg

SEQ ID NO: 26235 - DNA, 426 bp, Homo sapiens
  misc_feature (1)...(426): n = a,t,c or g
gacatgaagcagcacagtatgttagaaagaaggaagtactggaagttaggaagctcccatgctgaagtctctggctgagctagctctttggtcttttcatttagactttctagtctacagttttctcatcttttaaaataagaagcttgatctagaaaatctgtaaggtcccttggaactctaacattgtcatttttaaaattttaatgacaatactaagatgaatgcattgatattaattttaaagataattcctttgcaaataacctttgttttggatttttgcaattacacgagataagtgtcctttagtattacaaactaatatacctaacggtgccacttgaacatatttatttcctaaaacaganagcccancaagtanaaagattananatgttatgancttcnctataaaaacttagg

SEQ ID NO: 26236 - DNA, 433 bp, Homo sapiens
  misc_feature (1)...(433): n = a,t,c or g
gttcnnnnnnnnnnnnnnnnnnnnnnnnnnnnnnnnnnnnnnnnnnnnnnnnnnnnnnnnnnnnnnnnnnnnnnnnnnnnnnnnnnnnnnnnnnnnnnnnnnnnnnnnnnnnnnnnnnnnnnnnnnnnnnnnnnnnnnnnnnnnnnnnnnnnnnnnnnnnnnnnnnnnnnnnnnnnnnnnnnnnnnnnnnnnnnnnnnnnnnnnnnnnnnnnnnnnnnnnnnnnnnnnnnnnnnnnnnnnnnnnnnnnnnnnnnnnnnnnnnnnnnnnnnnnnnnnnnnnnnnnnnnnnnnnnnnnnnctatgtctcattttctanctctggctctcattcagttcttggacatggtgccatccttgttgaantcaacanggtagggatcaagcatgataganagcagcngggcaacanancacaaccctgtctctacaaaag

SEQ ID NO: 26237 - DNA, 435 bp, Homo sapiens
  misc_feature (1)...(435): n = a,t,c or g
ggaaatccaaggtgattcctagggttttttggcctgagaggtcagtaaagatggggaagacaagtcattagaaggaatccagggaaacatttagtctttcctttactctgaagcaggtgtccttggagttaataataactggattacaaggaattctttgtagaaaatatcttgaacattttttgcctttcttagtaagtttgcccaattataaaagttacagcttttgggccagatgtggtggctcatgcttgtaatcctannnnnnnnnnnnnnnnnnnnnnnnnnnnnnnnnnnnnnnnnnnnnnnnnnnnnnnnnnnnnnnnnnnnnnnnnnnnnnnnnnnnnnnnanggtgtggtggcacantcctatactcccagctacccaggaagttnanancgganggnccgnngngncccnagccgtnnnggggg

SEQ ID NO: 26238 - DNA, 502 bp, Homo sapiens
  misc_feature (1)...(502): n = a,t,c or g
gtttttgtataggaaaagagaaatcagaatgtagaattggttggtggcttaagcgctagtgtgaaagaatgttccaggtgtttctacctcagctgacagattaaatggtccaggcttggcagcaaagaaattatgatttaaaaaatgactgttggacttggggaaagtgacagaattaagattaccaaaaatgtcatctgagtttccaagattggtggtgttgaaggaatgaggaaggccaaaagaaagtgattataaagtggtaagtttgagcttccagagacagttgtgggtgataaaagttactgagcagggctacagaggtgggaggctgangctgnngctgcncagaaatgnngtcangggtnactcannnagctntgngttccgntgangncnttnnggcccancnttcagnngtcgnanccggaggagggncgncnnttnnngggncgggnngnntcgnnccngggnnnnnttcntggcncncccncgnggccca

SEQ ID NO: 26239 - DNA, 514 bp, Homo sapiens
  misc_feature (1)...(514): n = a,t,c or g
gaacaaaagcccagagaagttaagagaatgcccagggtcacacaggtcccctgactcccagatcagcattctttagggtatattaagctacatgttatttccttttgtaatatttgtaggtaaaggaataatttgggccctatattttanaaactaaattttgttaatcctgcttatanattangtgaaggatactacctattaataattatagaaanaatgatcaaacttaccaaatacgtatgttgtttgcacattgatttaagnaacagttttattctatagggaacataccaagtanntganatatgtgttgtgggnggcnngtgntcnggnggncaggntncctnntntctngnccgggnnctnnnncagntngtgtatnnnntntgggtggntgnngngcnnnctggngcgntctcnngnnnggnggtngtngcttgntnngnctgnggcgncggncngtnnnncncgtnngnngngnngntgtngnncnngggngntttnnaggggg

SEQ ID NO: 26240 - DNA, 528 bp, Homo sapiens
  misc_feature (1)...(528): n = a,t,c or g
gcaataaagcaagaataaagtgaaaaaacanaaaacaaccaggaggcagtagagcactgaggctagaacagatgagatgagagcaagggctgaaaatagccaagatactgataaaaaagaacacattttatttttttcttctcatgcctgctctcaccatttatgaagtacaagtgaaaactcacttaccatgtatctaaatacttaaaaataatacctgaaacaagcccacagcctggtcatgaatcccaccaangatcncacagcccattctccagggatggccttagaaactcagaggctanaggaccgaatccttgcccaagccatccctttcaatctgatctatcaaggttgatcttctggggtcangcagggcatangctganaccngcccaggaatcntggnngtgtntggnccaggttnataaccaggctggancttgantnggacatctcccngcttctcntcncangctgttctntnantnccctnnntnncngcttcancttanggnttnggggggg

SEQ ID NO: 26241 - DNA, 524 bp, Homo sapiens
  misc_feature (1)...(524): n = a,t,c or g
gggggcggggagcttggtggcagcaagagatantggggaccctcccaaggggcctgggctggctaggagaccccttantgcacccttcancccancctggcagtcaggccctctgatacccgccagggcgtttgatgcctgccagggccttgcttangcaggtcttcttgcctggagtgcccttatgctgagatgacccctcccagacaggggccangggaggggctaccatgctcattcccttgaatgggaaactgcancctgttttanaggaaccctganagaggaccccaggtacacacggtgtgtggcagaaacctttattctggagtctctanccctggttttcagggctaaacccctagaccgganaagttgtttagganaaccccaaactggacantaccccaaagctgctcaccctggctgtccttccatcgggccatgtctgtncaatgcaaaangcaaaggccannccctttcaaaatggaanaggccaanaaagacnacatnttcctgnattt

SEQ ID NO: 26242 - DNA, 515 bp, Homo sapiens
  misc_feature (1)...(515): n = a,t,c or g
ggagctagcaccatgagcttcaataccctcagagacccattgagtgtccttgatcacctgcagctctctgtccctcaggaagccctttctcagtcttcattctcaatgtagaccaggccattgacattccaagggcactgattccctacattccttcagcagtcaagtctttgacttttacatcactgacattccctgcacccaactcttttctccatttctgccactgcttcgctagcaggggtcctcattacctaacttatgtccctacctctcactttggctcantggtttcttacacttgttctaaaagcagccttcctaaagcacgtccgtaactatgccacattgcagttcaaaagatgtaatggcttcctattgcttantgaattaagtcctaagtctgcttttaggactcgacaagaatggattaggctctccagtctacttctccatnnctntctcaagcaaaaggnncctattgctggaaaagcttcgngtttanccatccgttc

SEQ ID NO: 26243 - DNA, 497 bp, Homo sapiens
  misc_feature (1)...(497): n = a,t,c or g
gatttgtantgcaaaanaaacagctttnnangaagnanaattagaangcctggncccaatgaccccagggccctacactcctnagcctcctgatttgtagganancaagacatccctcagtatgtctcgacatncntctgtntttcaagatnanagcaatatgtctgtcttggatattcccagtgccattccagaaaancaggtaacacaggaaggtgaanatggagatggtgatcttgcagatgaanangaaggaactgtacaacagcctcaaagccantgtcntgtatgaggatttgnttangtctgaaggagaatatgatgatgaacatnctgggagtggtnaanaaggngacaatcctttctctgctatccacctgngtgaaagtggnactgactctgatgtgggatntggtgganangaccaancaanccgcatgcttcatgagacncatngangacatggnaaatgnanaaancancntgtccatnntgag

SEQ ID NO: 26244 - DNA, 518 bp, Homo sapiens
  misc_feature (1)...(518): n = a,t,c or g
ggacttgcactcagaagatcagtggtcaacttcagaagctcttccacgcttagatcatgtcttcagaacttagatgtgaaaatctacacactgggagatgctgtgagccccaaggttttgatggagtttgcttggaatcctcttgacttcatgccacattgacgtgaactttgatgtataataagcagcagcaacttcatgtgaaaatatggtcaggtagttatatgtaaggttacgtggtccagtaatgtcttagattgataaattaggtatggaatccatcagtgttacgtgatgagaataggtgaacacaccttgtcagtgaaagatgaagagcaagaccttctctaggttttctagctttcattaaatgtatttttttccccagagctaatttgaaagttgattggaccactgtggatggggtctcattaagaatgtgggaaatnggggccgagtgcgtggctcacacctgtaatccancagtttggaaggcatggcangtggacgcttgacca

SEQ ID NO: 26245 - DNA, 570 bp, Homo sapiens
  misc_feature (1)...(570): n = a,t,c or g
gctgtggtatctgcaanctctcaggtgatgccagttctgttgtttccacagatcgcattcttccttagccagtctcctaaaagaaaggaaaaaaacttaccccaaaagtgatcaaatcagtccattatgaatatctgctttgttaatggccttcagatggattattagtanctaagaggaataatgcaaagattcttaaatttcatctagggtcctttattgaacagattccttgacttgaatcccagagattcaattccaggtttaggaaaaggtccagaaaacttcaggtttaataaatactctaggtaattcggtagtattgggattttggntggcattgtatgaaaactagatantaatttggagggattggcatattgaaagtattaagtagtgctttccagaaatatagtgtgtcttatcanttttannaagttttaagaggttctctcagtacagtattcttcantcaggtcttgcagcnttataagcttgtcacatagttttagtttttttgtaatnggttgaccttcagcatgtgagaagtttcagtngnttatcttaagg

SEQ ID NO: 26246 - DNA, 574 bp, Homo sapiens
  misc_feature (1)...(574): n = a,t,c or g
gcctgagttttgtatcatttaccatcctgtttcccttctttagattcactcagatttgtcatggcctctgaaaatgtggtgccgaatgaatctcagtgttccagatatggtttgaccagtctaggattcanagaaactgtttcctctgtacaggcattttatgtgttgatgtgttgatgactaaggggaatccctggagaaattataagcaggaatttgggaaattagaactggtgcccattcatttagtatttatttttatttatacctaccataagctgtactcanaattacagatagatatttcatagtagttgacctgaanaggnnnnnnnnnnnnnnnnnnnnnnnnnnnnnnnnnnnnnnnnnnnnnnnnnnnnnnnnntgtaccgaanacanatatttggacacaatgtttttgagtgactttctctgcggnngaggagctcgggaaaacggtgtgaagtatctanntgaagcagacatnaaagcanagaaggaganaattcnagagngnaaagnnttacagggtcnggantcaaagaaccanggnttcaaaaaaggtacgggttta

SEQ ID NO: 26247 - DNA, 565 bp, Homo sapiens
  misc_feature (1)...(565): n = a,t,c or g
cggcacnanctgactgaaaaaattaaggaacggattcacatgcatgggaacaactacaaacaaagcttgcttcagcatttcccanacattcttcctctggaatatggtggtgaagaattctccanggaggacatttgtcaggaatggacaaattttagaatgaagtctgaagattatctcancagcatttctgagagcattcaatgagaagttatgtcatgtgaatggcttcctaactaaaaatacatgagtgatatccaacctggttaaatgaatgaaanaaaaggagcanatcttttaaactaangcttgcctgaactttaaaaatgtanaaatcttctgacatgagcaacacaggtgtttggaaagattttttactttttaaatgcttttttctctacttttgaagtnattanatgtcagtacattttngtancataaaaacggnnattttgtacntgaanagaanatganagttattgctaagtngctgtcatgtnnactctgnaggttcnaaanagtncngttaacaaggtcccggannaatgggtnannaaanntagaa

SEQ ID NO: 26248 - DNA, 577 bp, Homo sapiens
  misc_feature (1)...(577): n = a,t,c or g
gggangtagttggggattcagggccattcancctccatcaggcacaggtgaatgcaggatctcgggggcctggcctggaggttgatgtgcttcagtanctgtgtattcggtgtatccantggtctgcctgagaggagggcagtaactcctgatctctctcccacaacactgccttgcccctcttccanggctgagcttggcatgtgtggtgtccttggggtaagtaggccccatttctctcgacatatgaggatacttgtggggctcaaattccattangaanccactaactttggactctgancccttggagcaaacatccctctgctttttggcactcgcttanccctgattgggaactcctgtggccctggtcaggatcctggatgtgancagatgccaancactccctcttgggtcanggctgcagtgggagcctgaatcatgtaaggaatctggtgtgttgggtccancggcaggngaatggcaaannaccttcttggcananagacctcctctgntgccnccgggtaacaagannccaaggacttttccannnaattnaattccangtgcg

SEQ ID NO: 26249 - DNA, 435 bp, Homo sapiens
  misc_feature (1)...(435): n = a,t,c or g
gttttttttttaaataaaggggttcantttggtcttaaattggattcaaacaatccactcaccttggccttcctaantgtcggnattactancttgagccactgcccccatcctgggttgttttgttgttgttgttgtcgttgttgttaatttaatgacattatgttattggacttcttctgactttgctaagacaatgaaggctatgcaaaataatnnnnnnnnnnnnnnnnnnnnnnnnnnnnnnnnnnnnnnnnnnnnnnnnnnnnnnnnnnnnnnnnnnnnnnnnnnnnnnnnnnnnnnnnnnnnnnnnnnnnnnnnnnnnnnnnnnnnnnnnnnnnnnnnnnnnnnnnnnnnnnnnnnnnnnnnnnnnnnnnnnnnnnnnnnnnnnnnnnnnnnnnnnnnnnnnnnnnnnnnnnnnccnctnaaacaagg

SEQ ID NO: 26250 - DNA, 520 bp, Homo sapiens
  misc_feature (1)...(520): n = a,t,c or g
gcttttatgtccttggtttttggtgtttttgaaacataatttcttatggcttttggaggcattgtgaagacgcattcacatttttccagtgttttggaatgaatgatgtaatatgagggctgagtgttatggaatggagtgttattacgattgttacaatacagtgaacagaaaggatgctcacaaacgttccaggaagaagctggcagttcctggcctctgcaccaggagtgagggcttgtcgctccctgtgcccagtttctcctggttttttttccttgcctttnnnnnnnnnnnnnnnnnnnnnnnnnnnnnnnnnnnnnnnnnnnnnnnnnnncatggctgtttattnnnnnnnnnnnnnnnnnnnnnnnnnnnnnnnnnnnntcagtgaanggaaataagggtggggccgttttanagnattgggtagntaagggaaattacagccaagangggttggttgttccnggnggcaaantaggggcacaggngccattaggggacntttgnccaggag

SEQ ID NO: 26251 - DNA, 533 bp, Homo sapiens
  misc_feature (1)...(533): n = a,t,c or g
gctcttcagctgagcacttagtgtttgtacaggatgaggcagaagattcagggaatgatttcctctccagtgagagcacagacagnagcattccanggttcctccgggttcaggagttggcccatgacagtttgattgctgctactcgtgcacaactggcaaagaatgcaaaaaccagcagcaatggagaaaatgtccaccttggttctggtgatgggcagtcaaaagattctgggccccttcctcaagtggaaaagaagctcaagtgtacagttgaaggttgtgaccggacatttgtatggccagctcactttaaataccacctcaagactcatcgaaatgaccgctccttcatctgtcctgcagaangttgtgggaaaagcttctaagtgctgcanangctgaaaggtgcacatgaggaccacaatggaganaagccctttatgtgccatgagtcnggctgtggtaaccantttactacaactgggaacctgaanaacaccgggcatcacacaggagagaacctttccttg

SEQ ID NO: 26252 - DNA, 527 bp, Homo sapiens
  misc_feature (1)...(527): n = a,t,c or g
gagaaagagaggctttggcaggggctcttactgtgttttctgtaacaacaaaggtgtacaatgagagagtccacacagtgctgtactgcacacaccacagaatgtgtgagattttcctgtttgaatgtatgtctgcattatactcctgcaataatgctgaggacttgttcnagnagggaaactaaggngaataaattacctgtgaatgaacaatgaagtcgttcctcttaagactgaaacaagcaggccanaatttnnnnnnnnnnnnnnnnnnnnnnnnnnnnnnnnnnnnnnnnnnnnnnnnnnnnnnnnnnnnnnnnnnnnnnnnnnnnnnnnnnnnnnnnnnnnnnnnnnnnnnnnnnnnnnnnnnnnnnnnnnnnnnnnnnnnnnnnnnnnnnnnnnnnnnnnnnnnnnnnnnnttggaagncgannnnnnnnnnnnnnnnnnnnnnnnnnnnnnnnnnnnnnnnnnnnnnnnnnnnnnnnnnnnnnnnnnnnnnnnnnnnnncaagcgaganccatttcaa

SEQ ID NO: 26253 - DNA, 436 bp, Homo sapiens
  misc_feature (1)...(436): n = a,t,c or g
ggagtcattgacggtgaatacaggtctggaagtctgaggatcacaaaaagtaactagtaggtactaggctttgaacctgggtgaaagaataatttgtataataaacacctgcaatacaagtttacctatataacaaacctacacgtgtaggtttgagtttggcactcaatctctctgagccttagttnnnnnnnnnnnnnnnnnnnnnnnnnnnnnnnnnnnnnnnnnnnnnnnnnnnnnnnnnnnnnnnnnnnnnnnnnnnnnnnnnnnnnnnnnnnnnnnnnnnnnnnnnnnnnnnnnnnnnnnnnnnnnnnnnnnnnnnnnnnnnnnnnnnnnnnnnnnnnnnnnnnnnnnnnnnnnnnnnnnnnnnnnnnnnnnnnnnnnnnnnnnnnnnnnnnnnnnnnnnnnnnnnnnnnnnnnnnnnnnnnnnnnnnnn

SEQ ID NO: 26254 - DNA, 447 bp, Homo sapiens
  misc_feature (1)...(447): n = a,t,c or g
gccttagtanaaaattaataggccctaatagagctagccactgatgaagaaaagagaaagacaancccacttcactttctcttttggcagctgctacangtaatttggtttggtttgggatcatctggaaaaaaacgaacatttacaggtcctttttacctctcacctaaggttttgttcaatagattgttcattcaaagcatggctaccaaggtcagaatccantcagggacccagggcagaacatggcttctcaatgaaggctgcaagcccagcatctgagctgattatggtgggacaggttgccttggntgctatataagcccanaaaggtcttgggtctccactcaacccctgaacctgctggtttctgctaagtcccaagccctccntctgtangggatgcagggtaaatccnnntcagcngcgtctnggttaantttgggg

SEQ ID NO: 26255 - DNA, 444 bp, Homo sapiens
  misc_feature (1)...(444): n = a,t,c or g
ggtgggaagtgccagcattagctatgtagggctactggcaaaaaaattgaacctgaatcaaataatgatccagcttacaagatattctaccagacagctggactggactctataaataaaaggttagtgtccagctgannnnnnnnnnnnnnnnnnnnnnnnnnnnnnnnnnnnnnnnnnnnnnnnnnnnnnnnnnnnnnnnnnnnnnnnnnnnnnnnntagagtgctttaaaggcacttgtnnnnnnnnnnnnnnnnnnnnnnnnnnnnnnnnnnnnnnnnnnnnnnnnnnnnnnnnnnnnnnnnnnnnnnnnnnnnnnnnnnnnnnnnnnnnnnnnnnnnnnnnnnnnnnnnnnnnnnnnnnnnnnnnnnnnnnnnnnnnnnnnnnnnnnnncaccctgtatcccanctgcttggaagntganacaananaatgcttgaaaa

SEQ ID NO: 26256 - DNA, 454 bp, Homo sapiens
  misc_feature (1)...(454): n = a,t,c or g
gctcanaagcaaacggtttattttttaggtttttcagtttatttttaaatttctgactgtgatggtgtttattttttccttttccctttccccacttccccggctcancatcagaaagggaccatctgtccgttgccttgctgtggccattttanaaccagcgcaaggctgcttgaatctggtcccctcttctccctcactccctcccccaccacctggctttctctactctgcactgcctgctttcatccagctccctccaggtgtcagctgncacctcctataggcctccatctgtgaanacctccaggctgagtccagccacnagaccanggcccctgtctgaagcagccagatctgtggggaacctagacatggatgncagcaaanttacctttgaaaanganganggggaataaattccagtctccttgctccangcagggncctctgg

SEQ ID NO: 26257 - DNA, 453 bp, Homo sapiens
  misc_feature (1)...(453): n = a,t,c or g
ggagttaacaggtttaggggaaagaacagaagaggcggaggaatgtctccccatgaatgctgaccctccacatacccagaacctgggactanccccttggcaaagactccatgagcctcatacantgaatgggactcgttctcagccaggtagacatcagcttgggtctgacccccatccttgtgtgcaagtcctgattcacanagtttctttggcacttttgcttaagctgtnacaaacagccagtctgcacagggctcccttctgtctttccctttaagtcggctcacatttctctcctggtcacagctgtanaggacacacacagcacgaaacatgaggagtgtggcaagtaatgaatgccccagggtattgccactttctgacagatgaggacaatgtaatttcaagggattcatagctgagagattagaagctttcctgctgggccta

SEQ ID NO: 26258 - DNA, 454 bp, Homo sapiens
  misc_feature (1)...(454): n = a,t,c or g
agcgttgttgacatatttagtggttaaaaacttattgccaaattctcaacagattccagaattttttaaagttcacaacacgagagtggacgaaatgtcggagcttttgctcatatccagaaatgtggcctctgcttcccactcgggccctgcggtgcanacgggttcagggcggcgaggactgagccaggagcgccgagagttccagctgctcccaggctgggttcnaattaacgctggacccctgctgtctttgccagttccatgctgtatacacataatgagccgttacgactccagcaccaaagctaacgccccgggaacatctttaaaacctttttcactctgttgccaagaagagtagtacctgctagatggagtcccactctgtcgnnnnnnnnnnnnnnnnnnnnnnnnnnnnnnnnnnnnnnnnnnnnnnnnnnnnnnnnnnnnn

SEQ ID NO: 26259 - DNA, 457 bp, Homo sapiens
  misc_feature (1)...(457): n = a,t,c or g
nnnnnnnnnnnnnnnnnnnnnnnnnnnnnnnnnnnnnnnnnnnnnnnnnnnnnnnnnnnnnnnnnnnnnnnnnnnnnnnnnnnnnnnnnnnnnnnnnnnnnnnnnnnnnnnnnnnnnnnnnnnnnnnnnnnnnnnnnnnnnnnnnnnnnnnnnnnnnnnnnnnnnnnnnnnnnnnnnnnnnnnnnnnnnnnnnnnnnnnnnnnnnnnnnnnnnnnnnnnnnnnnnnnnnnnnnnnnnnnnnnnnnnnnnnnnnnnnnnnnnnnnnnnnnnnnnnnnnnnnnnnnnnnnnnnnnnnnnnnnnnnnnnnnggtgcaggggaaagaaagaaagaaaagatgtggccttctaagtcagtgggaacacgagcatgctaggagtcaaaaagtttanggtactgggcgttacctcagcattcctaagaatgcttgaaaccttgctggaattgctgagcctctca

SEQ ID NO: 26260 - DNA, 453 bp, Homo sapiens
gagttacagatctttatttaaaaaaaggtttcagtggcttctccaggttttaaaatatgcatgttcaacttatacaaacctcaaatggtgtaccacttcatgtatagttagaagaaccttacaacaatatacttccaatttctcttgcatcatttatgctgttgtcatacatcttaattttatgtgtgtaataaaccccagaatacagtggtaatatttttgctttagactaaattctttaacaaaaaaaatcttttatatttatcatcatttttgaatagtttctggtgtgggttgctttaaaaatatgtccacagattcttcgatactcctaccttgggaacagcctaattcccgttcccttgattgtgggctgtactaatttactaaatgaatagaatgtcgtagaaatgtgtgattccaaggctaggtcataaaggacatggcaccttc

SEQ ID NO: 26261 - DNA, 449 bp, Homo sapiens
  misc_feature (1)...(449): n = a,t,c or g
gccaaagaagaccagggctgatgtaacctgagaaggtactgcagtctggaaaggtcttaaaggagtccgcacannnnnnnnnnnnnnnnnnnnnnnnnnnnnnnnnnnnnnnnnnnnnnnnnnnnnnnnnnnnnnnnnnnnnnnnnnnnnnnnnnnnnnnnnnnnnnnnnnnnnnnnnnnnnnnnnnnnnnnnnnnnnnnnnnnnnnnnnnnnnnnnnnnnnnnnnnnnnnnnnnnnnnnnnnnnnnnnnnnnnnnnnnnnnnnnnnnnnagtagagnnnnnnnnnnnnnnnnnnnnnnnnnnnnnnnnnnnnnnnnnnnnnnnnnnnnnnnnnnnnnnnnnnnnnnnnnnnnnnnnnnnnnnnnnnnnnnnnnnnnnnnngtccgcacattttcttaagctccctggaggagcttgaaactcctcgctgtgtgtgatgaacagccaca

SEQ ID NO: 26262 - DNA, 452 bp, Homo sapiens
  misc_feature (1)...(452): n = a,t,c or g
gaatttttgcttgacttcagttattggtggaatctttagcgctcaataggaccaggatccagcctcacttcnagggtatgggaaatccaatcagagaccaggccctggctaanacccaaacatatgcacattcacttancanaaccttaaacacccctcagttgtgcagcttttggtcatcaagggtgcgtctgggaggttggtttaatgcaatanaactgctcccctctgaaagttgtacatgaaatttttgtaaatcacatccttatccttcatcttttaaagaaataaccactgcaagtccttttgtaaagtgaagaatccttttgtacaatgaaccactgccccttcattgatttcctgtgtcaatccagatggtgggatgtggttttcttaaggtgaggcctgtctgtganctgnatctaagnccntgggacangnttgcatnattc

SEQ ID NO: 26263 - DNA, 450 bp, Homo sapiens
  misc_feature (1)...(450): n = a,t,c or g
gaagagtgttttgaagtttttgttaattattgatattgcatcctctttgttacaaatggggcttttttcattatataactgactttttgtatgtaaaaatataatacgtctatatattttcccatgtaagtaacatgctgcatttttggctgactacatgttcacatatgtattaagatacaatcnnnnnnnnnnnnnnnnnnnnnnnnnnnnnnnnnnnnnnnnnnnnnnnnnnnnnnnnnnnnnnnnnnnnnnnnnnnnnnnnnnnnnnnnnnnnnnnnnnnnnnnnnnnnnnnnnnnnnnnnnnnnnnnnnnnnnnnnnnnnnnnnnnnnnnnnnnnnnnnnnnnnnnnnnnnnnnnnnnnnnnnnnnnnnnnnnnnnnnnnnnnnnnnnnnnnnnnnnnnnnnnnnnnnnnnnnnnnnnnnnnnnnnnnnnnnnnnnnnnnnnnnn

SEQ ID NO: 26264 - DNA, 590 bp, Homo sapiens
  misc_feature (1)...(590): n = a,t,c or g
ggagagagctagcaccatgagcttcaatnnnnnnnnnnnnnnnnnnnnnnnnnnnnnnnnnnnnnnnnnnnnnnnnnnnnnnnnnnnnnnnnnnnnnnnnnnnnnnnnnnnnnnnnnnnnnnnnnnnnnnnnnnctcatgtagtactttcttcttttaacatttttagtcattttgaggtagagattttctgctaccaaactaggaacaacccttacttagtaacaactaaatcccaacaatctctggctactttatttctaagtacttgcaatctttgcttaaattccatgtaacaggatcaatgccaccaaaaaacaacaacaaaactttcactgggacctcactcccagtcaggcggaagtccaaaagagctctgtgtgtgctactcacccacttctcccagcaatgcccangagcagtgacagcatcatggntgcccatggatgagaaaaccgagtcagagagaggtaanggattcctcaaggacatgtgggntgaacctggtccaatccanccagtcnaagtaccaatcctgagttctaactgcaaattncacagaacctggaaancacactacagtttcaatgc

SEQ ID NO: 26265 - DNA, 585 bp, Homo sapiens
  misc_feature (1)...(585): n = a,t,c or g
gaggatattggggtccaactgaagtgggatactccttgaacttcagggggtacgtgtaatcttaagatttgacaacccccctgctgccctgtcctttcatccatgagggatctatgctgggaagggctcatttccaaagcaatgctgttggtcttaagtcagtatactactgaccttttgggttgtagggaggctagggtccctggatcctcctcaagcacaggtaagcagagcctgccttagctcttggaaaggtctcatggggagcagacgtctagtttcataaacgtggaagcagtgattctgtgaccacgtggttgttctgcacaggcagaaagggagcagggctgcccacagcagcaaagaatggcgagccttggggtggagcatctatgttaaaagagctgcttatgattccctaaagagtacatgatagtctgctagcttttaaataacattttcttctactttctcaattgtttgtactgctcanattgtgcttaaanttgattttgtccncaagcaagaaaaactgtttcacttgctgcncgcnnaacactntcancaataggtccncccaatgct

SEQ ID NO: 26266 - DNA, 591 bp, Homo sapiens
  misc_feature (1)...(591): n = a,t,c or g
gtgnnnnnnnnnnnnnnnnnnnnnnnnnnnnnnnnnnnnnnnnnnnnnnnnnnnnnnnnnnnnnnnnnnnnnnnnnnnnnnnnnnnnnnnnnnnnnnnnnnnnnnnnnnnnnnnnnnnnnnnnnnnnnnnnnnnnnnnnnnnnnnnnnnnnnnnnnnnnnnnnnnnnnnnnnnnnnnnnnnnnnnnnnnnnnnnnnnnnnnnnnnnnnnnnnnnnnnnnnnnnnnnnnnnnnnnnnnnnnnnnnnnnnnnnnnnnnnnnnnnnnnnnnnnnnnnnnnnnnnnnnnnnnnnnnnnnnnnnnnnnnnnnnnnnnnnnnnnnnnnnnnnnnnnnnnnnnnnnnnnnnnnnnnnnnnnnnngcacactggntanntaaatgtggtacttatacaccgtggnatacaatgcagcatanataanaagaaaancacnnnnnnnnnnnnnnnnnnnnnnnnnnnnnnnnnnnnnnnnnnnnnnnnnnnnnnnnnnnnnnnnnnnnnnnnnnnnnnnnnnnnnnnnnnncaagtgggaactaaatgatgagaacacacggggacataaagggggtggcatngaatgggaggngganaagg

SEQ ID NO: 26267 - DNA, 585 bp, Homo sapiens
  misc_feature (1)...(585): n = a,t,c or g
gggggtgtatanccagtgggattgtgtggggaaaggtgacgaagggccctgagttcccagcgccacttgcctttttggtcccaggcctgcatctgctcaccatgactgcatgatggatggcttcacatgccaaacacgctcccaggggcctactcgggttctccttcccccaaccccccttttatttttcgaggaagtaaagcaaatagtaccacagatggagttggtcttccttttttccatgggatatttgtgaaagcattttacatgcctttgagtgatatcgaaaaanaagtgtcatttttaaaaagtcaatgtgactattctaattaatttgaacatcagttctcagggtgttgattgcagatccctgggaatctttaagactcttacagggaatacacaaggcaaaagctattttcctaacaatactaaattgttatttgccacnttcaatttatcgatatttgcacatgatgtaagancaacggtgggtgaaactgttggaacctangcatgaatcaangnacggnaccaatgttcaataaccttgtgtctcccacatgggcatgactataacatagg

SEQ ID NO: 26268 - DNA, 558 bp, Homo sapiens
  misc_feature (1)...(558): n = a,t,c or g
gcacggtgctggtanaaggagagaacacaangattgcccancctggagaccacgtcagcgtcactggtattttcttgccaatcctgcgcactgggttccgacaggtggtacagggtttactctcagaaacctacctggaagcccatcggattgtgaagatgaacaagagtgaggatgatgagtctggggctggagagctcaccagggaggagctgaggcaaattgcagaggaggatttctacgaaaagctggcagcttcaatcgccccagaaatatacgggcatgaagatgtgaagaaggcactgctgctcctgctagtcgggggtgtggaccagtctcctcgaggcatgaaaatccggggcaacatcaacatctgtctgatgggggatcctggtgtggccaagtctcagctcctgtcatacattgatcgactggcgcctcgcanccagtacacaacaagccggggctcctcaagagtggggcttacgganctgtgctgaaagacccgtgatggngaactgacctaaaggtgggccctggngctggtgacaaggtgtt

SEQ ID NO: 26269 - DNA, 499 bp, Homo sapiens
  misc_feature (1)...(499): n = a,t,c or g
ggtctgctgcccggggcccgcaggtggcaggccggtggggctggtacagcccgcgccgcctctgctgcagccgctgccgtctactccttgcgcgctggcactccgcagcctttaaggttcgcgcgggggccaggcaagagttagccatgaagagcctcaagtcccgcctgaggaggcaggacgtgcccggccccgcgtcgtctggcgccgccgccgccagcgcgcatgcagcagattggaataaatatgatgaccgattgatgaaagcagcagaaaggggggatgtagaaaaagtgacctcaatccttgctaaaaagggggtcaatccangcaaactagatgtggaaggnanatctgtcttccatgttgtgacctcaaangggaatcttgantgtttgaatgccatccttanacatggagtttntattacaaccagtgacactgcangganaaatgctcttcactggcngctactntggacatncattgtgcctacaaa

SEQ ID NO: 26270 - DNA, 501 bp, Homo sapiens
  misc_feature (1)...(501): n = a,t,c or g
gctcatactggacagaaaccgatcaggcatggaactccccttcgtcactcacctgttcttgcccctggtgttcctgacaggtgaggtctctgctccccctttaacctggatgaacatcacccacgcctattcccagggccaccagaagctgaatttggatacagtgtcttacaacatgttgggggtggacagcgatggatgctggtgggcgccccctgggatgggccttcangcgaccggaggggggacgtttatcgctgccctgtanggggggcccacaatgccccatgtgccaagggccacttaggtgagaagatgcctgacccttctcctcctaacccctgactttgatactctagaagcttcaactccctatacctcagctttttcacccctaaaatccgcatactccctgtccccaatctgataccaatccctgctcattctcctccanaatcacatgaattcaaacacccatctatgacccatgatctcaatctc

SEQ ID NO: 26271 - DNA, 502 bp, Homo sapiens
  misc_feature (1)...(502): n = a,t,c or g
ggccatgaacggcgaccggactganagcgactggcaggggctggtgagcgagtacctggtgtgtaagaggaagctggagagtaagaaggaagccctgctgatcctctccaaggagctggacacctgtcaacaggaaagggaccagtacaaactcatggccaatcagctccgggagcgccaccagtcactgaagaagaagtaccgagagctgattgatggagatccatcacttcctcctgaaaaaaggaaacaggctaatcttgcacaactattgagagattctcangaccganataaacatctgggagaagaaattaaagaacttcagcaaaggcttggagaagtccagggcgacaacaagctcttgaggatgacgattgccanacaaaggctcggagacgaaagcaatcggcgtgcgacactttgcagcccataacgttgaagacttggtgcacagctagagcgagctangggacnagattgantctctggagcacgacct

SEQ ID NO: 26272 - DNA, 509 bp, Homo sapiens
  misc_feature (1)...(509): n = a,t,c or g
gggggaccacgcaccatgatgccttggccatcctccgccaagctcgagagcccaggcaagctgtgattgtcacaaggaagctgactccagaggccatgcccgacctcaactcctccactgactctgcagcctcagcctctgcagccagtgatgtttctgtagaatctacagcagaggccacagtctgcacggtgacactggagaagatgtcggcagggctgggcttcagcctggaaggagggaagggctccctacacggagacaagcctctcaccattaacaggattttcaaaggagcagcctcagaacaaagtgagacagtccagcctggagatgaaatcttgcagctgggtggcactgccatgcanggcctcacacggtttgaagcctggaacatcatcaaggcactgcctgatggacctgtcacgattgtcatcaggagaaaaanctccaatccaanggaaaccacagctgctggngaatcctaggcaggacatgctgaanccaaa

SEQ ID NO: 26273 - DNA, 496 bp, Homo sapiens
  misc_feature (1)...(496): n = a,t,c or g
gacagcatgaaaatctgagagccagccttaggccgcggnccgctcccacgctctgccggctcaggctgggggcttgtggaggccatgcccgccccgccctggccagtctcccgggcagcagctggttgccgcccgcctgggctgcagctgtccctgcctgcctggtcttccactgaggagccgtcacagccctgtactcagagctcctcanagtgagcagcttctcaaggctctgagcctggaacctccttccctggccccatcctggcacgtactgctactccccagcccctganccttgagtgggccanggggggcccangcatggtgtctgacccagcacttggcactctcctgnccttttccttacaggnctcaggctgggacaggactgcccaaccaggacagccttcatggaggcatcgggattgccccgtctggccccaaggaattggtgcttaaaatggntatgcgtcanaaggtcanacananggaa

SEQ ID NO: 26274 - DNA, 505 bp, Homo sapiens
  misc_feature (1)...(505): n = a,t,c or g
ggaaaagatactggcccttgaaaaagaaaaggagcaacttcaaaagaagctacaggaagccttaacctcccgcaaggcaattcttaaaaaggcacaggagaaagaaagacatctcagggaggagctaaagcaacagaaagatgactgtaatcgcttgcaagaacagtttgatgagcaaagcaaggaaaatgagaatattggagaccagctaaggcaactccagattcaagtaagggaatccatanacggaaaactcccaagcacagaccagcaggaatcgtgttcttccactccaggtttagaagaacctttattcaaagccacagaacagcatcacactcaacctgttttagagtccaacttgtgcccagactggccttctcattctgaagatgcgaagtgctctgcaaggcggaacttctgttgcccagattangggccaactgaagggaatagangctgagaaagttnaanttagaattgaaagttagntccacacaagtgg

SEQ ID NO: 26275 - DNA, 506 bp, Homo sapiens
  misc_feature (1)...(506): n = a,t,c or g
gtaataaccacattggtcaacttcactgtctcatgtgtgacctttcttctgtctcccagcattcagacaatgctcatctggctctttagtagtcctaggagctgacttgacaaaagacatcagtagcataagttaaattcaagaacactgagaaaaattgtagatatcccttacttttgaggcctgtccttaaagtttgtgggttgctgggcaagagtggagctccagatggagctctcagtcttcangaacaaggtgggaggaccctttcttcccccctccattttaacatctcaagggtcctcatacataggtgtatgactcagcccacaattcccagttctgcctacaaccattccctcactagccaccttgccactactgggacctaatggtggaacacaagcaagggccaaaagcatcccctggggagtggctcgagcaatttgggatgggaatcctggggtccaagtacaagctcctgttgcggaaggaaaaggctctat

SEQ ID NO: 26276 - DNA, 497 bp, Homo sapiens
  misc_feature (1)...(497): n = a,t,c or g
gggaagcaattcgtanaccctttacaattctgttgctatcagctgccttccgatgttattgatttacctaggtctgtcttctctttttgagaattcagaaatttctgaaagctccaaatactcctccctcccacactgttttttctcagagagggcatgaggggaaatcaagctgttggagagattgaacttgttgtatattgcgcctgatatacnnnnnnnnnnnnnnnnnnnnnnnnnnnnnnnnnnnnnnnnnnnnnnnnnnnnnnnnnnnnnnnnnnnnnnnnnnnnnnnnnnnnnnnnnnnnnnnnnnnnnnnnnnnaccttgtgggggaaaagcatatcccagataaatacccagatattgggtgcttatgaggcaaatgttaagtaagttggcaattttatttcccccgctttgtcagaaggagttagagataagnaatgacacaaattaatcaagnaangacaatgggttgaaaacccantttttccac

SEQ ID NO: 26277 - DNA, 499 bp, Homo sapiens
  misc_feature (1)...(499): n = a,t,c or g
gggtangctgagccttcccaagcagaggccactcnggggcccangaanccctcanttgnggcttctcantcactgaacggaaggtgcccccagagctgtgaggaccaggcgtgtctgggtaaccatgtggctcctgctggnctcccctgcctgtccccaaagcacatggctcagctccagagggaaaccggctgggctgtcagtggnccnaggtgcatcccactttccagcancacttggtgccagcagangctgcaggtgtggcaggagggggcccanncntcanggcaccaggttcangcccggaatctcanggtgnanannnnaggctgtcctgaagcctccagaaggggttnncnnggaacatgtgtnnacgggcnctttccacanggngncnttagctatntgggntcaactgcnnntnncccnnanagtttcncnggaccacccgggtcttcaannntaacccttgggtggntcncnanncnnnngactggaa

SEQ ID NO: 26278 - DNA, 504 bp, Homo sapiens
  misc_feature (1)...(504): n = a,t,c or g
gctcatgcancacgcccccgccaatgactacctggtgacctcacacatccacctgcatgtgcccgagggcgccacccccaaggacggcccaagcgcaggctgcaccatcgtcacggccctgctgtccctggccatgggcaggcctgtccggcagaatctggccatgactggcgaagtctccctcacgggcaagatcctgcctgttggtggcatcaaggagaanaccattgcggccaagcgcgcaggggtgacgtgcatcgtcctgccagccgagaacaagaaggacttctacgacctggcagccttcatcaccgagggcctggaggtgcacttcgtggaacactaccgggagatcttcgacatcgccttcccggacgaacaggcagaagcgctggccgtggaacgtgacgncaacccnggactgcaagcggcggtttnaagggcctgttctgggcaaaaactaaccctttgggaaaccncccggacctggaattggancaccga

SEQ ID NO: 26279 - DNA, 508 bp, Homo sapiens
  misc_feature (1)...(508): n = a,t,c or g
gcacaaaagtcccttttccgttttagaatcccactcaggattcctcattacatttagttgtctgcctgnnnnnnnnnnnnnnnnnnnnnnnnnnnnnnnnnnnnnnnnnnnnnnnnnnnnnnnnnnnnnnnnnnnnnnnnnnnnnnnnnnnnnnnnnnnnnncctgtcaattgggatttgtataatgtgtttctcatgattagactctggtaaactgtggttatgggttttggggaggaagaagactacagagggtaaaatgccattttcancanatcacatcaagggtatgtattattaataagatctatcactgttggccttnnnnnnnnnnnnnnnnnnnnnnnnnnnnnnnnnnnnnnnnnnnnnnnnnnnnnnnnnnnnnnnnnnnnnnnnnnnnnnnnnnnnnnnnnnnnnnnnnnnnnnnnnnnnnnnnnnnnnnnnnnnnnnnnnnnncnggtgttggtggnaggaacccctaagcncaaactannccgggangggggag

SEQ ID NO: 26280 - DNA, 494 bp, Homo sapiens
  misc_feature (1)...(494): n = a,t,c or g
gaatgaattgagggtaggaggagggggcggcgcccgcggacgcaggggcgttcaatgctccagtaataaaccgattcacaaggcgtgcctcaggtatgtgcagaagcttataatcctgatgaagaagaagatgatgcagagtccaggattatacatccaaaaactgatgatcaaagaaataggttgcaagaggcttgcaaagacatcctgctgtttaagaatctggatccggagcagatgtctcaagtattagatgccatgtttgaaaaattggtcaaagatggggagcatgtaattgatcaaggtgacgatggtgacaacttttatgtaattgatagaggcacatttgatatttatgtgaaatgtgatggtgttggnagatgtgttggtaactatgataatcntgggaatttcggggaactgggcttaatgttcaataaaccaaggcaagctnaatcaatgggtacttctcccnggggcncgttggggtttgg

SEQ ID NO: 26281 - DNA, 508 bp, Homo sapiens
  misc_feature (1)...(508): n = a,t,c or g
gatgaaataccctgacaatttgagcataacagactgattttccattcttatccctcccatgtccttgtgtaaaaccctggacaggttgttgaaatgcctcaagcctcgggagctacctgtaaatgatgggtgtcnnnnnnnnnnnnnnnnnnnnnnnnnnnnnnnnnnnnnnnnnnnnnnnnnnnnnnnnnnnnnnnnnnnnnnnnnnnnnnnnnnnnnnnnnnnnnnnnnnnnnnnnnnnnnnnnnnnnnnnnnnnnnnnnnnnnnnnnnnnnnnnnnnnnnnnnnnnnnnnnnnnnnnnnnnnnnnnnnnnnnnnnnnnnnnnnnnnnnnnnnnnnnnnnnnnnnnnnnnnnnnnnnnnnnnnnnnnnnnnnnnnnnnnnnnnnnnnnnnnnnnnnnnnnnnnnnnnnnnnnnnnnnnnnnnnnnnnnnnnttcntgtcacaggcctagcccttcaatggtnnangaagncatatgggnnanggcantnttnnctgggganagcat

SEQ ID NO: 26282 - DNA, 509 bp, Homo sapiens
  misc_feature (1)...(509): n = a,t,c or g
gagtttagtgcggaaaccaacgccagaagcgccgctgccttgcagctaggaggagacattagcccatctggaaaccagattaccgtgttccacgggaaggtatggaaagggtgtaagaaggcaaatggcagagattagcaggagtgcataggtgacccggaggatcttcacgatggggaagcatctggaatggactggacagtgttgaaagcatggcactgcagaacaggaggacaccgaggagtcatcaggttcaaagcgctcattttgcagatgagaaaactgaagctcagagaggtccattggctgcccaggatcacacagctagctanggaancagagacttgagttaccccactgccagggggcacccaagttcccaaacctggaaaagaacacgtttacctgggactgggttgttgntgcccgggaggtangggtgtcantataatttatgccaanggcatcaagtctctcggangttcctgagccatgatgaaacccgatca

SEQ ID NO: 26283 - DNA, 509 bp, Homo sapiens
  misc_feature (1)...(509): n = a,t,c or g
ggagagagctagcaccatgagcttcaatnnnnnnnnnnnnnnnnnnnnnnnnnnnnnnnnnnnnnnnnnnnnnnnnnnnnnnnnnnnnnnnnnnnnnnnnnnnnnnnnnnnnnnnnnnnnnnnnnnnnnnnnnnnnnnnnnnnnnnnnnnnnnnnnnnnnnnnnnnnnnnnnnnnnnnnnnnnnnnnnnnnnnnnnnnnnnnnnnnnnnnnnnnnnnnnnnnnnnngataattccaaaattggtaggacancataagaatccctanaatcctgctagcatataccactacacaaaggcaagagatttattctaatcagccatagtgcctggtcaaaatccatgaaaaattcaaaactggagtaccagaaacaagagctggaaaggatgtaaggcattatatcagaccttctgtnaagaaaataaannnnnnnnnnnnnnnnnnnnnnnnnnnnnnnnnnnnnnnnnnnnnnnnnntctgaaangatcactnnngcacagttttttacag

SEQ ID NO: 26284 - DNA, 501 bp, Homo sapiens
  misc_feature (1)...(501): n = a,t,c or g
ggaagatgtgaagaggcttctgaaactacacaaggaccggttccgaggtgacctgcggtggatcctcttctgtgcagacctgccgtccctcatccaagaaggccctcaatgcgggctggtggccttgtggatggcaggtactctcctgtcgccccccagtggcgtccccctggagagactcatacgggtggccacggaaagaggctacacggcccagggagagatgttctcagtggccgatatgggcaggctggcccaggaggtgctgggctgccaggccaagctgctctctggtggcctgggcggtcccaacagagacctcgtcctgcagcacctggtcactggacatcccctgctcatcccctacgacgaggacttcaaccatgagccgtgtcagaggaagggccacaaggcacactgggncngnntattccaggnctgctgggtgttcgggctgtgcccaatctcggctacactgangacctganctgccgggctgtg

SEQ ID NO: 26285 - DNA, 502 bp, Homo sapiens
  misc_feature (1)...(502): n = a,t,c or g
ggtgggtgactgcaaaataaatgttgattacagtagtggcttcgggaggcagctgctgccaggggctctgctggcatggaggcccagggaggagtcataacactgccatgagaacggagagggcttgtgcccaggccatactcttcacctgccctcanacctcagcaccttccctacctcctgcgcttctgtccgctttcccttcccttctccgtcccatgcttccagcctgggcaggccctcctctctggctgggtctatgggggaaggggtcttcctaatcagcttctcccttctctaggcctccctggacccctccacccaacctttgggtaataaacaccacagatcatcctcatttgtctaacgggctcagttaaaccccctaacaactccaggaagtgagaaccattatctcatgccacanatgaggagactgaggcacacacataccanggtgtnaattgtggccaactgcatctgaccctgcggcnatgccctt

SEQ ID NO: 26286 - DNA, 505 bp, Homo sapiens
  misc_feature (1)...(505): n = a,t,c or g
gaggaggttagagaacttgtccagggtcaaacggtctgtatatgagtttgaagcccatgttcctttcatcccagctgtttaagtttagcctagtctagatgtggcttaacagtaacacagatgtagaggcttagggtcttaggagtttgaccatcaacatgggattcacctggttctttgtgggaaagatgtcacactgctgatgggcagaagccaggggacagagaagctttagcttggagacctggaaacaacacattcaggggaagagggttcatttattcagccagtcactcaacccctctcctgtgccaggcctgactggaacactgagggtacagaggtgaaggtcccacagcctggtgtgcagatggtgacaattcatgtgagtggttncattnaaaagcaagacagatcccacctctcccttgcctagaacactccattggctctcactccaccttcctcagatctgatcttcccangctgcttctcancatttatg

SEQ ID NO: 26287 - DNA, 556 bp, Homo sapiens
  misc_feature (1)...(556): n = a,t,c or g
gnnnnnnnnnnnnnnnnnnnnnnnnnnnnnnnnnnnnnnnnnnnnnnnnnnnnnnnnnnnnnnnnnnnnnnnnnnnnnnnnnnnnnnnnnnnnnnnnnnnnnnnnnnnnnnnnnnnnnnnnnnnnnnnnnnnnnnnnnnnnnnnnnnnnnnnnnnnnngatanatatgatagatagatnnnnnnnnnnnnnnnnnnnnnnnnnnnnnnnnnnnnnnnnnnnnnatanataaaantaatacatatgtgctgaaaanntcccanacattgggcaatttccttaccccaccatgggaaaaaagactaaaggtttttnctttggngaatataaancagnagaagaagntctcannactcaaaggcacnanncacanctganggagggataccttantgannatcaggggcttaagtaaacctatgcatgtnaaatgcngtttcacccacctttttccccacttgaccccctaatganaacttaccncaggtcccgttggcaaaaatngtagcnanatcatcctaaacantttncaggnttggaatttccacgangggggg

SEQ ID NO: 26288 - DNA, 560 bp, Homo sapiens
  misc_feature (1)...(560): n = a,t,c or g
gtggacatgagcagcttcaacacctttaagaacaatcaccatagcacagaccaggacgcagaaagacagagtcttgccctgttgcccacgatggnntatagtantgcaannnnnnnnnnnnnnnnnnnnnnnnnnnnnnnnnnnnnnnnnnnnnnnnnnnnnnnnnnnnnnnnnnnnnnnnnnnnnnnnnnnnnnagannnnnnnnnnnnnnnnnnnnnnnnnnnnnnnnnnnnnnnnnnnnnnnnnnnnnnnnnnnnnnnnnnnnnnnnnnnnnnnnnnnnnnnnnnnnnnctataaaaagaactcangatagaaatcttgaagaatgacttttagcagcancantagaagacaaaacaacagaactcacagctctggntggaatgcagtggtgtgatctctgcnnnnnnnnnnnnnnnnnnnnnnnnnnnnnnnnnnnnnnnnnnnnnnnnnnnnnnnnnnnnnnnnnnnnnnnnnnnnnnnnnnnnnnnnnnnnnnnnnnnnnnnnnnagtataaatggggttcccaagttggncangcggnctnntttctnttttt

SEQ ID NO: 26289 - DNA, 547 bp, Homo sapiens
  misc_feature (1)...(547): n = a,t,c or g
gattactgcttggtacgcanagcaccgaggccgagccagggatgaagctgaaatggaatatctgaagatagctcaggacctggagatgtacggtgtgaactactttgcaatccggaataaaaagggcacagagctgctgcttggagtggatgccctggggcttcacatttatgaccctgagaacagactgacccccaagatctccttcccgtggaatgaaatccgaaacatctcgtacagtgacaaggagtttactattaaaccactggataagaaaattgatgtcttcaagtttaactcctcaaagcttcgtgttaataagctggtaagttgagatcctggttttcattactgataatggtagcttttctgagaattgaatacttctttttaaaggatatcagagtgacatcttgtgaagtatagaatggatctcacttggngcatactttctgtttagcttaaagagntaaaactaaattatatcatnangaagttttttttgggtttttttgaaananagtcncgcntntcnccaaggntggtt

SEQ ID NO: 26290 - DNA, 547 bp, Homo sapiens
  misc_feature (1)...(547): n = a,t,c or g
nnnnnnnnnnnnnnnnnnnnnnnnnnnnnnnnnnnnnnnnnnnnnnnnnnnnnnnnnnnnnnnnnnnnnnnnnnnnnnnnnnnnngacttgtagttttttaaaactctgctggaagatgaaggttgaagagccgagggagaggatgtttccagaggcccatgcaagagatggccatgacctgccttgagaaggggcaggggaagccagatggactggaagtggagtggcagtgaccaaggaggaggaggtgtgatangcttcccacgcatggtagatccagagacaccagtgccacccataggcccctangactgcagtggtcaccgattcctttgtcccagntgagactcagttctgagtgttctattttggggaacagaggcgtccttggtagcatttgggagangatagccagctggggtgtgtgtanatcacagcctgncagtaacaagcatccganccacaggtgactggctaanggcanancanggnaacaggttaacccttctanggccggncanaggaagagaacattcaacactccgc

SEQ ID NO: 26291 - DNA, 544 bp, Homo sapiens
  misc_feature (1)...(544): n = a,t,c or g
gaccatgagcttcaataccctggtgttttggatggctatctggtacccgggtgccagtctctgtgggtggtccctttcttaaggagtatggtctaaggtagccatgttaccttcccaacagtaacatgtgtccctggattttctgctcagaagactggggacaaacttttagatcagctgctccaatgctccaaggagggtgagcagtgccaagggtcaccaacacctaatggctttactgctcaccacccatanattccctctctcttcaaaacctttccttcagccctccgcccctccactgcaactccttcacaatgtataatccaaagaggttttattcctctctctcgtacctcctgagtctccttctatttgtctgaatgatgcttttactctgccactgggacctcttaccctcnnnnnnnnnnnnnnnnnnnnnnnnnnnnnnnnnnnnnnnnnnnnnnnnnnnnnnnnnnnnnnnnnnnnnnnnnnnnnnnnnnnnnnnngangnaactgaatcatggggacaatctttccatgt

SEQ ID NO: 26292 - DNA, 550 bp, Homo sapiens
  misc_feature (1)...(550): n = a,t,c or g
gtgaggattttgccacgtatgcatgaggacatcaatgaanagtggatctctgataaaaccagatttgcctatgatgggctaaaacgtcaaagacttaccgagccaatggtcagaaatgaaaaagggcttttaacctatacttcttgggaggatgcgctctctcgtgtagctggaatgttgcagagttttcaaggcaaagatgtggcagcaattgcaggtggcttggtggatgctgaagccctggtagctctcaaagatttgcttaatagagtggactctgacaccttatgcactgaagaggtcttccccactgcaggagctggcacagatttgcgttccaattatcttcttaatactacaattgctggtgtggaagaggcagatgttgttcttctggttggtacaaacccacgttttgaggcaccactgtttaatgctagaattcgaaagagctggctgcataatgacttaaaatggcccttatagcagtccaatggncctcacntacacatatgaccacctgggagatcccccaaaantctntnttttt

SEQ ID NO: 26293 - DNA, 627 bp, Homo sapiens
  misc_feature (1)...(627): n = a,t,c or g
gaggccatntatgacgccnannnnnnnnnnnnnnnnnnnnnnnnnnnnnnnnnnnnnnnnnnnnnnnnnnnnnnggcacnagctgtcatggaggangaggaggatgaggaggatgaggaggaggaggatgagctcaaagatgaagttcaaagtcagtcctctgcttcctcagaggattacatcatcatcctgcctgagtgctttgataccagccgccccctgggggattctatgtacagctctgcgctctcacagccaggcctggagcgaggtgctgaaggcaagcctggggttgaggctgggcaggaaccagctgaggctggggaaagactccctggaggggagaaccagccacaggagcacagcataagtgacatcctcacgacctcacagactctggaaacagtgcccctaatcccagaggtagtggagcttccaccgtcactgcccaggagctctccttgtgtacatcatcatggttccccaggagtggatttaccagttaccataccagaagtttcttcagtccctgatcanatcanaggagagccanagntcatcaagacttgtaacancagacanaagagctatgaccaatccaaggancatcangggaanaanaattgt

SEQ ID NO: 26294 - DNA, 552 bp, Homo sapiens
  misc_feature (1)...(552): n = a,t,c or g
gctagagatttatgtattctccatccctctcaactctctctctgtggactgggccaccctagtctgggagccggcagttaaggttggttacccactgcagtgtctaagtatggggaattcagactcttctctggggattgaagcttgcactgagtttgaggaaggggtcagaaccggaattcctgagtcacatcgggtggcagatgccaagaatatgaagggccgttaattgttttccgacctaccagtatgagtttcttgcacaccctgtgctttttttgtacctctgtgcttggcatgtgatggtccccatgcatggattgtcctttcttgtctagtctgcctttcaaaatccagttgtcgttacctcctccaggaagctttccctgaccacccacagtctcatcctttgctctgctatctggatgcctgaagtcctttcctgctcatcgttgcaatgactgcattgtcactgcctgtctctgtgactccttgcggttccctgaaganannnccntgtcttgancancctgtatccctgggtgccatcca

SEQ ID NO: 26295 - DNA, 548 bp, Homo sapiens
  misc_feature (1)...(548): n = a,t,c or g
gnnnnnnnnnnnnnnnnnnnnnnnnnnnnnnnnnnnnnnnnnnnnnnnnnnnnnnnnnnnnnnnnnnnnnnnnnnnnnnnnnnnnnnnnnnnnnnnnnnnnnnnnnnnnnnnnnnnnnnnnnnnnnnnnnnnncttaaaatctttananagtctttgcctgattgaacagtacnccgaggtaccatccttaaacacaanaggcgtggggagtgggaaancgggtgatggagggtggattgaggggtatttacaaaaataaaagacatggccncagcactcagatatttcanaanctttggggagataanctatatacatttaaaaagcactaaagaattacaggtcatatccctaatgantatagatacaaaaatcctcaacaaaatactancatactgacttcaacaatacattcaangaataattcaccatganctagtgggatttatccctgggatgcaagtatggtcaacatatgggaatcnataaatgtgatacaccacatnancaaaaatcatatgacattcaatngtacataaaaancatt

SEQ ID NO: 26296 - DNA, 546 bp, Homo sapiens
  misc_feature (1)...(546): n = a,t,c or g
gctctgtganagcactgtccccacccaacctgtcacaacggccagaaccatacaccagagacacactggcaggttaggcagtccttctggtgatcctattccattccctcctgctgcggtttctcttggcctgtcctcactggaaaaacagtctccatctcctcaaaatagttgctgactccctgcacccaaggggcctctccatgccttcttaggaagcagctatgaatccattgtccttgtagtttcttccctcctgttctctggttatagctggtcccaggtcagcgtgggaggcacctttgggttcccagtgcccagcactttgtagtctcatcccagattactaacccttcctgatcctggagaggcagggatagtaaataaattgctcttcctaccccatcccccatcccctgacaaaaagtgacggcagccgtactgagtctgtaaggccaaagtgggtacagacagcctgggctggtaaaagtaagtccttaattacaaagntgcnttaaagttgtctaagnaaacacactgatgttg

SEQ ID NO: 26297 - DNA, 512 bp, Homo sapiens
  misc_feature (1)...(512): n = a,t,c or g
ggggaggtggcctcatggaagtaagaatgtacctcccttttctagtcatctgcttttcctctgtgtcaggccctgtgctgggcatggggcccagagatgaatctgtgtagtccttccccaccttccccaccgggagctcggagtctagttgggaagaagatgcagaaatcaccaactccacctttattgaataggtgttcttatgcaaagggcaggaaaaaagacattcctagtggaaggaacagcatgtgccaaggtacacaactgcctgcacttgggggaatgcagctgaagagacaggctcaagacaatgagtgaggacttgacctatggcaatggagagtcactggatagtaagcagggangggcaaggacaggggcangaggaactgtccaagtgagagatgccgagatcttgggctggggactgtgccatgggataaggacantgagcgatgtgaatctgtttaggaggcagancancanggtgtgataatgaactgcagtgggca

SEQ ID NO: 26298 - DNA, 513 bp, Homo sapiens
  misc_feature (1)...(513): n = a,t,c or g
gatcagatcagagtataagcggatgtacggcaagtcgctgtaccacgacatctcgggagatacttcaggggattaccggaagattctgctgaagatctgtggtggcaatgactgaacagtgactggtggctcacttctgcccacctgccggcaacaccagtgccaggaaaaggccaaaagaatgtctgtttctaacaaatccacaaatagccccgagattcaccgtcctagagcttaggcctgtcttccacccctcctgacccttatagtgtgccacaggacctgggtcggtctagaactctctcaggatgccttttctaccccatccctcacagcctcttgctgctaaaatagatgtttcatttttctgactcatgcaatcattcccctttgcctgtggctaagacttggcttcatttcgtcatgtaattgtatatttttaattggaggnatattttcntttcttacagtcattgccanacagagnatacaagtctgtttgctgcatacaat

SEQ ID NO: 26299 - DNA, 508 bp, Homo sapiens
  misc_feature (1)...(508): n = a,t,c or g
gctttgcctcagtttcctaattgagagtaacagtacttgcttcaaagtgttgctgtgaggattcgtgataaagtacacgttgaccactgacaacactgcccgacacatagtaagccttccataaatgtgaccgccatcaccatcattgtcatctccaacactggaaggaacctgcaccagtctggggtggggaagggctgtgattcccacagtttgggggagtgtcacctcacggtcttgggattaaggtgtcttctggccccctatagcaacatgtgcctctcctcacacttcctgagtagacagcccaatcacttgtcnttcattccccctcgaaagcaggttactgcangacngggctgtgtcccccacacctaacaaaggacctggnacatggnangagcccantcangtatttcttgagagttgcacagattgnggagagttggntntgtttcctaatggnttncccatggaanttangttnngnatccngaaggattctttg

SEQ ID NO: 26300 - DNA, 513 bp, Homo sapiens
  misc_feature (1)...(513): n = a,t,c or g
gctggctgcttcatttctaaccctaactcatcttctgcagtttgatgaaggaagcacgaaagatggtgagtcgatgcacttacttgaacattctcctgcagacccgttcaccagaaatattggtcaagtaagtggggatctggatggttggaatgggaaggtgtagcgaaaagatggggcggtgaggcatggggttcctcggtcattgatgggagactgggattgtaggatgtggtactgtcaaaacctagaaagggcattactgatagactctcctgcctgcctgcagatttattgacgttggcggctacaaacttcttaacaattggctgacgtattcaaagacaaccaacaacattcccctcctccagcaaattctactgaccctgcagcatctaccgctcactgtagaccatctcaagcangtacctttagtcnttaaaccctgattctccttttttgggttagtctaatggatgaaaaaccaaactgactgatgtggtgtaanctggg

SEQ ID NO: 26301 - DNA, 509 bp, Homo sapiens
  misc_feature (1)...(509): n = a,t,c or g
ggaatgggcaggaggagagagctggggtcatgtccactggccctatcaggaatggagactggacctttcagactgtggtgatgctataaatgactcctgaacttggacatgtctacacctgccttgtcgatcactccagcctgctgagccctgtttctgtggagtggagtgagaattagtttctagtactctctgggcctgactcaggactatactgactcaatacagagcctgtgtcacttctgcgtttatcttggtcacaacatgaattattctttcccttgatctgggacagtcacagaaaccagagtccttgggttanggtgggagaaaacatggcagatatctatcctcatatctccaaagaaatgangagatctaatcacctcattatgtgcttccaaccctatgaactggtgtcctctaantccttggtctagtatttaggangcattcntatggctgtgagaatctgtaaccgatggggggtaactccatgggtgccaact

SEQ ID NO: 26302 - DNA, 513 bp, Homo sapiens
  misc_feature (1)...(513): n = a,t,c or g
ggagagctancaccacttnnnnnnnnnnnnnnnnnnnnnnnnnnnnnnnnnnnnnnnnnnnnnnnnnnnnnnnnnnnnnnnnnnnnnnnnnnnnnnnnnnnnnnnnnnnnnnnnnnnnnnnnnnnnnnnnnnnnnnnnnnnnnnnnnnnnnnnnnnnnnnnnnnnnnnnnnnnnnnnnnnnnnnnnnnnnnnnnnnnnnnnnnnnnnnnnnnnnnnnnnnnnnncaataatatggcacctgcaaatttcctgtgaattggtaagaagccaccattactctttgtgctccgggatacctaagtcagagatccctttggggatgaggcccaagtccataccccgccaccatgccaggcagtgtgtgactagcaagagggtaaggtccaataagccgcccccgggggaagtcagagaaagaaatggggcatgggagtcaggatcctcacttcctaagncactctcagaggggagtgtcaaggacgctangnccagagccagcctccacacctagaa

SEQ ID NO: 26303 - DNA, 510 bp, Homo sapiens
  misc_feature (1)...(510): n = a,t,c or g
gcacgctggtggctaaactggcaattacactgtttccttttggttcaattgcctaccgcgtcaatcttctctgtggcttatttggagcagtagctgcatcattactttttttcaccgttttcaggctttctggctcatctgctggaggaatccttgctgcgggggtgttttcattttctcgtctaacatggcagtggtccattgcagcagaggtttttagcttaaacaatctctttgtggggctgcttatggctcttactgtacattttgaggaagcagcaactgctaagganagatcaaaggtagctaaaattggtgctttctgctgtggccttagtttatgtnaccaagcatacaataatactctatgttttgtgcataataccttggattctctttcaacttttaaaaaagaaggaactctccctggggctctttgttgaagttgancctgtacttctctgctggttgctgcccatgtccaacttccatctcatctaccttaatcag

SEQ ID NO: 26304 - DNA, 513 bp, Homo sapiens
  misc_feature (1)...(513): n = a,t,c or g
gnnnnnnnnnnnnnnnnnnnnnnnnnnnnnnnnnnnnnnnnnnnnnncaaattcaaagcttggagtgatggtcccagtggttatgtctaggagccctttttcctgccagcccctcaggggattgatgactctcaaatgcttcaggtgtgacatgggcacagcagtgagtcattcctctgacattctttgggaagaacattttccatccaggnttccaggnataagatccaantcctctggtgataaggagttcacagacaggacaatgtctgagtgtatcntaaacccagggnccatggcttgtgttcacaccagaacctccaaggattttgaagggttttgtttgggtgnttgttgnngtttgttttttgngacanagtctctctctgttngcnangtngngtgnantgggancaatctcagctcactggaaccntcggccnccnggtaangcgaatcncctgnctcagctcctgaatancngggactaaaggtgnggnccancaaacccgg

SEQ ID NO: 26305 - DNA, 505 bp, Homo sapiens
  misc_feature (1)...(505): n = a,t,c or g
gccttttagaatgaataatttttcataatgacgtgtatataattgagagatacagaaagtgctgtggcaccctggaggagagagtaaatttttcttcctaaagtaatcttgcagatcctaataagagaatgggtgttcagttgggtcttgaaggattttcatgaactcaccagagagtgaagggaagagcaaagtcataaaaatacaagagaatatgacactttctgggactgcaaatgactagttgtggctggagtgtcagttgctagtttaaaagcagtggaagatgagcctggggaagttggtaaaggccaggtcatgaaaggtcaggaatgctatgtaagaatctnnnnnnnnnnnnnnnnnnnnnnnnnnnnnnnnnnnnnnnnnnnnnnnnnnnnnnnnnnnnnnnnnnnnnnnnnnnnnnnnnnnnnnnnnnnnnnnnnnnnnnnnnnnnnnnnnnnnnnnnnnnnnnnnnnnnttaccgggtgtggggggggcatgc

SEQ ID NO: 26306 - DNA, 398 bp, Homo sapiens
  misc_feature (1)...(398): n = a,t,c or g
gctcccactgtgtgcaggagctggactctatactagggacatcttggtggaaaacacaggcaaagtctacccacctggggttctaacgagacaaagagagggttggagccatgggcatagctgtgaaggcaatgaattaaatggcaggatcaaacaggaaagggtgggcagggatgctctctgtatggaaggggcatcttcttggctttgagatccaaatgccaaaatatttgtgagcagcaggccacacccactcagtaacagagctgaaccacaaccctccatagatgccaaaccaaacaccagatcagaccaataatgtgggacagagaccttggcttgaaagggtctggccactgagctcacaaangttttttcctaagctttttttttttttt

SEQ ID NO: 26307 - DNA, 513 bp, Homo sapiens
  misc_feature (1)...(513): n = a,t,c or g
gggaaagggcatttcctccctctgtaaagtgtagttagacaagggactgctctcaggtcccccctggctctgtcagtcttgttctttgaagagagagctggaattgaagcctcttccttctcccttcatctgaaaactcggaacagggaacgtttgagaggttgatcaattcctgaactttcaaaggtagccggagaatcaactctagggaggaaagcctgaggggcactattgccctataacccagggacagcaggaatatggggaaactgtggcataacaccatagaaaagaccctgtcacccagcatcccattcccaaaaaaagtttggcaggaattgaagttaaactggggaagcaaggacccctggaaaggttgggtcccaatgggcctcagattggatttttattccttcctgaattcaaactccaaagctagaggagctctcccactcctattgtggnaaanggcanctgttgcccctgtccccaatcaggggaaacttggncaag

SEQ ID NO: 26308 - DNA, 509 bp, Homo sapiens
  misc_feature (1)...(509): n = a,t,c or g
ggggcatggtggcacctggctctgactccgcatatttctcgagtatgaagtgatgtgaagtggggtccctgggtgtcctctgcatccacctgctcattgagtccttctgagcgcagctttggcaggagcagacagtctgggctggacctcgacctgctgccctggaaagaaagcccttgctccctgcacttgctgtcacagctgtgtcttcctgggccccctctggcttgggagtcgtcaccagctctgcactggtgtttggttgtgtgagctcctaatgttcccaaaggagtgagcactcatttggagaactgantcctcccatgatggcactgcttaaatccaaacccaagagtcaagtccagaggtcctcgacctgtgaggcaagtatggtttttacatttttaaaagttcatacaacaanataagacaagncaancagaccaaancaccaagggagaacatgttaacaaaggctgtctgtggccgcaaagctcaaatatgtgcta

SEQ ID NO: 26309 - DNA, 511 bp, Homo sapiens
  misc_feature (1)...(511): n = a,t,c or g
gatttatttatttatttattttttgagacggagtcttaccnnnnnnnnnnnnnnnnnnnnnnnnnnnnnnnnnnnnnnnnnnnnnnnnacaacaatttaaaaaaaaaatgtgtttanaanagtacctggnacatantaccatttaataangtttactgaataaataaacagcttccactgganatgtgtgtgatgggtagggantccncatnagtgagtggngggttacnaaaggcttccctgaaggtgantaatgggatcncncttcccngcctcanctgagggctgctgccttagggtcccctgttaaggaggtgacattattgtaaggngaacctcagatgaatcatcacagcagccatctgattgccttgtgccnaagacgtctgaaaagcactttgagatgcanaatcctggcggtaggttggctgggttgaatcngagctctacnacctaccanctctgtagccttganaaggttacttannctttcttaagccncantttattg

SEQ ID NO: 26310 - DNA, 520 bp, Homo sapiens
  misc_feature (1)...(520): n = a,t,c or g
nnnnnnnnnnnnnnnnnnnnnnnnnnnnnnnnnnnnnnnnnnnnnnnnnnnnnnnnnnnnnnnnnnnnnnnnnnnnnnnnnnnnnnnnnnnnnnnnnnnnnnnnnnnnnnnnnnnnnnnnnnnnnnnnnnnnnnacggtgattctttctggcagaaattagcanagtaggtgtttttggaacaattgctaatganaagaaggaaaaacagaaaaaaaaaattttctgtttatgggaggtgacttatttctctatcaatcctgtgagtgatttagcatggcaattcatgaacactgagttgtttccttgctctgattgnctgttgctcaatgaaatggcttttagcagggctcaaaggtgaagccagattctcctgcactantaggatangcatggagacacnagtgttcantgtggcctcnggttgcctgaaatttgctggnaactccaataccttgaaagaattaggttccaaagtgggaaattgtntgctgttgtgaaatgcatcnanacttaggaaa

SEQ ID NO: 26311 - DNA, 502 bp, Homo sapiens
  misc_feature (1)...(502): n = a,t,c or g
ggttgagcaaacccgtgatatcagcatgacatggtcatattgtttaatctgctttacaagaacaaacacttagctttaatattggcatgcgttgttaaacatttattacaagtacttcttatcaggaccaacgagacttctgcttagcaataatttgccagccctttaaagttgtttatgaatttcagagcacttaaatggcgtttttatgtgaaggttttgaaatcgacgggagaaagggcaaatgcgagcatctgatttgtttgtaccagtgctgcttggaagaggactgggctttgaggagacactcagcatttcttgtcgcgtgtaggattgaatgggtgcatcaatcaaatggtgctgggattagcggttggcttgttgggaanaaaacagctcantgtgtttctcagtggcattccattggcaccacagncaagatgacttcccttgctcangttgtgctgncactccggcatcagcttccctgacncctacccgt

SEQ ID NO: 26312 - DNA, 519 bp, Homo sapiens
  misc_feature (1)...(519): n = a,t,c or g
gggtctccgtggctgtcangagcattcctcagcagcaggctttctggctccaaatgaatatgccttaagccctcctgggcanaaatgcttctcagtgtctcanttctgctgtctgtagagtcgtggtttctggtcacgcactcaggaactccgctganatgttcccagctcccctttgtaccagggcccaagaactganccaggcctgggaggtgagggcagtacanagctggcagtggcagggaaaggctganaagggagcagaggtcccaaatgtaaaatggtctctgccatggggaggctcggttcacctcccganacctggggttggcggctgtgtgtgcgcctggcaggtggctacgcangcttgcagcccagcatcacgctgttcgttcctgggctggatcccttttagttctcctctgccagggaanttggatctgaacttcccctcctcagaaatcccaagttttaatgtcacaattantccacatgtggaatganaaggttntnactggg

SEQ ID NO: 26313 - DNA, 520 bp, Homo sapiens
  misc_feature (1)...(520): n = a,t,c or g
gcaacaacaaaaaatatacatctacatattctctctgaaaccaggttaatgacccagagactgcagtaaaggaattagaagctctcttgggttttacattgagagtaggtgttccaaacactcggcctgtgaaaaagacgatggaaattccgaaagattccttgcagaagtacctcaaagacttactgggtatccagaccacaggtatgtgggcttctttcatgttttggtagctctctccaaggcgaaggttttggtctgtttctcacttttcaaccctaatggaatgggctggagacaaagaagctttacagtgaggaaaatagccattgggcctggtgcatcggagcactgctttcagttttgcttgggaaaaagcattaacttccctatttatgcatctccaaaagtgtactatccactcttacacctganagtgtggtatgnnaatggntgcctgcttcaacanggagaggacttggggactgcaatgtgtgctcanaggatttacagtttcaat

SEQ ID NO: 26314 - DNA, 522 bp, Homo sapiens
  misc_feature (1)...(522): n = a,t,c or g
gaactgggtancacactgactcccaagatacaaaaagatggcatcagtaagtcagcaggtttagaacagcctacagacccagtggcacgagacgggcctctctcccaaacatcttccaagccagatcctactcagtgggaaagccccagcttcaacccctttgggagccactctgttctgcagaactccccacccctctcttctgagggctcctaccactttgncccagataactttgacgaatccatggatccctttaaaccaactacgaccttaacaagcantgacttttgttctcccactggtaatcacgttaatgaaatcttagaatcacccaagaaggcaaagtcccgtttaataacgtgagtgacagtgggcgctgggtgtcgtgctctgtgtcctgtctgttgatttggaagccagctacttttggntttggngaactgaanttaccttngaggggcaccgaggtcatacaaagctaaaatgttatcctgcagnctcactggtttggataactgt

SEQ ID NO: 26315 - DNA, 526 bp, Homo sapiens
  misc_feature (1)...(526): n = a,t,c or g
gcggcacganganactgatactcagagcatctgagccgtggcgtgccaaaaagtcaagtcactcatnaagggtggaggcaagaattttgagccctgacatcagggttcagccatggagctcctggccacaaccctctgctgcctcttggctgctgctggncaaagctggcctgtcccggncctctaccattaggtcagcaccanggaggggtgaaccatgaagggcaatgaanttccggattcggaaattaaggcatttgccanagggccccacagcgagcatttctcataacatgtcatggacagccactgtgcacttgggagctagangtggagctggcacacanggtgacttggtgcacgtacaatgtgagtgactnanaaganaagcanagtgtgcatgtctgtgtgtgagcacagaacccgtncacanncacttgnctcctgaacacaagaattancgcncagataagcagctgttttgcaaatcttacacatagcaaancctggtctgaagccangaggg

SEQ ID NO: 26316 - DNA, 520 bp, Homo sapiens
  misc_feature (1)...(520): n = a,t,c or g
gagcttgggacccagaagataggtcagctccctcatttcacagcctaagaaatggaaactgtaggatttacaaaccatagtttcagctgggtattttactggatgctgctaattttttaaaatgaatgttcagttatttttttccattctcctctctctctgttaaattacatttgcactcttcaccgagtgccagtgagccatggaatctanccaagaaagcaaagctcttccagagactcccagccaccatcaaaaggtgcttggttttcaaagagcttcaatttcaatgctctctgaaatgaactattttanttcnaaaatttcnaaagcctgatgaaaagttctccaagcatgcatttttcatgttanaaaacacatctanatctctataacannccccanganatgacacgtttaccctgcagtctgcaaatgngcattacttcccgngggtctcctgggaaatctttngtanggaatacacacngagggnttgncaaggnaatnaatanctttt

SEQ ID NO: 26317 - DNA, 506 bp, Homo sapiens
  misc_feature (1)...(506): n = a,t,c or g
ggggatacttaaaatgcatcttggaggtggaacttgagggttgacaggaacatattaantangtaatcgtgaatacttangcctaattccccgattttacagatgaaaaaactatgatttatagttaagtttttttgctggggncataaggttantgntaagtgntcaattactgatatacctgaaatacnnnnnnnnnnnnnnnnnnnnnnnnnnnnnnnnnnnnnnnnnnnnnnnnnnnnnnnnnnnnnnnnnnnnnnnnnnnnnnnnnnnnnnnnnnnnnnntaataangcacgagaccctgtctgtacagaananaacnacntacanngccaactnntctgacnccaaancccatgctttctgttactactcanaagngcncattgagaanacaattgcttgncnatggaaacntgcnatcaaggaatctggaactttcctattngcgnnacattnntgnacnnaacanngaaatngnttttganccnagaaggagaacttc

SEQ ID NO: 26318 - DNA, 507 bp, Homo sapiens
  misc_feature (1)...(507): n = a,t,c or g
gaagctagttaggaccaattttcatttatcctaggtgcanaaaataacttanaaaacttactgcacanagggttacaagtgaagagtctgcatattacttaatgtacaaaattgatatcgtagaaagactatgctttggatttcttctgttgtgggctccantcctagtttttgccagttaatttctactgtgtgaccttggaaaagatttctctcatcttttgggtttctcatctgttaaaatanggatgataatactaatttcttgggattcatgagaatatnaatgangctctgggcatatatttgtcctttaatgttccattttattttacnttactttattttgaggtggaatcttgctctgttgctcagnnnnnnnnnnnnnnnnnnnnnnnnnnnnnnnnnnnnnnnnnnnnnnnnnnnnnnnnnnnnnnnnnnnnnnnnnnnnnnnnnnnnnnnnnnnnnnnnnnnnnnnnngcnccatgcctggcaanttnttcatat

SEQ ID NO: 26319 - DNA, 503 bp, Homo sapiens
  misc_feature (1)...(503): n = a,t,c or g
gctgccttggacaacttttctcatgttgaagccactgccttcaccttcaccttcatccatgtccaacccccgacttcatcccaaaggacagccgcctggagatgacttgaggccttacttaaacccagctcccttcttccctagcctggtgcttctcctctcctagcccctgtcatggtgtccagacagagccctgtgaggctgggtccaattgtggcacttggggcaccttgctcctccttctgctgctgcncccacctctgctgcctccctctgctgtcaccttgctcagccatcccgtcttctccaacaccacctctccagaggccaaggaggccttggaaacgattcccccagtcattctgggaacatgttgtaagcactgactgggaccaggcacnacgcanggtctagaangctgtggtgagggaagacgcctttctcctccaacccaanctcatcctncttcttcagggacttggtgggtacttgggtgatgatcc

SEQ ID NO: 26320 - DNA, 500 bp, Homo sapiens
  misc_feature (1)...(500): n = a,t,c or g
gtgcaggactatgtattttgtgctagacttattacaagtttaaacaaatagtacagtattagtagtataaaggtgcctgaaatttgttctatcatcttttacatatgtatttaatattacaagaatttgtcatcttttcagtgaattgtttattcttacataatatgcgaaagcccctcctttggtataaaaatactggatttccctctctgactctaatgggaatgagatccttcttctgcggcctgactagagttgctggaacaggttatctctctttggctttttctactttcccaagttattagagacaatcaggaatcactgcagcaatcctggccccccaaagaccttattatccaagaagtttgttgttgaagggtaggaaatnnnnnnnnnnnnnnnnnnnnnnnnnnnnnnnnnnnnnnnnnnnnnnnnnnnnnnnnnnnnnnnnnnnnnnnnnnnnnnnnnnnnnnnnnntattgancatcagggtgggt

SEQ ID NO: 26321 - DNA, 537 bp, Homo sapiens
  misc_feature (1)...(537): n = a,t,c or g
gagagggcattccaggagaatgtntgggcaaaggcacagggatnaaancgagcacagctgttgggggctgaacctgggagctcanccatgtnactgcccatggngtggtggagtcnggnnaaatttgcaacctgtcccctacatgttctgcctcacggagcagggctctgaaagaggganatggttcttgcaggggcatgattggnananagattttgtttggggcnacacangtcttgctaacttaggtttgttctgggcttggtnatccttagggcaaaagtctcnacagctganagggggctgtctcnggtgaatgggcccctgaaanagggtcataggtttagcaaancccttggagagtnagtggggtcccagganggtagttctatacagngacttgggctctntggctgtttctttagnggtttctngantcgncacctctaancaattcgccaattcacctcgnantctgggtanccgntttanagnttncccanacantccatnctnngacnnttntgaccccnttcg

SEQ ID NO: 26322 - DNA, 547 bp, Homo sapiens
  misc_feature (1)...(547): n = a,t,c or g
gggaaggggaaaagatgggtctttgaagacaccatgcaagcctctgaaagtgggtggtaagggcacacccgcgcccttggccatgatggcgatgtgcgctcgcctgggaactgacggtccctgatccagtggccgtgactgcttcagctcctgcaagtgcatttgcccaaaacataactcgctgtgactggctgggcaaaactgagcccctcctagaaaccatccaaacccacatgcctggtccggcctgactatctcaggagctagctccggctgtcttctcgggcccgcctgtcagcgtctttcagccactcttggcatcattccctttccagcctgcaaagcacatctcatcccaccagccctcctcctgctgcttctcttttcacccatcactcctatttcatgagtaaaagaccaagatgtctatcgaagctttgagctccancccatgtcctgggctttcgatcctanttcccatgancttttttgacccaantgtgaagctngggcntntncaggaaaaggnanccaantntgggaggga

SEQ ID NO: 26323 - DNA, 540 bp, Homo sapiens
  misc_feature (1)...(540): n = a,t,c or g
gcggnacgancatanggntcnnnnnnnnnnnnnnnnnnnnnnnnnnnnnnnnnnnnnnnnnnnnnnnnnnnnnnnnnnnnnnnnnnnnnnnnnnnnnnnnnnnnnnnnnnnnnnnnnnnnnnnnnnnnnnnnnnnnnnnnnnnnnnnnnnnnnnnnnnnnnnnggaatgnncaaattanntnnntaagtacataaataaatgctttggtcngtttgctctantcactatcttccaacttaantctgacttgaatattcttcatagcactttcanancgcactgggattnttcctcagtttccacctgtangacatnaatggggnacgaggggncangataaccnnntcgcaacangatggctcncatagatantnatgacaacnncaagtnnttcancancttcaactganatgtccatgttctcacantgggactgantncgaggancgntgncncacaancaatatncaaagcaaggtttgcaaaggccaaccaaggtgcactggggagcaaagganncccaccccaaancagggaag

SEQ ID NO: 26324 - DNA, 542 bp, Homo sapiens
  misc_feature (1)...(542): n = a,t,c or g
gcggcacgagtgctcctgctggatatcctaccttccaggggccctaaagcatttgatacattcctagattccctacaggagtttccctgggtcagggagaagctgaagaaggcaagggaagaggccatgaccgacctgcctgcaggtgacagattgactgggatcccctcgcacatcctcaacagctccccatcagaccggcagattaaccagctggcccagaggctgggccctgagtgggagcccatggtgctgtctctgggactgtcccagacggatatctaccgctgtaaggccaaccacccccacaacgtgcagtcgcaggtggtggaggccttcatccgttggcggcagcgcttcgggaagcaggccaccttccagagcctgcacaacgggctgcgggctgtggaggtggacccctcgctgctcctgcacatgttggntgtggtgcctccancaaccgctggggantgtgtccctgatcatgtggggtnaatccnganttcactcnnagcaggggntttttngtaagttgntttttc

SEQ ID NO: 26325 - DNA, 531 bp, Homo sapiens
  misc_feature (1)...(531): n = a,t,c or g
gggccatcgtccccaccttcacctgggccgcccggcaggcaggcgacggaggcccgggagccatgggtgactggggcttcctgganaagttgctggaccaggtccaggagcactcgaccgtggtgggtaagatctggctgacggtgctcttcatcttccgcatcctcatcctgggcctggccggcgagtcagtatggggtgacgagcagtcagatttcgagtgtaacacggcccagccaggctgcaccaacgtctgctatgaccaggccttccccatctcccacatccgctactgggtgctgcagttcctcttcgtcagcacacccaccctggtctacctgggccatgtcatttacctgtctcggcganaagagcggctgcngcannaggagggggagctgcgggcaatgccggccaaggaccaangtggatcggccctggcggncgtnanctcagatggcaaaatctccgngggnaaaagatgtccctncgcatcncnganacnganggnaatnntnccnnttgttcttt

SEQ ID NO: 26326 - DNA, 540 bp, Homo sapiens
  misc_feature (1)...(540): n = a,t,c or g
ggttaaccctttatctactacatggtcaagttagtgttcaagaaaagccaaatgcattgaaagattttttgcctaacgaantcccttccttgcttctggcacagcaccagtttcctgcaagatgaggtgtcttcaggcctcactgctggcctcacctaggtagccacctgggcaccatctggtttcaaatccccctanttgctctttgaaatttctctttatttcgggggatagatccttttgcttataaggttggcnaggcttttctttgtttgctttttaacntaacttgtatccgacatttccanatgtttcncagtgganaaggggcttccngtgtcagctcagtctgctgtgcagacctgaggtcnancctaacnaagtggaacagggaagttcactatgggaaanngntttttctnggttngccncganncctggtgttatacganancccnnaaccanngcttccngnanaancnantnctttcancangaagaggaannccgggcngnanttngnnnncgccaancaccctg

SEQ ID NO: 26327 - DNA, 534 bp, Homo sapiens
  misc_feature (1)...(534): n = a,t,c or g
gcggcacgagagaatctggaacatacaagttttanaatcaatccatacgcagactctctgggaaancctgattatccaggcgctgacattcaacctaactctccacccttttttggggagccagactatcccagtgctgaggacaatcanaacttgccaagcacttggtganaacctgattattcagatgctganaatggtcatgattatggctcttctgagaccccaaagatgaccangggggtgctcagcagaacatcttcaatccagccctcatttcgtcacaggantgatgaccccgtgggcagtctttggggagagaatgattaccctgaaggcattgaaatggcatccatggagatggcaaactcatatggccactctctgccaggtgctcctggaaatgggtatgtgaacccctgcttatgtnggtgaangtggcctgtccatgcttatggaaaccacantggcctgaatgtnatgggacaanatnaccccagggnaaaantttcgcagccctaaacccangncatt

SEQ ID NO: 26328 - DNA, 541 bp, Homo sapiens
  misc_feature (1)...(541): n = a,t,c or g
ggtgtccatcaaagtgcagtcggccggcatgaccancgaggtggttgaagacagcactatcacaatgatagaccgcccccctcctccacccccacacattcgtgtgaatgaaaaggatgtgctaattagcaagtcttccatcaactttactgtcaactgcagctggttcancgacaccaatggagctgtgaaatacttcacagtggtggtgagagaggctgatggcagtgatgagctgaagccagaacagcagcaccctctcccttcctacctggagtacaggcacaatgcctccattcgggtgtatcaggactaattattttgccancaaatgtgccgaaaatcctaacagcaactccaagagttttaacattaagcttggagcaaantatgganagcctaggtggaaaatgcgatcccactcancancaattctgtgattggccaactgatgcacacactgcctcagnatcancattcgngcntttanacagctcttgnntganggcctgaagggatntcaaancaatcnattcaggac

SEQ ID NO: 26329 - DNA, 526 bp, Homo sapiens
  misc_feature (1)...(526): n = a,t,c or g
gcggcacgnnnnnnnnnnnnnnnnnnnnnnnnnnnnnnnntcttttttgccagatctttctcctttgtttattccttaatattggtatttcttagggctctgctttcttttttttcacttcactttttaccccctggagttcttgtccatttttatgtctttgtcaancatttatatcttgacaattcccaatatttttctccagagctccaaacctanatatttgtctgctggagatcctcacttanatgtcttataggagctcaaactatgtatgttanaaactggactcatcagctttccccccaaaaaaatctggtcctctgcattattttattcccttcctgttttggnaanaacaantacncttacntgaaacctgggactcancgtttggtgcttccttcctcctcttacccagatagcggtaacttacgcaaagacncagtgtcncccaaactaactgnnccctttaacccccaggggtaaanctaaaacaaactacagggttaaaanngannaggga

SEQ ID NO: 26330 - DNA, 516 bp, Homo sapiens
  misc_feature (1)...(516): n = a,t,c or g
ggtagaagattcaaagcagcttaaaaaaaggaagtaaaaaagaaataaggtcaggagacaagattgagtgactgtgaaacatcaacaataggcagatttaaaataaagtcagggaaatagctaattaaaagaattaaaanggtgaacnaggtntnanatcnnnnnnnnnnnnnnnnnnnnnnnnnnnnnnnnnnnnnnnnnnnnnnnnnnnnnnnnnnnnnnnnnnnnnnnnnnnnnnnnnnnnnnnnnnnnnnnnnnnnnnnnnnnnnnnnnnncagcaggaagagaggctggcatgtggggctccagggggtgtgaaggagggtccacacnctccttcctccacctggccatactgagcancacattctcnganccancggccctacaancanccanccttttcctcntgggtncccaaagggcgcccctgcctgnccattcccaattcgggatcctgtgacttctgcctctnaaaanggcntganggnatttcctgaacaganctncaggttc

SEQ ID NO: 26331 - DNA, 563 bp, Homo sapiens
  misc_feature (1)...(563): n = a,t,c or g
caggccagcaaactgttaagccaagtacgttgcatcctctgatgatgagttacttgcataatgaacaggatggccaggttcgaattgaggactcatggacgacttggaattctgtgccaaaatgtgactggtcaggaagtgtgggcccctacaccccttttctccccaccgctggctccatcccataaaganaggggccttgcgtgcttctacatggacaccctaacctccgagctcaagctctgttcatatcttccaacaaatancanccttttcactcccacccccaccgaacatccaagagtatacaggtggttgtctanttcttcttgggaanccagncctggaaagaggccacacagnccttgnaagtaaganaanagttcananctgtctacgcagaatgttctggaatctgacatctcggagcgtggtctagaactnagggggtcngtangctctgggnatanagntncccttcacttgggancttnnngncnnnaannanggaaaanttgncngntggnncctntannncttngacctttaanantgngnggcca

SEQ ID NO: 26332 - DNA, 578 bp, Homo sapiens
  misc_feature (1)...(578): n = a,t,c or g
ctgggaattctgccttggtggccgaancanaagtcactgccctcctaatgccactcatcggaccacacaacactttcaccgccagtccttgtgtgatttgatctttgcaaatcananatagtactgttaanaatttccctgcaggaaanangaanttaaggatatgaggaattgccgtcaggatcagaggtaangcccggaatcccaacagactcccattcccancaccttccgggcacccgccttcgaggcctttcccctccctgccgctttataatgctaattgagggaatgagtttccttggcctganagtgggctaaggctggggctgggacccanggcttatgcaatcccaanggtctggaaaggaaaacaggtcangagtanaaccctttcccaacaccatgggccatctcccacgccccatcttgggcntgggggatttggantaggatnaccatnnattagtcatcacattannnnnctttnggaacaaatgganttcataaaattancctaagggangncnggtcngatgncaancctgtantccnntcttttnnangccnggnagtgg

SEQ ID NO: 26333 - DNA, 566 bp, Homo sapiens
  misc_feature (1)...(566): n = a,t,c or g
ggttcgagnnnnnnnnnnnnnnnnnnnnnnnnnnnnnnnnnnnnnnnnngatgcaaaaattggctgggcgtggtggcgtgtgccgnnnnnnnnnnnnnnnnnnnnnnnnnnnnnnnnnnnnnnnnnnnnnnnnnnnnnnnnnnnnnnnnnnnnnnnnnnnnnnnnnnnnnnnnnnnnnnnnnnnnnnnnnnnnnnnnnnnnnnnnnnnnnnnnnnnnnnanaaatggtggnnnnnnnnnnnnnnnnnnnnnnnnnnnnnnnnnnnnnnnnnnnnnnnnnnnnnnnnnnnnnnnnnnnnnnnnnnnnnnnnnnnnnnnncgtacaggtatgatccgctgancccancagttctgtgaatttcaattcaacacatttangtttgtgtgactaccatcacagtttttatttttttacttccccaccctggctctggnaccccatgcacaaaaatcatctatccattnnctgaannatttctttgacaatttancantatgctgggcctaatnaannttcaanaaaagtnngctgccnncctnangancnttnantnatnggananccgg

SEQ ID NO: 26334 - DNA, 570 bp, Homo sapiens
  misc_feature (1)...(570): n = a,t,c or g
gggaaaaacaatcccaagaaaancnaggaatgtgctgaagtgcagggccagctgcttactcagcacctggctgcggctccagggagggtcgctttgaccccanctgcttactcancacctggctgcggctccagggagggtcgctttgaccccatcaccccgcgtcatgggttctgttgtttanaactganaacagatgcccgaatggcctcanagaagtccttgtgggactctacacttcccccctcaanccctggtaagaggcangccctgtcaganaggggcattganggctgctccatccaatggctggacggttccactcacatcancccacagttgctgtgtgctangcacggtgccacccctcancactgcccgtgagctcctggnccancanancagactggcgtgtgaactaatgcgtaaaganctttgggctgaaggaaggganaccacctangatncacanacaatagtgctgtttgacngggccttggaaatcatgcngtgtcctgtgtaaaaacngtngaaggntncaaangttcccncatnngnngnanaangatt

SEQ ID NO: 26335 - DNA, 557 bp, Homo sapiens
  misc_feature (1)...(557): n = a,t,c or g
gtattgatgatggatatcccaatcccccgatttgattctgatacattacatgaatgtgtcagaagatcatatgcacccccaaaatatgtacacctattatttatcaataaaagaaaagggccannnnnnnnnnnnnnnnnnnnnnnnnnnnnnnnnnnnnnnnnnnnnnnnnnnnnnnnnnnnnnnnnnnnnnnnnnnnnnnnnnnnnnnnnnnnnnnnnnnnnnnnnnnnnnnnnnnnnnnnnnnnnnnnnnnnnnnnnnnnnnnnnnnnnnnnnnnnnnnnnnnnnnnnnnnnnnnnnnnnnnnnnnnnnnnnnnnnnnnnnnnnnnnnnnnnnnnnnnnnnnnnnnnnnnnnnnnnnnnnnnnnnnnnnnnnnnnnnnnnnnnnnnnnnnnnnnnnnnnnnnnnnnnnnnnnnnnagaaaagaaannaananaaaagggccagaatcaatgctacacagatggttaaatccaaaatctgtttattgcatgaatgttaattcctgattttgtcttgncntganaataccaatgaagtagtnggnnaangataaat

SEQ ID NO: 26336 - DNA, 647 bp, Homo sapiens
  misc_feature (1)...(647): n = a,t,c or g
ttatgacngccattacnaatttaanacgactcactagcccggaatttgtgccctcgaccgccaanaattcggcacnanagaactttctagttaaaaaananggcaaaagtctaatttctgaataggaattccctgtttcttgcangtgaattaattgctttctgtcttgggctatttacagaatactgatgacaanctgagaggaangangaaaaaaatctcgtaaaaaaanangaatttttagtcacaaaaaggaaattatgcctgctaagtgagacaagatgtgaattggccttaaaaaggancagacatgaatgttaagtggcanctttgtgctgaangtgggcangcggccttgantggctgaanaggaanaccgggggtgtggangcggtggatccttctagaaccttctanaaattctgtcccttttaacttttttttnnnnnnnnnnnnnnnnnnnnnnnnnnnnnnnnnnnnnnnnnnnnnnnnnnnnnnnnnnnnnnnnnnnnnnnnnnnnnnnnnnnnnnnnnnnnnnnnnnnnnnntgctgggattcagtnctgctnaaaggccgnctaattttcgnntttagcagananggggttcacanggtnggcngnnngnctctaantctcgcnctttttt

SEQ ID NO: 26337 - DNA, 549 bp, Homo sapiens
  misc_feature (1)...(549): n = a,t,c or g
gcatgccccacacctctggacccataggcatttcactgagatggaagacctgcattttatcanatttgtttcctgcactcttacaaatgtcttaccagtaagtctggagtagttgctgcttctcactcactagattcagtcagcataatgtcatcagtgtaatggtccagtgtgatgtcttgtggaagggaaaggtgatcaagatcccttcacacnaaattatgatgtggggctggaaagttgatgtacctctgaggcancatggtaaaagttatattgttggccttgtcaggtgacagcaaactgattttggctggccttgtggacaggtatggagaaaagggcacttgctagatcaacagcnncataccaggtaccaggtgatatgcngatttgcttanncaatganacnccatctggtacancanctgcaantggaatcacnggtttgttaanctnnnnatnntcnactgtccttttccaagatccanttgtctcngcncaggtcaaatngananccgaatnnnaagnngggnggaatcatncccc

SEQ ID NO: 26338 - DNA, 564 bp, Homo sapiens
  misc_feature (1)...(564): n = a,t,c or g
gcggcacganagctgatactcattctcttgatagtgacttctgtgtggttgttatagtggctgggtttctttgatatgaanagtattgcatactattctatgacatttttaccactgcttaccaaagagagaaggtgcattggcttgtggggagaaaaatacctttttangctttacttgtttccattggattgtgtgtttcgattgaaggtcgtctttattttttattttccttgccttgctctgtgtctggcattatgacataagaaaatcaattgattttgacaaaacttantggcctcaanaaagctgaggttaaagggaagagagtttganagaacatatgcatactcagaccttggttttctacaacagcctaaattttanccagacagttgtctaatcatgcancacaancaaggggagtgtcttgaatgatattgtcanagtacgttctgtgatggctcacatgccatttccacagaaatatacctgcttgcttgatcaanctggcagagcaaaattccacgtgntggatgcattatcattnncttnanggttcca

SEQ ID NO: 26339 - DNA, 549 bp, Homo sapiens
  misc_feature (1)...(549): n = a,t,c or g
gctcttttaagggagagtgaattatggcacgaggacaggcatcccggagtcaggtggctgggaacaaggcagtggtcattgtgacccggcagcattcccagccctggtgccttttccccagctctggagacaaaccancaggcctgggtgttccccccacagagcacagagancatcaggcgctgtgaggggcancctgggtgggaaanagggaatggagggaggggtgcagaccgcananaggccgctccaagctgaaaaatggggcacatcanccaaagttgtctttggtgggtatgganaggatgggggtgccctacagctgagtgctgangctggaggntgcattgncccccacgtacaaggggcaccccaccgccacccccanatccccaggtactccctcggcttcatttctgtgccctgccacataaaacaacncagcctgaantttggaatgatctaaagntatttnncaaagnggaagtnatatttggggaatgctgcacctaannnaanagtgaattatnggnatanttnancaccatt

SEQ ID NO: 26340 - DNA, 546 bp, Homo sapiens
  misc_feature (1)...(546): n = a,t,c or g
nnnnnnnnnnnnnnnnnnnnnnnnnnnnnnnnnnnnnnnnnnnnnnnnnnnnnnnnnnnnnnnnnnnnnnnnnnnnnagtagatgcttcttgactaaatgttaaggagattttttccagagagataaacaaggaacagctccttagagtcagtgagatacaggtatggtgtgggcaagcccagatcaccctgagagctcacagaggggattggactcagccctggggagctgaacagacttcctgaagggagttaagtgcctaagctgatttctgaaggattaaccagacagggagaaggacagtcacaaaaagaatagcacgtggaaaggcctgggaggganaggcaacaagacatggatgaagtatagctcttagcagacagtgatgtggagaangggtacctcctgccagtgtctggacattgcttgtgtggnccatactgcanangntacaactccggactggtgactgaactccanccagtgtggatccatacggnttggaantttttacaacaattccacagcttngaagtaaagcgtcc

SEQ ID NO: 26341 - DNA, 528 bp, Homo sapiens
  misc_feature (1)...(528): n = a,t,c or g
gcatagggctcggcgtggtggctcacatctataatcccagccgaggaannnnnnnnnnnnnnnnnnnnnnnnnnnnnnnnnnnnnnnnnnnnnnnnnnnnnnnnnnnnnnnnnnnnnnnnnnnnnnnnnnnnnnnnnnnnnnnnnnnnnnnnnnnnnnnnnnnnnnnnnnnnnnnnnnnnnntancangnngnngaagcaagnnaatggcttgnaccngggaagccgaagntgcaaccanccnagnttacnccattngantccanccngggnaacaagngcnaagcnccgtcccnaaaaaaaaaaantttgnncgtttcnccnaaaaagggtaatgnnttgngtngccctnttaaaaagggggtttnattcctcnnaaaatttnncccggntgnttaaaaaacattncntnncaaatncaaccnnttttanggggaagggcnaantttccnnnnaanggggganccggggaaaaantttaagggnnngcgggcnaantttnggantannccctttnggnngggcgggg

SEQ ID NO: 26342 - DNA, 644 bp, Homo sapiens
  misc_feature (1)...(644): n = a,t,c or g
actcnggccctanggcgaattcaaagctcggtangcnnnnnnnnnnnnnnnnnnnnnnnnnnnnnnnnnnnnnnnnnnnnnnnnnnnnnnnnnnnnnnnnnnnnnnnnnnnnnnnnnnnnnnnnnnnnnnnnnnnnnnnnnnnnnnnnnnnnnnnnnnnnnnnnnnnnnnnnnnnnnnnnnnnnnnnnnnnnnnnnnnnnnnnnnnnnnnnnnnnnnnnnnnnnnnnnnnnnnnnnnnnnnnnnnnnnnnnnnnnnnnnnnnnnnnnnnnnnnnnnnnnnnnnnnnnnnnnnnnnnnnnnnnnnnnnnnnnnnnnnnnnnnnnnnnnnnnnnnnnnnnnnnnnnnnnnnnnnnnnnnnnnnnnnnnnnnnnnnnnnnnnnnnnnnnnnnnnnnnnnnnnnnnnnnnnnnnnnnnnnnnnnnnnnnnnnnnnnnnnnnnnnnnnnnnnnnnnnnnnnnnnnnnnnnnnnnnnnnnnnnnnnnnnnnnnnnnnnnnnnnnnnnnnnnnnnnnnnnnnnnnnnnnnnnnnnnnnnnnnnnnnnnnnnnnnnnnnnnnnnnnnnnnctcaatcanaagtggcgaaaccgacaagnctataagatncaagcgttcccctggantcctcgtgcggcnctgtccacctgcg

SEQ ID NO: 26343 - DNA, 567 bp, Homo sapiens
  misc_feature (1)...(567): n = a,t,c or g
gccatgaccctgggagctcaaanctgcantgaaccatantgggaccactgcantcttgcctacgcagcnacaggganaccctgcctcngtnntagatnccaagtgttccannaaggtggtnaanctgaagccttcaaacattgctaataaaaatgtaaantggtacancttttgtncaaaacangttggcagttccacaaantantanntgtagatttaccanataacccagcanttccactctcantatactgtactaagtgccgtacttagcataccgtgnagtacatacatggaantaagaacntacatcnacacanaaacttgtatgtgttcacagnancantattcacaatggttannanngttaacccacatgtccaacnnctgnntcctacacacaagtggtaagatcngnacaatggaatatttagtncaaaanggaatgncgttccatacatgtacaccatgggtcnaccttnaannagccacnnatttaccnannatcacnncngncacatnnncngtcgatcccctagangantgccntaaagggntnggggggcc

SEQ ID NO: 26344 - DNA, 551 bp, Homo sapiens
  misc_feature (1)...(551): n = a,t,c or g
gcctgatttcctttcttcacattgctgaaacttctgagtcaaacttctggctttgtccccatgggcacatccagcagaaatccttcaggtatcatcatcagctttgacatctctgcagttgaaacttgcaggattttagatgagttagtcattgaaaccagcctccatcttaccactgaccccactgctgagggaaatttaccctcttgctcttcaatcctatggagtaactttccatgagagttttcatgactactgctgttgctggagcaatcatggtagcccctggctggcaagtgaattaagagagaaaaaataaaaattaaatacatgttggtgtctctggtttttcacattatctcttccaatattaaaaccaaaggaaagaaaatagtcttttctgcgtcatattctttggttttaacctttgcattctttgctttcttggctgtattcctgaatctgtcgtggttctcaagtgatgtanaattggggtaatnagtgtccattttgccccaanttctngttanaccngcgttcacataatataa

SEQ ID NO: 26345 - DNA, 504 bp, Homo sapiens
  misc_feature (1)...(504): n = a,t,c or g
ggcctgagcaggggcggggactggagcctgctgcccttggtcgcctaaactggatagtgggggtgggcggaaggcaacgcaccatccctctcccccaggccccaggacctgcagggccaatggcctggtganactgtccataggaggtgggggaactggactccggcataagccacttccccacaaacccccaccagcaaggggctggggccagggagcagagcttccacaagacatttcgaagtcatcattcctctcttagggggccctgcctggtggcaagagggaatgtcancaggaccccatcgccatccctgtgtctctacacgctgtattgtgtatcaccgnggggcattattttcatttgtaatgttcaattccaacccctgtccaagcctcnatttggttnaatttgagccccattccaacaccccaatttcctnggggcacaagtttcttncatttccccaaggagcaaccttgggnacccatttgggaagggat

SEQ ID NO: 26346 - DNA, 565 bp, Homo sapiens
  misc_feature (1)...(565): n = a,t,c or g
gtttttttttttcactttaaagtttttctacaatgcatatattatttttgtagtactaaagctgttttagttttaaaggaaataaantaattaaaaaataaagtccctcgcagcgatgcaatgacnctatgaaagtgcctatttcanttatgaatcttgagacataacnggtcaanaactcatcttaggagtgtagaantagacattagaaattaaatagaaaccaatactatatancctttctattaaaaaaantaaaataaaatacactaaaaacactagtctttcaccatttctttcatgtagacaacaaccctatcctancttccatacncaggaaccactaaacaantgaatctgccagagaaaatacagaactgccctgggaaaattcttaccaanctaagggaatttttcncattnacgaaacaaaancaaccanccanncaaacaanaaantcttaacaggaattttgggtgacattttccncaanganattacagtancangaactacgggccccacttgaaaaccagtacggntcagccaanntagagggacgcg

SEQ ID NO: 26347 - DNA, 560 bp, Homo sapiens
  misc_feature (1)...(560): n = a,t,c or g
gcggcacgaggtcaccattcatgttgtactttcttggagtggtaattttgaaatgtttgccaccttggattgaaagaatttgtgatttttttttaaagaacttgaagaactaattcagtaagtgagtgcttcctttgcaatattacaggtacctaaatacagtcgttgttctcatgaagtctttagtgtggttgaagatgcaattacagtgtactgagtgttcagtgctttgatcagaaaaactaaattggagggtatcaggttttaagctgaattcagttgaaactnnnnnnnnnnnnnnnnnnnnnnnnnnnnnnnnnnnnnnnnnnnnnnnnnnnnnnnnnnnnnnnnnnnnnnnnnnnnnnnnnnnnnnnnnnnnnnnnnnnnnnnnnnnnnnnnnnnnnnnnnnnnnnnnnnnnnnnnnnnnnnnnnnnnnnnnnnnnnnnnnnnnnnnnnnnnnnnnnnnnnnnnnnnnnnnnnnnnnaacacttgaacccaggagatgtaggttgcggtgagcaantgcaccacgcacanncancctgggcaaananaaaact

SEQ ID NO: 26348 - DNA, 561 bp, Homo sapiens
  misc_feature (1)...(561): n = a,t,c or g
gagcttcaataccctgtctctactaaaaatacacacannnnnnnnnnnnnnnnnnnnnnnnnnnnnnnnnnnnnnnnnnnnnnnnnnnnnnnnnnnnnnnnnnnnnnnnnnnnnnnnnnnnnnnnnnnnnnnnnnnnnnnnnnnnnnnnnnnnnnnnnnnnnnnnnnnnnnnnnnnnnnnnnnnnnnnnnnnnnnntcttatgggaccaccatcatatatgcagtccatcactgggcaaaatgttgatatgcatgactagacacagatgctgaacaattaacctaataaatactacattatatagtatgttagaggtgtaagtgctatggtggggtgagggataggttgcaagttttaaacaataaggttttactggccaggcacagtggctcatgcctgggagnnnnnnnnnnnnnnnnnnnnnnnnnnnnnnnnnnnnnnnnnnnnnnnnnnnnnnnnnnnnnntacgtgaaacccgcctctactaaaactacaaaacttactgggctggaggtgacgctatatccactacccggaagctgagnaagagatctcttaac

SEQ ID NO: 26349 - DNA, 520 bp, Homo sapiens
  misc_feature (1)...(520): n = a,t,c or g
gctagcaccatgcttaatnnnnnnnnnnnnnnnnnnnnnnnnnnnnnnnnnnnnnnnnnnnnnnnnnctcctcaannnnnnnnnnnnnnnnnnnnnnnnnnnnnnnnnnnnnagggtaggtgcatgccaccatactcagctaaannnnnnnnnnnnnnnnnnnnnnnnnnnnnnnnnnnnnnnnnnnnnnnnnnnnnnnnnnnnnnnnnnnnnnnnnnnnnnnnnnnnnnnnnnnnnnnnnnnnnnnnnnnnnnnnnnnnnnnnnnnnnnnnnnnaaggagtttcttgaaatagaatctactccngataaaggtgctgtnaanacngtggaaangatancatcaantttagaagattacataanacttagtaananaattangggaagggttnataggacnagacccatttcgaaagnagctctaanggngngtnaaangnttttaatngagnnncantcggnaaanagnagcccttcntggaaggaanaatcnctgntggannaaattaangttttttt

SEQ ID NO: 26350 - DNA, 562 bp, Homo sapiens
  misc_feature (1)...(562): n = a,t,c or g
ggcaatcgtnnnnnnnnnnnnnnnnnnnnnnnnnnnnnnnnnnnnnnnnnnnnnnnnnnnnnnnnnnnnnnnnnnnnnnnnnnnnnnnnnnnnnnnntacctgcctcatcctatccctacccctggaagcagggattgcaagtcaggcccattcctgggagacaaaggccttttgtgattaatggcttcggctggagcactccccatcagcccgactgaaacttacttagaatgacactgnnnnnnnnnnnnnnnnnnnnnnnnnnnnnnnnnnnnnnnnnnnnnnnnnnnnnnnnnnnnnnnnnnnnnnnnnnnnnnnnnnnnnnnnnnnnnnnnnnnnnnnnnnnnnnnnnnnnnnnnnnnnnnnnnnnnnnnnnnnnnnnnnnnnnnnnnnnnnnnnnnnnnnnnnnnnnnnnnnnnnnnnnnnnnnnnnnnnnnnnnnnnnnnnnnnnnnnnnnnnnnnnnnnnnnnnnnnnnnnnnnnnnnnnnnnnnnnnnnnnnnnnnnnnngtcaaaaaaaaannnnnngnnnnnaaaaaaantntttnttggnggccgccctt

SEQ ID NO: 26351 - DNA, 561 bp, Homo sapiens
  misc_feature (1)...(561): n = a,t,c or g
gctaatgaaaaatcatatagagatgaacttggttttgaaatataatgagtagatacttgcttggctgggatggcaaacaagaaaatgaggagcgactttttgggagccaggaaatcatgactgagaaagatatggaattatttcgtgatatccaagaacaagcactgcaggtaaagttggatattcaggttagacaatcaagcaacttgttcatggctgagaaacagcagattaattacattgtgggttaagcagtaacagcagtttgcctaatctcagaatanttgtggtttgtgtgtatatgtagttctgctgtttataatattcctttcaaacccatgataactgctttggttttgcagataagcacatggctttgactatcaatattaaataagcttggtttattttttgtcttactgtatgaagaagaatttgggatttgaccatnaccnaacaanaaacangcttctcatgagtgataaancacctatatttattaattcaagaagtattcatgcctgtaatccnacacttgcaangtgggtggattgcctgagt

SEQ ID NO: 26352 - DNA, 563 bp, Homo sapiens
  misc_feature (1)...(563): n = a,t,c or g
gctgcagaactaagacatgggatncaaaantaagggggaaagtgacacagagtcataggctttcatctgaaaatatctcattccggccaactgagaagcacccttgcaaatcagttagaatatctctctgtgtagaaaaggaaagccagagagaaatgttgccttcaagtgtagtttgcctgtgtattaccttctgttgaaattcccacagacaaataagcctttgagaacccataagaaaacaatggctgccactagtaagatttccaaaggtacttttaaaacatggagtagatttgtttttctgtcccaacgacttcagagaagttcccacttaaatccatgcatggtcattttatatctgcnantacatattcttgtttgcnaaatgtaagtcttgtcaatgagttattttnaaaagtacttttgaaantacgcacaccccaaacancagaactgctgtgtgtatacaaatgctctggaanggcagnagtcaggtctgggtgtnggacaggncatnncgcatggctgcctggaagcctgtctcanctgcnagctgccac

SEQ ID NO: 26353 - DNA, 556 bp, Homo sapiens
  misc_feature (1)...(556): n = a,t,c or g
gggcacagtgaacctggagagcccctcgttcagctctgcattacacttctggacttagggcctcatgtgactgcaggggtcgtgtgcctgccttgctgaccatgcctgtcataccttctacatgcgctggacctgctcggagagtctcggggcatcttcagagcaccccagctctccccatgctacaggaaagaaaagcttacaccttgggtgccttttcacccagattcagggaccagggcccaggacatcacagctcaggcatcagaggccaagcacaaggggccctcccctctccaggcttgtttctcatgctgtagaatgtgctgttggacttcacagtacctggatcataactatgggtacctggagggaggggcacgatatctcttaccacacaattttgtgagttcttagctttttcttnacaagaagccaaaaaccggcgctttggtagatgccacctgatgactggcaagggcagctgtgtctgggttcntcctcacaaggancagctcctatagcagggagncanaaggttacatgggngaaaaaa

SEQ ID NO: 26354 - DNA, 525 bp, Homo sapiens
  misc_feature (1)...(525): n = a,t,c or g
ggcctaagaaaggaggaaaaaggtcaaagtgaaaagacaatgggcacctgactcatacaaacctgatgcaaatcttgattcctaactgtgtgacttagaacaaaatatttataaaatttcatttattccatgtacacaatgggaacaatagtgtctactatgaaggattgttataaggattatattaaatagtnnnnnnnnnnnnnnnnnnnnnnnnnnnnnnnnnnnnnnnnnnnnnnnnnnnnnnnnnnnnnnnnnnnnnnnnnnnnnnnnnnnnnnnnnnnnnnnnnnnnnnnnnnnnnnnnnnnnnnnnnnnnnnnnnnncgcnaaatgacccangtgtggtggcncatgcctgtagtccaanctaatccnggaggccgatnccaggatcccntggaccccggtgttggacggttgtattnagcccaanttgtnccatngcactccanncnggggcaacanacccagacctggcncangnannaactnagccgcnantnnttanccgnnccngctttttcc

SEQ ID NO: 26355 - DNA, 560 bp, Homo sapiens
  misc_feature (1)...(560): n = a,t,c or g
ggcggttttttttttttaattgggtattatttaggaacttgtgcaaccncaaaanaanaaactgccattntacccnaaattttgtttgtaggaagcataanggataaaataataccttaatggcaaattatttacaggaccatttaaatncctaaattttatttaaggnantgggtgnnnnnnnnnnnnnnnnnnnnnnnnnnnnnnnnnnnnnnnnnnnnnnnnnnnnnnnnnnnnnnnnnnnnnnnnnnnnnnnnnnnnnnnnnnnnnnnnnnancnggnantggggacccatganctnttttaaaaanccncccnggngattcnaattcangcccaantttaanaanaactgatttaaggnntcacatatttanccttcttgcctaaaaagaactttatantanggcancttagttactatatacagttaatagcaaaccttgcctgacatacccagatgaaatatcnacccacacaaaatgaaaacnactttgacctantttcaggttaatganctgggtanctgcttcaccangcccaattccatnaaaacggga

SEQ ID NO: 26356 - DNA, 566 bp, Homo sapiens
  misc_feature (1)...(566): n = a,t,c or g
gcagaaatgctgaaaagcatcatcgaagaangtgagtacaccccccaggtgtctttaacgtagatgagacgagacttgattggaagagaatgcccaaaggaacgtttatttccgaggaagagaatgctgagccagggtttaagtcatccaaagatcgcttgatgctgctgcttggtggcagtgcagctggggactttaagttgaagcccttactggtgtaccgctcagaaacctgcaaggctctgaagggttcttgaagcccagtttgcccgtgatttggcgctccaacagaaaggcttgggtgaccaggagcatctttcatgaatggttcacttactttttttgccgttgaaaaatacagtgcccaaaataatctcaccaacaaagcactgctcatactagacagtgcgtcatgccactctgtaaatttgagcgacctttctgataactaagagtagaataccttcaggccaagcgcggtggnnnnnnnnnnnnnnnnnnnnnnnnnnnnnnnngacggcggtcactgaggcangattcnagacngctcacatggnaaanccgtc

SEQ ID NO: 26357 - DNA, 561 bp, Homo sapiens
  misc_feature (1)...(561): n = a,t,c or g
gctgaaaagcagtcaaaatggaaccaagagtgtaatcaaactgtaaaccagtaagtaagtttaaaagttgatttgtatacttttcagatttactgctagtttagtgtacttgtactaaagataactgaaccaaaacctttgtttctttctcaaaatgtgttcattcacttaatagcatgtatcatcatgccactgcactctgccacagcctgagtgacagagcaagactgtnnnnnnnnnnnnnnnnnnnnnnnnnnnnnnnaagtaaatagtatatctcataaacacctacttagattataatttagttggtcatttggatagcagttgaggcccttctagtatatagacggtcatttaaactgttnnnnnnnnnnnnnnnnnnnnnnnnnnnnnnnnnnntttttannnnnnnnnnnnnnnnnnnnnnnnnnnnnnnnnnnnnnnnnnnnnnnnnnnnnnnnnnnnctcaagttatcctcccacctcanctcctgaggaggggggatnnnggtgctacaccanaccagtaatttgtttttttgtcnnatgggtttgccg

SEQ ID NO: 26358 - DNA, 511 bp, Homo sapiens
  misc_feature (1)...(511): n = a,t,c or g
gtgatcacagaagctatggagatcaaagctaaaagacatgaggaacagcaacgagaattggaagaggaagaagaaaattcggatgaagatgagctggattcccacaccatggtgaagactagtgtgganagtgtgggcaccatgcgggccacaagcacnatgagtgaaggggcccagaccangattgaacataataccacgatgttggaatccgacttggggaccatggtgataaacantnaggatgaggaagaataagatggaactangaaaagaaatgcancctcacacanctncaaggaccatctttcanggactactttgatnagcatgacttcnagaatnagagtcccgannccggtnatccnaacatncctggnccttcccnaggtccnanaacgtttttcctgatanngtggannntcctccccangganacctttacntntccnaaggaccggntnctnnntgcnaaatnctgganntcctngcaggatcananccccngagt

SEQ ID NO: 26359 - DNA, 540 bp, Homo sapiens
  misc_feature (1)...(540): n = a,t,c or g
gcatgaataccctggagacctagacactancctanaaggctgatcacgactggtacagatatggagtaaatggggcagaggaagggaggaagggaaaagcaaaancccacacactgacgacagccagactcctccaactgacttctcatctgaggccanccccgtgcaaacagacatcctanacgtcccacagtaatgagtggaaagcccagggtcatgggatgcancgggcctgagacttgcaacggatctctaactatgtanctcagcaaacttgatcaacaacttccttaaacatcatcacaaggaggtggaatgtgtcatacagaanccgcntccccccactagcaagtgagcactgtcctggtcaatcactgagttggttcctctgtnctaggaacgggacacagcccctggaggaangtgcaggctgccaactggnaaaatggccctggcatggtggctganaaaggcaanggctgaatcntgacngtcctangcccattgcaacgnttnngtganacccattgcanaanccag

SEQ ID NO: 26360 - DNA, 517 bp, Homo sapiens
  misc_feature (1)...(517): n = a,t,c or g
ggttttttttgatattcatatgacaaatatttatcanagtcttactgtcaggttctgttcaggataccaacttgcctaagacagataaggcctctgcctttaagaatgtacatnnnnnnnnnnnnnnnnnnnnnnnnnnnnnnnnnnnnnnnnnnnnnnnnnnnnnnnnnnnnnnnnnnnnnnnnnnnnnnnnnnnnnnnnnnnnnnnnnnnnnnnnnnnnnnnnnnnnnnnnnnnnnnnnnnnnnnnnnnnnnnnnnnnnnnnnnnnnnnnnnnnnnnnnnnnnnnnnnnnnnntnnnnnnnnnnnnnnnnnnnnnnnnnnnnnnnnnnnnnnnnnnnnnnnnnnnnnnnnnnnnnnnnnnnnnnnnnnnnnnnnnnnnnnnnnnnnnnnnnnnnnnnnnnnnnnnnnnnnnnnnnnnnnnnnnnnnnnnnnnnnngggntgccacaaaccngggtcanttttggntagancaattcctnttttcctccgnggaacancntncccccgttgccaag

SEQ ID NO: 26361 - DNA, 519 bp, Homo sapiens
  misc_feature (1)...(519): n = a,t,c or g
ggtcccaccaagagatgctgaggggtaaaaatgtgganaaatcgcttggtgtgtaggtatttgtgtttgtacagaatattcagccactgagtcaaatgtctgactcatcctctcgactcanatgtctggcactttgggctgtaaataaatattagttgaatggttgaatgagcgaatgaatttgtcacagttcggcaagtgttttacataatnacattgcattgtnagccacatcanancaggccaaagnatgantgaaaaccttgacgnaacttaattcccanatgnttcttctggnantgnatggccntgantanaannactggtacactgganaatnttgncangcagggcnatcattgcactgtgngcctgtgacagtcnangcatcttgtatacacctgtttccagttttcaagagccacgtggntngttccacnattnacngntntggaactcangttangtnntgcnccgatncnntgnncatccnnngngtncntccngntnnttttgctg

SEQ ID NO: 26362 - DNA, 530 bp, Homo sapiens
  misc_feature (1)...(530): n = a,t,c or g
gaccaattttcnnnnnnnnnnnnnnnnnnnnnnnnnnnnnnnnnnnnnnnnnnnnnnnnnnnnnnnnnnnnnnnnnnnnnnnnnnnnnnnnnnnnnnnnnnnnnnnnnnnnnnnnnnnnnnnnnnnnnnnnnnnnnnnnnnnnnnnnnnnnnnnnnnnnnnnnnnnnnnnnnnnnnnnnnnnnnnnnnnnnnnnnnnnnnnnnnnnnnnnnnnnnnncagctnnnnnnnnnnnnnnnnnnnnnnnnnnnnnnnnnnnnnnnnnnnnnnnnnnnnnnnnnnnnnnnnnnnnnnnnnnnnnnnnnnnnnnnnnnnnnnnnnnnnnnnnnnnnnnnnnnnnnnnnnnnnnnnnnnnnnnnnnnnnnnnnnnnnnnngggacccatctcagagggtgacttctttcaagtctcagagtgtatctaaaaagaaaatgcagattttgtattaaactccanaatgtatccatattttaattttaaaatggcatttattgngatttataaagttccattcaangtccaaaattttaat

SEQ ID NO: 26363 - DNA, 491 bp, Homo sapiens
  misc_feature (1)...(491): n = a,t,c or g
ggagagagctagcaccatgagcttctaccctgcacggacacttgcctcttaacaggaggctgtggaatctaaacaaacaggttctccctaggggcaaggatggagttgttgtcttaacattttccagctggtggagctgctggggaaagctgctgaggccactgccacccaccacaaaagccccattgagagccccgccttctccaatacgagggctcctgtccagggaggaggtgggctgggtttttctggcaggagcgtgtcccctccacaggggcaatcancctatttattaaggtccttctacgtgttaagctgtgagcccagggcacagacccgcaggtgtgangctgatatctgccaggaantcanaaatctgacagccacanaaaaatgctgaangacaagggangaaaggtcatggtcaattccggaagacttgcacagggaatggnttccanctgatcctaaacggcactggtaactaggaa

SEQ ID NO: 26364 - DNA, 490 bp, Homo sapiens
  misc_feature (1)...(490): n = a,t,c or g
ggganagctgcttactttggtgtcctanagcccaggtacaaggcggacatgggctgtgcaggaggccttgtcagtccctctttccaggggaggcaaggtggtgtccaggcagaggcagaaacgcctgcagaggcctcagggaaggaaaggctancaccatggtggaggtgggccctctggacagacggggctgcatcaggtgagcctattgggctcaagggagatggggcctcccctgggacagggacacancgtcgctcactcagcgtttactgaatacctgctttgtatttggggcagcannaaatcagggaanggtgtgcacttgnctcccaagcaggggcatgcatctgaccttgctgcggaggatcctcgggctccagattcggctctgtcangggggcantgggcangntccttcccaagggacacngaggtttgtttnnggttctgattgcngngcatcnacctgtttnggtcncnagcccag

SEQ ID NO: 26365 - DNA, 563 bp, Homo sapiens
  misc_feature (1)...(563): n = a,t,c or g
gagaaggaaaaggaagaaaggcaatttcagccttaggacctggtgttcccaaagacacagagtcctgtccctgagttgtgggtttagagaacactggtgtgaatagggaacgccaagaatgacagagggtcctgggagatgaagtctaaagtttacctggggagtaaaatccaggaccgcagtattatttagctattatctgcaaatgtttaatgttaatattcacctttgcagaaagtgattcaccaagccaggaatatctggctaagagagccttgaataccgggtgtggtgaacactgggatgcaccacccagaacccctttcagggatgaaggacatactctcctagctgctgggagcactgccagcacagagccctcagctgtcagctctctatggggattgtgttggtgaanacagctgcctcacccaaggncatgccccttttccaagatgcttgcatccaatgactgacaatgttggggtnaaaggcaacctctcacccagtcanggcaacncactncnnnggccncccacttaaantcccgtnaatcantggag

SEQ ID NO: 26366 - DNA, 503 bp, Homo sapiens
  misc_feature (1)...(503): n = a,t,c or g
gcttaccaggtcttggactgtgatgtcatattattcagttttatgcttgttcctgagcagaactcataagagtgacatagtcagctgctgacggnacctcagccacgccactcttactcagttcagtgggtgtgcttgcgtggtaggatgtggtgcagccctctctacgctcttctatttttggtatatttcctatctaaccttcaaatagcttccaattctttttttcntggactggcttcattctgaatttgtgctaaaataatctttcataaacagacctcagtttatagcgtaacaagactacacaatgcactgatgttttcaaaaangtttaaggggacccactgcagaanggtgctgcctccttttaattgnattcatttngatttngacttccatgttaacaangtgangncccangttggtgcccttcanagtangagaaccatgtanacattagggaatggncaganggccttaggaatgantatcnngttttg

SEQ ID NO: 26367 - DNA, 556 bp, Homo sapiens
  misc_feature (1)...(556): n = a,t,c or g
ggtttgtggcatttttagtgaattatggtagttcttttgtttcacttttcattccaaatgaatacccattaagaaatttgnnnnnnnnnnnnnnnnnnnnnnnnnnnnnnnnnnnnnnnnnnnnnnnnnnnnnnnnnnnnnnnnnnnnnnnnnnnnnnnnnnnnnnnnnnnnnnnnnnnnnnnnnnnnnnnnnnnnnnnnnnnnnnnnnnnnnnnnnnnnnnnnnnnnnnnnnnnnnnnnnnnnnnnnnnnnnnnnnnnnnnnnnnnnnnnnnnnnnnnnnnnnnnnnnnnnnnnnnnnnnnnnnnnnnnnnnnnnnnnnnnnnnnnnnnnnnnnnnnnnnnnnnnnnnnnnnnnnnnnnnnnnnnnnnnnnnnnnnnnnnnngtaacttanattagttactataggtaagtttgtgaaaaaataaccnccatttgttgtgggcccgcttaatgctttcatttcananacccttccgggggtngtaatatcanggggatatanccacaanncaggtaatggggggtacangtgcttanattcagcccaaattttct

SEQ ID NO: 26368 - DNA, 489 bp, Homo sapiens
  misc_feature (1)...(489): n = a,t,c or g
ggcaacttccttttgacctcctctcttgagtctaaatatcctttggttttagaactanacttgtttctcatttaatttcctttacatctctctaaactccgtttcttctttcctcagtattcaacacattttttattctccaaagccttgagacattttgggaacaaccagtggaggagaggaaagtagagcaccgagttttaaggggatggcgtagatgtcagggacctgagttgttgggggagtagccacacgttagggacgcaaccttgaaatacacaaaataattcaatagtttttttgtctctgttatgtcggggacagatttttccangttacctgangactaatactgattcagggatcttcattaaactagaatgtcntcggccagagtcntttttttttttaaattggnaacanaggaagggaattgcttttngngngntgggctnnggtggcnntncccctaaggnccnaaggaggggg

SEQ ID NO: 26369 - DNA, 496 bp, Homo sapiens
  misc_feature (1)...(496): n = a,t,c or g
gcacatttatagtagttgagaccttttttaaagggatttcctctaactgtatcatatgacctaggatttccattaggtggaaagtgatggtgtgatgacatgttacttctctggattataagattttactttgacaatacatcagcccaactaaaatgaagcatatgtaacagatttccatgtttgactgagtgatttctccatgagccacttgatgctaattttgtcatgcagtttatttctgagggctgatgtcaaagatgaatatgttggaggatgtggatttataagaagaaatnnnnnnnnnnnnnnnnnnnnnnnnnnnnnnnnnnnnnnnnnnnnnnnnnnnnnnnnnnnnnnnnnnnnnnnnnnnnnnnnnnnnnnnnnnnnnnnnnnnnnnnnnnnnnnnnnnnnnnnnnnnnnnnnnnnnnnnnnnnnnnnnnnnnnnnnnnnnnnnnnnnnnnnnnnnnnnnnnnnnnnnnnnnnnnnnnnnnnn

SEQ ID NO: 26370 - DNA, 490 bp, Homo sapiens
  misc_feature (1)...(490): n = a,t,c or g
gcggcacgaggcatgttgaaatgggtaagacagtcctcttgaaagtttttttccccccagttattttctctatctgaatgttaaaacaaaattccacatttaggaatgcatatgttcaggttttggacttaaaaatcataggcgtctgcgttctgagtaaggggatggtacagaatcaaaacaaaaggaggagaatgaatgcctcagtcagattgtttgaaaaaatnnnnnnnnnnnnnnnnnnnnnnnnnnnnnnnnnnnnnnnnnnnnnnnnnnnnnnnnnnnnnnnnnnnnnnnnnnnnnnnnnnnnnnnnnnnnnnnnnnnnnnnnnnnnnnnnnnnnnnnnnnnnnnnnnnnnnnnnctagccgngggnnnnnnnnnnnnnnnnnnnnnnnnnnnnnnnnnnnnnnnnnnnnnnnnnnnnnnnnnnnnnnnnnnnnnnnnnnnncagtgaactgacattgtgccactanacnccanctggcaaaa

SEQ ID NO: 26371 - DNA, 540 bp, Homo sapiens
  misc_feature (1)...(540): n = a,t,c or g
gattttgcagacgataggacagtattctcagggaaagagtgacaggccttgtttctcttcttcttgcttatgttagattggtactgacattaggagatcatgcagtgttggtttattggatttaagtgtactcactaagtccaaggaggcctctgcgtgatttacactgcctgagtgccctgtcagtaagtgattcatcattacaaacagtagtccagttgcctgaaactacggatctgtaagcaattccccctttccacagccactcttcaaatgaaccccttatgacatgtcctgaaggtaactgagtgttgccaagtggacagtatgctgggatggttttccttcagataaatgattgtttcattttagagttttagtgacatgatgtttgattcnccagttgtgtattccaattttgccaattacatagacaatttnggcaaatgcattggcanacctgaaatttttgggcccncaaagttcaaagtcctcaanaaanggaccangactgttgtnaacttacancctggaacaaaa

SEQ ID NO: 26372 - DNA, 544 bp, Homo sapiens
  misc_feature (1)...(544): n = a,t,c or g
gggaaatgtccatgaaccactgtggtttctggtgccaggagagggcccagcggggagtcaggttctcagcctccactctggggttcttctgtgaagtggagaggctttgcagaaaccacattgcaaagtagtctgagaaagaagaggtttccccaggtggagaaggacatgggggtggggcatgtggtggcttccgctgtagactcccctgcctggggctttttccacacccctactccgatcctcccacactgcagcctgtctggagctagcgtcatatctccccaggtaaggagctcagtttcgtgggactgcccccacttcctgtgccagccgcaaatgggggcccctgccacccggcacaggaccctcctcgtgcttggaaatttgctangactcaggaactcaggaaaaantttacttatgaaacttaattttcatgaanggctgaaantcctcccctctanngacacattngatttcccggggagccaacctgggcaactcctnanaaaagcccnttgggggggctttnnacccaaaa

SEQ ID NO: 26373 - DNA, 554 bp, Homo sapiens
  misc_feature (1)...(554): n = a,t,c or g
gnnnnnnnnnnnnnnnnnnnnnnnnnnnnnnnnnnnnnnnnnnnnnnnnnnnnnnnnnnnnnnnnnnnnnnnnnnnnnnnnnnnnnnnnnnnnnnnnnnnnnnnnnnnnnnnnnnnnnnnnnnnnnnnnnnnnnnnnnnnnnnnnnnnnnnnnnnnnnnnnnnnnnnnnnnnnnnnnnnnnnnnnnnnnnnnnnnnnnnnnnnnnnnnnnnnnnnnnnnnnnnnnnnnnnnnnnnnnnnnnnnnnnnnnnnnnnnnnnnnnnnnnnnnnnnnnnnnnnnnnnnnnnnnnnnnnnnnnnnnnnnnnnnnnnnnnnnnnnnnnnnnnnnnnnnnnnnnnnnnnnnnnnnnnnnnnnnnnnnnnnnnnnnnnnnnnnnnnnnnnnnnnnnnnnnnnnnnnnnnnnnnnnnnnnnnnnnnnnnnnnnnnnnnnnnnnnnnnnnnnnnnnnnnnnnnnnnnnnnnaatcaaagnacgccactgtaggnttctgtccaagggaatactgggccggcnccgttancngtgtngttncaanacggntctccggnaattccat

SEQ ID NO: 26374 - DNA, 539 bp, Homo sapiens
  misc_feature (1)...(539): n = a,t,c or g
gtctgccctgagttccggcaccttctgaatggagtggagtttgcagattcattcaactttaatccccacaantggctattggtgaattttgactgttctgccatgtgggtgaaaaagagaacagacttaacgggagcctttagactggaccccacttacctgaagcacagccatcaggattcagggcttatcactgactaccggcattggcagataccactgggcagaagatttcgctctttgaaaatgtggtttgtatttaggatgtatggagtcaaaggactgcaggcttatatccgcaagcatgtccagctgtcccatgagtttgagtcactggtgcgccaggatccccgctttgaaatctgtgtggaatcattctggggcttgtctgcttcggctaaagggtccaacaaagtgaatgaanncttctgcaaagaataacagtgccaaanaatccactggtccngtactcagggaaaantttncccgcctttgcaccgtccncacgnggatctgccatttnanggcctggaanaaaa

SEQ ID NO: 26375 - DNA, 553 bp, Homo sapiens
  misc_feature (1)...(553): n = a,t,c or g
ggaagaagctgtccaaaagcaaaagccgaaggttgagccagctaccccattagctgtaagatttggacttccagattctagacgccatggtgaaagcatatgtctgtctccatgtaacacactggcagcagtaacagatgatttcggcagagttattttattggatgtagctagaggaattgcantacgcatgtggaaagggtaccgcgacgcacaaattggatggattcaaactgtagaggacctccatgaaagagtgccangaaaaggcagatttttccccctttggaaattctcagggtccaagtcgagtagctcaattccttgtgatctatgcgccaagaaggggaattttanaantgtgnagcacacancagggacntacagtnngagctttcantgtggggaagantgcaggctgctgntcctgggctacacatnatngggtnaantatgttaccagtcagagttggnaccacaaacttancanacccgncagggtnagcagngnctggaatgtngaaaaagtnaacttccctccnttnccactgga

SEQ ID NO: 26376 - DNA, 481 bp, Homo sapiens
  misc_feature (1)...(481): n = a,t,c or g
gctaaaatctaacctcagagcacaattttaaactagatgaaagagttgctgcgcctgaagcactgcaaacacctcctcaccacacatgtgcactcaccctggacaccctcactcaccctgacaccctcactcctcaccctggacaccctcactcaccccagacaccgtcactcctcaccctggacacctcactctgcaccctggacaccctcactcaccctggacacgttcactcaccctgacaccctcactcaccctggncaccctcactcaccctgacaccctcaatcctcaccctggactccctcantcctcaccctggactccctcactcctcaccctggacaccctcactcctcatcctggacaccctcactcancctgganaccctcantcctcaccctgganaccctcantcctcaagctggnaanccttcnttcttcaccngntancttcatcntnagcctgggnacctcgtt

SEQ ID NO: 26377 - DNA, 485 bp, Homo sapiens
  misc_feature (1)...(485): n = a,t,c or g
gagcagaccctcccaccaggacatgtctcaatctaaggggatttagaacagtttccagttcttggccaacactcctagagaaggctgggctgggcggacacaggaaccattcttctgcacaggtccccaccccctctcccaaggctgcagggtgaaatgggcctgttaccttgttattccatgtcctcttgtctaactccatccattggctgttctaaccatgcctgcttattgatttgcttagagtagatagatactacctgccacttcctgttggacttgtttttagaagacacccttttcagccttctcctccccacaacccttccaggctgctgacgctgtacttcccttgctgaacttggcttttcatgtgtgctcctgtcctgtgaggctgggagagccaggcatacaaancccttgctggntgtgctcctgacttggnatgctggggtccccagggggcattttnngggacccttggg

SEQ ID NO: 26378 - DNA, 486 bp, Homo sapiens
  misc_feature (1)...(486): n = a,t,c or g
gccgagcagtcagctgggggagatgtccctggaagaacacagccagtgtgaatgcagacctaaaaaaaaggacagtgctgtgaagccagacagggctgccactccccaccaccgtccccagccccgttctgttccgggctgggactctgcccccggagcaccctccccagctgacatcacccatcccactccagccccaggcccctctgcccacgctgcacccagcaccaccagcgccctgacccccggacctgccgctgccgctgccgacgccgcagcttcctccgttgccaagggcggggcttagagctcaacccagacacctgcaggtgccggaagctgcgaaggtgacacatggcttttcagactcagcagggtgacttgcctcaaaggctatatcccaatgggggaacaaaganggacctggtaaaaaacagccaagcccccaagactcagccaggaaaaactgctctangactgggctct

SEQ ID NO: 26379 - DNA, 487 bp, Homo sapiens
  misc_feature (1)...(487): n = a,t,c or g
gaactggaagtgtgagtgacacttgctgggggtggagggtgggacacatgaggatgtataagtacagattttaaaaaaggaaatcaacttacacttcctggctcttgtttaaaacagtggtgagctcctgtgtgggccgacttgctaaaggtcacacacgcgcccggtggagcacgagagacctcgtggcagcatgtgatctggaaggcaggcaggacgggggcgttggggagccaaagtcaactctgggcctctggagctatagtgacttttgggctagaagggaccctggtggtctgtgcttcagccatttgcagggcaggggcatcattaattcagacgtaaagattctatgaatatggactggccaaaagttatccttactccatctgtgaaagaanttgctaaancaaaatcatgatatgaacnaaaattacaggggacctgtttaanagaacaanantgttccaancactttaggcagaca

SEQ ID NO: 26380 - DNA, 479 bp, Homo sapiens
  misc_feature (1)...(479): n = a,t,c or g
ggagattcttagctgcagggggaggggctggcaggcctgaaccgcagttggacttagcagccaggggttttctggttttcattaaaattctctggctgtcttttgggatagctccattggatatgactgtgcactggagccggttgtgctgttctctcagctgtacacacccatcaaatcacagtgcccctgaggacgagagaaaattgaaggtaggcaatancctggctgagggctcttgctcagcaatctttgtggtaagtggcctccgtttataactgcagagcttgagttttgcagtcttaaatacagatggggaggcagacatggctgagctgggaatgggttgcagagagaatcctgttacagcttgcttttgaggatggacttgctcttgaggacagatggaggtttcctggcanctgtcgaaggncccaagtgttacattaatgaaaatgggctgatctgattatcctttt

SEQ ID NO: 26381 - DNA, 480 bp, Homo sapiens
  misc_feature (1)...(480): n = a,t,c or g
gcgcncgccttagaaatcgcaggcctcctgnattcncttcttcctcactctttccggcctatggccggtctggagcacttcaccatcncattcnaggacnactccccctcacaggaggccttgaccttcacaggntcccggnacacacctgcncagacccagcgactttggagttcccgcgtctcttccccatgtctgcantcggagggcgcgggtgggctcctggtcgcggcccggcgctcttcgtcctcgcccttctccgnccggggcgcttgctgaccctanagtcttggacagtggcgttgggagtccccatcggcctgggaaccanatgaggctggnaggaggaagtggntgaccgaancaaaccgttgctgtgtgcatancganancggngnagaggcggtccatcngcnctttttcgggggaanttggctaanggngaaatgggccttggaaataacanntacgggacctggg

SEQ ID NO: 26382 - DNA, 524 bp, Homo sapiens
  misc_feature (1)...(524): n = a,t,c or g
ggagaanaagtacctgtggggcttcacantcttcggctggggtctgcccgctgtcttcgtggctgtgtgggtcagtgtcagagctaccctggccaacaccgggtgctgggacttganctccgggaacaaaaagtggntcatccangtgcccatcctggnctccattgtgctcaacttcatcctcttcatcaatatcgtccgggtgctcnccaccaanctgcgggagaccaacgccggccggtgtgacacacggcagcattaccggaagctgctcaaatccacnctggtgctcatgcccctctttggcgtccactacattgtcttcatggccacancatacancnaggtctcagggacnctctggcaagtccagatgcactangagatgtcttcanctccttccanggattttttgtcgcantcatatactgttctgaancgngagtacaactggnatcagnaatcttggnncnctggnnaangntncngncttcanangaaacgaantaacgggncanaagttt

SEQ ID NO: 26383 - DNA, 525 bp, Homo sapiens
  misc_feature (1)...(525): n = a,t,c or g
gnnnnnnnnnnnnnnnnnnnnnnnnnnnnnnnnnnnnnnnnnnnnnnnnnnnnnnnnnnnnnnnnnnnnnnnnnnnnnnnnnnnnnnnnnnnnnnnnnnnnnnnnnnnnnnnnnnnnnnnnnnnnnnnnnnnnnnnnnnnnnnnnnnnnnnnnnnnnnnnnnnnnnnnnnnnnnnnnnnnnnnnnnnnnnnnnnnnnnnnnnnnnnnnnnnnnnnnnnnnnnnnnnnnnnnnnnnnnnnnnnnnnnnnnnnnnnnnnnnnnnnnnnnnnnnnnnnnnnnnnnnnnnnnnnnnnnnnnnnnnnnnnnnnnnnnnnnnnnnnnnnnnnnnnnnnnnnnnnnnnnnnnnnnnnnnnnnnnnnnnnnnnnnnnnnnnnnnnnnnnnnnnnnnnnnnnnnnnnnnnnnnnnnnnnnnnnnnnnnnnnnnnnnnnnnnnnnnnnnatcctccgtgaaatcatatcccgcacaagagtgntatcccctcgntccgggccaataaancttggggnaactaaagngaatgttcc

SEQ ID NO: 26384 - DNA, 517 bp, Homo sapiens
  misc_feature (1)...(517): n = a,t,c or g
gnnnnnnnnnnnnnnnnnnnnnnnnnnnnnnnnnnnnnnnnnnnnnnnnnnnnnnnnnnnnnnnnnnnnnnnnnnnnnnnnnnnnnnnnnnnnnnnnnnnnnnnnnnnnnnnnnnnnnnnnnnnnnnnnnnnnnnnnnnnnnnnnnnnnnnnnnnnnnnnnnnnnnnnnnnnnnnnnnnnnnnnnnnnnnnnnnnnnnnnnnnnnnnnnnnnnnnnnnnnnnnnnnnnnnnnnnnnnnnnnnnnnnnnnnnnnnnnnnnnnnnnnnnnnnnnnnnnnnnnnnnnnnnnnnnnnnnnnnnnnnnnnnnnnnnnnnnnnnnnnnnnnnnnnnnnnnnnnnnnnnnnnnnnnnnnnnnnnnnnnnnnnnnnnnnnnnnnnnnnnnnnnnnnnnnnnnnnnnnnnnnnnnnnnnnnnnnnnnnnnnnnnnnnnnnnnncgctctaagattaaaatgccctaanccacttcttacacaaggganactanacccctttcccatactagtnttttccgaaccat

SEQ ID NO: 26385 - DNA, 514 bp, Homo sapiens
  misc_feature (1)...(514): n = a,t,c or g
aggnnnnnnnnnnnnnnnnnnnnnnnnnnnnnnnnnnnnnnnnnnnnnnnnnnnnnnnnnnnnnnnnnnnnnnnnnnnnnnnnnnnnnnnnnnnnnnnnnnnnnnnnnnnnnnnnnnnnnnnnnnnnnnnnnnnnnnnnnnnnnnnnnnnnnnnnnnnnnnnnnnnnnnnnnnnnnnnnnnnnnnnnnnnnnnnnnnnnnnnnnnnnnnnnnnnnnnnnnnnnnnnnnnnnnnnnnnnnnnnnnnnnnnnnnnnnnnnnnnnnnnnnnnnnnnnnnnnnnnnctgggttaatgngtgcagcatcccaccatgcncatgtnnnnnnnnnnnnnnnnnnnnnnnnnnnnnnnnnnnnnnnnnnnnnnnnnnnnnnnnnnnctttnggggaccntntgngacnggcatctgncacagagctgggcaaaaantttggcttattgtgttntagtcattggtcnnagcctntctgaagttangccttcattnnttncnttccangncnngctntcctggg

SEQ ID NO: 26386 - DNA, 524 bp, Homo sapiens
  misc_feature (1)...(524): n = a,t,c or g
gattgtatttgtgnataatctccctaaagatgtctccagaggtataattttattttcatcttcaaaaatgtgtggactgtacgggtgtgtagttcgcgtatttaggtctggccgcccctctagcaggcctgtgattcatctgtcttcataaaatggccaacaagctgttcacatgcaaatataaattganagcatgagaggcctggnatgcctttctggagctgcctgcaancccaatattgngtgtttcccattccagaaagcaaccaggattgagcctggattttttggncaaaggcananagatactagccaagttcacttttaacctcanatcacttgatgctactacctcaaggatttacactatcattttggggaaatcatgtgagttcanngaaagaaagtattaanatctagganatgaagtaanaaattcctatctttcagttttcnattgttcaaatnaaaaagtagtaaaagcngnctaacctaaccccantggagaattagnancctaccaa

SEQ ID NO: 26387 - DNA, 522 bp, Homo sapiens
  misc_feature (1)...(522): n = a,t,c or g
gctgggactaaaagataaagaggtaatgcagttaggtttgctaggctatctcaaagactattaaatattggaatgttttaggaagtaacctaatggaatatatttaataataaattggtcttagaattgtgctctaaccatctggaagatggaggagttgggacagtgaccgatacttggagggtaaaaatccagaagtagaattacgtgaagtgtatttaattacaaaattactccaaaattttagaagatacaggagaggaggatatagtataaagttttgtacttgtagtttcccaagttagattaaaggcgaaataataccgtttattaaagtaagaacaagggcccacacactgaagtcttcttcagctttgaggagaaatagtcttttacatgaaaagacaaggaacatgtgtgattagttgccttacagaaataaacaattggtaggtttcttatagcagaaataattttttaatttcctcngtgcatcnttataaggaaatatcacanttgggt

SEQ ID NO: 26388 - DNA, 509 bp, Homo sapiens
  misc_feature (1)...(509): n = a,t,c or g
gggtcggggctgattgcattacacctggcctttatgccatggttggtgctgctgcatgcttaggtggtgtgacaagaatgactgtctccctggtggttattgtttttgagcttactggaggcttggaatatattgttccccttatggctgcantcatgaccagtanatgggttggngatgcctttggcagggaaggcatttatgaancacacatccgattaaatgganaccctttcttggatgcaananaanaattcactcataccaccctggctgntgacgtgatgagacctcgaaggantgancctcccttagctgncctgacacaggacaatatgacagtggntgatatatanaagcatgattantgaaaccagcctanaacgnnnttcctgtcagaaacgncanaggaatcccnnnagtttcttgggatnggccnnnaaaaaacctgaaantgcnancaaaanngcnnggannnatcanngnngggnnncgtnggaaatccccgg

SEQ ID NO: 26389 - DNA, 508 bp, Homo sapiens
  misc_feature (1)...(508): n = a,t,c or g
gnnnnnnnnnnnnnnnnnnnnnnnnnnnnnnnnnnnnnnnnnnnnnnnnnnnnnnnnnnnnnnnnnnnnnnnnnnnnnnnnnnnnnnnnnnnnnnnnnnnnnnnnnnnnnnnnnnnnnnnnnnnnnnnnnnnnnnnnnnnnnnnnnnnnnnnnnnnnnnnnnnnnnnnnnnnnnnnnnnnnnnnnnnnnnnnnnnnnnnnnnnnnnnnnnnnnnnnnnnnnnnnnnnnnnnnnnnnnnnnnnnnnnnnnnnnnnnnnnnnnnnnnnnnnnnnnnnnnnnnnnnnnnnnnnnnnnnnnnnnnnnnnnnnnnnnnnnnnnnnnnnnnnnnnnnnnnnnnnnnnnnnnnnnnnnnnnnnnnnnnnnnnnnnnnnnnnnnnnnnnnnnnnnnnnnnnntttaactggtagtccaananngannantctttggcaactaggggaaaacccttgtttanaagnnttanaaattttacncccntnttaggctaaagnanncccaanttaanaagg

SEQ ID NO: 26390 - DNA, 498 bp, Homo sapiens
  misc_feature (1)...(498): n = a,t,c or g
gnnnnnnnnnnnnnnnnnnnnnnnnnnnnnnnnnnnnnnnnnnnnnnnnnnnnnnnnnnnnnnnnnnnnnnnnnnnnnnnnnnnnnnnnnnnnnnnnnnnnnnnnnnnnnnnnnnnnnnnnnnnnnnnnnnnnnnnnnnnnnnnnnnnnnnnnnnnnnnnnnnnnnnnnnnnnnnnnnnnnnnnnnnnnnnnnnnnnnnnnnnnnnnnnnnnnnnnnnnnnnnnnnnnnnnnnnnnnnnnnnnnnnnnnnnnnnnnnnnnnnnnnnnnnnnnnnnnnnnnnnnnnnnnnnnnnnnnnnnnnnnnnnnnnnnnnnnnnnnnnnnnnnnnnnnnnnnnnnnnnnnnnnnnnnnnnnnnnnnnnnnnnnnnnnnnnnnnnnnnnnnnnnnnnnnnnnnnnnnnnnnnnnnnnnnnnnnnnnnntggncctaacaatntncnattgaaacaacggaaccaattatncagcntggctattaaattttacgggnccccaattta

SEQ ID NO: 26391 - DNA, 523 bp, Homo sapiens
  misc_feature (1)...(523): n = a,t,c or g
nnnnnnnnnnnnnnnnnnnnnnnnnnnnnnnnnnnnnnnnnnnnnnnnnnnnnnnnnnnnnnnnnnnnnnnnnnnnnnnnnnnnnnnnnnnnnnnnnnnnnnnnnnnnnnnnnnnnnnnnnnnnnnnnnnnnnnnnnnnnnnnnnnnnnnnnnnnnnnnnnnnnnnnnnnnnnnnnnnnnnnnnnnnnnnnnnnnnnnnnnnnnnnnnnnnnnnnnnnnnnnnnnnnnnnnnnnnnnnnnnnnnnnnnnnnnnnnnnnnnnnnnnnnnnnnnnnnnnnnnnnnnnnnnnnnnnnnnnnnnnnnnnnnnnnnnnnnnnntttatgaccncggatgttggatcagggacatcccgatggnngcagcctgcnattaaaaggtcngttnggtncaanggttaaatgtcnnaangttgnctngngntcaanaccnggggnaancaaggccggttncaaccaattcaanttccccccngttgnccgggaaaggncactaaggcctanttnnaannnnggcctccccaca

SEQ ID NO: 26392 - DNA, 505 bp, Homo sapiens
  misc_feature (1)...(505): n = a,t,c or g
gggttaaggagggaatcctgttgcccaaagtagcaaaatgaggaaagacttgactttctctggagttgatttaagtatattttgatagttctccctgatcctttgatttctgcttcactggtagatcgtgagaaagctaagcagctctccacttaagccccacttccccgtgagagcccatccattctgaccaacagtgtgctggaatgaggagggtgggtgcggatgcacagccgatttgatcagacattccctttgccagccgcttggtggcattgttgccctggcacagctactgcaggctctgcagcctgggctttgggtaggagactttgtcctctgaattttcnggcatgcttgngtttantaacctgcanacttgttctgaaaattgtgatnaaggaaccaaggttggntttcacaagcatatangcctaaaaactttccnaaacgttaaancccttagggcaaanggngntatcctttcaactgggggtttcnggaa

SEQ ID NO: 26393 - DNA, 508 bp, Homo sapiens
  misc_feature (1)...(508): n = a,t,c or g
gcggcacgagcttgaccgagggattcgccgtgctgcactggaagcccccccagaatcctgtanacacctatgacatccaggtcacagcccctggggccccgcctctgcaggcggagaccccaggcagcgcggtggactaccccctgcatgaccttgtcctccacaccaactacaccgccacagtgcgtggcctgcggggccccaacctcacttccccagccagcatcaccttcaccacagggctagaggcccctcgggacttggaggccaaggaagtgaccccccgcaccgccctgctcacttggactgagcccccagtccggcccgcaaggtactggctcagcttcanaccctnggtggcaaaaccaaggnaatctgntnccaaggangggatcaatctcaacanntccttggctctttccctcaactcctanaatggacngttcaaggcaattttggggcaaaagctcctgcggccctttccaactncttnaacaanggttggggt

SEQ ID NO: 26394 - DNA, 137 bp, Homo sapiens
gaaaggaatgaggtagataaagggaaatgatgaaaatctctatacactgatatagtggcctccaacatatattaagggaaaacaagtgaagtggaggttggtgtttattgtatatgctttttctttttttttttttt

SEQ ID NO: 26395 - DNA, 510 bp, Homo sapiens
  misc_feature (1)...(510): n = a,t,c or g
gctggcatgctgaacaaaggtatttggatgcaaagtgattggaaagatggtagccaanagtaaaactgttctatagaagtaaccttttattttgcattaactaaatctgcttttataagcttatcaagcctttcaaatttacagttaatggagaacaccgtaatttgagatgtcangaaaatgcatctcagatggagaagggaacttgcagagtccttctctgaggctaagggaagttatatattatattctggttgttccttgggttttaaacttggnaccaagcagttttcgtttttaaaangtacagtgccttanttatcctttttgtttttanatttacanaagntaaaaancnggtctangtnnnntaannggcntgtntttaaaccttgangacaagcacttgtacngggagccgangaannaccncatcatgcnataaagggnnttttcagcaccancctggnagnatcngccangaanangnnccntccttngcaancccag

SEQ ID NO: 26396 - DNA, 508 bp, Homo sapiens
  misc_feature (1)...(508): n = a,t,c or g
gaaatgtatggctcataagactggaagtctaataatagggaatggaatttcaggttggttaatccaacagttcaacaacgccatcaaggacatggcttctcatggcctctttattttgctgcccataataatggcttctattcagggctagcagtaggccctagtccaatttgtaggatctaaggatagaaaaaaaaaanagcccctccctcaatcctgaaataaaattcttccctttgctgtaattgtcttgtgtctgctctggncccataactggtgcaaggaaaaacccangcctttactggngtcactccaggttcctcagacaatctgatgggattatcttgtttggntttgattaatcaatactcctctcattcctggagttggaattatttcctaaagcatcatggntattacaaaatggnggaggantgcagagcatttggacanttggatacatggnctgggtncagcttnaagncnatcnanngtgaaacaccagtcc

SEQ ID NO: 26397 - DNA, 546 bp, Homo sapiens
  misc_feature (1)...(546): n = a,t,c or g
gatcacagtccttggagacagcaagaacaatgttcnagctgctgccctagcgactgtgaatgcttgggcacaacagactggcatnaaggaatggctggaanaagaanatctttctgaanagctcaaaaaggaaaatcctttcttgaggcaagagcttctgggctggctggctgagaaactacctactcttcgttccacccctacagaccttatcctttgtgttcctcatctctactcctgcctagaagatccaaatggcgatgtgcgaaanaaggcccaagatgccttgccattcttcatgatgcatttacgatatgaaaagaatggccaaggctacngggaaactaaagccaacttctaaagatcangtagtggccatgccanagaaanccaaagttaacatgccangccaaancctgctccatccactaanagcaacttccanaccaaagggnnggttcnctccaacccatntccnanattcaancangcancngnctgaaaaatngtatttccancatnnnacngccacaaacttnnntcaat

SEQ ID NO: 26398 - DNA, 521 bp, Homo sapiens
  misc_feature (1)...(521): n = a,t,c or g
gcgatctttgggcatgaatgcatcagtgacaattgaaggaacatctgctgtgtacaaactcccaattgcaccattaattatggggtcacatccagttgacaataaatggaccccttccttctcctcaatcaccagtgccaacagtgttgatcttcctgcctgtttcttcttgaaatttccccagccaatcccagtatctagagcatttgttcagaaactgcagaactgcacaggaattccattgtttgaaactcaaccaacttatgcacccctgtatgaactgatcactcagtttgagctatcaaaggaccctgaccccatacctttgaatcacaacatgagattttatgctgctcttcctggtcagcagcactgctatttcctcaacaaggatgctcctcttccagatggccgaagtctacagggaacccttgttagcaanatcacctttcagcancctggncgagttcnnctaaccnaaanccggtcaagacncnaagtgggcnannacaaccccattg

SEQ ID NO: 26399 - DNA, 529 bp, Homo sapiens
  misc_feature (1)...(529): n = a,t,c or g
gcggcacgagnnnnnnnnnnnnnnnnnnnnnnnnnnnnnnnnnnnnnnnnnnnnnnnnnnnnnnnnnnnnnnnnnnnnnnnnnnnnnnnnnnnnnnnnnnnnnnnnnnnnnnnnnnnnnnnnnnnnnnnnnnnnnnnnnnnnnnnnnnnnnnnnnnnnnnnnnnnnnnnnnnnnnnnnnnnnnnnnnnnnnnnnnnnnnnnnnnnnnnnnnnnnnnnnnnagccagcactgtctgaatcagcctcttcataaccctgagagataccaacacnagctggtagcccctttcctacagagttctttttgttgttgttcnnnnnnnnnnnnnnnnnnnnnnnnnnnnnnnnnnnnnnnnnnnnnnnnnnnnnnnnnnnnnnnnnnnnnnnnnnnnnnnnnnnnnnnnnnnnnnnnnnnnnnnnagcctcccatgtgactgggancanangtgcctacaaccannantggctaatttttaanctttttgtacnaatgggntccaactttntnntcatncngntctcgnnttttg

SEQ ID NO: 26400 - DNA, 521 bp, Homo sapiens
  misc_feature (1)...(521): n = a,t,c or g
gttctgattcttgtgggtcagaggttgaagcaaggctcanactttactttgtccatgtcccccagtaccattacctggcctgcctgattgtcactgtgatgtgccttagcccacctggggtctgacctggtagcccagcttctccctgtgaagaaaggacagggagggaagtcccttcaggggcgggtgagttcccagacttctacctcagaaaggtaggtgctttctgggaaatgtctctgttgctggagtcccagagccctatcccctgtccatgggaaaatgagggtgtttctgctcagggcagagcttctgtgatgcttgcagtcaggtccctgagcacagtctcttaagnatgtgttctgaaaggccatctctttcccagggtacnagctgtgttctggtacaacctcttgcggngcngggaaagtnactaccgattcnagacatgnggctgccctgtncttnnnggcntnantnnggncccaataanttggttcacnnancnaggcaaggagttg

SEQ ID NO: 26401 - DNA, 530 bp, Homo sapiens
  misc_feature (1)...(530): n = a,t,c or g
gaccctgaagacacccttctttcagcaaattcatttgacacactcaggacattactcacaaagaactcatagaaaaggatggggtttgtgtttccacatggtgggattaaactaaaacaaaaaagtatgggccactgccccaggcatagtacagggatccacaccaatttctggccattgtctggtcagttgagggatgctccatccctgacactgtcaaaaaataattattgaccctctgagtactcacagtgttctaataaacctcccagcatccttcaggcctcttgagttcaaggaaacacatccttcatttgtagattttaggtaagcccatttacgctgttacttgcaaaataagcccactttgaatggggccccttctaacaaaaggttctagaatctgtcaaattgcaatacagcaagacattaatgccctcctgagtcccaatcnctgggggaaactttggaaacgcctcncannccnccnggatnncngggncaacccangatggccatggcttncgaaa

SEQ ID NO: 26402 - DNA, 517 bp, Homo sapiens
  misc_feature (1)...(517): n = a,t,c or g
gggcagaatcgttagaggaatcctgggaaattcggtgaattcagtgattgtgggcaaaggaaattgtgatactaggcttgtgaaataaaaaaatggtgaatattgatcacattgggtaagtttgggaagagagaagctaaatttggcaagatttagaaaagaagataggcagtgagttgactaataaagcagagaggtagaaactaaggaaaaagannnnnnnnnnnnnnnnnnnnnnnnnnnnnnnnnnnnnnnnnnnnnnnnnnnnnnnnnnnnnnnnnnnnnnnnnnnnnnnnnnnnnnnnnnnnnnnnnnnnnnnnnnnnnnnnnnnnnnnnnnnnnnnnnnnnnnnnnnnnnnnnnnnnnnnnnnnnnnnnnnnnnnnnnnnnnnnnnnnnnnnnnnnnnnnnnnnnnnnnnnnnnnnnnnnnnnnnnnnnnnnnnnnnnnnnnnnnnnnnnnnnnnnnnnnnnnnnnnnnnnnnnnnnnnnnnnnnnnnnnnnnnnnnnnnnnnnnnnnnn

SEQ ID NO: 26403 - DNA, 438 bp, Homo sapiens
  misc_feature (1)...(438): n = a,t,c or g
ggattaatttctttctttttctttaccagttttcataccttggtcctgaccctgtccataagctgctcacactggtggtggatgatggcattcaacctcctgtggagctcagctgtaaggagaggaacattctagcagccacttttatccgctccctgcataagaacataggaggctctgagacctttcaggacaaggtgaactttttccagcgagagcttcggcaggtacatatgaaaagaccacattccaaagtcaccctgaaggtcagcagacatgccttgttggaatcggtaggtaaaatttcatctctgtcagcaagataccaaagttttccaattgaatgtctatattctgcaggttaatgtttttgtttnggtttgttgggaatagggtccaancaatgccnaggntggggncanangtgcgancnntggt

SEQ ID NO: 26404 - DNA, 542 bp, Homo sapiens
  misc_feature (1)...(542): n = a,t,c or g
ggagactgcatangnnnnnnnnnnnnnnnnnnnnnnnnnnnnnnnnnnnnnnnnnnnnnnnnnnnnnnnnnnnnnnnnnnnnnnnnnnnnnnnnnnnnnnnnnnnnnnnnnnnnnnnnnnnnnnnnnnnnnnnnnnnnnnnnnnnnnnnnnnnnnnnnnnnnnnnnnnnnantananaanaaaantcacataacatgaanatcaccaagttaaactgtatnnttcaataatttttaacatagtcacagtggtgtacaaccatcnccagtatcnaattccagaacatttccancncnccanaacatcccccatacnacctgttngcagtcactccccatcttcnctcccacatcccctagcannctgaaaatctagcttctgtctatggntttgcncgtggcantaaacaatnnggcnttttgtgtcaggnttcttcaatcaacctnatttttnngctcaccatctatgtcntantcattcacacnttntcccctttatgntgcatntctntcnatgggtanattnccncntttgtnatccct

SEQ ID NO: 26405 - DNA, 509 bp, Homo sapiens
  misc_feature (1)...(509): n = a,t,c or g
gagcagttgggccaagatggcggccgccgagggaccggtgggcgacggcgagctgtggcagacctggcttcctaaccacgtcgtgttcttgcggctccgggagggactgaaaaaccagagtccaaccgaagctgagaaaccagcttcttcgtcgttgccttcgtcgccgccgccgcagttgctgacganaaacgtggtctttggcctcggcggagagcttttcctgtgggacggangaggacagctccttcttaatccttcgccttcncgggccccancggcgggggtaagagccngccctgtnncactagganacattgcttngcatnaanccacccctgtgtgnaatctatcanatcttgttaatcccagnacaacatcaggtnncacttatgngaataaagcgacttangggattanaaantnccnaaaggnntggggganngattttancttnnggggngnnncnccgagtggnatgnngtacacncnnntttnngngangtttt

SEQ ID NO: 26406 - DNA, 504 bp, Homo sapiens
  misc_feature (1)...(504): n = a,t,c or g
gtggaatgtgtgtgcccctgactgtctcccaggaatgttgttgaaaggactatgcacgggagattagactgaatagcctcaaccgcaacgtccctcccagcttggggcttttacagcttgtggtgggggcaaaaccacatctattctccatggtagtagattagataactttactaattagacaactggaagcttctccttcctggagaatactctctanagtagacagccttttgacaaccaaccacatctctaagagaaaatgtgtgccaattagtagacaaccttgatgactagaagatgcaatggcggctcaactcaccactcccatctcaccctttcatacaaccaatcatctggtcagcccaagaagctagaaattaagggcanatggtctgataataaaaagctaaantgatngggatcaaatgcanggaattttggtggnancctggtgggtcacagnntgggnccnngggtganccacctgnatcangcttgctt

SEQ ID NO: 26407 - DNA, 504 bp, Homo sapiens
  misc_feature (1)...(504): n = a,t,c or g
ggcnnnnnnnnnnnnnnnnnnnnnnnnnnnnnnnnnnnnnnnnnnnnnnnnnnnnnnnnnnnnnnnnnnnnnnnnnnnnnnnnnnnnnnnnnnnnnnnnnnnnnnnnnnnnnnnnnnnnnnnnnnnnnnnnnnnnnnnnnnnnnnnnnnnnnnnnnnnnnnnnnnnnnnnnnnnnnnnnnnnnnnnnnnnnnnnnnnnnnnnnnnnnnnnnnnnnnnnnnnnnnnnnnnnnnnnnnnnnnnnnnnnnnnnnnnnnnnnnnnnnnnnnnnagctacagtggttcaatttataccatgaaggatgaggtcattgaaaggctataaaacacaaactatttaangctatattttgttaagttgcctttttttaaaaagcatctacnacatatttatcatgggatcactcaaccaagattngcctngaanaantttagnttaagannngnttcaaagtaangtanctacnggntttgctttaacttccaaagnaaccttttacttttag

SEQ ID NO: 26408 - DNA, 506 bp, Homo sapiens
  misc_feature (1)...(506): n = a,t,c or g
gggaagaataaataatagtgcttcaagaagagtagtgattgagaggataggtaaagagggcgcctcatcgtggaagctagagcaggaacacctccccagtagtgacatgtgcaaagttccagatctccacgacaaagacagctcaacccactggaacaaacagactcccaatgtggctggcaactgcgggggtagaagaactcaggcaaagtaggcacaggaatgggggagatgagagccaagggacaaacgccgagaaagcgttccgacaagcatgtgtgttcatacatgcatacccccaacaaagggcaatgcactgtgtaacagaactgaacacaatttaacaaagctgctcccagccttcctgtcacctctttggcagtanggcaaggcatctcaacttcggncacacaaagacattctcttaaggaggaaaggtgtcctgttntgtggggaaaaggnttcagggtannacaaaactntgatanntncagcattaattggtg

SEQ ID NO: 26409 - DNA, 492 bp, Homo sapiens
  misc_feature (1)...(492): n = a,t,c or g
ggcgggcggaagagttcctaactgccagccaggaggctctctgacccctcacgttcctaccacagggccacagcccacacagccctgggacactgccctggccctccatactctgctccctactggctgtcttgggggaaggcagcgcctctctagctactcaagggagggggatgtgggcacttgaagcagggacacccacagaatggtccctcttctccccaaaaggtgttcatgcctccctgtggctagtacaggctgagcactaagatgcttagtgctcagacaacctggggatgcctgtcccctacctgctcctcacccacagctacctgaggctgctctgagaagtacacacaggaatacatacgctcctctattcttcccttcatcctcaattgaacgccaagtatctccctcctctctctcccctgaaaagcatttnggaaaacaagggattttctcaccaaantttntaancccattgtccca

SEQ ID NO: 26410 - DNA, 504 bp, Homo sapiens
  misc_feature (1)...(504): n = a,t,c or g
gaaatgataaaaccaagagcagatcttgccatgatgtcccgtgtatgctgctgtcattcccacgttgcctgatccccgcctggggcaggagcaagcgtcagggctggcagagctgtgtgctgggcctcagcagggccctggcatgcgtgcccttgtggctcctctcaagtccagctgtgtgcatggaggaaacaggtcacgttaagtctctatattcttgaagtacctgaatgattgggagagccatggcgaggatcttccaggtcagcccccgtcgtgtgtgatgttccttgggctctgcggatgctcggtgctttcatcggtgtccacacctctttattccgctcctcctttgcttgtctaatcctaatttgccaataagttttttaatccttgaaggctttgtttggccctgtggttgtangannattggttttaagganttaagtaatanaanatttccncctgggntttaccaacccccgatagacacatcaaggggga

SEQ ID NO: 26411 - DNA, 441 bp, Homo sapiens
gcggcacgagcttcctttcacaagaacaataatagcaactaccattgaggacctacgatgtgctagacactggcctagggatttcatcaggtattcttataaaccctttcatcatctcctcagggtggtggtgacatctccattttccagataaggggatggaggctcagtgaagtaatttctgcaagctcattccagaagaaagcagcagtgccttccttcaggtccaggtctaatcaattccaaagtctgtgttcttttacagcgccaaacctcagggctggacacattgcaggtctgtcattgagacagaaagacaatgtgtacattttgagccagtcattcatgcatttgttttaattaattttccaaaaagagctaaaagaaagatcatccatagcctaaagtttttttcctttccttttcctttttttttttttt

SEQ ID NO: 26412 - DNA, 506 bp, Homo sapiens
  misc_feature (1)...(506): n = a,t,c or g
gagcaccatgagcttcaaccctgatttcaagaatcccaaccagcatctctggttggtttgagcattatccaccagagggcaccacacttcagttctcaccatggagagagaaggctaaagctgggacaatagcctgagctcttagcgatccctgaggcacaaatgccacagtcagaactcaccttatcccccatgatgggacactgatcagttcccagccccctgagctcaggagctaaatcgtgaggccccacctggcaagggaaaaatatcctcagctctgggtatccagtcctacgcttcacaggcctcccctgggaattcccagggctctgatgcaagggcagcatctgtcctccctcctgcgggtgtcccctccaaggcttcaggactcaccgttcaanatnnnanggggnaaccaagttnggggttncccacnaangtgttancncttcntnggggnctttcttgcccaaggtgngttcntggnggtggccttcccatgg

SEQ ID NO: 26413 - DNA, 487 bp, Homo sapiens
  misc_feature (1)...(487): n = a,t,c or g
ggatctctttacccattccactattctttcttgaaattctaagccaccttctattaacattttctttctgtttggcgaacttgtgtaaccttttttctagggtcagtctgctggtgtctctaaaagtgtctttatgttcccttcattcctgagggatatttttgtgggataataggatttagggtctgcagttcttttagtacttgagaaacatgtttgttccttctgtccgctatggtttcagatgagaaatctgttgccatttgaaccattgttccctagttcataatgtgccatttttatcaacctgcgttcaaagtgttttgttttttttgtantgttcanaagtttggttatgaggtgtgtgacatggaatttttttgagtgnaacatgtttggttttggntaaccttttgggtttgccgnntaaggcccttggcaaattgggnaaatttnnacccattatccctggaanaattttccaccc

SEQ ID NO: 26414 - DNA, 500 bp, Homo sapiens
  misc_feature (1)...(500): n = a,t,c or g
gcggcacgnnnnnnnnnnnnnnnnnnnnnnnnnnnnnnnnnnnnnnnnnnnnnnnnnnnnnnnnnnnnnnnnnnnnnnnnnnnnnnnnnnnnnnnnnnnnnnnnnnnnnnnnnnnnnnnnnnnnnnnnnnnnnnnnnnnnnnnnnnnnnnnnnnnnnnnnnnnnnnnnnnnnnnnnnnnnnnnnnntcaggagaaattttaaaacaagttaaagcaacccattctcatttgcttctggnnnnnnnnnnnnnnnnnnnnnnnnnnnnnnnnnnnnnnnnnnnnnnnnnnnnnnnnnnnnnnnnnnnnnnnnnnnnnnnnnnnnnnnnnnnnnnnnnnnnnnnnnnnnnnnnnnnnnnnnnnnnnnnnnnnnnnnnnnnnnnnnnnnnnnnnnnctaacaacaagnccggggtaantttttggantttcaantaggacntggtttaaccgtgttanccaaggatggnctgggnccccngacctcatgatccacccgtctcgg

SEQ ID NO: 26415 - DNA, 501 bp, Homo sapiens
  misc_feature (1)...(501): n = a,t,c or g
gaagagaggaaaggaaaggggaaagggaaagaaaggaagaaaggaaggaaaggaagaaggaaggaggaaggaaggaaggaggaaggaaggaaggaggggaaggaaggaggaagaaaaaaaagagaaataaatggtagtgaggacagacagcagtggacattttggaggtaaatagccccttgtgcctgggccaggactaggttgaggcaagtgaagtggccagggcacaaaacttaggaggccctcattctcaggctcgtgcacacaaagtggaataatgtgtacataatgtttgcacacacaccactccagaactaagaggatcctggaggctctggcatgtgggcattggttacagttctccagcctcaggtgaagagcaaaaaggttttggaaattttgcccattccaaanannaatttnangggtatnaacangnaaagggnncaccanccantnttnttaacnnnttcnntnctanaaccttgtgaaannnttttc

SEQ ID NO: 26416 - DNA, 449 bp, Homo sapiens
  misc_feature (1)...(449): n = a,t,c or g
gcannnnnnnnnnnnnnnnnnnnnnnnnnnnnnnnnnnnnnnnnnnnnnnnnnnnnnnnnnnnnnnnnnnnnnnnnnnnnnnnnnnnnnnnnnnnnnnnnnnnnnnnnnnnnnnnnnnnnnnnnnnnnnnnnnnnnnnnnnnntggagtggccatgaggctgantgccannnnnnnnnnnnnnnnnnnnnnnnnnnnnnnnnnnnnnnnnnnnnnngaaactattcttctctcctagggatctanaccttgatgtangagctgccatganggtcgctaaaatgcctttggggcattttccccanagtcttggntattanattcagntcccantatgcacattcggtggctggtttganttcctctgcaaanangggantngctcgttgnntccngcccanggacnnnngtgcanntttcnaaanttttggttcnggatcnntttaagtt

SEQ ID NO: 26417 - DNA, 504 bp, Homo sapiens
  misc_feature (1)...(504): n = a,t,c or g
gtgaaaaacaaataaagcgtgatccttatactaatgcagctgattatacttttgcatgtttccatgtagtttttatttctgatgggtgtatgtgtgagtataaacattttttttctgtcctcccaacctattttgtttttttttaaattactgctatagcgataggtatatgtaaagagtataggaaattgattanacaacttccaagcaacgatgttttctttttatcagattgactctantatgcanagatganggcattttcgtgnangnggncttgtacatttaggtaagccttttcagangaanatttaaccagccaacatttnantnangaanctcagggncacatttanaaagttntgtccaaggnatgggngtttnntccnngtnnttnttcaaaaggnnngngnggnnntcttncnaangntggntgacngcctcnnnagcttncngccnnntcnangantaannncngacngncccgtcgngtccngnnngtca

SEQ ID NO: 26418 - DNA, 519 bp, Homo sapiens
  misc_feature (1)...(519): n = a,t,c or g
ggtgacnaaacaggaatanaacaagccaacnaantcaccaagctcaacgtttcaaagagtgtgtgaggcggcgcccacccgctgcccgaggtgctctgtttgtcgaaacacagtaatatttgtatttggctgttgtgctttccaagcgccacagttgccctccccggacgtggtgttatgtggtcatttcagccctaacttctgtgtggatcacagttattcagggttcattttcatccattcttccctttcgctcccttccctggaaaccccgctgcctctgggtcatccgttcagcacgtggtggagaacaagtgccttcagggctggcctcggcctcgagtctcgggacagaggccgccagtggagatcatggctttgggtantaattggcttttagaacaaaagctgtggttaagatctcatttttaatgctttttcccacgtcccacgagacactattttcggttctctggctaanaccctgttttgagtttaatttgttccgtcaagtcacag

SEQ ID NO: 26419 - DNA, 490 bp, Homo sapiens
  misc_feature (1)...(490): n = a,t,c or g
gaaaagcacatattggtcctcaccatctatatgactgtgattatttttctctcttccatttcacgcaacttttgctcacagcctacttggcataattgacacattggctcaggccaccaagactgccaacttggagccttggattagttagatcagttatgacagatgtgattatttacaagagaatagaagtcactataattaaaccttccaaggagtacatttgggtggagaatgagaaagcacaagtttaatctggcatgatgtgtttggattttcagccctgagcaggttcttctctagctcatgaaaggaggtattggggtgtctggcaccctctgtagacactgccatctcncaattctcctgacacagctattggtaaatggaaagccangtggnanagttagcattanttggggtaccagtannngtgggttagttcncagctcagccactgntccctggnanccgnttgngngtttntcgg

SEQ ID NO: 26420 - DNA, 503 bp, Homo sapiens
  misc_feature (1)...(503): n = a,t,c or g
gaggtgctgcccgaatggagagcttccatgtttctaagctgtctttactgtgatcctgaagcccaacgagattagttacacacaaacatttagggatcccacagcgatctgagagcagggccatgaaaaatagtcatttattacagcagttgcagggcagggccacagctgtgttactggacatctgtcctgagctgagggtgtagacaccagaagtggggaaagtgggcttcacctcccttttcagactctgatcttgtgggtggctggggcagaggggcccctggtacaccctcagctggcgctttanacatattaatcaanatggtcnnnnnnnnnnnnnnnnnnnnnnnnnnnnnnnnnnnnnnnnnnnnnnnnnnngatggntgntcacgggnggcaggngtcannnccancctggngnncatggngnnncccatccgnctnnnnnncncacannnnnncnncggnnnnnnnnnngnncnngnnnnccnnntttctcc

SEQ ID NO: 26421 - DNA, 497 bp, Homo sapiens
  misc_feature (1)...(497): n = a,t,c or g
gcaaaggctgaacaaannnnnnnnnnnnnnnnnnnnnnnnnnnnnnnnnnnnnnnnnnnnnnnnnnnnnnnnnnnnnnnnnnnnnnnnnnnnnnnnnnnnnnnnnnnnnnnnnnnnnnnnnnnnnnnnnnnnnnnnnnnnnnnnnttactttcttaataaacttgctttgacttaannnnnnnnnnnnnnnnnnnnnnnnnnnnnnnnnnnnnnnnnnnnnnnnnnggggtctggattgggacccctttctgataatattttggtttattcaatgagctcatgaaaaagaaagatgggctagactcaggaccattctagtacatttgcgtccctaaagttatcctactaaaatattaacatgatttctatggatgcttgccaggtccaacccacagacgctggccgaacgatggntgaaagaatgcactcaagacaccantatccantgaaagancaagctaaggganngggcatncacaaaccctgaagaaggggc

SEQ ID NO: 26422 - DNA, 509 bp, Homo sapiens
  misc_feature (1)...(509): n = a,t,c or g
gaaataaacacagcaacagcaacagtgtggatgataccattgttgcattaaacatgcgtgctgctttgcgaaatgggctggaaggaagcagtgaagaaacgtcttttcatgatgagtcacttcaggatgaccgagaagaaatagaaaataattcttaccatatgcacccagcaggtattattctcactaaggttggttactatactattccatctatggatgaccttgctaaaattaccaatgaaaaaggagagtgcattgtctctgatttcactattggtcggaaaggttatggttcantctattttgaaggagatgtgaatttgacaaatctaaatttggntgatattgtgcatatccggtngaacgaagtagttgtctanttngatgatanncatccnncacctgtgggtnaagggctanttangnaaggcngnagttacattgggtgganntttgggcancagtnaaacatcncnttgtttaanangnnngnccagngcgcctgc

SEQ ID NO: 26423 - DNA, 515 bp, Homo sapiens
  misc_feature (1)...(515): n = a,t,c or g
nnnnnnnnnnnnnnnnnnnnnnnnnnnnnnnnnnnnnnnnnnnnnnnnnnnnnnnnnnnnnnnnnnnnnnnnnnnnnaaaaaaagaantcttanaatgtggcctcnacatatnaagaccgtttcanctgngttgtcattttttanagttgcntctnnnntttaanacgtnnnanannttacggganagccagancanggtgtttgcnatctcggggaancaaacgcttggntcnagggcaggtgnccancctcanagcttcnnctggncctcatnatttggnggnancanntgtcntcnanctgttaatnnnagtcccaggntcaannctgcanccctgtngaggntattttcanggcntnncgncanttctggaaatttcggnctgttnnnatatggnncgagggaantcagttcatttcaacggcatanaccancacctgnccgttangtacattcattcanctgggtcacataagnctcaatangcaanttacaccctataaancttaaatc

SEQ ID NO: 26424 - DNA, 513 bp, Homo sapiens
  misc_feature (1)...(513): n = a,t,c or g
gggaacattttgggggtaaatttatttctagcattanccaatgtgtacancggttgcttggaagattttggtcacggaaaggggggcagggagtgtatcctgcancccacanagtgccctctctccctcccagcctccttcctcancccacggggtgccctctctccctcccanccagcttcctcagcccacggggtancccctctctcncancctccttcctgancccacagggtgcctcctctctctcccagccacnttcctcancccacggggtgccctccctccctcccancctccttcctcagcccacggggtgccctctctccctcccancctgcttcctcancccacggggtatcccctctctccgtatggccttcntcaaccacacggtgacacctctntcncnaaaccatnttttcaggcacaggggtgncnnctcnccatccangnctccttccncagccaacnnngtgggctcttcctcccaaccgncctcnncaaggggag

SEQ ID NO: 26425 - DNA, 522 bp, Homo sapiens
  misc_feature (1)...(522): n = a,t,c or g
ggtgcccgtctggctgagatgaggcaaaaagaaatccccagggtcctggagcagctcgaggacctggatagccgggtcctctactactcagccaccaagaacggcatcctgtaccgagttggtgatggtgtgtacctgccccctgaggccttcacgttcaagtaagtgccccctcggagcagccggggccagggcgctccaggctgagccaggctggctttgtggtgtccccctccttacagacattgccaatccctccgcaccagctgttgtcctagccgtcacgttggcataggtggcaaacagacaacataaatcgtgtagactgaccatgatgctattgcagagcaaagctgagcgtaaaagtcaactcgctggtttggctgggattacaggcgtnanccacaatgcccagcctaaatcatttcttanggtacacacctaccttaattcatcaagtgcttgactttaaatggttattttcactgggtcaatcatgcctgactgaccactgcaaggtgg

SEQ ID NO: 26426 - DNA, 514 bp, Homo sapiens
  misc_feature (1)...(514): n = a,t,c or g
gcggcacgaggggagttatctgctcagaattcatgtctctgagactgaccagtgaagccagcagagaggcctgtgcagggcgtctggaagttttttacaatggagcttggggcactgttggcaagagtagcatgtctgaaaccactgtgggtgtggtgtgcaggcagctgggctgtgcagacaaagggaaaatcaaccctgcatctttagacaaggccatgtccattcccatgtgggtggacaatgttcagtgtccaaaaggacctgacacgctgtggcagtgcccatcatctccatgggagaagagactggccagcccctcggaggagacctggatcacatgtgacaacaagataagacttcaggaaggacccacttcctgttctggacgtgtggagatctggcatggaggtcctgggggacantgtgtgatgactcctggggacttnggncatgccaaggtgggnntcaacaacttggctntggncaactttgaancattcaaggaancaag

SEQ ID NO: 26427 - DNA, 505 bp, Homo sapiens
  misc_feature (1)...(505): n = a,t,c or g
ggaagcttccttgccatcttagtgttcttcaccaaggtgctcaactagctcccttgcaatttcttctccaaataaccacagtaattgctacagaggaagtgaaaattgtaaaaacgcttcagaagactgacagtggngctgattataggagtgactgcttttaagttctaataaattgttttaattttcttataatttctactcagataaagcagactcctagcttttaattctgcttctaatgggttttttcccttcccacttctcctgtagtagggcagtgttgcagtgatgagaccatcagctgaaggccccattgctttgtcctgctgatctttttttccattggccactccatttgacatttccactgacaatgtcttatttctgagatgaggggaaacgcttttttaagtgtctagtctatatttgaagttaagatgaacatgggactgaaccccaactctatcacgttntnnntttaaaggcctgggaaaaggaccta

SEQ ID NO: 26428 - DNA, 521 bp, Homo sapiens
  misc_feature (1)...(521): n = a,t,c or g
cattctcncncggaatggttntggcatgctcnagaatangccccgtgtgtctnatcagntctgctgttggtcacaggtgtggcattatncttcggacnttancaccnacagcnncacgnctgnacangccacancnncanngnatcaangcacatntgctggnggngngttggtgcnnngnngantcctcccccatgggaagggcaatcngtgcttattncaannctccagccttgnctttnatcgcatcattnaaccacctaaaccttctcacaactccgtgnnanacanntnnncncncacgnncagagatngacatngaggcagattttaagaagatcctctatgtaatncngggncacatncactagnnatctgcatcttcgttctcctctcacnnnatctgctcgttncnntacatcggtgcnanntnaaagnttcancaagnaatttctgccancccaaangtggtcnntgngggncgngnntngcnttacacgcgtgntccncaacaatttggg

SEQ ID NO: 26429 - DNA, 504 bp, Homo sapiens
  misc_feature (1)...(504): n = a,t,c or g
gtggtagatgaggtccgagccacctcccaggggaacagggcactcctaagatgaggcgggcatttggagaggatggggcccacaagggaaaggaggaagcagtcatgggacttctttcacgagatcctgacccagagaagcccagcagcaaggcttccggttcattctgggcctcctctcacctctgctacagacaggcgtggcagcctgtccagctgagcaaatgctcagtccctaatatgtgcctctgctactgcccctccccagtgtcctgggtttgcataagagcccttgtgttgggaagagggggaataggtggagtggggagctgattggtcactgagggggtggggggccgggcagccgctagaaactggacttgtttttaattgtggggcctgggggaagggcctgagaagaaactctcnttcatgccgtaattgggaaantccactttgctgggctccttcaatccggccctgtgnanaggncccttggttgggg

SEQ ID NO: 26430 - DNA, 272 bp, Homo sapiens
gccggatgcatgggcaaagccagaccaggatcaaacaggttctcaccatcctatgtaatttgccatcaagtcattcatcagtctgtccatccatccatcccttcaatccacagagattcactgagcacaggattcatctttttggagagagagaacttagaatagttatttcatcaactgcaactgggaaaacaggcttgaatttgtaggactggtgggctggacatgactttgaaagatcatcttgcctcttaagtatttttttttttttt

SEQ ID NO: 26431 - DNA, 502 bp, Homo sapiens
  misc_feature (1)...(502): n = a,t,c or g
gggaagaagtgtcttccaaaggagaaattcatggcggaagtaatgggatctataaaggaggaaaagcaaacaactgggaaggaggtatccgggttccaggcatccttcgttggcccagggtgatacaggctggccagaagattgatgagcccactagcaacatggacatatttcctacagtagccaagctggctggagctcccttgcctgaggacaggatcattgatggacgtgatctgatgcccctgcttgaaggaaaaagccaacgctccgatcatgagtttctcttccattactgcaacgcctacttaaatgctgtgcgctggcaccctcagaacagcacatccatctggaaggcctttttcttcacccccaacttcaaccccgtgggttccaacggatgctttgccacacacgtgtgcttctgtttcgggagttatgtcanccatcacgacccaactttactccttgatattccaaaagatccaagagagagaaaccc

SEQ ID NO: 26432 - DNA, 507 bp, Homo sapiens
  misc_feature (1)...(507): n = a,t,c or g
gaaagagagaagatggccctcatggtgacccaagaaggaagggaatccagagcagctgcagcttaaccctgggagttgtggcacagccctatggagaaacaccaggtcttgacagttctgggttggttctctgtgaagtatgtaaatttcctttctcctttcttgtgattcagtacatgaatcagacctgcagcttttttccaacacctacatggttgtgtaggggtaatgagctcataactcattgtgttgctttattctctcagggaagttgtcacactgattggtgtgctattctgggttctgggtttgttgttggtcagagtatgaaagtctggannnnnnnnnnnnnnnnnnnnnnnnnnnnnnnnnnnnnnnntgggaggctgaggctggaggaacattgagtctggtagttcaaggccagcttgggacacaatgggaagacccatgtctcaaaaattaaaacatgggcaggggcggtggtcacgcctgtaatcccagcat

SEQ ID NO: 26433 - DNA, 383 bp, Homo sapiens
  misc_feature (1)...(383): n = a,t,c or g
gaaaggaactgcttactaaaaataagattcaaaactattcagacttcaggacatcattctgaatctagctgtatcttccagactacagctatagtatggaagcttccctgtttagatatgtgaaaagaagcatttcatgagaataattttctaactaattggtgttagccttaaattcctttttctttannnnnnnnnnnnnnnnnnnnnnnnnnnnnnnnnnnnnnnnnnnnnnnnnnnnnnnnnnnnnnnnnnnnnnnnnnnnnnnnnnnnnnnnnnnnnnnnnnnnnnnnnnnnnnnnnnnnnnnnnnnnnnnnnnnnnnnnnnnnnnnnnnnnnnnnnnnnggntcanttntgtngntttannnnngatgncgggttca

SEQ ID NO: 26434 - DNA, 516 bp, Homo sapiens
  misc_feature (1)...(516): n = a,t,c or g
ggagagctagcaccatgagcttcaataccctgttttcactaaatggccacatgctcctcttcctttcagatcacgggctcctttactactcctgcaacatatgatgatcactctttcttgtttcctgcttccagtaccaaatccagactgttctcagagccttggagaaggaaggttctgctaatccaggcctcagatgcctcttgcaggatgctacgacatcatcctgtggcccaaaagactccatctctagggagttctataactttctgctccctggcctggggcattcagcctagcctcttgtctcatttttcctgattagtttcccttcctggctcagcaaaactgctcttgcatgtatgggctctggcttgcccctgacttgaggggacaggggaaaagacttccaagcctcttttctangagaagctacaatcatctgccacaacttgtatcaactctctccccaatttaaagagagaacaaatggtcaantctcaattaggaactaag

SEQ ID NO: 26435 - DNA, 503 bp, Homo sapiens
  misc_feature (1)...(503): n = a,t,c or g
gtcgctcactcctcgccggccgcctctccttcgggctctcctcgcgtcactggagccatggcgttcgccgagacctacccggcggcatcctccctgcccaacggcgattgcggccgccccagggcgcggcccggaggaaaccgggtgacggtggtgctcggtgcgcagtggggcgacgaaggcaaagggaaggtggtggacctgctggcgcaggacgccgacatcgtgtgccgctgccagggaggaaataatgctggccatacagttgttgtggattctgtggaatatgattttcatctcttacccagtggaataattaatccaaatgtcactgcattcattggaaatggtgtggtaattcatctacctggattgtttgaagaagcagagaaaannnnnnaaaaaaaattcttnaattaancggccgnaaagcttatcccctttanggagggtnaattttaacttggnacnggccgtcntttaaaactccngacgggaaaaaa

SEQ ID NO: 26436 - DNA, 505 bp, Homo sapiens
  misc_feature (1)...(505): n = a,t,c or g
gggcaggtgtgtccccgcagggccagcgcgtgagttcagagaggagataggccgcagcccaggaagcagggtccagtgtggctgtgtgcagataggagaggtgtggccgcagggtagacgaggtctgcccctgacgaactggctgtgcagtagtgtggaatctgtctttattctgaagacaaatagtgagccatcgcagaagtttaacagaacgataggagatttttaaagagcaatctgccatctgtatagagaatggacgagaagggaggtacgccagaggcaagaggagagcagccagaagtggacggtaggcatgttaagccaggtcagcagtaatgtgtgtagtaatggaataaagtaacgtgagggtgacgtggctgctagtgaaggtagagcgagtggcangtgagaaaggtgaagggacanggaaggtttgacatgttacatanggaaaaggaagtatcattggtgatttacagatgtctgggctcanatggntgag

SEQ ID NO: 26437 - DNA, 485 bp, Homo sapiens
  misc_feature (1)...(485): n = a,t,c or g
gctggaatgtgaaggcccatgccagctcancccantnttgcatanctacncagttcaggcaaggcactgcatccccatagggtaatgtgccttgtcagctcaggtctagggtgtgtgaccttangttggcccaggcaccattttcctgggatncaggaagctgcttcagattangtactggactgtgtgtctgcttgggatggccaagacactgttacctggaaggcagggtggnacggtanggtgctgcttaancttaggcactggggaggcatgnntgctctcgatggccanattnctgttttcccaggntacaangtactgcttcanctcaggtanataagggtgtnactgcnccggatggtnaatgcactgttttcccangatgcctgncantgnttcaannaccnggnccanaagggnaagggatttccnagnntcngcaagggggaancctannatttcccacgnatcctttntnaatt

SEQ ID NO: 26438 - DNA, 489 bp, Homo sapiens
  misc_feature (1)...(489): n = a,t,c or g
gaatatcatgagcatgtgtttcagcaaggagcctgccccagccgaaatcgagcaagagtactggaggctagtggaagagaaggactgccacgtggcagtgcactgcggcaaggtggacaccaacactcacggcagtggattcccagtaggaaaatcagaacccttttcgaggcatggatggaacctcaccgtcctccccaataacacagggtccatcctgcgtcacctcggtgctgtgcctggagtgactattccctggctaaatattggcatggtcttttctacctcatgctggtctcgagaccaaaatcaccttccatacattgactacttacacactggtgctgactgcatttggtattgcattcctgctgaaggaggnnaaaancntggaanatgtggtcaaaacctgntggaaaccaattggaacccaagggctgcaaattcctggaaagcaangtcatgatctccccggaggtgctgtgcaaa

SEQ ID NO: 26439 - DNA, 485 bp, Homo sapiens
  misc_feature (1)...(485): n = a,t,c or g
gagcaaaaaaaacttctgattaaggatcttggcaagtggattctagaatggcagcaattctccatgtccaggaaactagagaaggaggtgagtcaggattatggtgggctgtgttacagttctactcaaagggtttatcgggaaggcagagatttggcccatcctccactgctgtcattgctgaagtacaaagtcataatgcctcctcactgttttccttggagccctgaggtccatacatactctctgggttatccatataattttgcctttaggcttttaggctctctagccaagaattcctttttcagttaaggaaaagcaactataaggagcatgtcccctggatgaatgccatgttactcttccagttctggaaacgatctggctccaaggtaccaacanaccaagggtnaaccctggccaaattttaccncggacccnaaaggcccctgaaaactggccctgtgtangggggctgcttc

SEQ ID NO: 26440 - DNA, 475 bp, Homo sapiens
  misc_feature (1)...(475): n = a,t,c or g
gtgtaaatctgagccagtaaaagaagaaagttccgagctggagcagccatttgcacaggacacaagtagcgtggggccagacagaaagcttgcggaggaagaggacctatttgacagcgcccatccggaagagggtgatttagatttggccagcgagtcaacagcacacgctcagtcgagcaaggcagacagcctgttagcggtagtgaaaagggagcccgcggagcagccaggcgatggcgagaggacggactgtgagcctgtagggctagagccggcagttgagcagagtagtgcggcctccgagctcgcggaggcctctagcgaggagctcgcagaagcacccacggaagccccaagcccagaagccagagatagcaaagaagacgggaaggaatttggtttgcccctnnaannaatccnccggtccnaaaantctcaacaatnagggcgctgatcaaaaaatgagggtgtt

SEQ ID NO: 26441 - DNA, 480 bp, Homo sapiens
  misc_feature (1)...(480): n = a,t,c or g
gagtaattgtaggggactccctttcccctaagacatatttagcaaacaactgatgggagaaataaaaaatatgtaacactaacaaactagagggattgagagctatctccagtcatgtagcaaggatatctatcatggagaaaacggcatggtcttcaggaggagaaagaagccttgatttccagacaattgttttctcatgggacacgtttattgagcatttacagcttaccacattgtanaagttgctgggggatttcaagagccatanacagctcttctccctcaaggggctcatgtagggatgtgtaggaagtgacagatgtgtttggacctttggctactacctaatactttgttttctcaggaacaaactacttattaaatccagaagcaagccantctaatataatnaaaaatggcngggggcctaatnaaagttttgggttncccttanaagnaccaatnggaangtttccc

SEQ ID NO: 26442 - DNA, 480 bp, Homo sapiens
  misc_feature (1)...(480): n = a,t,c or g
gaacggggtaaagtggaccatgcaggctgcagagggtgggccttgggctggccggggttgctgggtggccccttccccatgggcctccacaagcactcaggccactggcacgttgggccaggcagaaggtccacatggcagggctgcctggaacaccgctgccactgtggctccaggaggcccttgggagcatgaggagagctggactcgctcatctgttcttgcaccaccatccagaatgccccctttgcaaggcctgctgcagtccccagtctgaccagcaagtcccggggtcacccttgctgaaccttgtgctccaggggtcctcctcctctaggaccagcttgccacggtttctcagagcccaggtgccctctgacctgccatgcggaagtgggaatttganacngtacaatgncctgnanccgggtttttaaggtttccataagggttttaattttnggtgggttgacacnaact

SEQ ID NO: 26443 - DNA, 477 bp, Homo sapiens
  misc_feature (1)...(477): n = a,t,c or g
gtgtattgctactgaggaatcattttttatccttaagtatctgtcagaaaaagtcttggctgcacaggaaacacatgagggagttactgaagatggcattgaagatgcctttgaggttcttggtgagattcaggaaattgtgaaaacagggctttgggtaggcgattgcttcatttacacaagttctgtgaacagattaaattattatgttggaggagaaatagtcaccattgcccacttggncaggacgatgtatctcctaggctacattcctaaagacaacaggctttatctgggggataaagaattgancatcattagctattccctgctggtttcagtcctggaataccagacagctgtcatgcggagggactttagcatggctgataaagnccttcctaccanttcnaaaggacannggggccnngnttgcnccttttggggaaaanaaggncttcagcnngaagnncttaa

SEQ ID NO: 26444 - DNA, 469 bp, Homo sapiens
  misc_feature (1)...(469): n = a,t,c or g
gaccctgtattggctaaatatttagcaacactgaanaatttttaacactaatatctcatttggagtggaatatgctttatggtctgaattctttccccactctgttttataagtgatgataaaaatcaaaacataatcacctgtcgaggatgaatcctgcacctgtgaaattatatttcaaacaagccaacttcctaattacaatggagagggaactggcatgaggaancaagttatttccaccattccggcagtgggctccaggctcccagatgaagagctgttggtacaaccacannaaaaactgctaaaatcatcttttattattcctgtctgcacaacaaatagctccatctggggctcaatggtagactccatccaaaatttgtnagggcncngctctnangctctggtaacanacccntncnaangncagnaatcnnnccnacaannggaacaaggtnnactg

SEQ ID NO: 26445 - DNA, 485 bp, Homo sapiens
  misc_feature (1)...(485): n = a,t,c or g
ggctgaagataagacgctatatgcccctgccagatatggcccaggtgtagagatgagtccaggttattgttaaaagagtgaaaatgcccctgtcacattccccatcgttttcttccatctataaagatgatggcaatggtgttggcaatggtggtgataatgatgattatcaagtgagcattattccatttttaggcatgatggaaggaaaagtcaaatgcagtgttcttaagaaattctnnnnnnnnnnnnnnnnnnnnnnnnnnnnnnnnnnnnnnnnnnnnnnnnnnnnnnnnnnnnnnnnnnnnnnnnnnnnnnnnnnnnnnnnnnnnnnnnnnnnnnnnnnnnnnnnnnnnnnnnnnnnnnnnnnnnnnnnnnnnnnnnnnnnnnnnnnnnnnnnnnnnnnnnnnnnnnnaaaggaaggnnnagggnccaaaatttgttnnancccaggaantaaagggttgaattgnnctnaaattttg

SEQ ID NO: 26446 - DNA, 481 bp, Homo sapiens
  misc_feature (1)...(481): n = a,t,c or g
ggtagtgaagagggaggttatatctgaggtccagttgacatgagggaaaggtcttaagacctttaagacatttaagaggaaaaatgagcccaaaatgcatgtgtttggaaggcccacagctgggcacagccatgcatgttcctcacgtccaccataggtttatgctgcctgaccccttgggtctttgctcatttcccttagtttccctagtccattccccatggggagctgggacccttctggatgacctcttctctgaggcgcccatctcgtgctcccagggagcactcccatctcctccctcccaggggaagtacacattgccttatctccatgtgtcttaggatccttcttgtccttacactggtgtcttcaaacgacatgtcctaaaagtaaatgttgggtaagttgaatgncctgngnnaccaatccccaagttntccaaaatttaggggnanggncacctnnctggnaagtgttt

SEQ ID NO: 26447 - DNA, 477 bp, Homo sapiens
  misc_feature (1)...(477): n = a,t,c or g
gacaaaggcagcnnnnnnnnnnnnnnnnnnnnnnnnnnnnnnnnnnnnnnnnnnnnnnnnnnnnnnnnnnnnnnnnnnnnnnnnnnnnnnnnnnnnnnnnnnnnnnnnnnnnnnnnnnnnnnnnnnnnnnnnnnnnnnnnnnnnnnnnnnnnnnnnnnnnnnnnnnnnnnnnnnnnnnnngagnnnnnnnnnnnnnnnnnnnnnnnnnnnnnnnnnnnnnnnnnnnnnnnnnnnnnnnnnnnnnnnnnnnnnnnnnnnnnnnnnnnnnnnnnnnnnnnnnnnnnnnnnnnnnnnngtagccaccgcaccgggcctgtccacgtaatttaaaaggtgctggacgtgtncggtggtcacntgggnacnccgcngnntnngggatgncggnntnnggggtgccngnggnccggagntccnnccgnncnggggnaccnggggggggnccgntcccnnngnggntttnnaantggnnngggg

SEQ ID NO: 26448 - DNA, 484 bp, Homo sapiens
  misc_feature (1)...(484): n = a,t,c or g
gtggaaacattatcagcaccttccctgttagaactgacatttttagataaacaatttggaacgtaaaatctcattcctctgagattttaaatacatcgtaagaagaaattaagctcttactctaagactgtcatccagaattccctaatcctacccaacaaagggtatgctctcaaaacatgcaatctttatttctactgtttttatttttagcaaccatacttaatctgtcaccaagtcttaccaactatcctactgcataaaacaaaagttgttattttacctctattcctacaagcatcaccctaatccacatctttatcaccattacctttacatagtggtttctcggctagctttcaagtctctcattgaaatccacccagccagatttatcttcntaaaaatgcantttttggggccggacccnattgggtnaagccgggaanccaacnantttgggaaggcaaggggggganatcac

SEQ ID NO: 26449 - DNA, 484 bp, Homo sapiens
  misc_feature (1)...(484): n = a,t,c or g
ggggtttcattttagtagtctccccgaaagagacaaaagtccttagactggggtggtgtgtttgtggtggagatacgtggaagagttgagagttttttaggatgtacctgaacttatacagagagggaagcagacctattaaggatgacttccagttccttgctaagatgaaaaagcttggaggaaaccagttgagcacagccaaagcacgagtttggttttgggcataaagggttgagtgctaggtggtgtcaatgaaggacagctggttatgagtcacatatttgtgtgtgaggcatctgcacactcaaataaggtacctggcctggagataaatgtgagagatttaaactgattccaaggggtgactgaaggcattagagagggagggaatgaagaggaaaaaggngtnggcntnaatgntgnacccccnngnttaaaantgangaaaaaaggctgggnnaattgggtcccncctgtaatc

SEQ ID NO: 26450 - DNA, 482 bp, Homo sapiens
  misc_feature (1)...(482): n = a,t,c or g
gtaaaattttggcatcaaagctaacttttaaattatgatgaataatacataattaccagaaaattcttacttctgaaataaaattattcaacattatttttatcttagagtacgactttctgtctcatatttttgagaactgtctactgccaacataatattaaactatcgactaaaaggaatttaagatgtatgttagccaaatctcagagaaaaaccaatggaaatattgagagaagtaatttaggtatcttttgcccccactgcctaccactaaataaaattacaaacaataaaacgtcctaggtggtgatgcaatgagaggcactaatggtgtggtaagagagatgatggttcaccgggagcactaaggaaaggtctgctgttgagaaaatatgtaagggcatacctgaaaggggttnaaaacnccaaanattggtngccctggggggnncacgtccngtaancccancactttggga

SEQ ID NO: 26451 - DNA, 484 bp, Homo sapiens
  misc_feature (1)...(484): n = a,t,c or g
gaataagctaagaatggnaatgcagtttcaggggttagaaaatccaattcaaattagtcctcactgcagctgtacgccgtcaggatttttcatggaaatgatgagtatgaagcccgcgaaaggtgttttaacagaacaagtggcaggtcctctgggacagaacctggaagtggaaccatactcgcaatacagcaatgttcagtttccccaagttcaaccacagatttcctcgtcatcctattattccaacctgggtttctacccccagcagcctgaagagtggtactctcctggaatatatgaactcaggcgtatgccagctgagactctctaccagggagaaactgaggtancagagatgcctgtaacaaagaagccccgcatggggcgcgtcancangggagggtcaaaggggatnacctgngtgttgtttgntgggaaaaananccccnggntccactataangcnctgacctgtnagggg

SEQ ID NO: 26452 - DNA, 479 bp, Homo sapiens
  misc_feature (1)...(479): n = a,t,c or g
gtagcaccatgagcttcaataccctgatctgctccttatctctgagggggacctcccaactggggcctccaaccggctctgcccatattctctggcagacagagttttgatttctacctgggatggagtgccaagcgggagggggaggctgtttggacagttgtttggacaactcagccattccagcctgtggggtgtccaaactgtctgaaagtggaagcagtaccccagcatggcatacctactctaggaaagcatggccacactgcttctttaagcaggtcctcgatcctgtttctcctggatgagtgagatctcccaaatggggtatccanccacctcctataggtgtgttcaggtcaacaacaggtctgtaccccactgggatggagctcccanaaggaaggggaaggcaacatccttgnnggttnaacaaattaggtgttttanccnccaaactttgggangccaacctgaag

SEQ ID NO: 26453 - DNA, 515 bp, Homo sapiens
  misc_feature (1)...(515): n = a,t,c or g
ggaaggaatgtgttgggcgttgtgcaaaccctaacgtaaatttcctgacaaaggtagaaagccctggcatggttcagaggtggggcctcctcctatgtcgacgggattctagattcacaccatggtacgtggggctccctgggatctttgaacccccagctgggagaattttgtgcttctcagcctcactgttctcatctcaccctggacacggtcgcagggtgaggagtagattacaccgtgaatggtgtgggacgtcagtctgtaaactacaaagcagtatataaacaggaaacgctttcagtagcaatggtggtatttctgtgtgacctggtaagtaatttcataagaattcttgaggagcgcagggtcacgagattttctcctgcatcctcctctgcatgctttatggccttggtctgggccaaggtgtgtgatctcctgcattcatggtgtgtgngttaggagggggatgggncctgcccgtctgnagtggcccatgatcccccgctgct

SEQ ID NO: 26454 - DNA, 509 bp, Homo sapiens
  misc_feature (1)...(509): n = a,t,c or g
ggggaagattaagaaaggtacaattgctgaggagaagcaggaaacctgtttccttagtggcttttatcccctcggcatgcgatggggctgatgtttctatgattgcctcagactttcacatttactagtagggctgagagaggctttagtgaggaaggaatattcagantaaaacggttgagaaagctgagaagaccattgagttttgatcanttgtgaatagagtggnaanccatggccaagctgtttttggaaacgctggccggcgtgtcttcagtggaaaaagcaaatcannatggagcgagagcaaaggggcgtcctcagtcctcaacctanaatcactgtttggaatcggtcctggnanctgaacataggnggtcactggtncaaagtnatantgcaggttggttttcaaacatcctcctgggtgattntancanctncnangtgggtcctcctttganccgtactcacatnatgngctttggnggtggggncgngctnctgtt

SEQ ID NO: 26455 - DNA, 516 bp, Homo sapiens
  misc_feature (1)...(516): n = a,t,c or g
ggaggnagccctgtcatataccatcttagagaacttgcaaaagaccctttgcttcttggagctcagttttctcatttataaattgtgaganccctgcncactctctgagtcgataagcatgacagggcaggatacccatgaggagtaacttaagaagagctggggacagcctatgccatgggcctctgtcggtgataggactgcactaacgtgcatccatgccagggcctgagcacacaanaaatccctggaagtggttctgcatagctggtgctagatcanctgcacctgggagtcacagtagcaatgtgtgggtcagaanccagcatctgcgcanagtgagtgacctggcgctggggagtctgacagtgggtgaagggacctgccanncccaagaatgggaattcccatccagncctggctttgtccattcnagtgacttggtcaaggcccgatctgccttagntccttcctgctggacatggggcattgttctgcttctgtagcactanttcc

SEQ ID NO: 26456 - DNA, 526 bp, Homo sapiens
  misc_feature (1)...(526): n = a,t,c or g
gcgtcaattgagagtggtcatggagatcatggtgatagagatttggggtaggggaatgtgtgaaataggcatctaggagagtaagggaacagagtggcacaagccatagagttaataaatggcagggataggattctgacctaggtatcaagtttgattttttttctgtattaaattgccacccctaggccaggcgtgcctgtacnnnnnnnnnnnnnnnnnnnnnnnnnnnnnnnnnnnnnnnnnnnnnnnnnnnnnnnnnnnnnnnnnnnnnnnnnnnnnnnnnnnnnnnnnnnnnnnnnnnnnnnnnnnnnnnnnnnnnnnnnnnnnnnnnnnnnannnnnnnnnnnnnnnnnnnnnnnnnnnnnnnnnnnnnnnnnnnnnnnnnnnnnnnnnnnnnnnnnnnnnnnnnnnnnnnnnnnnnnnnnnnnnnnnnnnnnnnnnnnnnnnnnnnnnnnnccangtcctgtctcaaatttaaaaagccaccctaacaagcaaagtataaatactaaaggtgtgtttc

SEQ ID NO: 26457 - DNA, 527 bp, Homo sapiens
  misc_feature (1)...(527): n = a,t,c or g
gcggcnnnnnnnnnnnnnnnnnnnnnnnnnnnnnnnnnnnnnnnnnnnnnnnnnnnnnnnnnnnnnnnnnnnnnnnnnnnnnnnnnnnnnnnnnnnnnnnnnnnnnnnnnnnnnnnnnnnnnngttctgatagattttaataggaacanaagtcccggcagtataataattgangaaatgangatgttctgggtgatatattgttcctttcattcagaaancataannctcctcagatantgaccctcttcctcnacgtgntccatctcttaagcccttcaacccctgatgggggtgtgtcngcccangtnaaanannattggcatgtggaagctacggaagtttnncttagggaacacgtgnaaattgcnnngatacctccacganggccangttngagnctaattgcaaattggctgtgnatccctaanggcaantgcnggaccccctggngatccccangaanggnccattctgganntggcnanttggcattcaanggggaanttncntcnttgggnncgggg

SEQ ID NO: 26458 - DNA, 529 bp, Homo sapiens
  misc_feature (1)...(529): n = a,t,c or g
ggagcgtgagtacaagcagaangatttgtgccggcgtgtgactgtgcacacactcgtattcacatgtgaggatgcctgtggggaatggtgagcgtgtgtgttgctggacatggatggattctgcatctctgcacctcagggcagatatgtaggtgtttgcttgtgtttgccggatggtgtggcatgtgctaggtttttgcacatgtctgattcttgggcatgccctcttnnnnnnnnnnnnnnnnnnnnnnnnnnnnnnnnnnnnnncntggcctctgctangcctaaagagcatgtatgtccaggntccagagctgggactggggaacgcangactggccaggcccgaggnagatctgtgtacacacacccttcacatcacagctggcggcnnggagnaggggtgctgtggaaacagtgggtgntgagccccanccttgggtcngannangantggnccctgnanctccgggggnnggccnnggggntaanncanncccggtnaaaanctccncangnaatttnggct

SEQ ID NO: 26459 - DNA, 542 bp, Homo sapiens
  misc_feature (1)...(542): n = a,t,c or g
ggctagatatgtgagaaccccagcagtaaaaattcactccatcttctaaggaattgtctgtgttccttcagaatttacaaaactgaacaccatatctcttctacatagctcatagctcctactacacattgctgaaaagaatttgtccatcaatgctatactgtatacctgtgttatttttatagtatttcattacaggaatatcaggtctttctcttcccttccctanactttttctctttgtttgaccttttttcatttttagtccacagaaggctgagtaaaacagatacatatgttaactttgtgactttgagcaaattactgaacttctttgatcctcatctgtaagacttagagcaataactagcaacctggttggggagagtaaataattggatacagggccangtgcaatggctcatgcctgaaatcccattattttgggangntganggnggggaggnnantngnccaggnnttgnngctgggtgaatgggngacncagntatnnancnntgnnccgggntcanngnttttcc

SEQ ID NO: 26460 - DNA, 564 bp, Homo sapiens
  misc_feature (1)...(564): n = a,t,c or g
gtaaataagtaagtagttctttcgggaggaccattgcctcncnggcatgcantttgaagtgttgctaagtgntcatttcactggggaagagatnaccancgtggntctnnncanacggttaatttcacancttttcccangggggagcgtgttncctattgtgnnctgcncntgtnnngganctacnttgnacactcctgatnanaanttaatgccngntnnccngtnactgncncncatcatccctnnatgggaccatccatttgcaggnttaacacgctcaggggtctcantgattctacattatgctttgtntggttctanncaccaaattttcgtgncncanncctncaccancataccgtnttcatcctttgaatgagttctagtgtttgtgcccanacctggtgttttgctncatgggggattcnggaggatgncatccatcgaaagatttntgaatcatgtgaagtccgggngtccnccnnttgcctcctcctcacnngnctaaaannggncttaagaggggaggaccnnaagcncggtncgtcnaaantnnaaggg

SEQ ID NO: 26461 - DNA, 172 bp, Homo sapiens
  misc_feature (1)...(172): n = a,t,c or g
nnnnnnnnnnnnnnnnnnnnnnnnnnnnnnnnnnnnnnnnnnnnnnnnnnnnnnnnnnnnnnnnnnnnnnggccgaggagaatctgaacagacaggcctggctgggcttccccactcggtgtgttagtattaggtggtaccctttttgtccaatcacatttttttttttttt

SEQ ID NO: 26462 - DNA, 552 bp, Homo sapiens
  misc_feature (1)...(552): n = a,t,c or g
ggagagctagcaccatgagcttcaataccctgaatcaagtgaatgacttgttagtttgatcaaaaattatcactttatactacgagggaaagcaaccatcttatccaaactanatggnattagactgtataaacttccagagtctgcaggtagattccctcaagtcctctgaaattcttctccagggacttgtgaggagcttgggctcactggacctgtctctactagggtgggcagagcaggctctccccaaaacaacagaatcttggcttcccagccccagcctggcagagcactagcctctgggttttaatgagctgccctgggttagaaacaggacgtgactgtggctggctgagaatcctgaagatcttattaaagaatcatctcccttgtactttgggctgaaatgctctttccaaccaaggntcaaagcaaacttgacacacattctctcattaatctccccatccctggggcggaacantcggtaccgttttncnggttccaaaagggaanctgatccaatgncngggtggctgtgggaaaacc

SEQ ID NO: 26463 - DNA, 549 bp, Homo sapiens
  misc_feature (1)...(549): n = a,t,c or g
gggagctgggagattcatcaagtactttgttaaagggcgccaggctgtccttagcatggtccggaaggcaaagtaccgggaactgctcctatcagagctcctgggccggcgggcgcctgtcgtggtgcggcttggcctcacctaccatgtgcacgacctcattggggcccagctagtggactgcatctctaccacttcaggaaccctcctccgcctgccagagacatgaagattctgctcatcattgctcagctcctcagagtgggccgggaggggactaanagagctgcatgatggtggctgagacagggtcaccttgggaaggcttgggagccaggatgagtgtcgggctctcgtgtgtgcaaaaggtcagatgtgactgctgctgtttgcctggtttctgacccaatggtggggnttgacaatgcttctctgcccttccatggaaagtggancanaaatggtgcaangtgttgctgttcccttcctgtaaatggtctgttatannccgtcctgaanaagaaggngganttctggaagctnnaaaga

SEQ ID NO: 26464 - DNA, 553 bp, Homo sapiens
  misc_feature (1)...(553): n = a,t,c or g
gccaaagtccacacggaatgctgccatggcagctgcggggagccgcaagaggcgcctggcggagctgacggtggacgagttcctagcttcgggctttgactccgagtccgaatccgagtccgaaaattctccacaagcggagacacgggaagcacgcgaggctgcccggagtccggataagccgggcgggagcccctcggccaggttagtggggacatgcgtgagcagaacctcttgctcgtcctgtcccaccccggttgggttgctgacctcgcctggggtctcagggccaaggcctaaggatcgccgacctctgccccccagtcctttcagcttaacttactctttcatccgatgtttactgagctcctgttccgtgccaaactctgtcctangcaaggagcgtatgtttgggagtttgcnaaaatctctcccgatctangagaatctcacttccttggtgaatcaacgctgcanttcgtnnaaaaanataatnctnggaaggaaagganggcannggggttaanaaaatttcagggaaccnntttccctt

SEQ ID NO: 26465 - DNA, 555 bp, Homo sapiens
  misc_feature (1)...(555): n = a,t,c or g
ggaggccccttcttctagaagaacagcctctacttctacaggatcttttggatcaagaaaggcaagaacagcagcagcaaagacagatgcaagccatgattcgtcagcgatcagaaccgttcttccctaatattggtaggagttttcttgagtctcaacgtatattactatgggtattagagtggcatgcgatatgcttataagattttattattagaattacagttggaataaagcactgagtttttctattcctccttgaggagtttgtttgntttggtttgaaaacggagtcccaactgggtcaaccaagatggggtncaatggngccancncnggtnaaaagaaactncaactcccggggtnaagtgatctcctggntcaanctcccnantngctggggacnaaaacanntgnaccaanccngggcaaattttgtgnttttttaaaaggcgggggggcacnnntttggccagcnggnccnaaacccnncncaagggngnnccggnttgnnnccccanggggtnggnntananngngggcncccnccttggc

SEQ ID NO: 26466 - DNA, 545 bp, Homo sapiens
  misc_feature (1)...(545): n = a,t,c or g
gctttcgtctgcactaccaattcaatgcccttcatccaatgggtatctatttttgtgtgtgattatagtaactactccctgctttatatgccaccctcttccttctctttgacccctgtgactctttctgtaactttcccagtgacttcccctagccctgacccaggcactaggccttggtgacttcctggggccaagaaactaaggaaactcggctttgcaacaggcattactcgccattgattggtgcccacccagggcacactgtcggagttctatcacttgcttgacccctggacccataaaccagtccactgttatacccgggggcactctaacatcacatcatcaatcaaaattcccttaatttgtanggactgggaactttggaaaacacttttacantttggtccgattggagctcaagaaaaccctgggaancctttanggnaaggatcctaaccccaatttgaanatgaaaacctgatcaaaaattcggtggactgtggtcccactggaactaccaagancaatgtcacttcaaa

SEQ ID NO: 26467 - DNA, 552 bp, Homo sapiens
  misc_feature (1)...(552): n = a,t,c or g
gctgaagttcaattctgcattctaagatgttcttttaccaccccttcccctgcctggtggcttagtgactgtgtaccctacatcatagcatggttgagagactcctttgagataaatacatattcaccgcatcatccaaactgtggtacctggattacttaatccaaacttcacaacaaccctaaaaagtcattcccaggattcttcctgttttcagataagcacagggaggcttgtgactcaagcctcgagttcgggtccagcctccagttcgggtcaccagcctatcagaggcagtgctcacccaggcagcctgtctcccagtccctcagctttgcccccattggtctacctgacacacctcaactccaggaggagtccaaaggttacagcaaactcaccactaacctccagctgcaagtggtgatcccgctcaaatcaaaagtccacaccaaagncacaaagtcccgccttctccaactgtccaaaaccttttccaaacanaaaggggtggaaatgtcccaaaccctgcaggggaatttcaacccccat

SEQ ID NO: 26468 - DNA, 555 bp, Homo sapiens
  misc_feature (1)...(555): n = a,t,c or g
gtggtgtcagacatggaaatgaatgatcaacaagaatatagccaggcgcgtgggcagggccagggcgggaggagctggggagctggggccctgggtcagtctggccccccaccagctgcctgtccagttggcctatggaagggtgcccttgggantcgctgttgggagccgganctgggcanancctgggctggtggggtgccaccctcncacaagggctgggntgatacccagctgagtgcagcgttgcgtttcactttctggnggggcctnangtcttntcacctggncttgtgnccccanaagaatcacangtaangatngnaaggggganccacantnnccttcctcncaaaacncacgncccaaggcgngtntatncgttcacaaganccccntcattnccnccnccttnaagctcnnntgtccctnnnggcaaaanctnntanntcnangtaccaaatgncaanctcanctctngcccttaaaangcntttcccanacanatggggatnccannttccaaancggccnggggaatgtnnancnnntttt

SEQ ID NO: 26469 - DNA, 541 bp, Homo sapiens
  misc_feature (1)...(541): n = a,t,c or g
gcattgaagaacgctatggaaaatataacatcagtgatcctttaatggctctacagagagattttgaaacactgaaggagaaaaatgatggcgaaaagcagccagtctgcacaaatccactctctattcttaaggttgtgatgaagcantgcaagaacatgcaggagcgcatgctgtcccagctggctgctgctgagagcaggcaccgaaaggtgatcctagaccttgaggaagaaaggcagcggcatgcacaggatacggctgaaggagatgatgtcacctacatgctanagaaggaaagagagagctgactcaacagttggnatttgaaaatcccaagtgaaaaaatttgaaaagacaanagaaactccccaatcaactgggaaaaggacgctcccgccaaagcanctctcaancaagccaatgctnagttcaagaaagcaccaacaaggaacccaggaaggcaaaagncnggaactnnccncaaattggnaaagggaaaacccgggtnttaacggaaaaaatttnnnctnaaaaaaaa

SEQ ID NO: 26470 - DNA, 546 bp, Homo sapiens
  misc_feature (1)...(546): n = a,t,c or g
gtagacatcatacacatttgccaagaaaggatctctggggcttccgggggtgagattcaagcaggacaataacaagaggctggacaccctacagatgtctttgatgttttcagttgtttgatatatctcccctgtagggcatgttgaggaaggaggagggctgatcaaggccaagctggtctancctgacatcctagctcctgactgaacactatagacttcccagcagcatttcacccancagccananccggctttaagtccccaacccttacagacaccactgccaccaccaccancacgaccaccaccacnaccangactcaccaccatcatcacctcggnaaagtgtntccttgccctancccngtcacccccgaaantaaattttaccttcaggttgnnaaactcccnggggctaatccaaaactggggttcnatnatnctntaaagtaaaaggggctgagctnaancaatgggaaccngntgtgtncccaaaatngaaaattgaaaacttcattggggaaaaaactcgtncccaccatc

SEQ ID NO: 26471 - DNA, 522 bp, Homo sapiens
  misc_feature (1)...(522): n = a,t,c or g
gggccatggctgtggaagacattatttctcgggtgcgaggtggcagttctggctggagcggtggcttggcacagaacaggagcaccattacataccgttcctgggggaggtcattaaagtataatcctgttgttatcgattttgagatgcagcctatccacgaggtgctgcggcacacaagcctggggcctctggaggccaagcgccagaacctgcgccgcgccttggaccagtatctgatggaattcaatgcctgccgatgtgggccttgcttcaacaatggggtgcccatcctcgagggcaccagctgcaggtgccagtgccgcctgggtagcttgggtgctgcctgtgagcaaacacagacanaaggagccaaagcaaatgggaaccggaattgctggagctcctggtcngttttcanancaagcatccanggaaagggaananantnttnnanccnnnnnccnnaaannnnggggccccntttcagggngnaantnaannccnnggttctngggcccc

SEQ ID NO: 26472 - DNA, 529 bp, Homo sapiens
  misc_feature (1)...(529): n = a,t,c or g
ggggagacaaaagtaaaatcatacagctagcactgctttgtatattgaatacaaaggcatcaatgggaacaccaaagaagtgacagactggcctggaaaaccctcaaggttggtttagggaaaggtttttagaggatgatatttgagctgaattttgaagcataagtagaaaagggggagtagaatgtcgacataccagacccaggagatatttgaactaagactgtgtaacttgagtcagcatgtctatgcttggatcacagatacttagcttcaaaagtaatcttttaacttgaagtttcttttcttcagaagtgtantccatgantatatattcattactaaaatttctgttggctgggtgccggtggctcatgtcngtgatcccaancactttgggangctnnnnantagatngnttgacccaanaanttgtnaaaanctggggnncatnncnaaccccactntnatncantcccannatnnccacggntngcngcnaagtncgcancccctncaantnggtggg

SEQ ID NO: 26473 - DNA, 524 bp, Homo sapiens
  misc_feature (1)...(524): n = a,t,c or g
gnnnnnnnnnnnnnnnnnnnnnnnnnnnnnnnnnnnnnnnnnnnnnnnnnnnnnnnnnnnnnnnnnnnnnnnnnnnnnnnnnnnnnnnnnnnnnnnnnnnnnnnnnnnnnnnnnnnnnnnnnnnnnnnnnnnnnnnnnnnnnnnnnnnnnnnnnnnnnnnnnnnnnnnnnnnnnnnnnnnnnnnnnnnnnnnnnnnnnnnnnnnnnnnnnnnnnnnnnnnnnnccgcgcccanccctgaagcaggcttttagataagattgcatgtccatgaaaattttgagggaanaaaaaaacttccaccctgttgcaaagattaaggcagtgaaaggaatctgaaaaacactgggatctattatgaccaagcttgtctgctcttaatgcattccaaactcctagttccactttgcatttcaatgtanaaatataaaatgttgggnanaaagttaaaccggattccnnggnaaatcccngggaaaggggncccctttgganaaanaaangggggccaaancccttgggaatt

SEQ ID NO: 26474 - DNA, 522 bp, Homo sapiens
  misc_feature (1)...(522): n = a,t,c or g
ggctcttgctagaatgtccagaacaatgttgaacagaagcagcagcagtgggcatccttgtctctttcaaaggctttttgtttctcaccattgagtatgatgttagctgtgtttgtattttgtttgtttgtttgagacagtccccctctgtcattcangggtggnnnnnnnnnnnnnnnnnnnnnnnnnnnnnnnnnnnnnnnnnnnnnnnnnnnnnnnnnnnnnnnnnnnnnnnnnnnnnnnnnnnnnnnnnnnnnnnnnnnnnnnnnnnnnnnnnnnnnnnnnnnnnnnnnnnnnnnnnnnnnnnnnnnnnnnnnnnnnnnnnnnnnnnnnnnnnnnnnnnnnnnnnnnnnnnnnnnnnnnnnnnnnnnnnnnnnnnnnnnnnnnnnnnnnnnnnnnnantcacggggcccgggcngataaatttgnttccanncccannntannnggnccntnnnnnannaanggggtttnnnnttnnnnanngggtttnnnngnnnnnttnggnannnnccngggggt

SEQ ID NO: 26475 - DNA, 545 bp, Homo sapiens
  misc_feature (1)...(545): n = a,t,c or g
ggtgagccaccgcacccagcctaattatggtacntctgaacttgaagtgtcctttanagtaatctcatacagatnaggagactgacaatgaganangttaaagatttccanatatcnacactttttgaatttaaacanngaaatttgggaaaaaagtcttcatacttgctctcttcacttgcttaccttccagttactcataagccactccaatcttgtgttgtacccaaggccacacagctagttgctggtanantcaagtcnggntnaaacctacgtantttcatttccantccantgcngtncaccatgccnccttttgngtantgagtnnacaangacttgttgantgtccnggtatatgnnccannttgttcnggaccctnnggaacagtnntccnnncgacaancnaaattcntgtccaannanngctnccnannggntgncnnncagtttnanccctttnccccnnnaananacnntttngngnaaaacattnnncnaaattttcaagtntggtnnnnncnngananangncaggggg

SEQ ID NO: 26476 - DNA, 523 bp, Homo sapiens
  misc_feature (1)...(523): n = a,t,c or g
ggcatagtggtgtttctaggctgctgacatatgcnaaggaaacattgtattgatgtgtgcatgtgacagtctacctgcaacatgcatgtgctcgtggctgaatcatttgtgcatccaaagctgaggtccctggctgctgttgatttagtccaacgcatatgtaatactctgtggaaaacattcctggttagtagctcctcactactgtgttatacaagctgctggcaaaggtaattatgcttaataggagccacctttgatttaaagctgcagaggtgagtaattaaattgagctcgctcaagcacgagggggtggcatgcaacctttgtttggggacattcattgggagcggctgggatctgttacaaaggcaatgtttcttgggctcatatttgtcacccagattgtcntaaaaagacatcantgcaacngggagaaattcaccaaaagnntaatgnaagggaanccntntttggccgggnccccaaatttccncaaaggggaaancccccccanntttat

SEQ ID NO: 26477 - DNA, 530 bp, Homo sapiens
  misc_feature (1)...(530): n = a,t,c or g
ggtactttattcttcctacatttttgtagtattatcacttcaatgtatagtactgctgaaatgggctacctgtagtgatatataaaataaatagaacaatatcagacctttagaagtgtggctacagtttattcactgctttactcagcagaccattaagtacctactatggcccagcacctctgctagatgcggagatgaaaggacagcgactgtctttaccaggagctcttcgcttttgaagagataggtaaataaatgatgacaaaacagtgtaaaaagtatttggtgaatgtagtgganaggggtcatcaggaactgcttcttanatattgacatccctaagtaggaattggcgatgtaaanaggcaggaaacaccagaccanaanaattgcacatgaaaaaacacgggggctaaanaaaacacagcacattcnatgnactacaagtngnttatggagtntanccaaaggnggantttncttcctttgggnaaacngggattggctaatgggggaaacctaaaggg

SEQ ID NO: 26478 - DNA, 549 bp, Homo sapiens
  misc_feature (1)...(549): n = a,t,c or g
gcaaatatcttcattcagaaaacaaacataaaattatgttttnnnnnnnnnnnnnnnnnnnnnnnnnnnnnnnnnnnnnnnnnnnnnnnnnnnnnnnnnnnnnnnnnnnnnnnnnnnnnnnnnnnnnnnnnnnnnnnnnnnnnnnnnnnnnnnnntccttagctctacttaaaataaaatttnnnnnnnnnnnnnnnnnnnnnnnnnnnnnnnnnnnnnnnnnnnnnnnnnnnnnnnnnnnnnnnnnnnnnnnnnnnnnnnnnnnnnnnnnnnnnnnnnnnnnnnnnnnnnnnnnnnnnnnnnnnnnnnnnnnnnnnnnnnnnnnnnnnnnnnnnnnnnnnnnnnnnnnnntgtttcaaggggtgtcttcccttggtaagttttattntagtgctttcctacaagtnntaacattccntgnccccanangntntttananccntccaanggcgganaaantggnncaaaacngttatnccagaatttgggangcanaggngggcngncactnagggcnggagtcngacagcccggcaaaatgggnaacc

SEQ ID NO: 26479 - DNA, 541 bp, Homo sapiens
  misc_feature (1)...(541): n = a,t,c or g
aagttataaaatgaaaaggaagaagactttatactgagctttgagaaacactgacttttcagattggttggagggaattaagaccaccaagactgagaagcaattccttaaaagctaggagagtgtttctgggaagccaagtgganagagtggtaacgatctactttgttctgaagggtcaaacaagataaagactggagagtgtccattgggtttagttacacaaagatcatttataaccttatgtaaagccatttcagtggtgagttggaagctgaaaganatggatattgctgggtatanattattctttgaaaaagttggttgaggaanaacgganaatgtggtacttaanggagaagacacncaaatattggctnagtgaatacatgtgcacatgaaccnctttagaaattacaagcacaagntacaaggtcancnccgaggagattggangagacccggtangganacaactgaaacatnnatanccnggncaaantttttgggttccanntgtgccaantgaangnnaaaaacc

SEQ ID NO: 26480 - DNA, 545 bp, Homo sapiens
  misc_feature (1)...(545): n = a,t,c or g
gaaagttgattatcaagctactcaaggaaataccagagaaaggtgaaatcaacttaaggaaattttttaaaaatacatattataggagaaaaatnnnnnnnnnnnnnnnnnnnnnnnnnnnnnnnnnnnnnnnnnnnnnnnnncactaaagataannnnnnnnnnnnnnnnnnnnnnnnnnnnnnnnnnnnnnnnnnnnnnnnnnnnnnnnnnnnnnnnnnnnnnnnnnnnnnnnnnnnnnnnnnnnnnnnnnnnnnnnnnnnnnnnnnnnnnnnnnnnnnnnntttannnnnnnnnnnnnnnnnnnnnnnnnnnnnnnnnnnnnnnnnnnnnnnnnnnnnnnnnnnnnnnnnnnnnnnnnnnnnnnnnnnnnnnnnnnnnnnnnnnnnnnncntattggngggaanaatganggaaactcccggnattgcagagatccagactccaaattaaagagccaannacaccanggaatcatcnaannaggtntcacctagnacatntcacaagtttccaaagncnnatgacaaatancctagggcgtg

SEQ ID NO: 26481 - DNA, 552 bp, Homo sapiens
  misc_feature (1)...(552): n = a,t,c or g
ggtattccgggaagtatattctcaaaacagtattcaagccaaagggggaatgccctcattatacccttccttattttcttagagttgctgctgacactgcctgcatcacctgcaggttaagtccctggggttgggcatagtgtgtgtgcatgtgtgtgctcacatgtgtgtgcgcgtgcatgcagtgtctcgtgttgtagacacttagactcaaaccgaaacaaacccccgccaaatgggctcaccagctggttttctttgggtccccgggtggcatgcatcccagcacactgcccacagttggagctgttgttttgttttttttttaaaattacactcctgacccaacaaaggagagtaggtaggaattgtgagcacagagtaaagaaantggaaaaagtaaaancagaacccggttgcctcctcnccagcgggtgactctgtgatanaagcggaagggttggggaatcaggatttgcctgggagaaaaattccgcctggngaganagcagantctganncagganccctttcttgntngacantgggatg

SEQ ID NO: 26482 - DNA, 511 bp, Homo sapiens
  misc_feature (1)...(511): n = a,t,c or g
ggcatacctgtggccccccacacaactgancccatgctgatggagtaccctgaggctataactcgcctantgacaggggcccagaggccccccgacccagctcctgctccactgggggccccggggctccccaatggcctcctttcagganatgaagacttctcctccattgcggacatggacttctcagccctgctgantcagatcagctcctaagggggtgangcctgccctccccagagcactgggttgcaggggattgangccctccaaanncacttacggattctggtggggtgtgttccanctgcccccaactttgtggatgtcttccttggaggggggagccatattttattcttttattgtcagtatctgtgtctctctcnctttttggangtgcttaancaggggcattaattcncnggnaaagggggaaccggngaaacccaaattttcccngnccgnnnggaaannccttcccgnnnngaaccnnggnccccaccgatcc

SEQ ID NO: 26483 - DNA, 521 bp, Homo sapiens
  misc_feature (1)...(521): n = a,t,c or g
gtggtgagcatcgcggtgggctgtgccacccgcaacaggacggtgcccttctgcagcacttttgcagccttcttcacncgggcctttgnccagattcgcatggccgccatctccganagcaacatcaacctctgcggctcccactgcggcgtttccatcggggaanacgggccctcccanatggccctanaanatctggctatgtttcggtcagtccccacatcaactgtcttttacccaagtgatggcgttgctacanacaaggcagtggaactagccnccaatacaaagggtatctgcttcatccggaccanccgcccataaaatgccatcatctataacaacaatgangacttccaggtcggacaanccaaggtggtcctgaanagcaacgntgaccaagtnaccgttatcngggctggggtgaaccngcaccaagggcttggcgctncccnanngncggnanaaanaaangtcaaannnccnttncnggancctttanaataagcccctnggaaaaa

SEQ ID NO: 26484 - DNA, 535 bp, Homo sapiens
  misc_feature (1)...(535): n = a,t,c or g
gctaatgtatcctccatggttatatttgggggacataaggttgccattttcttttggatgaccttggatgcccttgagcctcagaatatgtctgcgagacttggaggattccccctgcttttgccttcgtgccttacagtctgtcagggtaggtaggaggactgtgttggggagaagggtcttagttaactgagtgaccctctgtctctgtgtactcagcttgagaactgggtgggctaggggcagtttcttttcaccccttgccacatgcagatgaatagaagctggaaatttgacttgcgtgnggtaacctgagttgacaatgagagcccatgacttgctaatgcctgtgatctgtaacccagagatcatgggctggctaatttggccctggacanaagnaatgntaaataatgngtnaaggaattgttcaaacaaggaaccttgataaggaacaaagaanggctggaaatttcnggantcccctgggggggttaccagcctgcaggggaanactctaggaaacncagccaga

SEQ ID NO: 26485 - DNA, 530 bp, Homo sapiens
  misc_feature (1)...(530): n = a,t,c or g
gcaattaatcaagaaactgccatcgacagaagagattctgaatcacttattatagcatattcccagtcttaagagaaaattttgcatcttcccttgcggtggaggtgggagagtcttactcagtgtgagacggctgttggggtccgagcctcaacttcaaggttccccaaaggcaggagggaggcctgcgtgtgccctggccctgcagcaccggcactgacttgggaggcggggagcctgcgcacgtagtgtggggggcccagtctctacacagctgtccagctgtccttgccgattgctttaggaggtcactcatctttgtaaccttcctgtcctggacagcagtaatgcctgtgaccaatgtgtttgtgaggacnaattggtccgtgcacacagctggcccctgagaaatgcanctgcaattctgtgtgaaccantctttgacacggncgggccaatttcnaagtggngcttttaanaaaccaantnccacttgggccctntgntcaaccctgtatcccaanaatttg

SEQ ID NO: 26486 - DNA, 539 bp, Homo sapiens
  misc_feature (1)...(539): n = a,t,c or g
gcggcacgagggcancttaanngacactattcagcatcatnaaggataancggtttgggtctctgaaggaaatatggaagggatggntgatgaccccnaagaccgcatgtcctacttaaccgccatgggcgcggactatctgagttgcgacagccgnctcatcagtgnctttgaagacacggacggtgaangaggcgcctatactganaatgaactggatgagccanccgaggagccgctggtgtcgtcnatcancgctcctcgganccngtgcagcacgangagannntntgaaaactagnccagaggnannagctcanatnatgagggctgccagcatcngatnacttanggacaantancccgccccatcattnaangccaaatcgnccnaanggcaannccnacccnggnantatctangacttctccaaatcctatgntntnantcaaacccctnnggcnntttttggtantgnacncctgggggancnaccannaggttatctccncntggttgcagcnannannaccttggg

SEQ ID NO: 26487 - DNA, 530 bp, Homo sapiens
  misc_feature (1)...(530): n = a,t,c or g
gaacccagtagtgtgctaggtcctggggttatggttgtgtacaggacagaactaaattctagtaggggagaaatgaaacaaacttcaagggttagaagcagagcctggggatctggagggggaaacacaaaacatatttgaggcttagtaatcctaagaaatgggtaaacagaaaaaaggaacattctttttctagtgctcttttaaagacttgtttctttctgtcttcctaaagacacttgactcagcaaagttctccctctcatcccccttgtgcagactttctgtggaaagctggattgcaaggaattctccactgcattgtattttgcagttanatgagaatatggaagctttagatatcaatggancangtgaaaaagggangctgtggtgtcatgggaatanggattcccgaagcncagaaaggnttttaacactcactaactanaggaccttgggcangtcctcaaccctgggagtttaatcccccaccttnnactgggaaangaccttcttanngccaaaat

SEQ ID NO: 26488 - DNA, 503 bp, Homo sapiens
  misc_feature (1)...(503): n = a,t,c or g
ggagtaaagagtacaggggacctcattgtattgccttgtaacttgatgaatttctataattttaaaataaaaactaaaaaaattgtttaagggtatattgttaagagtgttaagaaatctactgnnnnnnnnnnnnnnnnnnnnnnnnnnnnnnnnnnnnnnnnnnnnnnnnnnnnnnnnnnnnnnnnnnnnnnnnnnnnnnnnnnnnnnnnnnnnnnnnnnnnnnnnnnnnnnnnnnnnnnnnnnnnnnnnnnnnnnnnnnnnnnnnnnnnnnnnnnnnnnnnnnnnnnnnnnnnnnnnnnnnnnnnnnnnnnnnnnnnnnnnnnnnnnnnnnnnnnnnnnnnnnnnnnnnnnnnnnnnnnnnnnnnnnnnnnnnnnnnnnnnnnnnnnnnnnnnnnnnnnnnnnnnnnnnnnnnnnnnnnnnaggngtattgaaatttaagaccattttaattttcaacctgggcaanaaanccanaccctatctttaaaaaaaaaaaaaa

SEQ ID NO: 26489 - DNA, 547 bp, Homo sapiens
  misc_feature (1)...(547): n = a,t,c or g
ggtgtgtttgccatcaacaacaccaagtcttttgaggacatccaccagtacagggagcagatcaaacgggtgaaggactcggatgacgtgcccatggtgctggtggggaacaagtgtgacctggctgcacgcactgtggaatctcggcaggctcaggacctcgcccgaagctacggcatcccctacatcgagacctcggccaagacccggcagggcagccgctctggctctagctccagctccgggaccctctgggaccccccgggacccatgtgacccagcggcccctcgcgctggagtggaggatgccttctacacgttggtgcgtgagatccggcagcacaagctgcggaagctgaaccctcctgatgagagtggccccggctgcatgagctgcaagtgtgtgctctcctgacgcagcacaagctcaggacatggaggtgccgnatgcaaggaagaggtcagacggaaggagaaggaggaagacggancaaggaaggaaggaaggctctggagccatcancccggacnttggccaagtgctgca

SEQ ID NO: 26490 - DNA, 530 bp, Homo sapiens
  misc_feature (1)...(530): n = a,t,c or g
gtacaaaacaacaacaaataacccaactaaaaaacaggcaaannnnnnnnnnnnnnnnnnnnnnnnnnnnnnnnnnnnnnnnnnnnnnnnnnnnnnnnnnnnnnnnntaacttagtaagtcctttctgtaagagacagcgaaaaaaacaaaacaaaacaaagnnnnnnnnnnnnnnnnnnnnnnnnnnnnnnnnnnnnnnnnnnnnnnnnnnnnnnnnnnnnnnnnnnnnnnnnnnnnnnnnnnnnnnnnnnnnnnnnnnnnnnnnnnnnnnnnnnnnnnnnnnnnnnnnnnnnnnnnnnnnnnnnnnnnnnnnnnnnnnnnnnncaanggnnttgaatanacattccttcaangaaatntacaattggccaagaancccacntaaagangcccaatancccnanccttaggnaaattgcantgaactacacggtatcnccccaatccctaagggggcccttccaaaaaacanaaanggcnnncatgggggncnacctttaaccccggaatttggaaggccaggnnatta

SEQ ID NO: 26491 - DNA, 518 bp, Homo sapiens
  misc_feature (1)...(518): n = a,t,c or g
gctttatacatatcagaacaccaatgcatcattgtgaaaactggtgaagtctccctgtattatcaagagcaaccaagattaataacaaagctttttttcacagaagagaattccagctaatgaactcagagaagatgaagttagaaaatcactatggtgcagcccctaatgataggtctaggtgatgacactaatgcctgctggagctatgagatggacaattaatacagaatgtcatcaaggaaggagcaggctgacaagacctaacccacccaaacctgcttgcctgttgagatggggccggagggagtacatgcctatgaagcttcctgcctgagattcagcctggtccaatcacctccaacctaactctactgcattggnnaaacagggaganaggaagatgtngtcccagggagccactccaaatgcanctgtanncatttgnaggcatggtttagcccaagtcttacattgaangnnagganggaaaggggggttccntgtaatnatntttt

SEQ ID NO: 26492 - DNA, 631 bp, Homo sapiens
  misc_feature (1)...(631): n = a,t,c or g
ggggntngtggcngcctntttttgggncggacattacnnatagtcgatacnagnccggcccagggaatttnnccaancgaggccaagaattcgnnacgagcaggtgtgtnnnnnnnnnnnnnnnnnnnnnnnnnnnnnnnnnnnnnnnnnnnnnnnnnnnnnnnnnnnnnnnnnnnnnnnnnnnnnnnnnnnnnnnnnnnnnnnnnnnnnnnnnnnnnnnnnnnnnnnnnnnnnnnnnnnnnnnnnnnnaccccacctcagtttctgaatcctggagtctcttcatttcattccctgtcatcattccttcccccaaaatgaaatgcttcttttccaaatctcagtttgcaacttatgtttttctgaccccatcaaggntcacttgtgggtctgagatanctgggagttgtaaccccatangtttttccctgaagggtttctggctagtgcacttanttnatttctggggctcncttcntactgtttcacaatncnaggttcggttagcagccaanagtctanctgggcgagatttggnaggaantccgccgtcctnagtggctactgnggccccaaggnagtccaactctgaggnngntgngncccanntggctgggggtnatgngtttgt

SEQ ID NO: 26493 - DNA, 622 bp, Homo sapiens
  misc_feature (1)...(622): n = a,t,c or g
ggggnttgtggcttnntcttttaggcacgccacnaattataanataantcaggcccggccaatttggcnaacnaangccaagaattcgncactagaaacaggttaagaacaactgttggaggatatgctcttcaaaggccagtgctgttgcttctttttgtactttctgagttttaaaactgagtgcccgtttttcatctttctggagctttaagtcttcttaatgatctttgggagatggtatgtatccaatatgttccaggacccaggtgtttccttggnctttttcagtgatctcagaccttgaagtcctancttattccatatgtattttgtgatcacaancccaacctcaancagcccatgcttaccctgggacttatcccacatgtcatctcctggaaaacagccctatatnactgccccaaatgggancatccgctttctccctgtgcaagaaaancctttgaaganaagctctttngaaaatttggntgattaanngnacctanttaataaggtgaggtttttgggtngtntgttgttngttgngtggntgccttttggtttntgntttgnaancnntcgtgnangttncnagttaaagtgaannggtcntctt

SEQ ID NO: 26494 - DNA, 627 bp, Homo sapiens
  misc_feature (1)...(627): n = a,t,c or g
ggagnntnttggcggccttattttggcnggacattacganaagtctatacgagnccggcccagggaatttnagcaaacgaggccaagaattcgnnacgaggaaaatcagcttacantggccgaatattttttagaaaatggtgcanacgtagaagcaagtgatgctgaaggaaggacagcacttcatgtgtcttgttggcaaggccatatggaaatggtgcaggtcctgatagcataccatgctgacgtcaatgctgcagacaatgaaaagcgctctgctttgcagtctgcagcctggcagggccatgtaaaagtggttcagcttctgattgagcatggtgctgtagttgaccatacatgtaaccaaggtgcaactgcactctgtattgcagcccaggaagggcacattgatgttgttcaggtcctattanaccatggtgctgatccanaccntgctgancaatttgncccacngccttgcctttttgcacccaaanattggcattntnagnnanttaaacttttctanactntnggggcacccanttntaaggggggtccccacnccngttnaaaattggncacnaanccnnnantcntttnctnnaaatnnnatnctntaaattt

SEQ ID NO: 26495 - DNA, 544 bp, Homo sapiens
  misc_feature (1)...(544): n = a,t,c or g
gcaccaggggactacaggtctcaatctctgctttatgcccanttattttattttttaaatgaaagttttcaaagcaggtatttacagtattcttgnggataggaaccttactaaattactttgtattctgtttagcatttatgcatttgaatgtaggcactcaaatacttggtgatttaatgatgcctattattaaaaaaacactgtggtaataatatggagacaggagttacctggaggcaganataataggctgttacaatagttgtagtgtgagagatcaagccaaagcatanaatgttggtagtgcgaatggggaggaagattccagtcactgcaaaggangaattcggcagtttctggcatagatgttgttttnngnatccaagtnnattggatncgtgctagncnttccgggaagtntgncnggnttctgantccattcgnntnnctcttntcngnngncntcnattnngacccnggggtcnggcttgggttttnnccaggttcgntgctntgnnnccttttgngnncnggnccactt

SEQ ID NO: 26496 - DNA, 551 bp, Homo sapiens
  misc_feature (1)...(551): n = a,t,c or g
gcggcacgagcttattttgacacagtttttctaaaacaaaacttggctaagtctcctcctacttaaaatcctttgatatctccctactacccgtaggatatgagacaaacatccgtggtgtgccactcaaggaccccttgaggtctgacactggtgccctggcgcctctctcaccattttcatacaggctccccatgcatgccatgctgcagccaagctgagggcttacagctccccatcagtgctgcacagtcttgtcctctgtgcaccttacatgctgttccctcacctgagatacatcacttccatgaccccttctctacttgacactttcctccacatccttcacatcttantacaattgtcactgcttggggaagccatttgttgttttccccangagagggaaagtgacccctgcccccaagtccacagcaccttgatgagactctgatagggagtgcttatcataagtgnctgtttattatgcttgcctttctatctagagncaagnattaatcttggcccgtaaacctcaannctgtcnaaag

SEQ ID NO: 26497 - DNA, 541 bp, Homo sapiens
  misc_feature (1)...(541): n = a,t,c or g
gtaagcctgcgtttcaaaaagactggtcaactggatttgcattcccagaaaccaggaaatttctgaaactgagttttaaacctggcaactcttnnaccatccctttatatttttgcagttcctccctataccagcttccttacagctgttctgatttcctgtcgtaagattttttcttttcattttctccagggagggtaaatcaatataacctcttctctagagaggaggtggttaggttggtcttaagcagtgttagaagatctattttttttcaaaccaggtgtctgagctgggtgaattccagcctggggagaggactttgatcaccagatgtttttttggtgtgcgtgctgtcttatggttgcgtggcgagtttctgcttcagatgcanagcactgtcatagcttcctccagtggacaatagcatatttgtcgcaaaggangtggaaggacagattcgggggactacgtttgtncaaagggtacacctggtncgaaagaagnccttttttgaatgctcnaagagtgggataacaca

SEQ ID NO: 26498 - DNA, 537 bp, Homo sapiens
  misc_feature (1)...(537): n = a,t,c or g
nnnnnnnnnnnnnnnnnnnnnnnnnnnnnnnnnnnnnnnnnnnnnnnnnnnnnnnnnnnnnnnnnnnnnnnnnnnnacaaaacnnnnnnnnnnnnnnnnnnnnnnnnnnnnnnnnnnnnnnnnnnnnnnnnccagctcaggcagaaaatanaatantggttgcaaagagttgggggagggaaaattagtgtttagtggatacatagttttcatttgggatggtaaaaatttgtanaaatggatgatctggtgattactgcacaagaatgtgaatatacttaatgcaactgagctttaggtttaaatgtgggataaaatggcagtttttattttttttanatgaggctctctcnnnnnnnnnnnnnnnnnnnnnnnnnnnnnnnnnnnnnnnnnnnnnnnnnnnnnnnnnnnnctctggtgantctcctgcctcngctcccaatnnctgggactgcaggcagacaccatcanactgggtaattttgtatttcantananatgggtttacatgttgccaaacggttccaaccccgggtt

SEQ ID NO: 26499 - DNA, 529 bp, Homo sapiens
  misc_feature (1)...(529): n = a,t,c or g
ggccacacccagcagtgagaggagccccgggcacagccagccagagcccacaagcttccgggagggganaaagataccatgaacccaaggaggggacccagtananaaggcccancacccanagtgagaggcaggctcagtggacccctggccccgccatgcanccgggccctccccacccaggctgcgtgactgaggccanagggcccgtgganaaccactggagaggccagtgactgcacganaacgccaggcaacttactaactctagtcaggcggctcacaatctggcacttccacatcggcgctgcaaggaaacacaaggctcanttggaggcagcatggggtctgaggactcgggggtgcacangaagggggaccacgggcnaactgccangagacctanaacctggagcatcggagtcgganacacctgggctctggtctccctggacggcgcctgcggtcctgctcacttccggcctggagggancangagcctgctcaactgaaacgggccccccnttcc

SEQ ID NO: 26500 - DNA, 528 bp, Homo sapiens
  misc_feature (1)...(528): n = a,t,c or g
gctggtaactagtttcatggagactaacatgggaatcatcgctggagtggcgtttggaatcgcattctcccagttaattggcatgctgctggcctgctgtctgtcccggttcatcacggccaatcagtatganatggtgtaaggagaagtctttcaagaatgacggaataagagacctgttttaaaaaggaactgcagcaatctttgaaagacttccaaagaatgttagagcacagtacataatacacttgccctgctccctctaccccttaccccacaacgtgcaactgacactcccacccagtctctgctccacctttcagcccacgtcacgtgtagtgtccattttgtgaagccctgttgtgccacagagtgtatccaagtccccctgcagctagtcctagtgaactcacccgaggcctgcatgggccaacccctccatctgtacttggtccaactgcaactcatcatcngtgactggtatcanacattcgctggccctttgggcctgatgtatgttggaagggc

SEQ ID NO: 26501 - DNA, 539 bp, Homo sapiens
  misc_feature (1)...(539): n = a,t,c or g
ggtttattgcaaaagtttgaaacaatgcagcatctctcagttcatctggcagcagatgtcttatataaaagtttgaaanaatccantatctctcancccatctggcagcaggtaccttttcacctagggaggaggcactactaaggcattancaagttttttttccctctgcacccaacacacatcacacatcantgtagttgtatcaaggancctgaccctaancctttggacattatctacttctcttctgctancatnncacactctgcccagtacaagtatttatgttcaccctcatgctgtggtgactctagctttccttttaacccaggccttgcatgggttgaatacgtgctaagtacctttacccatccttcccancttcccanaggtgccngaanagacacagacangactctaanggcatctgtctcngatnatncanggaganaaaaagatggaancacancccccaccctgtgcctacgtganaaacanaaggctttgcaaccaaaacgttaatccanngngaagcc

SEQ ID NO: 26502 - DNA, 525 bp, Homo sapiens
  misc_feature (1)...(525): n = a,t,c or g
ggaggctagtccganccggagccagtgtgaccacacgtgnnnnnnnnnnnnnnnnnnnnnnnnnnnnnnnnnnnnnnnnnnnnnnnnnnnnnntnnnnnnnnnnnnnnnnnnnnnnnnnnnnnnnnnnnnnnnnnnnnnnnnnnnnnnnnnnnnnnnnnnnnnnnnnnnnnnnnnnnnnnnnnnnnnnnnnnnnnnnnnnnnnnnnnnnnnnnnnnnnnnnngtannnnnnnnnnnnnnnnnnnnnnnnnnnnnnnnnnnnnnnnnnnnnnnggcgcaaanaanancacggcgccggcgcangtgcananagacaggaggctgatggggggaanttgangcacctggggcaganaaaaaaatgcatcgccanncggtttctgggtcatctactgacgaaaatgtcntcccatcaagcccttgcctggtcccaaggacctggcatccgtcgttggngccaaggtgcncntcnggcaataaggggtacccnatccggcaaaaggccataattgaatttaanttgtgg

SEQ ID NO: 26503 - DNA, 530 bp, Homo sapiens
  misc_feature (1)...(530): n = a,t,c or g
gcagtnnnnnnnnnnnnnnnnnnnnnnnnnnnnnnnnnnnnnnnnnnnnnnnnnnnnnnnnnnnnnnnnnnnnnnnnnnnnnnnnnnnnnnnnnnnnnnnnnnnnnnnnnnnnnnnnnnnnnnnnnnnnnnnnnnnnnnnnnnnnnnnnnnnnnnnnnnnnnnnnnnnnnnnnnnnnnnnnnnnnnnnnnnnnnnnnnnnnnnnnnnnnnnnnnnnnnnnnnnnnnnnnnnnnnnnnnnnnnnnnnnnnnnnnnnnnnggcctctttctccttcttaacactagtgtgttagttgacttgtgtgtttattcatatgttatacatttattgaggacctgctaagggccaaggactaggaatanaanaatgtgtaaatcacagctctaacctttgcctttctagtctggtaatgtctctgaatgccgatctctctctctcttaaaaagagggccttgtcctctctctcaactgtcccacatcagttagggaaccaggaaacaatccttgagtatgngttaaaanaaacccag

SEQ ID NO: 26504 - DNA, 615 bp, Homo sapiens
  misc_feature (1)...(615): n = a,t,c or g
ttatganacnatttntanttngnacnttntcactacanngnaatttngncctcnaggccaagaaancggcacgagattttccatcaggacagatacagttttaaggatnaaatcagatgaatatatanaaatttaaacggatcttggcactgatcttccttgttttcagaacctgtttcaatggtgcaaccnaccaaaantaatacgcatctcatgcangacatgtcccattattgcagaantgtcntcaccctctctaagaacgaaggtacaaatccacatcctggctgttactgtgggcactgaaatggtgcccattacangaaaagccagtcntaantctggtccactaccaaggaggaaaanaagtatgaagtangtttcaggtcacttcacaaacctgggtanaaagaaagttcccanactganaagattttagatttaagntgggcangngtatngaaccctggnaggtgcctcngagtnaaagcctggacnttcnaancaantggntnnannaaactgaanangtnncttnacaatttngtncctnnntttgnttgccaaaaantcggaananggcaaggatnggngnnnaanccgntanttcatttg

SEQ ID NO: 26505 - DNA, 598 bp, Homo sapiens
  misc_feature (1)...(598): n = a,t,c or g
atgagncccatntccantngtgactttttcncccctnaccccatttnggccctcttttgccaacccaancggcacgagactctccctccctggattgttgtcacaagtttcccccangctcttaacaaangctgcacgggtgaaaacgaggacantggttctgacccccacatacagtggagaancanatgcgctcctgccttctctgagaacagaagtgtggacctgggggaaagggaacgaagggcanctggggcacggngatgttctgcctangcttcaaccgttgtgtgtaaaatgtctggatggcaaanaantaatccatctggnggcaggtggttnccattctcttgcacttactgcgaaatcccaggtttactcatggggtagcaatacctttggtcaanttgggcattccgattttccaacancangttcctcgtcttgcaaagntaggcagttgaaaatgggntctngatcatacctgcaggganggattntccctgtttttatggggtacanangactcaaccnnggttnnttaanttggccganaggnnctannaangnggnaacttccnntnatnaagtggttcta

SEQ ID NO: 26506 - DNA, 516 bp, Homo sapiens
  misc_feature (1)...(516): n = a,t,c or g
ggaggggcaccacctgctggcctcgcttctgcagcccctgcaccacgtcctcatacttgtccagcaccttctcctggtcctggaganaacggggtcaggggcccaggtgagaccaacagccttccccctggtgggaggacgcanagcaggggctggattcagcaggtggggtgctgtggaggggcctgtacagggctgagggcangcatggtgtanaggggtcccccgccccccgggccancaggggtcctgggccatcgctcacatccagctcccgcagcagcagctcaatctggtaccggtccttgaagtcagggccatacttctggttcaggtccgagtccaccttgcgcagcagctcctgagcgtccttcacgtcttcgtgaaactacgggacaangtggtctgttacagccangaaaccactacaacactgggcttctgtcngaggctcaagctcatccctcangcgggctgggctccggttaactggagtccaacatgggaacctgtgct

SEQ ID NO: 26507 - DNA, 552 bp, Homo sapiens
  misc_feature (1)...(552): n = a,t,c or g
ggaagggaaggaagaaaagaaacttaaaatgcagtttctgggcttggttgtaaaaatcttgaaagtgagggagataaaaatagttgcttgttaggacctggcaggcatgctctggaggctccctgtttgaattcagttgctaatcaggaggtgggaaacaacctctggttcctgctgttagcacctttcttgcagttggccttgtcaagaaggataatgggctggagctgagaaagaagcatcgtgctcactcgctaaactggagtggagaactattctctccttactgaatttcagggatttcagcctgccccaagtcaaatccttgttcccagaaataaagctcattacatctgtaatgtgaatgattccttccccggccacagctcaataagggctcttgtgaaactttggagtacaacttattatgggttgcctttagtcctgttgtctgggccctgattttttagtcctgggagaaaacgctccctcangggtctgagtctaanccntggcctaccttaactccctgtgcacctaacagggncgcct

SEQ ID NO: 26508 - DNA, 548 bp, Homo sapiens
  misc_feature (1)...(548): n = a,t,c or g
gaaaatagaagtctgcaagggcannnnnnnnnnnnnnnnnnnnnnnnnnnnnnnnnnnnnnnnnnnnnnnnnnnnnnnnnnnnnnnnnnnnnnnnnnnnnnnnnnnnnnnnnnnnnnnnnnnnnnnnnnnnnnnnnnnnnnnnnnnnnnnnnnnnnnnnnnnnnnnnnnnnnnnnnnnnnnnnnnnnnnnnnnnnnnnnnnnnnnnnnnnnnnnnnnnnnnnnnnnnnnnnnnnnnnnnnnnnnnnnnnnnnnnnnnnnnnnnnnnnnnnnnnnnnnnnnnnnnnnnnnnnnnnnnnnnnnnnnnnnnnnnnnnnnnnnnnnnttctgcanggnnccaangggcaccatgaaattattatttggnggtgacttgatgggncnttttgaacctganagtaanaanctaggncccattccgcagatcaggaanatttcactgaaggtttggtanatgtcaggctctgtacaaacattatttgggatacaaannaataatcannggttttgncncaaggactaaccatccnaantantnnaataacttggg

SEQ ID NO: 26509 - DNA, 559 bp, Homo sapiens
  misc_feature (1)...(559): n = a,t,c or g
nnnnnnnnnnnnnnnnnnnnnnnnnnnnnnnnnnnnnnnnnnnnnnnnnnnnnnnnnnnnnnnnnnnnnnnnnnnnnnnnnnnnnnnnnnnnnnnnnnnnnnnnnnnnnnnnnnnnnnnnnnnnnnnnnnnnnnnnnnnnnnnnnnnnnnnnnnnnnacanctnnacttnagtcnanngccttngtatccncnttgtngngnctctnttnttcananctctgtgttggggntnnccacatctgccccnggtttggtaatttactgaaaggactcacaggattcagaagtcatnggactcatggttataggttattacagtgaaaggatagaaagcagaatcagcaatggggtgaagtccagaaaaccagacagaagcttccagagccccctcctggaggcgtcacacagcanccagctgtgacaagangtgccaggtactcttctacanggcagttccttagacactcagtgctcanggtttttactggggactggcacataggaancctctgcctggcacagaccanaattccaactcctanaagggaacatnaacca

SEQ ID NO: 26510 - DNA, 549 bp, Homo sapiens
  misc_feature (1)...(549): n = a,t,c or g
gatcctgttctctccatcctcattaattttatatagtattgccagtcctattttcctaaatgaatagtaatagctaacatttatcaagggatgactatgtgtttagttaatcctcctaacaatggtattactcctattttacaggtaagaaaactaagactgaaggagtttaaataacttgccaattggcaaaaccttattagaagacagagaaaaaaaaaattacagggaggaggagcaagccagcctagggggcggctgcacagtctccaggatccccaggcctggaggggggtctgtgcacagtcggctggctccgccccgcatctggtcccgagcgggcctccctcgggccagcccaacgtgaccgagcccagtggagcctgagcaaggaacgggtctgtcacggagccggaatgtgggaggaacatgacattgtanagatggttcacccaaatatcactggggtggaggcagaaaacccactgttgataagaggantgacagcatttttggaaggctantaaaagtancctggagactcacact

SEQ ID NO: 26511 - DNA, 190 bp, Homo sapiens
  misc_feature (1)...(190): n = a,t,c or g
ggtactcttcactgtctactgtctctatcacaagcagcttcaagaaactaaggttgaggcccaatggctcatgcctctaannnnnnnnnnnnnnnnnnnnnnnnnnnnnnnnnnnnnnnnnnnnnnnnnnnnnnnnnnnnnnnnnnnnnnnnnnnnnnnnnnnnnnnnnnnnnnnnnnnnnnnnnnnnnn

SEQ ID NO: 26512 - DNA, 104 bp, Homo sapiens
  misc_feature (1)...(104): n = a,t,c or g
gnnnnnnnnnnnnnnnnnnnnnnnnnnnnncgcttggcctctcaaagcattgggatgacagacattagccaccatgcttgaccccttcgctttttttttttttt

SEQ ID NO: 26513 - DNA, 547 bp, Homo sapiens
  misc_feature (1)...(547): n = a,t,c or g
gggcactcgatcaagatcccctgctaatgtcagggtccggggtctgaatccaggtctaacatggggccaggacatagtgacacatgtgggttcatgtcccagctggggccagggctaggtgggtgttggtggcaagagctggcttccatagctagggtcagagcacaaaggcagggccctaaaggaccttgtctgcactccctggtcctggacaggaaccagctgaggctgtgaccactccagccacctgccccaaccctgcacccgtgtctcccccagcaacaccgtgctccccattacacagcaatagtaccacctacaccctgacctgtaccgggccctatggatgagctttcattccccacagtaacctttaaggtgagctcaatactcccattttgcagatgagcaaacaggctcggaatggtacanggaagccaaacgccgtggtcatgcctgtatcccaacactttgggaggcaatccagtggtcatctgagnccggagttaagacaacctggcaaatgtgaaacccctctctacaaaaa

SEQ ID NO: 26514 - DNA, 551 bp, Homo sapiens
  misc_feature (1)...(551): n = a,t,c or g
gattttgtcttccctgaatccaggctctgccccttctaggggtgtaacatcaggaaaaggactttgcctctgtctttatggggagagcattccaagcatgggaaacagcaagtgcaaaggccctgaggcaggagcctgttttaggatccacacggaggccggaatggccaggggcagagcaatgggaggtcaagtcagagaggtggcagtaggagtagggaggctggtgggcagattgcacagggccttgagggccattgtaagggctttgctttctacgctgagtgaggtggtgtcgctgagtgaggtggtgttgtccttggagtgtttcagcagaggaggggcagatctgactcagttttcgcaggatccctctggctacttgtgcgggtagatgataggaggtggggtggangctgangaggangctgccacagcaacccgggcangagaacctgttctgcaggtggctanatggaatccactgccctgcttgtccnctgtgctgctcacancttntaccncantcctgggngctttcttggncccca

SEQ ID NO: 26515 - DNA, 556 bp, Homo sapiens
  misc_feature (1)...(556): n = a,t,c or g
ggcatgtcggacatgctgcggtctctggccaccacccggcccacggtgaatgcagacgacctcctgaaagtgaagaaattctcagaggactttgggcaagagagttaaaagctgcttcacttgggcaatggtgaaggtgggaggttgattggggcaaatccaggcactccccatgtcaacagccagacagggctccagggcttgtcccagtcaatacagagttccctctgctgtctggccgtctgccagggagccagaaggaagggccttgcagccacagagacactccactgccctggggcacacagtggacactgctcttcctacttcctcctctcctggatgctcatcagctccttctgcctcccccccttttttttccatcttttgttcccctaaattaatgctgcttggattttcatcttatttataaagataaaatcacctggaagtgtcaaggagtggggccgggtggcngggganaaacaaccgtgctgcaagtcaccagacctccanaagccggtancccactgcccgttcctttacccaatttgcc

SEQ ID NO: 26516 - DNA, 561 bp, Homo sapiens
  misc_feature (1)...(561): n = a,t,c or g
gggtggtgtgtaannnnnnnnnnnnnnnnnnnnnnnnnnnnnnnnnnnnnnnnnnnnnnnnnnnnnnnnnnnnnnnnnnnnnnnnnnnnnnnnnnnnnnnnnnnnnnnnnnnnnnnnnnnnnnnnnnnnnnnnnaaaaggtcccataaaccgcaagatctggatccatactttggttaccctacgtgtctctcttgagccccanagggaaagccctgacaccatgacagcaaaaacttgacaactgcaaaggccacagcatccagacaccaggagtactggctgggtcacaaaaggcacatcccaggactatagaatctttcagtctcaggataatggccatgagaggtgaacagcccagagaggatatgagaatccagaaagtctgtagattatttgctgacagtgaccttgacacaaataacaggtctgcaattgctganaattctggtgccctcacccangaaactcagttgctggaacatttgtggatgcctccttanaactggctgaaatcctcctgttacanacactnactccatactactcactcatattcatg

SEQ ID NO: 26517 - DNA, 529 bp, Homo sapiens
  misc_feature (1)...(529): n = a,t,c or g
ggactcttacaaggccacctgcccagccctggtggctcctagtccaggacatggaaaaggggctgctgcccacaaagccangagggcgagaagaccttganaatgtccagaacactgagaactggattaggacctagaggcactgggcccctggagcctcagaaggatcanatccagaaatggaattgtgctgtctgcatcctctcccggccagatgagtgcataagtttactctgtgaatgactctcctctatctgctgtcaaaaactaccacctacttgatggctttaaacggcagaaatttattctcccacagttctgggaggtaagaagtccagaatcaaggcatcggcaagggccatactcctctgaaggttctgggaaagggtcccttccccgcttatcnaaangggaccctgaaatcctnacagatggccaatcantccaactctgctcnacaacanatngcccttgtccnccgtaagtnnttnnccaaatcctctgctctctcttaaaangatnacatgat

SEQ ID NO: 26518 - DNA, 517 bp, Homo sapiens
  misc_feature (1)...(517): n = a,t,c or g
gctgcatagggctcggcgtggttgctttcttccggaggctctgcgggagattgtcccatgcctctctccaagctttgggtggttgctgggaatcttttgtgtgttctggtttgcagatgcctctccccatcctctgcctcagttgtcacatggtgctctccctgtgtgtcgctgtgttgccttcatatcatcttccctctgtgcatgtctctgtgtccaaatgtccctcttcttatgacacaccagtcattgatttattttttttgtggggggacagtgtctcannnnnnnnnnnnnnnnnnnnnnnnnnnnnnnnnnnnnnnnnnnnnnnnnagaaactcngcttctcgggtccaagcaattctcctgctcagctcccgggtagctgaggacaaaaatnnttgaaccangaagcanaattgcannagccgaaattgcacaattnactccncntgggtnataaatcagncncaatctcaaaaaaaaaaanaaaagangttnnttaatttagnggccc

SEQ ID NO: 26519 - DNA, 512 bp, Homo sapiens
  misc_feature (1)...(512): n = a,t,c or g
gggccagagctcatttactggagattttcacctatcctcnanacctgaccgggctgtgggggatccatgcacaancggccacacctgagccccatgtcttgggtacctctgtggtgcgaccccccacagggagaatanacctctgggcttcagggagggctctctgggctgtcccangaggccactggacttgtcaccttgagatcccanatcancatangcangaggtggttcctgccaccagactgangcangaggagttccctggatgggaaggtctcctctgganttcaggggctctatcgccaagatacacctcggtcctgtgcacaggaangatcccccaggctacctgaacacctggggtatgggtgcataggaaagggncttaacctcatgcatncactngcacactggnggcanggnaaacaagggctggaaaagtgntctttngggtggcccgntgcctanggaattgacaccggttnggtnncccngnngaagttnnagga

SEQ ID NO: 26520 - DNA, 531 bp, Homo sapiens
  misc_feature (1)...(531): n = a,t,c or g
gtcatgacccannnnnnnnnnnnnnnnnnnnnnnnnnnnnnnnnnnnnnnnnnnnnnnnnnnnnnnnnnnnnnnnnnnnnnnnnnnnnnnnnnnnnnnnnnnnnnnnnnnnnnnnnnnnnnnnnnnnnnnnnnnnnnnnnnnnnnnnnnnnnnnnnnnnnnnnnnnnnnnnnnnnnnnnnnnnnnnnnnnnnnnnnnnnnnnnnnnnnnnnnnnnnnnnnnnnnnnnnnnnnnnnnnnnnnnnnnnnnnnnnnnnnnnnnnnnnnnnnnnnnnnnnnnnnnnnnnnnnnnnnnnnnnnnnnnnngttnaggtntnaaaggnattgtggtattgtgccanaaaaaancaccaattcgggggggaancnnnnggccanggnggccanncctgttaccccancattttgnnggccnaggnggggggggtcacctgngggccgggtttaaaancnaccnggcaanatgggggnaanccccctttaanaanannnaaaaatttanacggttttggngnggggntttntaccccacc

SEQ ID NO: 26521 - DNA, 525 bp, Homo sapiens
  misc_feature (1)...(525): n = a,t,c or g
ggctgcggcttcagggtgcctctgacagctgctgcaggaaacatggccaagtttgccctgaatcagaacctgcccggtgagtgtgcaaaaagagagatgtgtgtgtgtgtgcgcatgcacagagaaacgcttgatgcccttgtgtgtggacgcagcctacagccctagagtgcagtcctctccaatgtcatgagcctgctttaaaccacctatggcatcaatcnnnnnnnnnnnnnnnnnnnnnnnnnnnnnnnnnnnnnnnnnnnnnnnnnnnnnnnnnnnnnnnnnnnnnnnnnnnnnnnnnnnnnnnnnnnnnnnnnnnnnnnnnnnnnnnnnnnnnnnnnnnnnnnnnnnnnnnnnnnnnnnnnnnngctcggtgtggtgaccatgcctgtaatcccggcactttgggaaggccaagcgggcaaatcacaangncaaggaggtcnagaacatcctggntaacacgtgaaatcccaccccnctaaaaatncaanaaanttacccgggatggggngncccgta

SEQ ID NO: 26522 - DNA, 528 bp, Homo sapiens
  misc_feature (1)...(528): n = a,t,c or g
ggtgtaaggcagggcatagaaatgaatagggcatgggttctttctgctgaattagatggtaccccctcaccccccattttactgttgaagagagggaagcttggtggtgaggtggcttgccccagaccatacaggtaaaaagtagtccagagtagattcaggcataacttgtttgaaccaaattgtgttctttagactgcaacatgctttctgttccttagcatgtaactattacccatgtatttttatttatttttcttttatgtgaatttaaaatgtcatatttgttctgcttctattactgcagtcttgaatgatgattcatcantgcagtggcctattttagtgaaccacaatagcttgggtanaaagaanaaagatccaacatacacangaatgggaaaacaccatccttttaaaactaaaattgcaaacatctggcaattacccaatcnaactcccctcaaaaaagaagnaacaatccttcaantgggggnccgnccctgtgnttaatcaaggnannaagca

SEQ ID NO: 26523 - DNA, 514 bp, Homo sapiens
  misc_feature (1)...(514): n = a,t,c or g
gagagaagctttaaaggtaattcagcctatattgcaaaacttctagagaatgggttgatttgcccctgcagatctccatgtaacatccccattctacctctgaaaaagccacacacaagtgaatattattttttgcaagattttagagctatcaataaaatagttcaagatattcatctgactgtgccaaatccatatcctttattgactgccatacctggtagttatggatgtttttcagtattggacttaaaggatgttttcttttggattccaattgaggaaaaagtccacatgttgtttacctttgaaaggcaaaacccagaaaggaagatgattttccaatattgttgaatagtantgcctcaaggatttaaaaacttacccactgtcctgctgaatattgcaaaagacttagaaacttacaattagtgaaggngtactacgcatattatagattaagtaatngcaattggacatcttggcaanaaaatggaanccgtcccacaaaaaa

SEQ ID NO: 26524 - DNA, 236 bp, Homo sapiens
gggaagagcaaaaaggtcaaaaagtatcaggaataccctgctttgctttaaatctctatttgccttagagcagtcatctgtagtgtggtgaccacaggctttctaatgtctatgggtttaaccccctagagagcaattcctttggggtgaggagactggaggggatattcttcccttccaggggtcttctcattgccttctttttaattttttaaatttaaatttttttttttttt

SEQ ID NO: 26525 - DNA, 527 bp, Homo sapiens
  misc_feature (1)...(527): n = a,t,c or g
ggcagcaacctctgggttcagcttttgccaagcttcaggttttgggtctagtaatactggttctgtgtttggtcaagcagccagtactggtggaatagtctttggccagcaatcatcctcttccagtggtagcgtgtttgggtctggaaacactggaagagggggaggtttcttcagtggccttggaggaaaacccagtcaggatgcagccaacaaaaacccattcagctcggccagtgggggctttggatccacagctacctcaaatacctctaacctatttggaaacagtggggccaagacatttggtggatttgccanctcgtcgtttggagagcanaaaccactggcactttcagctctggaagaggaattgtggaaccccaaggctttgggtttcccccccaaacaaacaagtggcttcggtgctgctccaatgttgggagcccnctactttggggganccccggggtttggagggtgcaacattcggtcancccanncnttnaanccctctgggncnaggg

SEQ ID NO: 26526 - DNA, 528 bp, Homo sapiens
  misc_feature (1)...(528): n = a,t,c or g
gcaaaaaggctgtcatactggccctttgccctcgctggcggagggcagccaccccacgcaatgtggtaagggaccaactgagctgttaacatgcacacagacagacggcagagctaaaagaccactgtaacactttctctggggttttggggtcgtgggcaccctcacctgggtgctgctgtgggacctgcatggagctttctctcgctggctcctggagcannccggccaggtcctgcactctcttgctaacatgctccctcctgcagggggttgagcgctgtggcgtgagtaaactgtcncccttgttgcaagtccaatgangggaccatgantaatccngcntcactgatatgaaatgtaccaaattnantgacatcatcttanttcttctgatttngttttnaatttgttnanactccctttcataggtagtangtntcnggtntnantannnagnntnngncnaatttnaanttgancctaagnaanaacnnntgntntcnaggcganntnanttggtattga

SEQ ID NO: 26527 - DNA, 529 bp, Homo sapiens
  misc_feature (1)...(529): n = a,t,c or g
ggtgcgccttcgagctgggcaggtagggaggagctgtgtactcgacatcatccttaggatctgttgtcctcccgcttcccctgccccggcccccagatgaatccagaggctgttttagagccagacggacactcctggtatgcaccagacactcatagtgcagtgctcgctgagtagaggaggagttagtgggtgaacccggcccgccaggctgccctgcacagaatttcagccttgtcaccccactggtttttaaatcatcacaatcctcgggatgttctgtgcatgccacacacagactcttaagagtccagaggtcctgtttttgcacagttactccaatgaatannnnnnnnnnnnnnnnnnnnnnnnnnnnnnnnnnnnnnnnnnnnnnnnnnnnnnnnnnnnnnnngtggattgcctgaagtcaggagctgaagaccancctggcaacatggtgaagctcntctcnaacggaaattcaaaaaattacctggcttgntgtgggcncgttattttancattgcgg

SEQ ID NO: 26528 - DNA, 607 bp, Homo sapiens
  misc_feature (1)...(607): n = a,t,c or g
ttttataggncccttacnaattnaaatacgactcagnncnacggaatttggncctcgaggccaanaattcngcacganaaggacaaaggcaagaanttaattcctgaagtcgagaagaatgtcttccaagnaagccanctctccatttgcctgtgcagctgatggagangangcattgacccaggatttaacctcaagggaaaaggaagagggcagtgatcaacatgtggcctcccatctgcctctgcancccatangtgcacancaancctcactctgaggagctaccaacanttgtcantaccattcaacaagatgctgantgggacatcgttctgtcatctcacnannnaatggaatcannnaatannaagttangttccctatattccttccganatacctctacctcaccacatntacctgangatcggagtcnngacngtgagataatgaccagtgttacttttggaccccanancggnccaaagggagtcttgcgatgtnggggncncactnacacaacagnanctttaggnatcactcngncngacaanaggntcnccngcctggaanaantattcaaacaatgggnggannatggcag

SEQ ID NO: 26529 - DNA, 515 bp, Homo sapiens
  misc_feature (1)...(515): n = a,t,c or g
gctgctttctgacactacatagactaaaccttcttccacataactgtaaaagtattggaaaacatctcccatgcctcctgcttgaattccacattcccatgtaaaaagaaagtgacatttgagagcaattagatttcattattccattgagcatttatttatggggtgcctantgngtgcggggggttatncagtgtgctagcantcgcagagaaantgaatagcaccagattcgcatgtacaaagtatgtactctgcactaagctattccactgctacccaaaatgtgcaattatcatttaagatacaaactaatgaatagaattattgcctgcacttatttaaatcanggtttaaataagcagtgtcttgcngggtgcaactgtatacatgcctaatacccacaggatncaanctgtgggcangaactgctaatnnnancttgattccgacaaactagcanaggtcttggcaaatantgngcttnannttttgaangcttggnnaatccggtt

SEQ ID NO: 26530 - DNA, 522 bp, Homo sapiens
  misc_feature (1)...(522): n = a,t,c or g
gaaagtgctgagattataggcagttcattctttanaatttctgagaaaattactttttaagctcatctttttttttttaaccacaacaccataaagaancncattacantgnnttaggattgccnagggattatncntgtgggccccaantctgaatgccggggtanaanccacagcngccacttccgggntgtggnccncnaccactttacccantctantcanctcanctnaaanggnnatanaattagatttcaccccantgaannccctcccngncnaccgatccatactngcanccctgntgtacncatganancatttcaganaattttcggtcantactaggaaaacacangtcttgtcnnnaatggttgggcannagnccatttanaggntaattcttaacagttaggcctgaaatgcaggntaagacctggcaaatttcncntcngtaaaggtangggncnaaanatnccaaaannttganccantcaanngtttaanncnttnntccaacag

SEQ ID NO: 26531 - DNA, 519 bp, Homo sapiens
  misc_feature (1)...(519): n = a,t,c or g
ggagtaattatggggcccttctgtgctgaggcagagggtgaggggtaaggtgttgattctcagcgttagtgtagggagtcaggtctctctcctctaccctccttcttcctctttctcctcactttttctccttccatccaaattggtcagacctatattggtctgtcctgggatcccatgacactgactctgagcttgcaaattgttctctacttttttctgccagcatattgggtaattaatgccccttctttccacctttcttcctctcttcctttcctcctttctttctttcttcctnnnnnnnnnnnnnnnnnnnnnnnnnnnnnnnnnnnnnnnnnnnnnnnnnnnnnntttctntctttganaganttttgctcctgttgcccaanctggagtgcaatnntgntatcnaaactcagtgnaanctctgncccctgggttaaggnantttttgcctnaaacccccgantntntgcaatanngggatgnnaacnaccccnnctnttttntttttat

SEQ ID NO: 26532 - DNA, 560 bp, Homo sapiens
  misc_feature (1)...(560): n = a,t,c or g
gggcatcttggttttagagcccagcggtggaggtgaaagccttggagactttttttgtttttgttttgagacagggtggcnnnnnnnnnnnnnnnnnnnnnnnnnnnnnnnnnnnnnnnnnnnnnnnnnnnnnnnnnnnnnnnnnnnnnnnnnnnnnnnnnnntggtcccccagacccctnnnnnnnnnnnnnnnnnnnnnnnnnnnnnnnnnnnnnnnnnnnnnnnnnnnnnnnnnnnnnnnnnnnnnnnnnnnnnnnnnnnnnnnnnnnnnnnnnnnnnnnnnnnnnnnnnnnnnnnnnnnnnnnnnnnnnnnnnnnnnnnnnnnnnnnnnnnnnnnnnnnnnnnnnnnnnnnnnnnnnnnnnnngaatcctaantcggngtgcaatanctgtgtgaccttgccaactgcaaatgcttttaagtcccantttcctcacaagtctgaaatgataataanactcctccccgngttgtgtaattantaattttaattttgnacggngttccctctgttgccaagctggnntgnatggggtntcncantcacaaaaccttgt

SEQ ID NO: 26533 - DNA, 555 bp, Homo sapiens
  misc_feature (1)...(555): n = a,t,c or g
ggtctgtcaaagatgaccaattttcaaagcagttagaatatactataaaatgttttaagaattcagaaatctcttaaatctttgaataccttaggttatcattgtgattagctttgttatactgttggagtctgagagtttcgattaatagaaatttatggttaacattgattttgcatctcttcagcatttgttgccatattcactttctcacatctcactttgcttgtatgtattttttcttctctaaaatttttatttgccanagttttgtctattagctttgaatacaaatataattttatattgtttatgggaaaattaaatgcagatggcttgaaaacttctgtatgttgtctctgaaaatggngaggatgagaacccactctgttatatctggagttcaggacaaagcacagatctggtcacaggggatcttgcntcctctgtgtggaaccaccaagcacaaggactggtaatggttccacagaaggnanaaagttgcaaagnggaaagccggcttaangggctaanccgttattgcaccataaggtg

SEQ ID NO: 26534 - DNA, 560 bp, Homo sapiens
  misc_feature (1)...(560): n = a,t,c or g
gctgcccggagagcttggctgaggttggaacgtgggagtttaagagagcaaactcccacagcttggtgcagagagaaaagtgtagaaaggtcgggtgtcatacagcagagggctgtgatgctctactgaggagtggaagtgtttttctgagggcatcaaacacgccgtcaagcagggaggcaacaaatctgagttgttccacagatactttgagtgcagtacaagttggtaatgggtaacaggctaaaccatgtggcaccccttccctcttatcagcttcttgctaccatgcagaaaagtgctgaaggtggcctgccctaaggcagtagcactagagcagggatggggaggacttggtggccagatgcatgtggacatgatggaaagggaagagaagaactgtcaagattttcactatcagtggtataagccccgtagtaatatcctagtgttccattattggacactaagtatgtgggaattattatatcctaccgctcaaancatcaccaaggnctgatcctgaaaatcanaaatgcacctgagcataatgggtttaa

SEQ ID NO: 26535 - DNA, 634 bp, Homo sapiens
  misc_feature (1)...(634): n = a,t,c or g
ttatgacnncnttactttttaagnccactcactatanaaaaatttggccntcccaggccaatgaattcngcacgagagaatncccatgccaaggcctcccgcacctcgtccaaanacaaggaggatgtgtatgacaacctgcacactangaacaagagggagganaaagtgaagaagcagcggtcagnatncaaggataagagcaagggttccctcaagaggaantgancggtgctgtcctcaggtggccatgcctcanccctgaccctgtggaagcatttcgcgatggacagactcacaacctgaacctacgantgccccattcttttgnnatttaaatggctgcatcncccccacctctccctgaccctgtatatagcccanccatgcnccatgcanggccaacccttctcctcttgtaaataaagccctgggatcactgtgacaaaaanaaacngcaggnanntttttgnttnangggccaantctttncccccttnaannggggnaaattttacctgnganagggctncttttngactncancnggggnnaaaanngnnatnnntgnngcanaantngcgcnntcngggaanncgtctgngccgtnnnttangnagcntcnantcntctt

SEQ ID NO: 26536 - DNA, 564 bp, Homo sapiens
  misc_feature (1)...(564): n = a,t,c or g
ggacatttttcntaagcaaaatacaaggtaacccctgtacgtaagtctanaatttcancantccccaagactgactgnncattagaancactctgantttaaaatacatatgtggttttccgangatctantaacagancctccataatgtancctagagaaangagttttcaaatgtantgataaatttggaaggnaagtcagtgaagtaagctgaatacagnnttttaggaaatatgcctaaagtcannaantgaattggntttcntgtttatttgaaaatantgtctctttttgttctttttcatgcannatcanagtttanttcnnatgtgagtagctncnnnnttaaaanttttgnntttggaanatngttgaatctcgacntaannanntancnnaccagtcatatgntcagnncccaccgantgccattttcgtttataanancagtctcananngtnaccaaanngngnccgnntgcacangntccnaggtactggantactccttgaatcntcantnanttnctannctcngtcnaagtcgtcctanaagtgtgc

SEQ ID NO: 26537 - DNA, 551 bp, Homo sapiens
  misc_feature (1)...(551): n = a,t,c or g
gttttttttgtatcgtacatgtgggtacactgccaatactacttgggtttgttgactgccttcagagggagaaaatgctaaannnnnnnnnnnnnnnnnnnnnnnnnnnnnnnnnnnnnnnnnnnnnnnnnnnnnnnnnnnnnnnnnnnnnnnnnnnnnnnnnnnnnnnnnnnnnnnnnnnnnnnnnnnnnnnnnnnnnnnnnnnnnnnnnnnnnnnnnnnnnnnnnnnnnnnnnnnnnnnnnnnnnnnnnnnnnnnnnnnnnnnnnnnnnnnnnnnnnnnnnnnnnnnnnnnnnnnnnnnnnnnnnnnnnnnnnnnnnnnnnnnnnnnnnnnnnnnnnnnnnnnnnnnnnnnnnnnnnnnnnnnnnnnnnnnnnnnnnnnnnnnnnnnnnnnnaagtaangagngaaaaaaaaaaanncnaaagggnngatttcnaccnaagggntntgaaantaagataaaatttnnttcccnancaaagggcaaaatnncagnnntcantncagggnccnnggnncncnanccaattaggttaaaacccngngggaag

SEQ ID NO: 26538 - DNA, 558 bp, Homo sapiens
  misc_feature (1)...(558): n = a,t,c or g
gaacttgctccacatcgcacagcaagctagctgagtttcaaattctttcacgaccttttgagccagttctttgaactgttttacctgtactgccacacatgttggtgacagaagtgcaaatgaaggatagtgaggaagacgtggattaagctagaaactgcaggagcagagtagaagggagaaatgtgagatttttatacttttaacaggacttgatggttgattttgttttttaaattannnnnnnnnnnnnnnnnnnnnnnnnnnnnnnnnnnnnnnnnnnnnnnnnnnttggcctttnnnnnnnnnnnnnnnnnnnnnnnnnnnnnnnnnnnnnnnnnnnnnnnnnnnnnnnnnnnnnngcaattgattgattttgtgaatagcanggccacataatgtagtaaaaagacaggttggctggggcgcagtggntcacgcctgtancccangacttgggangcaaggnggnggaacagcgnggcaggngtnaanccanncnggcannangggggnccacncnnnngnngnannnnttnntnggcaggngcnngcccg

SEQ ID NO: 26539 - DNA, 567 bp, Homo sapiens
  misc_feature (1)...(567): n = a,t,c or g
gccaatacgcacctttgtattttcaagaactcttctatttattaaggaaaatgtcacattgtgatgtattaagccagtacttcaattacgggttgacttgggatgacatattacatgctgtagttaacatttataattctttttccttgtttgagtatttctgtctctgaaataaccttttacttggcttttctagatagctttatttgatttcgagtggcaaaatgttttttattacggcttttctattgctgtatgatacagaactcttttggcataaatatttgtgttcccagtacctcacttgttcggatttgactgcctgtatatgttttgtgaaatggtcctgtttttgggtaggtgacacgtggannccaantangtaaatgttacgtgcanctgtgcccanaataatgtgtnggatggatgtgnagactcctggatgctttatccctgnncancaaggngccgtggcctcacngtccaggagggcggntcaccnntcgtagcaggcgacaaagtgncccggattngccctggtcagtgttnnangggacaannnacgat

SEQ ID NO: 26540 - DNA, 544 bp, Homo sapiens
  misc_feature (1)...(544): n = a,t,c or g
gtggtctatgttgaagtttatcagaaatgggatggtggacatggcggtgggaggaagttgaggagtggtggcaacaagtacacanttagcctgagtgatgaggtagctccaaactgtggacatatgagaataatgccgaagtctgtgcaatgtattgaggatgatttttaatttctaaagtgaatgggctgtcnggaatcaggtaggtctagtatgagcaagttttatctgtgaagtaggatgtagtttgataaagaggtaggttttaagcantgcctattaagttgtangtaaatttacatacaatttaacagacattgctaaaaacccctcctttataaataccacagtgatcccaggctccccaaccataccgttttgaanaaggaaaaacatgcttttcattgcctttgggtagaggtganntnnaagtactgctctaacanangncnccntggcgaccctggancaggtattnacgcacnncnnncatcaagtaaactcncctcctgnnntcgtnnnngcccnnnggccngtaagcacg

SEQ ID NO: 26541 - DNA, 232 bp, Homo sapiens
  misc_feature (1)...(232): n = a,t,c or g
gaactggggataaggacttcaacatatgagtttggggggacaccattcaactcataacactgctgatgtttnnnnnnnnnnnnnnnnnnnnnnnnnnnnnnnnnnnnnnnnnnnnnnnnnnnnnnnnnnnnnnnnnnnnnnnnnnnncagatgannnnnnnnnnnnnnnnnnnnnnnnnnnnnnnnnnnnnnnnnnnnnnnnnnnnnnnnnngtttggaaaaaaaaaaaaaa

SEQ ID NO: 26542 - DNA, 544 bp, Homo sapiens
  misc_feature (1)...(544): n = a,t,c or g
ggagagctagcaccatgagcaccctgcacaaaggtgacactcaaattcataatggtaccatatttatctatttaattcnnnnnnnnnnnnnnnnnnnnnnnnnnnnnnnnnnnnnnnnnnnnnnnnnnnnnnnnnnnnnnnnnnngtgannnnnnnnnnnnnnnnnnnnnnnnnnnnnnnnnnnnnnnnnnnnnnnnnnnnnnnnnnnnnnnnnnnnnnnnnnnnnnnnnnnnnnnnnnnnnnnnnnnnnnnnnnnnnnnnnnnnnnnnnnnnnnnnnnnnnnnnnnnnnnnnnnnnnnnnnnnnnnnnnnnnnnnnnnnnnnnnnnnnnnnnnnnnnnnnnnnnnnnnnnnnnnnnnnnnnnnnnnnnnnnnnnnnnnnnnnnnnnnnnnnnnnnnnnnnnnnnnnatacaaaattncacctgtatcctaactgcttgggggttttggaaaanaactcctgancccanggaaaaggngattcagtgagacgaancctncaattgccncnacctgggcgacanaccnnatcttcccaaaaaata

SEQ ID NO: 26543 - DNA, 548 bp, Homo sapiens
  misc_feature (1)...(548): n = a,t,c or g
gccgacccccttttagccagtccagggggatataatgagcctttacctgggaaatgtgaggacacctgtcactcactgtctttacatttgggggnntcagctgaaactgcaaggcttcagaaaacccctgagattctctaagtctcctattctaagattattccaagtcttggagcatttctaccctcagcctggtggtggtggcctaccatccttcagggaaactttctggaggggatttttggatttctaggtcaactggagtcaacagggaaatangaccagtgacccagagcttacaaactanagtgtgtacctaaagacataattaggaaggtaaggctgtttttacagaagcacatgaaccctatcgatcaaatagctcatggctagnttttgatccacagacnacttctggattgctctggcattggtcccctctactggggacaggctgatacnctnatggacaaaagnagtcttgggggtgggcanaaggcctnggaaaagganggcantctggccgantcctcccttctanctggagg

SEQ ID NO: 26544 - DNA, 551 bp, Homo sapiens
  misc_feature (1)...(551): n = a,t,c or g
gataccctgggaggccaagggcccttgaatcttctgccgcaggtttaacacaaatgcatttttatttgaattaaagtaggtcttcctacgagcagttcaaagtagaaagaggggataaggatggaaagtgccctttatggaacacgtgctatgtgctgggtccttccctcaggcctatttaaatccttataatcctagaagaaggtactgagtcttcttggaatccttcctctcctcctacacacatcatcctgaacatggtcactgagcagccagcatctgcccaccttggccctggctacattcattgctggagtgggagtatatttaactgtttccaaaagcagggaggtaattacttgctgtatccaatgagctggaatcacccgtgctctgcttgtttctaatacgcccatcaaccaaagctaaacacacaggagaccaccattagaaaacgcangntcnttttgcatgactgcctatttgacaaactcacaaaggncttaatccaaantagaccatctaagaatgcaaaagttaaaatggnaggg

SEQ ID NO: 26545 - DNA, 549 bp, Homo sapiens
  misc_feature (1)...(549): n = a,t,c or g
gctaaaagaaatatatttaattttttgtcttcaataagttatgataaattgttgggctatgaatttttctcagtttgctgcctagtataaaaatttagtggataaannnnnnnnnnnnnnnnnnnnnnnnnnnnnnnnnnnnnnnnnnnnnnnnnnnnnnnnnnnnnnnnnnnnnnnnnnnnnnnnnnnnnnnnnnnnnnnnnnnnnnnnnnnnnnnnnnnnnnnnnnnnnnnnnnnnnnnnnnnnnnnnnnnnnnnnnnnnnnnnnnnnnnnnnnnnnnnnnnnnnnnnnnnnnnnnnnnnnnnnnnnnnnnnnnnnnnnnnnnnnnnnnnnnnnnnnnnnnnnnnnnnnnnnnnnnnnnnnnnnnnnnnnnnnnnnnnnnnnnnnnnnnnnnnnnnnnnnnnnnnnnnnnnnnnnnattctttactgtagttaatgtgaacttacttgctaaattatagtaggggaggggaagaaccagnngccaatactaanaaaacaatttgggccaggtgcaatggnacacnctgtaacccacactttgggagg

SEQ ID NO: 26546 - DNA, 550 bp, Homo sapiens
  misc_feature (1)...(550): n = a,t,c or g
gtggaagattgcttagtggtatggaatttgggagctaattggataatcttcaatanacctgccacaggaccctaatacaaatatttctactgtaaaatgatacacgtgttcctaaaaaaacctcactttctgcaaaatcatcctctataaagttacagtggttatggangtggggcaaataggcttgggacaaatgattcanaacccttgcancattttaacactaactaaaacaataattggtaccaggagagagaacttggatggtctagacaagcagtttactgtggctggaggctgcctcaggggatagtaaatgcaaatatagtgtaattgcaggcttgaagctgctgagacctgagctctgagccancggggttgccgttaagttgggcacaggaggggaagtgcaagctgccacttgatgggagaactgcgcaaggctggngttgtgccncnctgaaggagggaacctgggtgctggntgaaaagaacctgcctatacacaaccaagctgaaggnnttttctttcagctgaancttaantccc

SEQ ID NO: 26547 - DNA, 454 bp, Homo sapiens
  misc_feature (1)...(454): n = a,t,c or g
gccangaagctgtggaaagaaggcaggggagtttggacaggagaaaaatgggtcccacaatttaatatatatttgttaaaatctttgcttgaaacacaaaataaactaaacatggtctactcttctcctgaaataggggcttggatcttactagccaggcctgaacagtaccagaacaaaaggagagcatttctccccgctaaccatctaccaatagcaaccatgggaaataggacagataagactggctatatttgtgctaggggaagagaagtgaaaaatatgagtcatcttgctatctttgaatatcaatgggaacagaagttctttttgggttgaccacgtcccagcaaagaatgttctggcatgcagttgggcactgaggaaatccgctatgtttggacacaccatagagcatttaaccaccctgagccttcaccaagtccacaggagg

SEQ ID NO: 26548 - DNA, 456 bp, Homo sapiens
  misc_feature (1)...(456): n = a,t,c or g
gaactgggatttgttggccaaagagaaaagtctcagggacagagaggtagtgagctggtggcagacagtcccgagaggcaggctctcctcatccagaccctctggcatctgccttggctggttaaagtgggaggctcaggtgcgaccccagcctagaaggcccactctgtgcaggctgggcaccctcgtgcctggattcagatgccttccccagagtgtccaggaagagcagactcgctgacctcatctgtacaatgggcaaagtactgtaaggactggatggggtcctgtgactagagacgcctctggctgaacctgtctcctcctgggctgaacacagcagccgcaggattcgggatgacggtcagacctggccccgcaggaggaaattganggaaatggctggggagggccggaaganccctaagcctgcagcaagagtccanggctgcaacc

SEQ ID NO: 26549 - DNA, 456 bp, Homo sapiens
  misc_feature (1)...(456): n = a,t,c or g
gaatgacttgaaaagattacaagcaacatgtcaacaattgcaaagtaattattagaaacaannnnnnnnnnnnnnnnnnnnnnnnnnnnnnnnnnnnnnnnnnnnnnnnnnnnnnnnnnnnnnnnnnnnnnnnnnnnnnnnnnnnnnnnnnnnnnnnnnnnnnnnnnntcaaaaattttaaaaaggctgggcgtnnnnnnnnnnnnnnnnnnnnnnnnnnnnnnnnnnnnnnnnnnnnnnnnnnnnnnnnnnnnnnnnnnnnnnnnnnnnnnnnnnnnnnnnnnnnnnnnnnnnnnnnnnnnnnnnnnnnnnnnnnnnnnnnnnnnnnnnnnnnnnnnnnnnnnnnnnnnnnnnnnnnnnnnnnnnnnnnnnnnnnnnnnnnnnnnnnnnnnnnnnnnnnnnnnnnnnnnnnnnnnnnnnnnnnnnnnnnnnnnnnnnnnnnnnnnnnnnnnnnnn

SEQ ID NO: 26550 - DNA, 454 bp, Homo sapiens
  misc_feature (1)...(454): n = a,t,c or g
gcttgctctctggagaatgtcaatgtaatgtatttttcccatcgtacagagtctttgttgatttgcaaaatgttggatttggggttcatacccatattttttgttgtcatgggcatttaggtcatcagtctgttctcttatttgcttgttcttttgttaattcattcccatggctatatgccagacacagcatgatgcagaaggaatacgacagaggatgacacaggccctgccctcagctcacagtttactgccagagatagacacttggaaaaagtaatnnnnnnnnnnnnnnnnnnnnnnnnnnnnnnnnnnnnnnnnnnnnnnnnnnnnnnnnnnnnnnnnnnnnnnnnnnnnnnnnnnnnnnnnnnnnnnnnnnnnnnnnnnnnnnnnnnnnnnnnnnnnnnnnnnnnnnnnnnnnnnnnnnnnnnnnnnnnnnnnnnnnnnnnnnnnn

SEQ ID NO: 26551 - DNA, 453 bp, Homo sapiens
  misc_feature (1)...(453): n = a,t,c or g
gaagaaagggctttttcatcgagtgcttgaaatgtaggtttgtgagttgatcagaggcctcaaagcttcaggtgggttgaagttgcaatagataattctttgtattctgactttgaaagcgtttattttcacttcagtgtccaaaattttcacacacagaaaagttgaaaaagtgatagatacatatgcatatatactctttctagattctatgacgttttgctgtatttgttatatttgcctacaaaaatgattatttatttatgtgnnnnnnnnnnnnnnnnnnnnnnnnnnnnnnnnnnnnnnnnnnnnnnnnnnnnnnnnnnnnnnnnnnnnnnnnnnnnnnnnnnnnnnnnnnnnnnnnnnnnnnnnnnnnnnnnnnnnnnnnnnnnnnnnnnnnnnnnnnnnnnnnnnnnnnnnnnnnnnnnngtttttgaaacgggcctcantttg

SEQ ID NO: 26552 - DNA, 452 bp, Homo sapiens
  misc_feature (1)...(452): n = a,t,c or g
gaaggccccatggagctggggatgcctggagccctgggattgagagtgtagtcagccactgactgctggtccagagtgggcagggcctggccttgtcccagaactaggcttcgtctgagcaaattggcttcttggctcatttggtcagaggtgtgtttcttggaagcctgttttctcttctcataggaggaggaattagaccttgcaattcagtggccaggtcaagttaatgattcatttgtgaagctcccgtgcaaggagcccaacgggggaggcctaanagagaaacgtgagggcacaggcctanacntggatacggagcctggggctctgtctctccctgctcctgtgaccttggtcangcatttggctttggaacctcaatgtctgcttcnatganataaccattnanaatttaaaangtnaanttangtnnaatnttccccaccctg

SEQ ID NO: 26553 - DNA, 539 bp, Homo sapiens
  misc_feature (1)...(539): n = a,t,c or g
gcacactgcgtgtgctgagggcgcactggtcttagcgggagggaagcctcacgagcctgtacacttggaggagccctaagcgttaggatctgctgcgagggctgcctggaacggaggtgagaggatacaagtggcccggggcaagcatagtgaatcactggctaatctggccttcgaggtagtgaaaggaaaaaagggaaatgaagctgactgtggctgaatgtagtaggtcttgaaggccaaatggggcgatctgatttttattctagaagcagaggagaaactaaagatttttttaggagactatattcaagcttgtatcattagttcatcagacgtttatggaccacccaccgtccgtgcactcacggggcttgcagtcaatctggctgaatcactttggnaccatttttaggagggcnaaaaggggaacaagntgaaaaaccaccnggccaanaaaattggaactnnntgggattggnggagggcgggnannttcccccaaaaannggncnggccccnaaanttatttacccctc

SEQ ID NO: 26554 - DNA, 526 bp, Homo sapiens
  misc_feature (1)...(526): n = a,t,c or g
ggnnnnnnnnnnnnnnnnnnnnnnnnnnnnnnnnnnnnnnnnnnnnnnnnnnnnnnnnnnnnnnnnnnnnnnnnnnnnnnnnnnnnnnnnnnnnnnnnnnnnnnnnnnnnnnnnnnnnnnnnnnnnnnnntagcacactnnnnnnnnnnnnnnnnnnnnnnnnnnnnnnnnnnnnnnnnnnnnnnnnnnnnnnnnnnnnnnnnnnnnnnnnnnnnnnnnnnnnnnnnnnnnnnnnnnnnnnnnnnnnnnnnnnnnnnnnnnnnnnnnnnnntcccgttagtttatgcagtttctttgttgcatccatggtcnnnnnnnnnnnnnnnnnnnnnnnnnnnnnnnnnnnnnnnnnnnnnnnnnnnnnnnnnnnnnnnnnnnnnnnnnnnnnnnnnnnnnnnnnnnnnntngganaaatcccgnngnatgnttgccggtaagatttattcccctccnttanaannctanatgggcgggnnngnatttgggttnnaatnnctttccnnaaannntnaantngggcccccgc

SEQ ID NO: 26555 - DNA, 531 bp, Homo sapiens
  misc_feature (1)...(531): n = a,t,c or g
ggacttagattcagtatggaacattaatgtaaagtttgtattttgtcatgataatctgtgaaagtctgcctttatagactggactgtaggaggcataatattaataaaattttttgtgaaagaataattctctaagacttttaaaagctatagtttacattttatcaaatgttcttaaatacctaagccagtgttcaaaattcagttcattctcatttaaggacactgattttaattgctcacactaacttacagaatgactgatacatatgaaaacttatatcagttggaagttgcttgttgagtttccaaaccagagcattatgtctggcatatataaggatttggtcagctgttatctagttaagaatttatnnnnnnnnnnnnnnnnnnnnnnnnnnnnnnnnnnnnnnnnnnnnnnnnnnnnnnnnaaacnctttagggccgggantntaancaaacctggcaaaatgggaagggcccaatcnnaaaaaaanttttttaaaaatnttgggcaagggggnttaaaat

SEQ ID NO: 26556 - DNA, 536 bp, Homo sapiens
  misc_feature (1)...(536): n = a,t,c or g
gagttattttattttatnnnnnnnnnnnnnnnnnnnnnnnnnnnnnnnnnnnnnnnnnnnnnnnnnnnnnnnnnnnnnnnnnnnnnnnnnnnnnnnnnnnnnnnnnnnnnnnnnnnnnnnnnnnnnnnnnnnnnnnnnnnnnnnnnnnnnnnnnnnnnnnnnnnnnnnnnnnnnnnnnnnnnnnnnnnnnnnnnnnnnnnnnnnnnnnnnnnnnnnnnnnnnnnnnnnnnnnnnnnnnnnnnnnnnnnnnnnnnnnnnnnnnnnnnnnnnnnnnnnnnnnnnnnnnnnnnnnnnnnnnnnnnnnnnnnnnnnnnggggctgtatattttaagaagaggctacctggaaggttcatgtttaaactagcagcagggacaggcagttgctccgtgctaaaatgtgtaagtaccnccaaactggctgggatgttctgangaattntgcaaaaatggggtgtnaaattagggaaaggaaggatnaaaangctccttccccgggncngattnaaaccgggacccccaaangnngttnnaaaa

SEQ ID NO: 26557 - DNA, 522 bp, Homo sapiens
  misc_feature (1)...(522): n = a,t,c or g
nnnnnnnnnnnnnnnnnnnnnnnnnnnnnnnnnnnnnnnnnnnnnnnnnnnnnnnnnnnnnnnnnnnnnnnnnnnnnnnnnnnnnnnnnnnnnnnnnnnnnnnnnnnnnnnnnnnnnnnnnnnnnnnnnnnnnnnnnnnnnnnnnnnnnnnnnnnnnnnnnnnnnnnnnnnnnnnnnnnnnnnnnnnnnnnnnnnnnnnnnnnnnnnnnnnnnnnnnnnnnnnnnnnnnnnnnnnnnnnnnnnnnnnnnnnnnnnnnnnnnnnnnnnnnnnnnnnnnnnnnnnataaatcttaaaagtaatttgctagacgtacacccagtacttttaacttccttggttcaaacttatcctacgacaatagctttaaaacatggttttaatgcatggatgcaaaaatgaggggcccattttcggnaaaaaacctcnaggtcaaatcnnggtccatgtantnttagcattccaaattngggaaanaaccnancncnaaaanggccggnattcngggnangggtanggttcag

SEQ ID NO: 26558 - DNA, 536 bp, Homo sapiens
  misc_feature (1)...(536): n = a,t,c or g
tgaactggatgagtgtttagggttcagctcagttctactgtcctgcaaaaaatgagaacaaaaagtttgccattctgaagagtgggaaaaagtcatgagttgagtgatttgttcatttttacagctaaattctgcccaggctaaatataaccccttatgcaaatcataacaaaaataaacctgcattttgagggcccaagcttagaacatcacctaatttccccagagccaaattttaagcaaggcaggtgtgaacaagcatagaaggaaaaggaagacctaccctgccctctccctccctctgcggaagagaccttgacccaggcctctttcccctgcggagaacatgggcatctgctctcctccattactgcatgttagctttcagcctgganatgcccnatttttattcaggaattanggttagggacnaatccccatngacctngnnaaccggnanttnancccggccggantttngncnggacaccggaaannnnngccccantttgccaaccnggangtcccnngaaaac

SEQ ID NO: 26559 - DNA, 531 bp, Homo sapiens
  misc_feature (1)...(531): n = a,t,c or g
gtgtgtcgccattcattcactcaagtcgcatttattaagcacctgctgagtgccaggcgctgcttcgcacagggaacaccaaaacgactgggcactgtccctcccacttaggacacaacgtaggatgggagatagatttgtaaacaaatacatgtatggatgtaattagcgctgcaatggttatatgtaccaaatgtgagagacttaaaagcgtgtgtcttggggagagtaaggaacgactttataaagaaatgtgcaaacgagatctgactgatgagtgggagtgtgcctggcaggtggaaaaaagtctaacgttctaggtggagtatattgcctgtgcataagtaccaacgtgcgaggcagcatttagggcacaggaatctgtgggacccacccgggagccctgggtaaagtgcanccgccacagagacgaaaacnaagggccctgcttactganggtttggaatgccctgacagnaattangggatntganggccgntnaacgggnntcncccaanncagggccttgc

SEQ ID NO: 26560 - DNA, 510 bp, Homo sapiens
  misc_feature (1)...(510): n = a,t,c or g
gggaggctgctgtcatcatcctaagaagtgtatattgttcctctgtttttcacacatgttttatcattaggactaaacaaaagtctggccttgggtcctattgtgattgtcagccttttttaagtttaattctatccaagttaatggtcttcaaacactgtagataggaactgggagccttgaagtcttcaatatgatttcgtagtggagtagggaaccaaaattgggtgtggtgaaggagaatcagtaaacctgtttgatcccagtgaattctgtattcttaccctgtaatgattatgagttaaagttaataactagttgttgcttgataattgaagcaaaccaagaaataaactttgcttgttctggtttatcttagagtccaggagtaacagtaacattttggacatgttatttatttaaaaaattacttgngtgtgtgtgtgtangtgtngggnngtnnnctanatttaaangaanangggntctncccncggttncccnnggggg

SEQ ID NO: 26561 - DNA, 534 bp, Homo sapiens
  misc_feature (1)...(534): n = a,t,c or g
ggatcacctttgggcttgttttctactttgccacagattatcttgtacagccttttatggaccaattagcattccatcaattttatatctagcatatttgcggttagaatcccatggatgtttcttctttgactataacaaaatctggggaggacaaaggtgattttcctgtgtccacatctaacaaagtcaagattcccggctggacttttgcagcttccttccaagtcttcctgaccaccttgcactattggactttggaaggaggtgcctatagaaaacgattttgaacatacttcatcgcagtggactgtgtccctcggtgcagaaactaccagatttgagggacgaggtcaaggggatatgataggcccggaagttgctgtgccccatcagcagcttgacgcgtggtcacaggacgatttcactgncantgcaactccccagggatnaccgnttncaanaangttaggggaattggtttaaccaaaccggganctnnnctnaacnnancgtnnnancnnnccacnattt

SEQ ID NO: 26562 - DNA, 451 bp, Homo sapiens
  misc_feature (1)...(451): n = a,t,c or g
gggcattgcatgggaaaagagctgaaattctggcagattctctaggaccacccagctgggcagcatggtctgaagtagaggctctctctgtttctgcccccacccagttcccagctaaaggattggttgttgtgccccaactttgccaaggcgaagttcaaagcatgaggaggaccacggtagagaggccgagaggttggtccctggagacctcttatctgggtcgagagcacaaatctgccacttagtgtctgatcttaacctctctgtgacatatccttggggtaaaatgagttaatcctcataaaatgtttagcacacagcaaaatgagcagaaacaatgattacaagtgcaaagtcataaaacctctaatcatgaantggggnagtgcttatgccttaaggcaaaacttgtaacccttgccgtagataatctgccagggccaaggtg

SEQ ID NO: 26563 - DNA, 135 bp, Homo sapiens
  misc_feature (1)...(135): n = a,t,c or g
gtgctcttaagaaatctgtagtgacctaattttttgttcgtttgttttgagacgacgtcnnnnnnnnnnnnnnnnnnnnnnnnnnnnnnnnnnnnnnnnnnnnnnnnnnnnnnnnnnnnnnnttttttttttttt

SEQ ID NO: 26564 - DNA, 455 bp, Homo sapiens
gagaggtgatgcattacagggagggctcagagaaagatggctaacactaatagcacatgttggcattgaggagactacgtggaaatgtgcatttagcaaaatagcttcagaacaatattttttctttctcccctattagattttgagttcctgaagcactcatcttggtgtgcctcaccaattcccaggagagggctctgtatataataggtgaaacactattgagtacataatgtggcccagctatggttctgtcttaaggtttagcagcagctttgaactgcctggtaaaaatattttttcaggcagactaaactgaactgaagagagagatacaagttagagacaagagtcggatttccagaaatttctgggagagatagatatagacagtgtagaacagccaagaaactatgggaggaatttcaaggaccagataatatatgcataatgtt

SEQ ID NO: 26565 - DNA, 448 bp, Homo sapiens
gaggaaatgttaattgaccctaaactgtgtcctagggggcagttgtcacacaggagtttctgtcttcaccaccagctgtgtccttggcttccttccctgaatctgccaaggctggattctggtgctaaatgtgaaatggtgacacaaacttctaggaactgtgagcttggacggccctcctccatagccgcagggcatctacctttgctcttcttggatgagtgaatgaacttccctctttccagagcaatgctttcttcctgtttagataggagggagagaagcaaagtgtattgggaataggttgagcgaaagagtgtagtaagagttttctgtacagctctgtccttaatgtatcagtaaacaatagggtgagaacttttgctggggagagaggaaggagggaaatttcttttcagacaactcttgggtgcattcctttggtaac

SEQ ID NO: 26566 - DNA, 488 bp, Homo sapiens
  misc_feature (1)...(488): n = a,t,c or g
ggttagttggaatagctactggatgtttctgttgattctctagcacacagtcataatgcattccatatttcaaatactataatgcctaactgtgtgccaccagtttactgatacagagactggattgtgttgcctcctgtgccattcgtctccattgttactgagtctgctgtatgcccacccttgattaatgctctggatattggggtggggggaggacaagacgtctctccaggagccttacactcaagtgggggtggaggagtccaaagataaacacacaagtaagatcattgtaaggaatgataagtgctgaagggccatatggggcaattgaatagaaaatacctggaggggctcgggggtggggtattcctagcatttgggaagtgatttgcctgtattgaaatagtgactacatttcacactttaaaatgctggaaatgtggcatctcatgtcagtttttgcatgggcttggganaaaagg

SEQ ID NO: 26567 - DNA, 502 bp, Homo sapiens
  misc_feature (1)...(502): n = a,t,c or g
gcaggcccgggatttcgacttttggctacaatagaaacaacaagaagccatatgtgtcattggctcagcagatggcaccacctagcccaagcaacagtacacctaacagcagtagtggaagcaatggaaatgaccagctgagcaaaaccaacctatacatccgaggattgcaaccaggcactactgaccaagatcttgtcaagctgtgtcagccatatggcaagattgtttccactaaggccatactggacaagaccacanacaaatgtaaaggctatggctttgtacattttgacagcccttcagcagcacagaaagctgtaacagcactgaatgccaacggtgtacangcacanatggcaaagcancangaacaggancccacanatttatacatctcaannctcccactgtcaatgggatnaacaggaactgganggggatgcnnaatccctttggccnngttttctccanccgtntcctccgagatacagngggacca

SEQ ID NO: 26568 - DNA, 514 bp, Homo sapiens
  misc_feature (1)...(514): n = a,t,c or g
gactggagaagaattgaaggaatagaggccagctactgaacgcctcatctatgtacgttantgntctcacaaagaatcacgacaaaagttggacaaagcgagcccagagacaaactttataaagaatgaggagtgtgaccaaaggatccataggtgtctacaggaaggatgggtaacaggcaatatgatataatgggaatcacattttatagatttccagaagagaaaggtaaaataaacaagcatcggccgggcnttgnnggccatnccnnnnnnnnnnnnnnnnnnnnnnnnnnnnnnnnnnnnnnnnnnnnnnnnnnnnnnnnnnnnnnnnnnnnnnnnnnnnnnnnnnnnnnnnnnnnnnnnnnnnnnnnnnnnnnnnnnnnnnnnnnnnnnnnnnnnnnnnnnnnnnnnnnnnnnnnnnnnnnnnnnnnnnnnggaaatggttttaaccnagnagnggnacctncaatttaccnnnatcnagncatgggatccaacccngggnanaaat

SEQ ID NO: 26569 - DNA, 505 bp, Homo sapiens
  misc_feature (1)...(505): n = a,t,c or g
ggtaagaagttaaacgcagagcctgttaaagaaaaatgaaaatctctgggcagttctcactataatatactgccagagtaatcccactacaaaatacagtcacgtgttgcttaaggatgtggacgggttctgagaaatgtgtcatcaggtggacttgccattgtgcaaacatcgcagannnnnnnnnnnnnnnnnnnnnnnnnnnnnnnnnnnnnnnnnnnnnnnnnnnnnnnnnnnnnnnnnnnncggnnnnnnnnnnnnnnnnnnnnnnnnnnnnnnnnnnnnnnnnnnnnnnnnnnnnnnnnnnnnnnnnnnnnnnnnnnnnnnnnnnnnnnnnnnnnnnnnnnnnnnnnnnnnnnnnnnnnnnnnnnnnnnnnnnnnnnnnnnnnnnnnnnnnnnaggtgcatcgttgacgggaacgtcattatgcaacacatgantgtaccnantttaccaataaggattnanggaangaaaaaatcngggatcccgnggggncctaatt

SEQ ID NO: 26570 - DNA, 516 bp, Homo sapiens
  misc_feature (1)...(516): n = a,t,c or g
ggaanttgcagggttgagttggtcccggcaagtccttgagcagtttgttcctctgtcttcccgcttcctggtgccccgactgcgtccccacgaacgccccgtccttaccgccggctgctgtggagtgcctcgctgtctcccaagtccccgagttcctggnttcagagaagatgaccgaanaantggatttcctgggaaaaggnccctaangggggtagtgaggaagtggtcctaactcctgcananctcattgaaagattggnncaggcctggatgaatgaaaagtttgcccctgagctgctggagagcaagcctgagattgtagaatgtgtcatggaacagctggagcacatggaagaaaatctcaagaganccaananggaagacctgaaggtcaacatccaccaaatggngatggtaaggtccnnnacgtcccancaantannttnngggtccccccannaaanaaaaaaanttttcccccaattcctttaaaagganaaaacntcccngggg

SEQ ID NO: 26571 - DNA, 531 bp, Homo sapiens
  misc_feature (1)...(531): n = a,t,c or g
ggaaatcctctgttaatgtggactggagcatggtagatgcttgattgttttggtctcaaaatggtgtgctataaagataaaggtgaggggaagacaaagcacaccatatgtccactgttctgttctcatagaggaaattcaaatcccttttatctattagataatcaagggcactgtgatacagttttgagtaaaaagacattttttaaaagccttccagttttgtggattaaacctttttataaagatcatttataatactgttttaaaatgtgaggcaataagaattactttgtgttggatctgaggaggctttggtaaaacagtttcatctaaatgaaagtggtaatcctcttctaaaatagcaataactgaaaatgaaagtgttaattttaccttgtttgagttatcagggaacttagtaagtantatcaaagcattttanaaatggaacaaagaagatcaacattgaccatcatttatttgtataatgagggaaaatggtaataactgantctcagngactttcaa

SEQ ID NO: 26572 - DNA, 631 bp, Homo sapiens
  misc_feature (1)...(631): n = a,t,c or g
tttgangnggnnntttatcgccccaaaactangctanaaaccnagctcggccccaggagaatttggcantcgaggccaataattcggcaccaggaaanccnctgaaattactcacagttcaacatnacnggcatgnctcacttngnnttcaaaaangggacacaaggggaaatcacangtcnnnggatcaaatagncngcacantaggatcaacatgttncnggaccacatgaantggggaatcccctcncttttccatatacatctcatnanagctaacgagcaanagntnngcatggnggaacaantntcatnatccatncactttnnnncgggncccnctnatnatacgttcngattanngnnnntataattcatgtntggcgnttgggatntngatagtgtnngncctatcnacnntttggagtttatncnntcatcnaaangntngtncaacacctcnncngttatagcccnncntgggngngcacnccttantntnccngtttgncgntncaaggancttggagcnntttgagnncgggatttaacgagtngttcnancanaaagtanatcnnccccncgnncancttnnnannnnnccgncnngngnaannnctgcnnnncacg

SEQ ID NO: 26573 - DNA, 534 bp, Homo sapiens
  misc_feature (1)...(534): n = a,t,c or g
gcttgaccgcaaataaatgaacctcttacccaaggttgagatggagaatgaggagggataaagagctggcaaaatattgtgtagaaacaggaattgatgagatcagaatagattttgatctttcacagagagtaaaacatttcatcctctgtttctaaggtggtgtccttagggttgtgatgcagaattcagaagagtgtttgatggaccatgtttgtgttgggcttgatttcatatttagtgagataaatggctacataaaaacattgacttaaaactgacgtgagcagatggtagagaatattctattatttcaaattttaaaatagtgaaacagattaataaggtctaggttttcttccctgagaattttaacaaacaagtatcagtgacaaacagaatgttagtgtagtgaaagaggatacgactgtcctatctaagaaacagaggatgtctcaactgtttggcttatatcaatgaaaactgagatcangtgatgataataanttganagtttttgntananancnaaca

SEQ ID NO: 26574 - DNA, 534 bp, Homo sapiens
  misc_feature (1)...(534): n = a,t,c or g
gggctctgggttactggccatgcaggcagatcttcccttccaaaaggaaacgttattattctcttgtattcgtttcttcaaaaacatgcagatttaacaaaacatattacttagcactcttactgatttagaaatatgatgacccttaggaaatgcatctccttaaaagaaattccaggcaaactcatttaacctttctggatgttagtttcctgaccttcaaaaaatgggatattggaccaaattatcttgaagtttccttccagctgtgtgctcggtggggagtgctggcagtgtggggcaggacactgaatatctgtggtggtgatgtttggatacagggggtgagcaacccctttggaagcaacatgcaaaattgctgagcagtggtgggggtgcatgggaatggtggcggtgcccctgtattggagtgtaagagacaatgtggtgagagcagtctggcaaggctactantgtanganttacanagtcccttcaccaantactnnannacctnaaaantccggggcatat

SEQ ID NO: 26575 - DNA, 542 bp, Homo sapiens
  misc_feature (1)...(542): n = a,t,c or g
ggacacattcattcattcaacaaatatgtattcagtatctactgtagaagaagctctgagattctgcggtaaatagacatgcaaagcccctggcctcatggaattcctattctggaaaggagagacaaacaaataagcaagggaatcttagtgtgtgtggagttctctgaagtaaacagtgtgatggtgtagagagcacctgtgtgagtctgagatgaggggatgtgatgttgtggacttcagccaggtttttggcagctagtgtctgtccctttttcagtagctccagtcttcttatgaagaatgagttctttctgtggtgtgtgactttagtgggagggcagctcttgctctatgcctctcagttgccttccactgtaaccagtcctgtaactggtctgggcacactcggagggggatccatggtactccttgccatgaagatgtgggtaaaggnggttcngtggggcctccgngnggtcaacatttcnaaaatgtcccggggggttataaaggattgnanggtttggngggtcccacca

SEQ ID NO: 26576 - DNA, 529 bp, Homo sapiens
  misc_feature (1)...(529): n = a,t,c or g
gctacaaatgtgttggggccgttaggagtggttaccgtgagagagcccattcccccgacacctactccggcttgcgttctggaaggtatgtgactcacaaagccctaactcgggccggagggctcagtgggcagagttgatctgcagttctgcagatgaggcagagacacttttcttccagtggcccttatttggagaagcctggcagaagggcgtgagcctagccaagcagctatctattggtggttctctgtcatcctgcctggtgcaggggtgcgggtgagggtggagagtgtggagaacctgtctagccaacgaacagccctgcctctcactanagagttgcttggaggaacccaacagctttggggcacgttctgancctgaaaatccaactgtcaaatctgtctcancancagcttacatgaaaattgtaatttggggtnactggnatttggcantgccacaaanagtcaatgggtctganantgcatcacanancannggtcaaggcaangagggnangctt

SEQ ID NO: 26577 - DNA, 643 bp, Homo sapiens
  misc_feature (1)...(643): n = a,t,c or g
ggtgcggggtcttgnggctgttcctatgctccntgggtgtctntaaancncgggcccnnggaatttggcaaacgantgccattcaattcngcacgangaggtgggaaaatcgcttacctnnnnnnnnnnnnnnnnnnnnnnnnnnnnnnnnnnnnnnnnnnnnnnncatattgtattaacatannannttagctgggtgtttgtagnatggcnattagcnggttgttggtgccagctactcnggaggctgannctgnngtgggaagatnnnnnnnnnnnnnnnnnnnnnnnnnnnnnnnnnnnnnnnnnnnnnnnnnnnnnnnnnnnnnnnnnnnnnnnnnnnngncctcgtctctanccnnacagnatnagaggctgggcatggtngctcacaccggnantctcancactttgggagggtgngatgggcacatcatgtngtctggngttcgnncnccancctggtcaacntggngnncccncncctctntnnnttttccntttttgctggtntgggcgtttcnctgttntccnngctnctcnangnccncgncagcncgatnncttgttgcngnnngcngggttnntntccttancgtcngncnttngnccccngntgnggngatnngnnntccnnttcctt

SEQ ID NO: 26578 - DNA, 543 bp, Homo sapiens
  misc_feature (1)...(543): n = a,t,c or g
gtagcttaacatgccttattaaaaccaaagcccagtaggtagtttgattagtgctgtttagagtttttataagcaaagtgctcagatgactttccttattagaacttgtcagagcagtttctttgcagttttcatggatctcccttagcaacttactaaagaggcattttgtttaagctgtttcataaatagcaggaaattccaaaggcctggattgtattgcatttttgctttcaataatgactactactgtgggggaaaaagccgttaaaatactcnattcattttaacaatttgtagcaaagtacttttattttaaaatggatgaattttttaaaaaagtacagattcaagtttcattcaaggttttcactgttttcantaaaattttttgtagnttanattttagatgtgttagacaacaantagtgatataatancnagtaactatgagttattcaaaanttactgtaagtaatgggtaagatttgntcatanncaaagctannccgtgtgcatttgccgaatgattgtnccaaccca

SEQ ID NO: 26579 - DNA, 527 bp, Homo sapiens
  misc_feature (1)...(527): n = a,t,c or g
gcaaagtcaggttgccatttcaggcgaactgcctgggaaggaggaatggtgcagagtcggcaatggtgtgacttcattctacaggaggttggttagcagtggacagttctagcttgtcttagatcaaaacttaaagctgcttgggctcaagctggcatctgcctgtgtcaagaactagggccccctaaaaacactcaactagttctttccttccttcactcctggggtgagtagcttagtcaaagctgcctagccggtttgctaggcaagggcctctgggtggagacacctgaggaagctttgagacaggtagattacaggtctcccatcctcagcctaagggcgaggggaatgganggggcagcggcaactgttttggcctgtgtctccctgancgttcaagctcatacatggtaatgantantgangcactgtggggngnantatcanccggnactncgccnatcngcngagtnaanagggccnnnctaacngggctcaanctgnccnatggaagggccgntcct

SEQ ID NO: 26580 - DNA, 537 bp, Homo sapiens
  misc_feature (1)...(537): n = a,t,c or g
gcagttactgtactgcacaactgactttgtgacctttagggtttctattttgcaatcaataatggcctatttgtagattcatattcactctttattttgattccagaatagtagaactttcttcaacttgctttgaggttgtcagtggtgaaattaaaattgctaggagattcactttgatctgttgggatagaggatctttgttttccattcagcattgtctgtagtcttcatttctctttcttagctgccctccttctgtgagagtaattatgtatttactatatttttggcaaggccagtttcatccacaggtacctgggtgttgtcctttacatgcnatttttgccaagcttcccccttgtancatatgcaatgtagttaaatccacccctgnctcaaagccatngnaacaacagctgcntcagtcatcaaatatcaagnagttaaangcnttcccganaatctgcnggcataaangggnaaagggcaggtncaaccanattccaaannagncacttanaaaantgaatgtgt

SEQ ID NO: 26581 - DNA, 545 bp, Homo sapiens
  misc_feature (1)...(545): n = a,t,c or g
ggtggacataaattgagtttgaggtgcatgtgagataaacaactggagaaacacagggctggggcataacagaggcctgaggtagagaaacaagtttgggactcaacaggatatanatagtattgaagacatggtcaaagatgaggccaacctagggcaagagtagagtgagaaaagaccaagcacgaagtcttgaggaattctgtcacttaaagacaaggtaaaggaggatgagtcttcaaaggaaactaagacaaggccagaaaggttgaaggaaaagcagacggatggtggccntggtgttgagaagaagtcaaccaccagtaagaaagtttcatgctcatggatttagtgacaggaaggtcatgggtcaccctcataagagctgttttcataaattaatgcaaggaagccagactgaaaaggattgagaaatactgggaantgagntatccttcaagaaatacaatgtngctggggcacantggcttatgtcgtatcctggcacttggggggntaagccnttggtcactgagncaggactt

SEQ ID NO: 26582 - DNA, 550 bp, Homo sapiens
  misc_feature (1)...(550): n = a,t,c or g
gaattaaagtctttttaaggaaaataaccttgccatctgtctgaaatagagagaaatgggttaggaagctattacactagttgaggcaagaagtaaaaggtttgtgaaccagaagggtggctatagaaatagaaggaaaacaaggaatggttagacggaaatattttaagagatttcgtagattaaaactgacagattttctgacatattagaatggattgtggtggcaatgggaaagatgagtcaagaggtgactccaggattgtagcattagctgagggtgggagagtgagtccagttaaatatatacgccagtgagagatggggacagatgtttacactangaccctgaagtttttcctgganggtccaanaagaacctgaatcacttnatgggtacctcaacaccaaaaaantgctgggacaaacatcacnattacacgttantgatgcanttaaaaattaacttnaaccgntgggcncaatggncaaacccgttatcncancactttggaagcccaggcggggtgnnaanggggnnggnnaccaa

SEQ ID NO: 26583 - DNA, 544 bp, Homo sapiens
  misc_feature (1)...(544): n = a,t,c or g
gaactgaaaagggaggagagtgtcaaaaagaaggatggcgaggaaaaaggcaaacaggaagcacaagacaagctgggtcggcttttccatcaacaccaagaaccagctaagccagctgtccaggcaccctggtccactgcagaaaaaggtccacttaccatttctgcacaggaaaatgtaaaagtggtgtattaccgggcactgtacccctttgaatccagaagccatgatgaaatcactatccagccaggagacatagtcatggtggatgaaagccaaactggagaacccggctggcttggaggagaattaaaaggaaagacagggtggttccctgcaaactatgcagagaaaatcccagaaaatgaggtcccgctccagtgaaaccagtgactgattcaacatctgccctgccccaaactggccttgcgtgagaccccgccccttggnattacctctcanagcctccacnaccctaatactgggccgacttanctcacttggccacagcacnaatganaaccanaacggtactgggatcttg

SEQ ID NO: 26584 - DNA, 533 bp, Homo sapiens
  misc_feature (1)...(533): n = a,t,c or g
ggagcgtttcacgtcacgccgggcgccaggcgtcggcttgtataacctgaaaacgctcctgtttttctcatctgtgcagtgggttttgattcccaccatggccatcacccagtttcggttatttaaattttgtacctgcctagcaacagtattctcattcctaaagagattaatatgcagatctggcagaggacggaaattaagtggagaccaaataactttgccaactacagttgattattcatcagttcctaagcagacagatgttgaagagtggacttcctgggatgaagatgcacccaccagtgtaaagatcgaanganggaatgggaatgtggcaacacancaaaattcnttggaacaactggaacntgactattttaaggncatgacacanctattaggaaaccagaaaattggtattagangagagaaccatgaatttggatcccanatgggacacangttctcnantagataacagctcacangatctcctntatcatcatctctgattagggnctaantactgg

SEQ ID NO: 26585 - DNA, 540 bp, Homo sapiens
  misc_feature (1)...(540): n = a,t,c or g
gcacaaacataacctcttgcttctttaactgtgattactttccttggactaggctaaaatgggctgatattgatattctctgagcacacaactactcattgcagttctaacttcagctgggcagcagggagaaaattaacttatgatttgagaatttgctgtgcagttgactaaccctcccctagagaaagcgccagggtgtgtagatggtatcagccaggctgatcaaggtgaggagaagattcaaggggtcaggataagtcagaaagagaagggaccagggaagagatgagtgaagagatccaggacttcagtgttaaacaatgaccatgggagaatgtttgagtatcaagatagagatgctgaatctgacattagacctgggcctgaaaagatcagtaggatattatgtcccaattaatgtagagacagaataggaactgggaacatatgtgaatgaaacaagaaggccaagcttctccgtgaatggagatnggtaactcaaacatctttatgagggctgccatgtgatatggaatg

SEQ ID NO: 26586 - DNA, 526 bp, Homo sapiens
  misc_feature (1)...(526): n = a,t,c or g
ggtctccactgactgggactctagtggagctgtcaatgacatcaaactgttggctgtcagtgggaagaacatctccctgggtcctcanaatgtcttctgtgatgtcccactgaccatcagactctgggacgtgggcgaggaggtgtatggcatccaaatctacacgctggatgagcacctggagatcgatgctgccatgttgacctccactgcagacaccccactctgtctacagtgtaagcccctgaagtataaggtggtccgggaccctcctctccagatggatgtggcctccatcctacatctcaataggaaattcgtagacatgtaagtgcattctctgaataagggagtttattaagtgggtgggttgtggaggaacgtnaagtgggtcaganaagcctggacatggggaanggtcatcacagtcaanactcactctatgggttgtacccatcantgggtgtaaattggcctacatggaaagtnntacatggaanacatanggaaggnccatnnnctggtg

SEQ ID NO: 26587 - DNA, 538 bp, Homo sapiens
  misc_feature (1)...(538): n = a,t,c or g
gagaagctagcaccatgagcttcaataccctgctcaaaaagtcaaattttcagaccgtttaaattagtaatggagcaaaaacaaagcacatgtagaggacagaggaaacaagctgcccttaaagcataaacatctgaagctgtttaactacactgctgccattaggatcttcttttcccctttactttctcatggtcctagcttcatagatgaagctgaaatcccagaaagcagtgtcgcatccccagaatacaaaagcaaaacctccccctttccttcctcttcctgctttacttcctgggtacttccccaacctaacaactctggccaaccaccttaactgagagtaaggacacagcatttctcattgaatgagaaacgagcaggctgggagaaactttttgctaaagattgatttcagccaaaatagtgaactgcatatcatacataagaggcagatggaagtccattgggaaaaccagctcagtctgagaccactancctggaaacccccaggactctanacatccanagagag

SEQ ID NO: 26588 - DNA, 531 bp, Homo sapiens
  misc_feature (1)...(531): n = a,t,c or g
gcatttgttctcacaccaacagtgtgaagtgcgtggnataatcnccanttcaaaaccaaggaagcaacctcagagtggtcgagtgacacacctcacgcaggctgagtccanagcttgtgctcctcttgattcctggtttgactcagttccaggccngatcttgcctgtctggctcagggtcaaagacagaatggnggngtgtagccnccacctgatattcaggctactcantcagtcccaaatangtattttcctaagtgtttacnatgtgncagttcctgtnacaggtgtggggacacagcantgngtaatcantacanncaaagntctgcccttatggagctcacactccactggganacaaanannccannnntanngaancnatgaantannatatanacaaagtgagtgtgacttcccttctaanncctctgntcgtcctcccctantgcgcntcaanacaaananccannaacaatgatcncatggcaaacagcntccatcaantctgagaacttttccaggact

SEQ ID NO: 26589 - DNA, 525 bp, Homo sapiens
  misc_feature (1)...(525): n = a,t,c or g
gtttatattatgtgcatatgttatatatatatatattcaattctttanctggttaaaaatcactggacttaaagatccctatgttcccttcagcaaacaccatcatgtctcacccttggaagaatgtgtgtaaagagctgggcacaggacttggcacatancaggtgctaattaaatatttgctccctcctctatctatcacaaccactcccagccaaaaacaatggcagccacataggtctcactaggccanatggcagctggtgctgtatgtgaaacaaattgtgtcagtcaattaaggaatacccatggtctagtcacaggaagttccgaccaatgaaaagaacgaggtagggatgactataaataagtacatgatgaatatagcagangtgagctctacagtaatgcttctcaaactttcagcaacacctanagacatagattctggggtgagaccgagagctccactggtnananctgctaantgatctgntgctgctggccaangnncaacctggagtt

SEQ ID NO: 26590 - DNA, 526 bp, Homo sapiens
  misc_feature (1)...(526): n = a,t,c or g
gttctgaactgagcataggttgtccaacatcctcccctctcccacctaaattgagccccaaacacagaaacagtcatgctcatggaattcgaattcaccatgaaagtttgtgaacacaataaaaaggcatttctagctcccacttaccggatctctccagttcattttgctgtgtgaggtagtttgcacagtgggaccttccctcaatcccttagctacatctagtagggaatgtgctttcattcagcctagcaggagaagctgcccatacactggaatgtaaactatgttcatattatttctaattcaggataaaataagcaatttgttgtttgtcacttgcattattgcttttagggaggtagctttcacttatttcatttattttatccattcagcaaaccttggccaaggacttactctatgccangccctgtgccangtacggagagcacaagcagtgtaagagcctgctctcatggaacgtacattctagtgacagagagagagatantaattagggcat

SEQ ID NO: 26591 - DNA, 529 bp, Homo sapiens
  misc_feature (1)...(529): n = a,t,c or g
gagagaaccttatataaggccagaggtacaagctaagggagacacatagatacaaaagtgatagatgacataggagtctgaaccacttatttgtgtagctaatttgtacagtctgaaactgctcaaaatcaatcctaaacgtagtaattctgtcttaagatagtattacttctgtcttaggctggatttctattggggtctcccaatttatgactttgtgcaattgggagcactgagtttatcatggacattaatgtgagaatttcaccaactataaagcatgcccgttctgatttcacattcagaaactgaaaggcaattacaatgtgtctatataaaacagaatggattggatgtcccattattagataaccctgtaacactctaatagatggatcataatggagctttggatctttgagtatccaacatcctttcaaagaaattgctcnttatacagtttatatttacttaatagaagataaanggcccttgtgaagacggggaaacctaactcntatacttgctt

SEQ ID NO: 26592 - DNA, 520 bp, Homo sapiens
  misc_feature (1)...(520): n = a,t,c or g
gtctagacttgtggcatcatggcagcatcactgctgtagatttctagtcacttggttctcaggagccgtttatttaatggcttcacatttaatttcagtgaacaaggtagtggcattgctcttcacagggccgtcctgttgtccacaggttccagattgactgttgccccttatctatgtgaacagtcacaactgaggcaggtttctgttgtttacaggacagttctgcagatcgatttctcaacagcttgggaagatttatgacaggactggacaccaaaaataatgtcaaggtaaaccgctgtctttgttctagtagctttttgatgaacaataatccttatgtttcctggagtactttcaactcatggtaaagttggcangggcattcacaacagaaaagagcaaactattaactttaccagtgaggcagtacggtgtatgtantgattcanagaatttgctttgcaccanacataccangtaaccttgacaanttacttaacctaccaaacccatt

SEQ ID NO: 26593 - DNA, 518 bp, Homo sapiens
  misc_feature (1)...(518): n = a,t,c or g
ggacagagaggctgaagagacagagccgtcctgcacagtccaggcaccaccctgccctgccactgcctggcgggcatcttgagctccagacccttagcctctccgggccccccagttttttccgggtaagagactcgaactgatgctctctaaggattcttcaagctctgaaattctctgctgacatttgccagcagcaaggttgactcgaatctgaaacctctggggaaantgggggcctctcccagaatggaaccctctctgaacactttcccgggagggaccttagactgtgctgcctgttgccagcgtcgcaggcaggaggagcgcagtcactatggggtgggtgattcatgggggagggagtgaaagagcaaatgtccaaggaagggcataagagaagggctccagcaagaatgcaaaggaagattgtctaaaatggttttcaangcggtcatgacttgcctctaaccagcaaancgtgtggaagaaacatcggaattanggtccatctctca

SEQ ID NO: 26594 - DNA, 503 bp, Homo sapiens
  misc_feature (1)...(503): n = a,t,c or g
ggagcaaaaagcttcatgccaattgataagatgtacaaaagagggtggattgcaaatgcagtcttgcagcagtgagctctatgaccagatcagaatcagctgaacaggaatggagccctcttctatatccaacactaaggtagttccagcacagtattctgggagtgaaagatgtannnnnnnnnnnnnnnnnnnnnnnnnnnnnnnnnnnnnnnnnnnnnnnnnnnnnnnnnnnnnnnnnnnnnnnnnnnnnnnnnnnnnnnnnnnnnnnnnnnnnnnnnnnnnnnnnnnnnnnnnnnnnnnnnnnnnnnnnnnnnnnnnnnnnnnnnnnnnnnnnnnnnnnnnnanaagcactgttgtgtatttgggaagcaaaatatgcacangaaacaacaangcatanaangtgttgtggtcctaaacctgaattgatgagggtacatgggggtctnncgganggaggnacngnnggtnttgnngntagnnngttccngggggggggg

SEQ ID NO: 26595 - DNA, 519 bp, Homo sapiens
  misc_feature (1)...(519): n = a,t,c or g
gcggcacgagggcaagccagagataaagccttcctccaaaacagtattatggggcgttttcagaggctggcaggttagaaaacagccgctgcttgctcactacaagctgtgcttctccctactgcccagtctaagaancagagtcctggtgttacaatgggttgcccaaagtgnctgcagggtaagcttcaggatgattgttgagcaaggtgagctttctcctgtgagcaangaattatccacanactgaacactgtgggggacctgtctttctggctcactcctcacccctcctcttttacagttgagagaaccaatgaatgcnttgggcaagtattccttcttatactcatgataaccatttgacgttccaagtttatgtgtgtgtctgggtgggtgctttcccctggactccccatcnccantggtccntgggctttgtctcntggcccagaactcctagntgtggaacaatcaaaagccgagtcanttgatcaacactgtcctttggaatccatc

SEQ ID NO: 26596 - DNA, 528 bp, Homo sapiens
  misc_feature (1)...(528): n = a,t,c or g
ggaaaaaaggaaatcacatatggtgagatacacatttatcaggttttccttcancagcgctatccatttcctgcagtggacggaggtagagctcagcagaaagtggctgttctactgagttaaaaagttagaggttagaatttggggcttccacagtagcaggagattgggaaggagggaatctcgcaaaggagggagtctcanatggggagctcccaaatctgtgtacgaacttctctgattcctaaactgtgcatctgggtgaggttcaaggagctgagggaaaaataacagctggaaggctaaaaaggtgttgtcttgtgttgagcagatggtgcttanggtttanttctcaccaagttagaggactctggagaacacctaaagctttctactgagactacagaaggagtaatgactactccccangactaaagcctatgtcctaagaataaaggcaaaaccaagataggccancctgacaaacctaaaaccaactcctcatancgcattatcatataataactc

SEQ ID NO: 26597 - DNA, 528 bp, Homo sapiens
  misc_feature (1)...(528): n = a,t,c or g
gaaaccgccagcagcttcatttaagcaccacaaagggggtttcctagagtttgttgtatttgcagaaaggctgtcgtcgtctttccctctgtactggaaattacttacctacttggtattgtctttctggccaagtcgttttcttttgagctaatttcagacttccaccacagtttaacaatagtacaaagaattatttttctacatctttggagagtaacttgccaatactgatatcccatcactcctgagtacttgaatgtgtctttgctgtaacgaagatagtctccattgagaccctggcacggccatcagaatcaggaaactagcaccgctgtgtgagtcgcctcccacccgcagaccctgttcctgttggaatgtctcagtcatgtcccttgcagcaggagaatctgatgcagggctaagtggtgaatttcggtggcctgcctccttcaatattccttgacttccatgaacttgacactttgacaatgacaaggaantttctaaagaatgtgtaccgtttgg

SEQ ID NO: 26598 - DNA, 524 bp, Homo sapiens
  misc_feature (1)...(524): n = a,t,c or g
gcatcagcatcaccttggaacttttggaaaggcaaaatattgggccccacccccagagttttgagattagtannnnnnnnnnnnnnnnnnnnnnnnnnnnnnnnnnnnnnnnnnnnnnnnnnnncattgagtgtggacatttttagtagcataacactcatttcagatttagaaatcaggtttaagggatatttgtcttttgtacagttagattcccaaacctggctgctcatccatttgtaaaaatacagtttttctagttaagaattactgtttaggaattcctaatctgtgataagcccagtaacttgtgtttttacaagtctaccagataattctgatgtaaccagtccattttgggaccactgctatagaaggaattctaaaaataaagtaaggtcaacactgatatttgaataatgtatgtatctttatgcccagacagttagcatatgttgaaattaatgactgaacattgatcaaaatgctaaataatatggaagtgcnaatgttaaacngtcctc

SEQ ID NO: 26599 - DNA, 530 bp, Homo sapiens
  misc_feature (1)...(530): n = a,t,c or g
gacgttaaattatttaaggtttctaaacactgatttggtggaagtgctaacaatccttgtgaacaaagataagcttcagaaaaactgaacagcactaaaaaaaagtatctactttggaaaataatgatcctttgtaattgattttggttttagatataaagtttacattggtaattctaatgtctgtttaccagtttaattttaaaaagtacttnnnnnnnnnnnnnnnnnnnnnnnnnnnnnnnnnnnnnnnnagggaatctggannnnnnnnnnnnnnnnnnnnnnnnnnnnnnnnnnnnnnnnnnnnnnnnnnnnnnnnnnnnnnnnnnnnnnnnnnnnnntttaaaaataaaccttgcatggtggtgcgtgcgtgcctgttgtcccagatattcnnnnnnnnnnnnnnnnnnnnnnnnnnnnnnnnnnnnnnnnnnnnnnnnnnnnnnnnnnnnnnnnnnnnnnnnnnnnnnnnnnnnnnnnnnnnnnnnnnnnnnnnnnnnaaacacaagggaaaaaagtctttc

SEQ ID NO: 26600 - DNA, 527 bp, Homo sapiens
  misc_feature (1)...(527): n = a,t,c or g
gnnnnnnnnnnnnnnnnnnnnnnnnnnnnnnnnnnnnnnnnnnnnnnnnnnnnnnnngaaggtgttttatttttatttacttatttttgcttttatggtttgtctctgggatgtagaaagtatcttaatgataagaatagtgtcacttaaaatttgtacggtatcccccttgtgatagttttgatactatacagataatagattatactccttaaattggtctttttggcatgaattgtacactatgcctttctttgtactttgcaattctctgtcaaaatctgctaagggggcagttagccatttgaatagctctactcttgctgccaacatgtactttttgccactctaataagtgataccacttattgtttgggtattgtctaatattagaaatactcannnnnnnnnnnnnnnnnnnnnnnnnnnnnnnnnnnnnnnnnnnnnnnnnnnnnnnnnnnnnnnnnnnnnnnnnnnnnnnnnnnnnnnnnnnnnnnnnnnnnnnnnnnnnnnnnnacaaaaaaaca

SEQ ID NO: 26601 - DNA, 528 bp, Homo sapiens
  misc_feature (1)...(528): n = a,t,c or g
gaaaatatttatacacaaaggcagaacttgccgagtagtagctgatcactttgtctttaaaattccagggtttagtttattactggatgtgttttgtgctctacatggaccaagagaaaaatgtgttgaaattctgaggagtggccacttgttagctatctcaccaggtggagttcgagaagccctaattagtgatgaaacttataacatcgtatggggtcatcgcagaggctttgctcaggttgcaattgatgcaaaagtggtgagttatataaaattaattattgaagtaaagcttagtcaaatttaaaataaatggttaagtaatgagccaaattgtataagaacttagacacttttgctgcaataccttaaaaattagtatgtnnnnnnnnnnnnnnnnnnnnnnnnnnnnnnnnnnnnnnnnnnnnnnnnnnnnnnnntgtatcatgnnnnnnnnnnnnnnnnnnnnnnnnnnnnnnnnnnnnnnnnnnatcgtacaaaaatacaaaaatntncaggcatggg

SEQ ID NO: 26602 - DNA, 527 bp, Homo sapiens
  misc_feature (1)...(527): n = a,t,c or g
gtgaatgtggaacgctatgccttggtatttggaatcaacacctttattgccttggtgattcagaccatcatgactgtgattgtagtagatcagagagggctcaacttgccagtcagcattcantttttagtttatgggagctattttgcagtaattgctggaattttcctaatgagaagcatgtatattacctactcaaccaaatcccagaaggatgtacagagccctgctccaagtgagaatccacatgtgtctcacccagaggaagagagtantatcatcatgtcaacaaaactctaacctcatcgcaacaaacgcaacagtggctttcaaagttatgcaataataaggaaagattttgagatgggtggcatatgttttgccataacttgacatgctttgcaaatctggnttccaatggacctttcanaaccacannaaaacctcagttttagatgagttctctatgtgaccaattttactgggatgcaattgacangacccgtcatcataattaaacacccatg

SEQ ID NO: 26603 - DNA, 530 bp, Homo sapiens
  misc_feature (1)...(530): n = a,t,c or g
gctccaaatgacaacatttgacataaagaaaacactaggcaattatttaggctgattcatttaaataagtggtctttcnnnnnnnnnnnnnnnnnnnnnnnnnnnnnnnnnnnnnnnnnnnnnnnnnnnnnnnnnnnnnnnnnnnnnnnnnnnnnnnnnnnnnnnnnnnnnnnnnnnnnnnnnnnnnnnnnnnnnnnnnnnnnnnnnnnnnnnnnnnnnnnnnnnnnnnnnnnnnnnnnnnnnnnnnnnnnnnnnnnnnnnnnnnnnnnnnnnnnnnnnnnnnnnnnnnnnnnnnnnnnnnnnnnnnnnnnnnnnnnnnnnnnnnnnnnnnnnnnnnnnnnnnnnnnnnnnnnnnnnnnnnnnnnnnnnnnnnnnnnnnnnnnnnnaataaaaatagttttaatcctagctgcacattagaattactttgggagttaanaaaaaatcctacagctcanagattctgatttgtgtatcnctgantggggncncaagagtatttgagaacaacantattttttttacctggg

SEQ ID NO: 26604 - DNA, 525 bp, Homo sapiens
  misc_feature (1)...(525): n = a,t,c or g
ggatactgtctctgaacaaaaatagctggaaaaacacataactgttaactaagggttgcctctagtgaaaaggattggaagacaatttatctgatgctacactattcttcctgttgtgattgttttactgtgaacataacaaggttgtattggggaggagggcaggggttgattgctgccaatgttgattgctgaggccttagccaagatttcaggcatcatttgctccagtcctttcattttctttatggtggaaagtgaagtgacttgcccaagatctttgttggccctaaacatcgctgtctctgctacagattcctattgagagcaatgcatgttttagccttgtgcactcttanagtcagcatcatgggaaagagtaacagcaattgaaaaaagagattcaagagccaagtactcaaccctggcaagggatggggacatgatgcccaaagccaccctatactccaatctccctggcatcagctactgcntacnggggactgcctcanctttttctaagaa

SEQ ID NO: 26605 - DNA, 527 bp, Homo sapiens
  misc_feature (1)...(527): n = a,t,c or g
gaaattgaagtaagtttcaatgaagtttggtatacaatccatggggaagggatttcaggggaacccaccattagaatgaatcattccatctggagtaccagaaaactcgatattgtcgataccatggtgttttgttatatgaaaggaatagtatgcattggctaaacattatgttttggaagaatgataatggcctnnnnnnnnnnnnnnnnnnnnnnnnnnnnnnnnnnnnnnnnnnnnnnnnnnnnnnnnnnnnnnnnnnnnnnnnnnnnnnnnnnnnnnnnnnnnnnnnnnnnnnnnnnnnnnnnnnnnnnnnnnnnnnnnnnnnnnnnnaataaataaaatttttaaatgataatggcttgggagaatgatcacaaaaccaggcagactggggaaagaaangnactcgtcaagtctgcangatgaaagggaatacacagaaacatgtctgtcctgcacatgagaccacggttctaaggacaagnnggtttaaatgtttaananncctggcttgtcaggnggaa

SEQ ID NO: 26606 - DNA, 522 bp, Homo sapiens
  misc_feature (1)...(522): n = a,t,c or g
gttctggacaacttcaaacacacgagcctgatcaagataacttccccttcactcccttgcacatactcctcgccctctgcctcagggttagagaacagctgccttcagctttctcccccgaagctatgcagagccttctgaccttaaagaaggcctgctcctttccctatagtttctcccaccactctgactgatctgcannnnnnnnnnnnnnnnnnnnnnnnnnnnnnnnnnnnnnnnnnnnnnnnnnnnnnnnnnnnnnnnnnnnnnnnnnnnnnnnnnnnnnnnnnnnnnnnnnnnnnnnnnnnnnnnnnnnnnnnnnnnnnnnnnnnnnnnnnnnnnnnnnnnnnnnnnnnnnnnnnnnnnnnnnnnnnnnnnnnnnnnnnnnnnnnnnnnnnnnnnnnnnnnnnnnnnnnnnnnnnnnnnnnnnnnnnnnnnnnnnnnnnncatggnaaattttaanccagctattcaanacccctttaaagtcagggncncanaaccatttaaaaaaanangtcg

SEQ ID NO: 26607 - DNA, 231 bp, Homo sapiens
gaaattttttttaaaagtactaatgttatgaagtctgcatgttttatcagaaaatacagcaataaaaatagaaagttggtctgtattcattgtctccaacaaccctttgctccaaattgtaattttgaaaaatttataagctatgaagattgaagaaatgtaaacatgtataaattgataaaagaaaatttgattttactgagagtactaagggatatttttttttttttt

SEQ ID NO: 26608 - DNA, 521 bp, Homo sapiens
  misc_feature (1)...(521): n = a,t,c or g
gaagaagagccatgctttccttaataatagctaatggtgaaaggatgtgttgtaacaagagcagaggaatagggaaacaggagaaagacagtcagttgaagagtcctgccctgtgtcagggcaccatttggccagctgggcttgctaggagtagaatatagaaagtacatgaagtgccatactcagacagctctggctacgttgacaaactggtatatcatggtgcccaactttctttgttagctgggccagcatcataccctctagtatttgctctgaacttcgtaagcacgggtgactagctttcttttcctctgcagttatcattcagactgaatagtttctaagaggctcttaatgagaaatagaagggantaagttaacttctgtgcataccttggccatatttgcttgacaaactgatgtgtatactaaagccattatgggtgtgaaangcaaaagtataantgctccccantatgacctggntaatttgtctacttcnaaattgattgcaaaaa

SEQ ID NO: 26609 - DNA, 528 bp, Homo sapiens
  misc_feature (1)...(528): n = a,t,c or g
ggtaatgacttacagtagtatcattttcacttacaaagcacttaggaaatgaaaggaattaactcttgttatcaggtaagagagaccaggatatccacttgtctcatgactaaagtttgccttgtaatttggactaagggaaagtcattggttatatgaagtagacaactgtggttaatactgctcttatttacagagagaaagcggttggaagccaagcaacgggaagacatctgggaaggcagagaccagtctacagtttgaacatcactcaatgaaagggataattccatgaatcagaaaatgttccatagccttcagataagatganccttcaaaancccaaggtnaangnaaanttnnaggttaannnaataannngnncnaaacaaggactgacngggttanaaggganaaaatccngtcttannccnaatgcanttcttggaanancctacgtgggggggtntnnggnggcctcnnctngganaactggaaaannnattccaaattgcctggcagggaatc

SEQ ID NO: 26610 - DNA, 539 bp, Homo sapiens
  misc_feature (1)...(539): n = a,t,c or g
ggcaggtattggacaaactaaaaaacttgagatagagaagcccaaagtctgaaggatgagtcaagcagtggagcagtttcagaatgcccatctgttttcaccagaggatgctgtagccactctggttcctccaggctgaaggtggggactcattggcagggctgactggcccctggaaatggagacaagttgcagctgggctaagttcacctttcccagtcttaacattcagggtaaacccatggtttcatagctttgggtagaattccctgggctcaggtctcttcactccttacctggcaggaatgaagaaacacacccttctcaggtgtggctgagagatctggcctgaagtaangggattggatagcataaagcagccgtttctctcatttttgcggaacaccgaattctgccgcactttgaattcacttgtattcctggagttcctgttttgtgccatgtctaaccanggaagctctcactgtgggcatccanangaaatnaggcctgggttactccaaggggctcaattcaca

SEQ ID NO: 26611 - DNA, 539 bp, Homo sapiens
  misc_feature (1)...(539): n = a,t,c or g
gcttgtgacagaaaacttataagaaactcataaatgcatgttcatttatcagcctcaatcttccgaaccctcctttatttgaggagatgataggctgccattcaacattgcctctccctcacagggctgtgggaggctgcaaggtgtggttgctgatagcacagactttgcagtcagagagacttgagtttgaatttctttgtgggatcttggttatatatctcaacctctctaagccttattttttcccatttataggtgaaattaataatttctatgtcataagaatgttgtaagcgttataattaatattgtatataaagaggccagctgtgtctggtctacagtaagaanctaatcaataatggggggcaattaatcctggaaaatttaaggnaaaggntcctcaatccncaaaantgttccngtgggattggcatngttaaatggatttcncaatcctgaatgcctggganaaanctggncacatgtccanaaatctggaatcaacttggnanaaacaantgaataaagttaaa

SEQ ID NO: 26612 - DNA, 530 bp, Homo sapiens
  misc_feature (1)...(530): n = a,t,c or g
ggnnnnnnnnnnnnnnnnnnnnnnnnnnnnnnnnnnnnnnnnnnnnnnnnnnnnnnnnnnnnnnnnnnnnnnnnnnnnnnnnnnnnnnnnnnnnnnnnnnnntaataaaaacataaaactagcaacctatgagatgaggaattggaagtcactgtgtaagtcagaaaatattgccttaataactactgaagcaatgtgagtgtaatgaagatacttgcctgagctatgcctcagggtcgaaaggagaagagtcataagtcacagtggtttcattcgctattttagtgagattatataagatgttgataaaatatctgttgattggaaggggcctgatgcagaatttctctttaaaggatgaaacaataaaagcagctgacacttactgagcacttattgtgtgcaaagctctgttctgtgtgctcatttactttttccagccaccctatgaagccaggtagtactcatattccttaatttacggtaaggaantnaggnataaaaagggaangggggaaatnnanaccggg

SEQ ID NO: 26613 - DNA, 530 bp, Homo sapiens
  misc_feature (1)...(530): n = a,t,c or g
gctccttgtttgctttgctaaaacacttaccactttctaaaattaactcatttattttgttgttgcngctgctgctgctgctgctggtggtggtggtggtggtggtantgatggngatggnggngtttaagtttttaatgtcagtctcangtttctacaataanacctccgtgaaaaaagagacttgttcngtnttgntcangcctaagattctcaacaagganaagnntccttaggacatattacgaaccangaactaggtgtggtnntaatgntaaaggnattgttcaacgctgngcnttgagggtcangcccattaaaccaagccctttggganncnncancntgcaggattgcttgagcccangaacttggaanatcanggacntcntgggnaaaatcnncgctncnggtncantttannttttnccnnntngnngnnnaanccnnngggccgcnngcntncgangnttacngnaacnggnnnnttcggnntcngagngnnggggnaaganggangncnnggtttc

SEQ ID NO: 26614 - DNA, 520 bp, Homo sapiens
  misc_feature (1)...(520): n = a,t,c or g
ggggggagcagnnnnnnnnnnnnnnnnnnnnnnnnnnnnnnnnnnnnnnnnnnnnnnnnnnnnnnnnnnnnnnnnnnnnnnnnnnnnnnnnnnnnnnnnnnnnnnnnnnnnnnnnnnnnnnnnnnnnnnnnnnnnnnnnnnnnnnnnnnnnnnnnnnnnnnnnnnnnnnnnnnaanaaaaanaaggnttcnacaagttncccaaanngggccccaaatcccggggncnaaggnaccaacnngccttggttcccnaaatgcgcgggaatnaaagggtgtgcccaccttgcccggcctaaacacanactcttgactttactnnggnaaattanagtgngaaaagtgccacttgnccatcctaancctcctcntctttcccaattctcacttttaaaaattcnaatttatttttgggtaaagctaataacanggggttaaaatttttggggnngctttcatcanaatttcacaatcttanccaacaattcccgngtaacatggntcacnaaggaccnngccca

SEQ ID NO: 26615 - DNA, 525 bp, Homo sapiens
  misc_feature (1)...(525): n = a,t,c or g
gcaaccaaggcagctgggctggggacaacaggatatgatacccagggacatctgatccacacactctgctcccaccaggaaacttccaggctgggattatctgtccacttttgtccatttgtataattaaaaatcgagtctgacatctgtgacctgctcaagatttcctanagcctacctactctaaaccttagtttaatgtacattctaccaanccacatcatgtcgagaaaatgaacagattttcccaactagggcaaattagaatcattcttttccattgcatcagggggcttccaanaaaggccaattgactcaaacacaaatgttgcccatttccagggctgcagcgaaaatcctgatgtctgattcaagaaaagaantgatgcctcccaagtacagtccaagccagagtcattgtgttgcaccttcttttgtaccttcntntgngtgaatggtgccctgganttgtgcanggcagctgtnancccaagtccacatangnnnnggagagagatnctatgc

SEQ ID NO: 26616 - DNA, 523 bp, Homo sapiens
  misc_feature (1)...(523): n = a,t,c or g
gcggacacttcgggtggccaggatgggaaatgggtccaccaggaaactggagcccacgtcctcctcgtgcaggggaggcccgccctggccccacggcagaatcagcttctggtccatcggaggatccgagtgtgaatttcctgaagaacgttggggagagtgtggcagctgcccttagccctctgggcattgaagttgatatcgatgtggagcacggagggaaaagaagccgcctgacccccgtctctccagagagttccagcacagaggagaagagcagctcacagccaagcagctgctgctctgatcccagcaanccgggtgggaatgttganggcgccacgcagtctctggcggagcanatnangaagatcgccttggngtccgaggggcgccctgaggaacagatggagtcggataactgttcaacgangggatgatgactggcncatctgtcntcagnagantggncccgtcccangtgaactccatccctagagatnctataatccnnngggnaact

SEQ ID NO: 26617 - DNA, 522 bp, Homo sapiens
  misc_feature (1)...(522): n = a,t,c or g
ggaaggagggaggaaggaaggaaggtgggtccagggcatgttctaggccttacttcttccattctcagacctctcctgggagtttcagggaattcactttggccagttgactttgattgagtacatcctatgtccctagcagtgcgcctggtgttagggacacgacccggaatacaatccattccccacccttaagaagcttttaatctagtgggagagaaaataatcatacctattttacagatgaagaaactgaaactttaagattctgatatcattaaaatattcatgttttttctttcattcatttatttagaaaatttttattgagtccacgtgatgtgccaggcactccttgaggtgctgcaggctgacacagggaaaatcgggcaccttctgcccacatgagacacctatacagacaacaacaaatatgtatttgtgcacanaagcttangactttgtcaantcacttcaattcaccnttaaatgtcatcatggntaaagggaancctaanttgg

SEQ ID NO: 26618 - DNA, 543 bp, Homo sapiens
  misc_feature (1)...(543): n = a,t,c or g
gcattcccttaagcgtgcactttttaatatcacatctatttgtctgtctgctcattgttttgttgctggaactaaatatgcaatggatcatgagactcagattctatganaaacccagggtctctgctttaccacggagcanggtcaccaacccagatctccaggcccatgaggatggnacatgaaaggagccgacaaaagttgcttccattggcatgggctctggagctgtccagaagtccagggacaccanacttgatcaangaagggctgtcactttagaggttcaaaangaantgnctcaaagcanaggcaagcanaggaaccccacgatgaacttgctcttttcctttgatgagcctctccccaggtgtatttcagcagaccccggggacccanccccactgggcctgctggctccctcngctccagccnaatgccccanctggccttccccaacctgcaangagctgtagcatggcaaatctgcctgctgtagntatttcntagatcttgggacatccanacaggagangggggggg

SEQ ID NO: 26619 - DNA, 511 bp, Homo sapiens
  misc_feature (1)...(511): n = a,t,c or g
gtctcaaaagagaaaaacaaagaattcaagtaatcnnnnnnnnnnnnnnnnnnnnnnnnnnnnnnnnnnnnnnnnnnnnnnnnnnnnnnnnnnnnnnnnnnnnnnnnnnnnnnnnnnnnnnnnnnnnnnnnnnnnnnnnnnnnnnnnnnnnnnnnnnnnnnnnnnnnnnnnnnnnnnnnnnnnnnnnnnnnnnnnnnnnnnnnnnnnnnnnnnnnnnnnnnnnnnnnnnnnnnnnnnnnnnnnnnnnnnnnnnnnnnnnnnnnnnnnnnnnnnnnnnnnnnnnnnnnnnnnnnnnnnnnnnnnnnnnnnnnnnnnnnnnnnnnnnnnnngagaganttcaggtaancttttaaccccanaaaagtgtcttccccaggtaccantcagacatcttattcccaaacttccagttgaatatttaccctaacttgtttttaggaantacccccncttaagantattcccccaaanaantganancttgnttcaagnttaattttcaaggngcctg

SEQ ID NO: 26620 - DNA, 507 bp, Homo sapiens
  misc_feature (1)...(507): n = a,t,c or g
gacacantntnnatntaccaatnatngnncnangtaacangngaaaggacataccacagnnaacaantnncanctgtnnaaaaangccttcgnnanggnatacccctactnntnacctcannantttttttcntngcanggtttttctgaccttttancantnnagnctngcgccnatnccncagttaagggggcattggacnccaacagggancnggccgctaagtcccctnaaagttccactnctaannannatnggtatnncccnnngcaggtttnncannnacntgnnctnagtatatncnaatggtgcccnacgnnnnnnnnnnnnnnnnnnnnnnnnnnnnnnnnnnnnnnnnnnnnnnnnnnnnnnnnnnnnnnnnnnnnnnnnnngagtnggggcnccnttnaccagtancancaacaactgggcaaccctggggaaatccccntgngccaacccaagcncgtngaaaanttaaattccnggggtttttaanggcaccg

SEQ ID NO: 26621 - DNA, 504 bp, Homo sapiens
  misc_feature (1)...(504): n = a,t,c or g
gtagaaaacccaggggaatcaactcaagcaattagaaataagaaggatcaatagatagctaattgcacagtacatatttgtatatataaaattaatagttttccaaatnaagaataattgngaaaaactgaccttatncanaatgcagttaaaggtaataaaatttnccagggtnnacccatgacaattgtgctctgaatgggtaaggtcctgtgtanggtctgccagctagagatgcccaattcntgttcacttacatactttattcagttcctgtnaaatcccnangttactttaacacctgncnannttaagttcaacngggaaagnacttggtgagaatacccatgaaagnggtgnnattngaagggnaatccnggtaccacgggctgccaaatgcccgggggggaaaaatgcccctgcnnaaaaaaggncctgtcctnttncaananaatccctaannnaagggnnggnccccccncaaaggngggggggngcnnttgg

SEQ ID NO: 26622 - DNA, 500 bp, Homo sapiens
  misc_feature (1)...(500): n = a,t,c or g
gatcgatatgtgtttcctatatacgtatcgatatagttaccaagaacatcttttatggccttgtctttgttttctaacttgatggattatgtttggaactcnnnnnnnnnnnnnnnnnnnnnnnnnnnnnnnnnnnnnnnnnnnnnnnnnnntaaacagcagaaannnnnnnnnnnnnnnnnnnnnnnnnnnnnnnaagatcagggtgccaacctgcttcagtgtctggtgaaggcctgcttcctagacggccatctttttgtttataacttcacgtggtggaaggggcaaggagtctctctaggacctcttttatgagggcactaactccattcataagggcttcatccttatgacctaatcaccctccaaaggncccaccttctaatattgtcgtaatggggggtaaggtttcaacatangaantttgggaaaatgggtacaaacantcaacccatnacaatggtcaattaatttanaaananttttttcncccaccg

SEQ ID NO: 26623 - DNA, 478 bp, Homo sapiens
  misc_feature (1)...(478): n = a,t,c or g
ggttgtnnnnnnnnnnnnnnnnnnnnnnnnnnnnnnnnnnnnnnnnnnnnnnnnnnnnnnnnnnnnnnnnnnnnnnnnnnnnnnatagctcactgaatgcctaggcttaagcaatcctctcacctcagcacctagagtancaaggactactggcatgccactaccacacttggctaatttttaaattttttttgtaaatttnnnnnnnnnnnnnnnnnnnnnnnnnnnnnnnnnnnnnnnnnnnnnnnnnnnnnnagcctcccaaagcactgggactacaggtgtnaaccactatgccgngcantgtgtngaganttnncacngagntttcccggcagtgtggaanttaccnacnacgntaggaggncccttntngganggccanagtngcccnncagttgnttnccgnaangtttnaangcnaaaaaggggaccngggccaattttttttcnnacaatggntttggtnaggtggagg

SEQ ID NO: 26624 - DNA, 496 bp, Homo sapiens
  misc_feature (1)...(496): n = a,t,c or g
gttcaaggtatcttagaagataacactaggccattgaagcctttcaaaaatatatttttatgcaaattgacacgagtgcagtatactaatgcaaattaattttggtgtttagcttttattgctcatttataacccaagaaatggtacagaccacagtaagtgggattaggtaacaactacaacatggaaaaacagtgtctaagatcacgtactgctaatttaggttacaaaaccccaaggctgtaacctttatatgaaagtacttaagcttgaaagttcataatagtttgggtatcacctcattagtatagtacagtggtctcaaagtttggtcctgggtcatcgacattacttccttttccttctgagacaaggtctcaatctgtcaccaagatggatncattggcgtgacaanggtcaatgnancctcaaactcnccgggtcaagggatccccccaaaanaagccccctgggtngntnggannnaaaggaaacc

SEQ ID NO: 26625 - DNA, 480 bp, Homo sapiens
  misc_feature (1)...(480): n = a,t,c or g
gatcaaggtatcagccaaggctgcggtcatctcaaggcgtaactggggcaagatctgctttcaagcttactcacaatgctgtttgcagaattcagttcctgctgggctattggactaagagctacagtttcttagtacttagcctctccagagggcagctcacaatagagtagctgactttatcaaagtgagaaagtgagaaagagcaagagagtgccagcaggatagaagtcacagccttttataacctactttcagaagtaatanccatcacttttgttacttagaaggaagtcattaggtctaggccacccatggtgaggggttacacaagaacatactaccanaaggnaaggatcactgggggctatttaanaagtagccacnccaaagtggtcaccaagaaacaanttgcccttccaacaanaanttcggnaaaattnttnaaaaggtttanangcntnnnnaanaattggtttt

SEQ ID NO: 26626 - DNA, 493 bp, Homo sapiens
  misc_feature (1)...(493): n = a,t,c or g
gagcagatggacacaaatgaatgggacacatgttgacgccaattgtgaagaaataaaaaggaatgatgaaggaagccgtgaagaaatgaaagcagcataaagggatggagggggtggatgggattgagtcaataaatatcactcggtgttattttctattatatgccaccatccatcgtgtgtgtgtctagggaccacaccactgtcaacaacattgctgctggtggggatgggcagagggttggaaggtgaaccttccagagcctcagtgagctccatcgccctcctgcttggggcctcacctttccttttcagctccagcttggacccctcccctgactcggtgctagaataccccactgcccactggacacttcctcctgggtgtttaatgggaatcttanaantggcttgacccanactgtggaaaaaatttggcggtccctaaaanttaactaaaatttgnccaaggnccgtgggncnaccccgttaa

SEQ ID NO: 26627 - DNA, 667 bp, Homo sapiens
  misc_feature (1)...(667): n = a,t,c or g
tttatgacagccctangactttattaaaacggccccgggccnaatttaanncctcgaagggnccnaattcggtacgaaatttgtctctaatgtgtgttaagcaatacctcatcccttccacatcctgcaccagtccaagctgcagtgggaaaagacaaatgcagnagatgccaactaggaagctctcagggcacatgtagtgtttggctgaaattctatttatctgtatattctcatgaggcagggaaaaaaagaacaaaggtccttgtttaagataatccattataggttggaatgaaaggaaagattcttctaaaagtcctttttaaatcagattaggatattcacagttcctatccacatcctgcttctttcttccttgtgcagcccctaccaagctcatctctgcacccaggtcacatctggttaccatnctggaatggccttctcagtgnagacgggaaaatgttcccttgtcccccttgcatngtgtntnatggngatatggatnagcttcctcactncccantgttcnnatctaggggaagcatnnacnnnnggcaagntntcggnagtgaatccacttcagtgtcntgnggaaacnttanaagggntccnnnatganannntgnccatntnctttnntncnancncnnctnngctgttc

SEQ ID NO: 26628 - DNA, 572 bp, Homo sapiens
  misc_feature (1)...(572): n = a,t,c or g
gagccaagacccgctgatgatcaagataacgcacgtccatgtgcacatgcggtatgacgcggacgcgggggagaatgacctgtcactgctggagctggagtggcccatccagtgcccaggacctactgtgagagaagcagcgtggcggccatgcactggatggatggaagtgtggtcaccagagaacacagaggctcctggtttctcacgggggtcctgggctcgcagccagtaggagggcaggctcacatggtccttgtcaccaaggtctccaggtactcactctggtttaaacagatcatgaactaactgaaactcagctagccagaatgaacaacacaaccggaagcgggattccaagctggcactgccactgtggagggcgctgaaacttcatcacacactgagaggccgtcacagccccagaccacccgcttggcccacgcagcaacagagccgccgtttgctgggttgtttaccgancactgtgacctttctttccctggaactcttacccaatagagaccttaaaagaaaacatggatacnttaantantaaataagatatctgt

SEQ ID NO: 26629 - DNA, 564 bp, Homo sapiens
  misc_feature (1)...(564): n = a,t,c or g
ggctgtgtttatcttcctgcacgttgctttattttgaattattggtcattttctttactgaattttttacgggaaaggagtttcttaatttaaatacgtctttattaggctattcttgggtttaaaaaaagcaaaaaataggattcttttgtttgtgaaatgtttagaaatccattattggtgcagtgattttgcctttaaattcaataatttattttggtaaaacacttgggagtcttatcaatgcgtattcagtttttaagaaacctgccaaatactcagtatctgagtggtactgttgggctcccttcagcaaaatatatgctaagtaccgtgtagnatatcagaacatttgagagggtccttcctgcccttggagcttgcattctacatggaaccatnncaggaatacatgtcaaggcacangncttttcannngttttcacggggccnttgnaatnggnctgcccaaaanaaggccaanggtccattttagaccanaatggcccngttnncagtcaaggtgccnnggctagccccanngntctgnggngaagnacgctg

SEQ ID NO: 26630 - DNA, 499 bp, Homo sapiens
  misc_feature (1)...(499): n = a,t,c or g
gtaatcgaaagaataagggggtaaagagagattccttttaagaaattcagaaaaatctctgtaatacagaatttttcagttttaagcattgagaaaggagtaactctctgaaaggagtctaggaagacttctgagaggagttttctgtagtgtaatctaaaattcagtaccttaaagagaaaagcctatataggtccatggccaatgaatggcctatgaaaacgttttttaaaaaaataaagcnnnnnnnnnnnnnnnnnnnnnnnnnnnnnnnnnnnnnnnnnnnnnnnnnnnnnnnnnnnnnnnnnnnnnnnnnnnnnnnnnnnnnnnnnnnnnnnnnnnnnnnnnnnnnnnnnnnnnnnnnnnnnnnnnnnnnnnnnnnnnnnnnnnnnnnnnnnnnnnnnnnnnnnnnnnnnnnnnnnnnnnnnnnnnnnnnnnnnnnggtncanngngccanatntcgccnattggnccccacccngggnaaacaannnngaat

SEQ ID NO: 26631 - DNA, 568 bp, Homo sapiens
  misc_feature (1)...(568): n = a,t,c or g
ggtggctaggcatttgagcctgaatgcaaacaccccttacaaaggttcccagaagccaagtaagaaggctcaagtctgagcagcagcaaggttgataagagtcctagcactgtggaatacaagcaggaacactgctggatttagaggagggcaaagctcagtttaaatctcagctccaaaatgcagtgagtggtttaggttaaatatcaaccctcctcagcctcagcttcctaaactctacagatcataataaacatttattttgtcaacatgattcactgaacaccatgtaaagggtgtntagaaagccagatatatagtttccacttatatgtgctgggagatttgnaaataaagaggaaacttgtggtttcctctanncanatgnattcggacaggatcaacnatacnggcgagtattttgtanatattaaagcactatntagatgttagtanattacatnanctccanccactgncntgtgatgtttatccaccacatttggnncanngcnntcntcnngcccngcaaaggttanantgntaccccagccttnnccccaagttt

SEQ ID NO: 26632 - DNA, 575 bp, Homo sapiens
  misc_feature (1)...(575): n = a,t,c or g
gggctagtaagaaaatgtctggaaaaagaggaactgatttgaacactgctgacctttatgcttctgccatcagaaagggggtgagacttcaacagccaatgcaaaggaagctgagaaaaaatcaatttagctttctctgctagacagaataaaggtctctaaagatatccatgttctaattcccagaaaccgtgaactgttattttatggctcaaaagggattgtacagatttgatttaattagggccttgaaatgggaggttatctcaggttatctgggtgtggccagtctatttacatncacctanantgtggngaancttccccttttgtantcagaggggagatgttttatggaaggnatgcannngagatacatnattgnctcctnannatggnggttaaggggnatntgtcantntantcgtgtattgtttccaggtgatccnctnnnatgccatgtttntaaggggtcaanntnttttgtccgttannattttnnnaangggancangnnnanttntntgnanatangtnnnnnntcaaaaganttgtgtttantagtgcttgttttg

SEQ ID NO: 26633 - DNA, 498 bp, Homo sapiens
  misc_feature (1)...(498): n = a,t,c or g
ggagccaanattgcaccacgaacttttctgtanacaagtgtctcnnnnnnnnnnnnnnnnnnnnnnnnnnnnnnnnnnnnnnnnnnnnnnnnnnnnnnnnnnnnnnnnnnnnnnnnnnnnnnnnnnnnnnnnnnnnnnnnnnnnnnnnnnnnnnnnnnnnnnnnnnnnnnnnnnnnnnnnnnnnnnnnnnnnnnnnnnnnnnnnnnnnnnnnnnnnnnnnnnnnnnnnnnnnnnnnnnnnnnnnnnnnnnnnnnnnnnnnnnnnnnnnnnnnnnnnnnnnnnnnnnnnnnnnnnnnnnnnnnnnnnnnnnnnnnnnnnnnnnnnnnnnnnnnnnnnnnnngacggtctnnnnnnnnnnnnnnnnnnnnnnnnnnnnnnnnnnnnnagcaccacacctggtgggctttattcaganatttntaaanatgggncnccangnttcccaancgngggnncgnantcctaaggccnatttggaanctncnttngnnccccaaa

SEQ ID NO: 26634 - DNA, 559 bp, Homo sapiens
  misc_feature (1)...(559): n = a,t,c or g
gnnnnnnnnnnnnnnnnnnnnnnnnnnnnnnnnnnnnnnnnnnnnnnnnnnnnnnnnnnnnnnnnnnnnnnnnnnnnnnnnnnnnnnnnnnnnnnnnnnnnnnnnnnnnnnnnnnnnnnnnnnnnnnnnnnnnnnnnnnnnnnnnnnnnnnnnnnnnnnnnnnnnnnnnnnnnnnnnnnngagccctccaatccnnnnnnnnnnnnnnnnnnnnnnnnnnnnnnnnnnnnnnnnnnnnnnnnnnnnnnnnnnnnnnnnnnnnnnnnnnnnnnnnnnnnnnnnnnnnnnnnnnnnnnnnnnnnnnnnnnnnnnnnnnnnnnnnnnnnctggtaccaatttactgtattagtctgttctcatgctgctatgaagaaatatccaaagactgagtaatttatttaaaaagaggttaacngacccacaantgcatgtggctggggaggcctcaggaaacntacagtcanggcagaaggnactctncaanggggagaannnaganaatgnagcancaggggnatngcaaaggnttanaagcccnagtnccnngnnaccccccaca

SEQ ID NO: 26635 - DNA, 564 bp, Homo sapiens
  misc_feature (1)...(564): n = a,t,c or g
gtaaggacaaanagggggcacagagggggtgagtcgggctgctaatcacagaggacagggtctgcactgtcatctgatggagcatccctaggggtcagtgcantggtcccacgcaggggttctcagtgtgactgatgantttgtgggtcgtagatctttatgtagtcactgagttgaaatcttgttctgcgaagtccgtctttgcttcatagaagctcttactgttccgtgtttaatgtttatgtctgcttttgctaaaaaaaattctttttaggtgggtaantccctgccttatgattgatgtctcttaaattgcaaacacacaatcctgtgcataaatgcttgaggtattttgcttcattgctttatgattttcatgacttctaanatcataaactaatacngtgtcttaaataataccaagtacanacganattanttngatttttacatnttttttctcaagtgnaacaaacttcaaagtntttggcntgaanaaccccaccncaanctcggngtnacaatccccaanaaagccntgnnccagncnncncntgnncactt

SEQ ID NO: 26636 - DNA, 513 bp, Homo sapiens
  misc_feature (1)...(513): n = a,t,c or g
gttttttttccatctccatgccctcgataggtttctttatgtctgtttggaagtgtaatgaaaaataacactagttattgaatagctacaacatacagagtgtgcatgcccagcccttccaagtacttggcatgtcaattgattgaactctcacaatgcttctgcgttgtaggtactactattannnnnnnnnnnnnnnnnnnnnnnnnnnnnnnnnnnnnnnnnncttctcccagggggattgagctagtgagtagtgtaacctgatattggncccaggcagtctggctccagggccaatgcttgggtccctgttcttctgnctctcagtatgcnaatggncantctgtttctttaattggagtgagtggcacttggacacccacacagccaccttaaanattgtgggaaatcaagtccaagtatctcaagtaacagtacaacatccatatcangaaaaacagcttaaggcttgacttcaatatgggtttgggtgcaatttatgcntctggg

SEQ ID NO: 26637 - DNA, 540 bp, Homo sapiens
  misc_feature (1)...(540): n = a,t,c or g
ggtttttatgatttgggtaagtggataattccaactgtagaagatactttctagaggacagtttttttttttttggttttngtggtnnccaaaanaaanatttccanganaacctnanggccngaccggggtttgcccctnggnaaaaaatgaancctnacccaaannaagggaaanacaaaaanaaggcttgtngaaaananntaaaanaccaaanaaagcccccaaanggcanggananatttaaaattnggaaaaaangtgnaccctttggaancanananncnaaaatttggaaaaanngggnaccggtatncaaaaaangnggccccatngaactttttttttttaaaaaaaanangnggccnngtaagntgnccnaggngggccnaaaaccccggggctnaannaacnaccgnncttttaaggggntcttnaangtgcnntggcccctgnactaaacnnccccagttnaccnangaaccnttcaagannagcagcnccnggngccccnnagnttannccnngccacnggagccc

SEQ ID NO: 26638 - DNA, 534 bp, Homo sapiens
  misc_feature (1)...(534): n = a,t,c or g
gaaaagaaaaaaatcccactgatgaatggagaagaagttgatatggatctttctgcaatggatgctgattcccctttgctgtggataaggatagacccagatatgtcagtattgaggaaggtagaatttgagcaagctgattttatgtggcagtatcagctccgctatganagagatgttgttgcacagcaggaatccattttggctttggaaaaattccctactccagcatctcggcttgcactcactgatatattagaacaagagcagtgtttctacagagtaagaatgtcagcttgcttctgtcttgcaaaggtgagattatatacagcataaaggaaatgactattgtatatattttttgtatctctgaaaatganttaaaattcacctagtccttaaatttacntggnanctgagtccttgaaagcctttgccaaagtgctttaaattaanaaggccngntttgaaagaaacatgtttgncccggnnataggtntccagaanaattttaaaaatnncaaaatgnaaact

SEQ ID NO: 26639 - DNA, 519 bp, Homo sapiens
  misc_feature (1)...(519): n = a,t,c or g
gagaatnattttccaancangctgcccttgaaccataataggttcacagagaacccagnactgccangtggttgangaanatttangaagagaannnggaaantggnaancagaanatggaagtnaggtccangaanagntgggttggttcnagctcggaatttgccttacttaangtagctaactgatttgaacaattagctacctgtgattggccaaatctcggtaattggcacancnnnnnnnnnnnnnnnnnnnnnnnnnnnnnnnnnnnnnnnnnnnnnnnnnnnnnnnnnnnnnnnnnnnnnnnntnnnnnnnnnnnnnnnnnnnnnnnnnnnnnnnnnnnnnnnnnnnnnnnnnnnnnnnnnnnnnnnnnnnnnnnnnnnnccattgtggantacannttggcgagtcctcaggggatcnanaattagnaatncgattggccanccaacccattactgggnntanncccaaggttntnaatcnagcaccggtcatnccnttncnngtngttt

SEQ ID NO: 26640 - DNA, 620 bp, Homo sapiens
  misc_feature (1)...(620): n = a,t,c or g
ggggtattcccctanggcaacntacnagttnttangactcnggcccccggaatttggcaaaangaggcnaaaaattctgcacgagattgtcacctataggtttgcgtctaggggctggatcccttgcttttcagacccctgaaggttgccccatcacagaaaggaggagcggagagtaggcagagtgcagggaggaagcctagaggattaattggttaaactttattacaaaggctggtcctattgtttacgggccattaaaaaccattatcatcttcccaggccaggcagacagcagtcagctgctttgatgcatgtcttagagagataaggaaaatttatcccttgttttgacttcacaatttcttcttggtttattatctgacatgctattcaactttctctccacatgtccctgatctcaagacaactctttcaagttgttggcagggggangttcaggttanaatcctacaattttagaccttggaagagnccgncgagatcaatgactgtccctaaacctgcccctttccttcncgccctggccccaaacggtattttcctccatggtaaancaattccngggcncccanttatttngacttattatcnccgaa

SEQ ID NO: 26641 - DNA, 513 bp, Homo sapiens
  misc_feature (1)...(513): n = a,t,c or g
gtnnnnnnnnnnnnnnnnnnnnnnnnnnnnnnnnnnnnnnnnnnnnnnnnnnnnnnnnnnnnnnnnnnnnnnnnnnnnnnnnnnnnnnnnnnnnnnnnnnnnnnnnnnnnnnnnnnnnnnnnnnnnnnnnnnnnnnnnnnnnnnnnnnnnnnnnnnnnnnnnnnnnnnnnnnnnnnnnnnnnngtgattattatatcaaaggaatgaagggcaaaacccatatgatctcataagacacagaaaaagcacttgannnnnnnnnnnnnnnnnnnnnnnnnnnnnnnnnnnnnnnnnnnnnnnnnnnnnnnnnnnnnnnnnnnnnnnnnnnnnnnnnnnnnnnnnnnnnnnnnnnnnnnnnnnnnnnnnnnnnnnnnnnnnnnnnnnnnnnnnnnnnnnnnnnnnnnnnnnnnnnnnnnnnnnnnnnnnnnnnnnttacaggtgttgcacttcacctggccaancctttctcnacccaaannaggnanggtnccantttaagattccnanccatta

SEQ ID NO: 26642 - DNA, 511 bp, Homo sapiens
  misc_feature (1)...(511): n = a,t,c or g
gacannnnnnnnnnnnnnnnnnnnnnnnnnnnnnnnnnnnnnnnnnnnnnnnnnnnnnnnnnnnnnnnnnnnnnnnngcagactgacacctcacacggccgnnnnnnnnnnnnnnnnnnnnnnnnnnnnnnnnnnnnnnnnnnnnnnnnnnnnnnnnnnnnnnnnnnnnnnnnnnnnnnnnnnnnnnnnnnnnnnnnnnnnnnnnnnnnnnnnnnnnnnnnnnnnnnnnnnnnnnnnnnnnnnnnnnnnnnnnnnnnnnnnnnnnnnnnnnnnnnnnnnnnnnnnnnnnnnnnnnnnnnnnnnnnnnnnnnnnnnnnnnnnnnnnnnnnnnnnnnnnnnnnnnnnnnnnnnnnnnnncaacnnnnnnnnnnnnnnnnnnnnnnnnnnnnnnnnnnnnnnnnnnnnnnnnnnnnnnnnnnnnnnnnnnnngacgcagctcctcacagcaatggaacanagctggacgntaatgactttgncanttgaganaggagggtttnnnnngtaagct

SEQ ID NO: 26643 - DNA, 518 bp, Homo sapiens
  misc_feature (1)...(518): n = a,t,c or g
gctgtgattgttccaatcagagatttgttccagcacctttaaagtcttttttcaaaccactgtgctccttnaattaaaacccctaagaatnccnaganggnnacctggctngcccctccaatggaangggaaattgaaantggaaacngggnttgacccccggnggccctnagngtntcnaancagancnanncnncancatcaancangcnatnccttttngcnnnttaccncagggnncaanngacccctcgggaacccngtaggcgggttcaanttcaccggtccattcattgtcaatttgtncctaaaanaanagtttcgggantcacanggcctaggttcgatccnaatctntgctaggccagggctgtgtgactttggaaacattncatanccttncaggantcacntttcccncatctcaaaatttcagcnaanaatnggacctnttggggtggaacnctgttggggngtttantggngcangangtttcgcccnnngnnagcngcccggg

SEQ ID NO: 26644 - DNA, 527 bp, Homo sapiens
  misc_feature (1)...(527): n = a,t,c or g
gtgctttgtctaaaacgctttatgggtggtggtatttctttcttggtatttttgtctgtcttatctctatcagttgatggcttgttcaccaagaatttcctacttcttccctttagtgactgttgaaagcatggctctcctgactggatgttggtggcagtgaagttttgttcaaacgtggcactaagtaaatgaagtgtgtctccctaacgagatcagtttggtcttatgtgcctttgaataaggtgtagaagggatgagaatgatctcaatttctaggttagcagaactgtgatacatacataattttattccttgactgtattgttaatatttgataaactgatttttaaaattattgttccttcttgtgaagagaatggagattgaanangaagcgtgaaagtgtgtttaatcatttaacaagtacaaagtgtccactccgtggnnnaacgccaaagcactgaagatgaaatngggnacnaatcnaatgntgnccccgggtcatttgnaccccccgggttggg

SEQ ID NO: 26645 - DNA, 542 bp, Homo sapiens
  misc_feature (1)...(542): n = a,t,c or g
gtgagcttcaataccctggatgtctgcatgtgccaagaagcacgcttgggggaaacaggagagaaaagctccgtggcaagccctcctctctcctctgagtgctcttggctggattcaggccgtgcatttatgtgcttgtcgtaaatcactgttaatgtctttggtaaagggctccaacagtagactccctctccttcacatccgcttcctctggccacagggtcatttttcttcatgtacaaagaaaacacaggaaactctgcacggccatgaggatgatgtctctgatggaggaaaagtgcggcctggttcctctccattagcaaggggcggaacctgctttanggtggagctggacanggaaggccttcctcagggactagagcaagacaangacacacttctgtgctggaangagaaaaacagcaagcttccctcctantccctgtaaantggtccaaacaacctggggaaacnaaaantcngncagncatttnnanggngccccaaatnnccncagggggnccctttnaaggggtggg

SEQ ID NO: 26646 - DNA, 489 bp, Homo sapiens
  misc_feature (1)...(489): n = a,t,c or g
gactggannnnnnnnnnnnnnnnnnnnnnnnnnnnnnnnnnnnnnnnnnnnnnnnnnnnnnnnnnnnnnnnnnnnnnnnnnnnnnnnnnnnnnnnnnnnnnnnnnnnnnnnnnnnnnnnnnnnnnnnnnnnnnnnnnnnnnnnnnnnnnnnnnnnnnnnnnnnnnnnnnnnnnnnnnnnnnnnnnnnnnnnnnnnnnnnnnnnnnnnnnnnnnnnnnnnnnnnnnnnnnnnnnnnnnnnnnnnnnnnnnnnnnnnnnnnnnnnnnnnnnnnnnnnnnnnnnnnntactnnnnnnnnnnnnnnnnnnnnnnnnnnnnnnnnnnnnnnnnnnnnnnnnnnnnnnnnnnnnnnnnnnnnnnnnnnnnnnnnnnnnnnnnnnnnnnnaacacagtgaaaccgtctctactaaaaatacanaaaaaaatangccangtgcaattggtcacacctatanttccngcatttggggggcctangnggtggatcaact

SEQ ID NO: 26647 - DNA, 489 bp, Homo sapiens
  misc_feature (1)...(489): n = a,t,c or g
gcttatttacctctctgcttcttcattatcttcttcatataggtaagtgtaatctattttatttggttactgtgaggattaatttagttaaacaagaggtacttggcacatcctaagtgattagctaaatgttagctattctgtttcattctgtaaaactcacttttttcctaggcataaagagaaggctattattcnnnnnnnnnnnnnnnnnnnnnnnnnnnnnnnnnnnnnnnnnnnnnnnnnnnnnnnnnnnnnnnnnnnnnnnnnnnnnnnnnnnnnnnnnnnnnnnnnnnnnnnnnnnnnnnnnnnnnnnnnnnnnnnnnnnnnnnnnnnnnnnnnnnnnnnnnnnnnnnnnnnnnnnnnnnnnnnnnnnnnnnnnnnnnnnnnnnnnnnnnnnnnnnnnnnnnnnnnnnnnnnnnnnnnnnnnnnnnnnnnnnnnnnnnnnnnnnnnncganagacaagacncagtcncaaaacaaaacaaa

SEQ ID NO: 26648 - DNA, 523 bp, Homo sapiens
  misc_feature (1)...(523): n = a,t,c or g
nnnnnnnnnnnnnnnnnnnnnnnnnnnnnnnnnnnnnnnnnnnnnnnnnnnnnnnnnnnnnnnnnnnnnnnnnnnnnnnnnnnnnnnnnnnnnnnnnnnnnnnnnnnnnnnnnnnnnnnnnnnnnnnnnnnnnnnnnnnnnnnnnnnnnnnnnnnnnnnnnnnnnnnnnnnnnnnnnnnnnnnnnnnnnnnnnnnnnnnnnnnnnnnnnnnnnnnnnnnnnnnnnnnnnnnnnnnnnnnnnnnnnnnnnnnnnnnnnnnnnnnnnnnnnnnnnnnnnnnnnnnnnnnnnnngtcagtantcttttttgacaagtatgactgaagttggtatgcctaggatcangggtatagtgggaactaatgatgtatgggngaaaagaanntantcatgggctcntgaaatacctgctacattaccctangcaatatgggctttantccgaaatctccagggaaccantgnantnnnacnngaatatntantccattgnanntaaggttaanccnggttannggtaaggga

SEQ ID NO: 26649 - DNA, 510 bp, Homo sapiens
  misc_feature (1)...(510): n = a,t,c or g
ggggttgtgcctgcttagtggctggcacagggcaggtccacaatgagtggcagctttcatttgcaccattccagcattcaccaaatctgtctcccaccgcccagtgcaatctgtgcccttttgttatgacccatgtttatgcctccataaaaatgtttcttccatttgaagtccttatcctcgaatgcttggagccttggaggaagtctgcttgctctgggaagccgtcccttatcctccaggtgctattaattcccttctgcatttccacagtccctctgccaggtttgagctgtcacttcctttgttttgtgctcacttggtgatttagatgtccatcttccccctgtgggattgcagggaaagtacaatctnnnnnnnnnnnnnnnnnnnnnnnnnnnnnnnnncgggagantgngtancttgggnngngtgaaagttngggaananggaaagggccngcgnnngaangggggggccttggaaacaaggggatttttnngggccgaa

SEQ ID NO: 26650 - DNA, 531 bp, Homo sapiens
  misc_feature (1)...(531): n = a,t,c or g
ggagggagcttacatttgcaagatgggtacatgtgtgttttctcaaggagtcatctctccctgctccacctccttccctgctccaaacctgtatattccttccacccatggtggaatgacttggcccaggcctgactttgatggctggggagttgggtaaagggctattgcaggcacaagatggcttcccaagtggcaagatgtgatccctttctattgtctacatgtgtgtctggggtaacagtctgctttggcagaagctggggctgtcaactacctgatttgcagcacagaggatgtagaagtggccccagaacctggaacccaagccagcttctacctctcccttagcaactgaggcatgacctgtatacccctggtccagctgctgtagtcctctgtgacctgtccttacaccccannactgcagtangattcagatccacgcanacatnaaggtcanaatcaattcctggggggtanaangcccnagganggggattngaaaggttttannannntncccgggtt

SEQ ID NO: 26651 - DNA, 523 bp, Homo sapiens
  misc_feature (1)...(523): n = a,t,c or g
ggttatgtagagcccgtcgagtgtcaataaaggggacttgctttggggatgtgtctgggccccaggaccacattcgaggagcatctttcccttcccaaggcaaggcatcttggctacatgtgttggaggatttgcagagccaggatttgggggatagaccaggctgctttcccgacccatgacacacctggactcttcccttccctttttctggctgacagtcttcctagaaagaggtcatttgtttggcccctccatggggctgtgtgaagtcagctgacgggcttctgcacattaagcggagaggtcaggagcacgttatattcattgtgatagtttgtgtgatagttctactatataatagacattatgctgtattttgttacttttaggaaatacatgatgaagtgttttggtacattttaggaaatggctttgagttgacatgtatgcattanaaatttccaattaaaagatgnnaaatatgcaagggccggggncaaanccgnnacccnntttttgg

SEQ ID NO: 26652 - DNA, 514 bp, Homo sapiens
  misc_feature (1)...(514): n = a,t,c or g
ggaatgaatgcttgctttcatgtatggaatattacatgtttgtgctcttgtcacatttgttttttttgtgttcagagtagggaaccattgttttagtttaaattctgtataacacttcacatgaacaaatagcatactctcccaactcaactatgctctacctatctttccagctcttgctcaaattcacatcccctttaagcttttcttggattncnancccngnatngaccttttncaaccnaattttnccnanccagtttctggctatacctcacatttgatattcaccatttctanattngcnaattatagtacttttangcnatttnctnanacttctttcnancngcaacacctaanccaangcttttcaangtcaattttattttttancattttaatattcaaatcaaattgctatgtgnccaatttttgtaagattctanaaggacnaanctttcnggngtgtcttcnancctcngngggtccaatanngtnaccannccaaaaa

SEQ ID NO: 26653 - DNA, 500 bp, Homo sapiens
  misc_feature (1)...(500): n = a,t,c or g
gaggatgaggaggaaggactggtgatcacctggtagcaccctttgtgccgccctcagactcatcgctgatctgcctccagtgggtcttgctatcggtggatgtgcttgaaaaactttgcagcaattcgaacctgagatattttttcttgagacgcactaagaacttgaacacacctgataagttatgggataaggatcaggagggctggcatcgccccacccagtgccctgcatactgcagttcctcattgcatacttactggcatgaattaatgaggattttgctgagagtggttgttgctctgccaccacattctgcaccacactgctttgcacttgttggtttttcgtgtcttttttccccccttagatttcagtgaacttgcatttcctctgggactaggcttgaaaatcagcacatgagataaattgcatataatcaacantatccttgancatcccttaaattactcatgccanntnnnttttttcaacnggtg

SEQ ID NO: 26654 - DNA, 510 bp, Homo sapiens
  misc_feature (1)...(510): n = a,t,c or g
gnnnnnnnnnnnnnnnnnnnnnnnnnnnnnnnnnnnnnnnnnnnnnnnnnnnnnnnnnnnnnnnnnnnnnnnnnnnnnnnnnnnnnnnnnnnnnnnnnnnnnnnnnnnnnnnnnnnnnnnnnnnnnnnnnnnnnnnagaattannnnnnnnnnnnnnnnnnnnnnnnnnnnnnnnnnnnnnnnnnnnnnnnnnnnnnnnnnnnnnnnnnnnnnnnnnnnnnnnnnnnnnnnnnnnnnnnnnnnnnnnnnnnnnnnnnnnngtnttctgttaagggtatgangggtgnacctttnnattcngncatcctnntctgttgcacctcncganctcattcctttcaaccggnnngncantaaaaacccctaaaccctaggccctaantccataacncaggtggtanggnagnatnccatttcaatgaaacngtttaacacttanaaggtcacccttggnttgggaacatanntnaaatcccnannannaannggtcaanttgggagggnntttct

SEQ ID NO: 26655 - DNA, 451 bp, Homo sapiens
  misc_feature (1)...(451): n = a,t,c or g
gcaaaagaagaggaagactccaggaggggtatagattgtgccgtcatagctttacaggtggttttaaagttaacaggggtttgtcatggtgattcactactcagtttatcagctcaaggattatacagctcttttccgggaactcacccaggagcaagcgagacactaccattgaatcagggaatgagaattaagaatggacaggaccaagacagaactcaagaaagccactggggaaaactcgagaagaaagggagtatactagtaggttagatctgtgaacctgaggacaagaagaccttgggaaatggaggcctcaggggatgtgcattcacatactattacgcttctcaaagagagaccaacatcatgcttttaacacatttgatgangttttttanttgtgtttttgtttgttttttgaaatgggagtctcactctgtngcccaag

SEQ ID NO: 26656 - DNA, 514 bp, Homo sapiens
  misc_feature (1)...(514): n = a,t,c or g
gnnnnnnnnnnnnnnnnnnnnnnnnnnnnnnnnnnnnnnnnnnnnnnnnntacacttaatgcaaaacactgtctctctaatttcttaggtaacctgccatctgcattcaaatttacctcacttactgatgagtttcttttggccatgaagaggtcttgtgtctcctgtggtttggaaccttgggagtctgggtgggaaagagtaggtgaaatcacccatccctgggcctggggggaattcccagaaatggtgctagccatcaggatgtataagtatgtgttcacgcatgccttcatatccttgagcaccagtantgatggaagtgcctgtgtgctgtcagctggggcgggtgcanggtgtcccctcgcttgccagttcgccttgttctgactggtccattggcccctttgccttangcaggaagggcagaaanagtgctctctgttaanaagggttggcccctgtgccncaancaaagcntgccatgnctttggnggttcccccaagnncgctg

SEQ ID NO: 26657 - DNA, 460 bp, Homo sapiens
  misc_feature (1)...(460): n = a,t,c or g
gagggaagcatagggtgctatgggggcacaagggacggcacccaggaagatagagggggcaggaagcttcccagggacagggaaggaggccagccttggctgagggagctgcatctgcagagacctggagggtgagggaggggccaaggccatagacagggagcaggcctttgagccctgcctggtaaggagccagcattttatcctgggcccctgatgacgtaaccgtggggtgacctgaacagtttttcctgcctgtggaatcctcctctttgcctaccccacaccccttctccagcactggtgcaggagttgcatagtagtggctcangagtcctgggatgaaaaaaatcatctgggggcacaataagggtcacaagtntngnccggttanggagcacctnacacgaatgggtgctcccaaacaagggtggttgnncataatttnnattnctttggg

SEQ ID NO: 26658 - DNA, 517 bp, Homo sapiens
  misc_feature (1)...(517): n = a,t,c or g
gaagccagcgtcctgagtgnnnnnnnnnnnnnnnnnnnnnnnnnnnnnnnnnnnnnnnnnnnnnnnnnnnnnnnnnnnnnnnnnnnnnnnnnnnnnnnnnnnnnnnnnnnnnnnnnnnnnnnnnnnnnnnnnnnnnnnnnnnnnnnnnnnnnnnnnnnnnnnnnnnnnnnnnnnnnnnnnnnnnnnnnnnnnnnnnnnnnnnnnnnnnnnnnnnnnnnnnnnnnnnnnnnnnnnnnnnnnnnnnnnnnnnnnnnnnnnnnnnnnnnnnnnnnnnnnnnantttccaaantaatggtcaaatccaagnaattttgaaaacacctaacantgtgngggaantntnaaanntgttnnactcacatttancngnctttgaccccattagtgtncaggacanntcngatntttnnagggccaanatctcgggacacnanttaatgtganaaantttcnctcgtgtncncnggngggtgttnaaangnaaaatctgggnncaaaaaancnccnccncggggtt

SEQ ID NO: 26659 - DNA, 503 bp, Homo sapiens
  misc_feature (1)...(503): n = a,t,c or g
gtgagcatatttcctttgtcatttgtcgtaacagggttttcatatgagcatatttcctttgtatcacccatgacatcatttgtaactcntttcttttcttccttcagagtgttttatccatgcanaaagtctgtgaagcgggtaanagacatgcttgggatagccatatctggnaccanctgaatgttnnagggatgtttctgtctctgactgctatgggcagaacccctgngctctccagctctganntttaagttgcccaaccanggtcccctccggatgcatanggtngctccaaacccaaggcctgngcacatagcccgggatntcnaacntcnnnggnacngtggctncaggatcttaaccngaaagcttnnggggagtcctaaacttgtccagggtagctccaccttntnccgggnanggnccnnggttgaagacttanttcangggngccccccnnttcccnngnggnncngnnttngggccngcctgnngnttct

SEQ ID NO: 26660 - DNA, 508 bp, Homo sapiens
  misc_feature (1)...(508): n = a,t,c or g
ggcaaaactttcatagtgatggtgctaatttgggtgttaccacagtggttggtgggctttaatagccaagagaacactatgcctttattttctgctgaattcagtttattttgaatggtgtgatgggcatcagggccacactattccttgatcttagaagaactgttagagcatcttcctccagattcttagatgactcacatagagccttcctgctaaaggattcaggcttttgggtgtggcatcttctgaggggcaggtctggttatggagttcttactgacactatcacgtttgactctagctcaagtgttctgactagacctgcctgggcttaccgttactccacagacagtttggagcccnnnnnnnnnnnnnnnnnnnnnnnnnnnnnnnnnnnnnnnnnnnnnnnnnnactttttttttttttgnccccgagatcangccacggnactccagctggggnanaanntgnntcnccaccccaaaannaaaanggggggngggg

SEQ ID NO: 26661 - DNA, 493 bp, Homo sapiens
  misc_feature (1)...(493): n = a,t,c or g
gtgaataaacatgtggtcttcttctattccctattttcctctctgatctgattagggaggcagccgaaattgctggaagatggcagctcttcctttcttctgtgaaaggtgaaactcttagaaagagatatctccaagtgttcctgatggatggaaataagagcctttgagatgcagaggggagtaagaggagggagattccaggaacctggaaagcggttaccatggaaacaatgtactagggatgtggtggtaccatggaggagatggcaccatagtaattccactgaggatggatctaggaatatggactcccagccttgccacagagcatgggaccctaaaggtatcagaaccactggcctgagatccaactgggaaatggcaaccttacntgtancattggggctangggntanaccccaggggcnccttgagcttaatcttaaaaaccttngnccttggaaaaccntgggcaagntaagggnatttt

SEQ ID NO: 26662 - DNA, 552 bp, Homo sapiens
  misc_feature (1)...(552): n = a,t,c or g
nnnnnnnnnnnnnnnnnnnnnnnnnnnnnnnnnnnnnnnnnnnnnnnnnnnnnnnnnnnnnnnnnnnnnnnnnnnnnnnnnnnnnnnncagatcactttttaatatgaattagatactgtatctgatgacttcctctgctatttatatgtattttccagcctgggtgacagaagcaagacaccatctcaaaaaataatgatgagaatgatttgagacctttcttcttttctaagaaccttcccaactgcagatgtgaaacggtcattctccatccactcacctggtttcctgccacaggagatagaaggctagtctgtccgttagctcagactgtttttccacgaaggngctctgccaactcatggtgccctccttgcctaccangnnaaancnannttccnattnatattgctcagtcttcanggncttaaaangggttncaanacgtctccngggacacctgggcngttntcncccnaagncttttgngnatnnncaancttcctgngggttaaaaantgggttnnggtcccaaaagagtanaatttcaa

SEQ ID NO: 26663 - DNA, 544 bp, Homo sapiens
  misc_feature (1)...(544): n = a,t,c or g
gagaagacagactgttaccagaggacatattctgttctatgataccacttgtgtaaacgtgaaaagcaggcaggaattttccatgtgagagaagtcagaatagcagttagcttaccagggggtggtgatcttaaaggggcaggaaggagccttgtggtatgctggaaattttccattcatctggtgatgtgatcacttggccgtgtgcacgtgtaaaagttcaagctatatgcttaatatttgtgcacgtcggtgcgtgtaagcaatatctcaaaacatttgagagaatttcccattcattgacagaatttttctcccgcctcggtcaaagcacacagtgggttttcccaacaactgaggtgcctgacggttgggtgccaaagaggcagaaagggcgagatgaccgcttgacctaagttccctattcagctgaggcctccaaccctggnctgttccangcagttccgntctttaccaaaacctganctanaaagaacttcttanncatgtccgtgtnnnctaaatcagcctcagtctacaaggg

SEQ ID NO: 26664 - DNA, 535 bp, Homo sapiens
  misc_feature (1)...(535): n = a,t,c or g
gnnnnnnnnnnnnnnnnnnnnnnnnnnnnnnnnnnnnnnnnnnnnnnnnnnnnnnnnnnnnnnnnnnnnnnnnnnnnnnnnnnnnnnnnnnnnnnnnnnnnnnnnnnnnnnnnnnnnnnnnnnnnnnnnnnnnnnnnnnnnnnnnnnnnnnnnnnnnnnnnnnnnnnnnnnnnnnnnnnnnnnnnnnnnnnnnnnnnnnnnnnnnnnnnnnnnnnnnnnnnnnnnnnnnnnnnnnnnnnnnnnnnnnnnnnnnnnnnnnnnnnnnnnnnnnnnnnnnnnnnnnnnnnnnnnnnnttcttgtctcctgctctagnctgtactacaagagccactgccctgaaaacacctttgtttgcgaattcctcngcctctttctgtttccaagatcccaaacctcgccctttcttggttacnncctcnctttggtggnacatattcnccatacnttttcctagaatnncatgtggaagttttttnngtagnacaaggttcnacgttttggcaaagcggtcttanncctgancncagtggacca

SEQ ID NO: 26665 - DNA, 553 bp, Homo sapiens
  misc_feature (1)...(553): n = a,t,c or g
gaagcaatgaagagcgtttcgaagcatgccagcagaacccaatgctgcaaagaggcctgggaatgggattgctgagggcccttctcacagtgagcccctcaagagcagcgtcaggggattgtggggactgttggcacacagctggctttgctaggttgaagacaatgggaggtgtggaagaattgttgnctcatttaaagaagattggagggaaaggtaggattgagagtgtttcagacagaaaaaggattatatgctgagggtaaagcacaagttcanagggttgcagatagtgcaaaaatctttaaaaacacttattttaacccaacttccaaggagactgnatttcttctgccagtcngtaacaccatcaacctgggagttgccctggacccctccagtcntagntcctgcncctgtntcannataccanancctggttancttatangnaacanntgtttanttcctacagttcatgntctgcaagtccangatcnnngtgccnacatgggcgaattctggggangggcccccttcnggatgnantggt

SEQ ID NO: 26666 - DNA, 536 bp, Homo sapiens
  misc_feature (1)...(536): n = a,t,c or g
ggggagagccacatgcagaagactcaaactctaacccaggagaactgcagcatgggctgcccccaataaagtcatgggggtgggggcccctggtaccctgggggcccagctcctgctccagtgtgtccagaaggcaggatatcaagtcgaagattattctgaagccttagaagttaatgtttgccctgttgggttttgtattggttgggacctattatccctttcttcttttctatnnnnnnnnnnnnnnnnnnnnnnnnnnnnnnnnnnnnnnnnnnnnnnnnnnnnnnnnnnnnnnnngttggatttcacagactcacagctggaggggaatttgcctcaggatgaattgcacctttgagtcttacccatatctgattttgggaangagttaanacttgtnngactattggnangaantnatgtnntttcctgtnntatnnnatgnnttttnaagggcagggaaatngatgctntggtntgaatggtnccnccaannnttcatgttgaaaccnaatcnnnntngtggngtatta

SEQ ID NO: 26667 - DNA, 551 bp, Homo sapiens
  misc_feature (1)...(551): n = a,t,c or g
gacagcaacaacaaaaaaacannnnnnnnnnnnnnnnnnnnnnnnnnnnnnnnnnnnnnnnnnnnnnnnnnnnnnnnnnnnnnnnnnnnnnnnnnnnnnnnnnnnnnnnnnnnnnnnttttcattgtagannnnnnnnnnnnnnnnnnnnnnnnnnnnnnnnnnnnnnnnnnnnnnnnnnnnnnnnnnnnnnnnnnnnnnnnnnnnnnnnnnnnnnnnnnnnnnnnnnnntgannnnnnnnnnnnnnnnnnnnnnnnnnnnnnnnnnnnnnnnnnnnnnnnnnnnnnnnnnnnnnnnnnnnnnnnnnnnnnnnnnnnnnnnnnnnnnnnnnnnnnnnnnnnnnnnnnnnnnnnnnnnnnnnnnnnnnnnntgccaccatgctcacctgatttgtagaaatttttttgaagatattgggtctcaccatgtttgcccangacaccattccgggtcagacccnatccttaganctcntganctccgntgggattncangcntganggctttacgcccccgccaangctaattcgntgnggactgaagnagctgg

SEQ ID NO: 26668 - DNA, 548 bp, Homo sapiens
  misc_feature (1)...(548): n = a,t,c or g
gctgggtaaatgggagttcatcatagtaatacttgtgtattacaaatcttaatttttggccagnnnnnnnnnnnnnnnnnnnnnnnnnnnnnnnnnnnnnnnnnnnnnnnnnnnnnnnnnnnnnnnnnnnnnnnnnnnnnnnnnnnnnnnnnnnnnnnnnnnnnnnnnnnnnnnnnnnnnnnnnnnnnnnnnnnnnnnnnnnnnnnnnnnnnnnnnnnnnnnnnnnnnnnnnnnnnnnnnnnnnnnnnnnnnnnnnnnnnnnnnnnnnnnnnnnnnnnnnnnnnnnnnnnnnnnnnnnnnnnnnnnnnnnnnnnnnnnnnnnnnnnnnnnnnnnnnnnnnnnnnnnnnnnnnnnnncttttataaagtcttcccttaggatgctagagatctaggtaggnctttcnggcttcttttganaaaatatattaggaggccanatgcagtggcatacnccngttanctcagcatttcagaaggctgaggggggagnnccntttgtccgggagttcangacnaccccngagcagcatantgnnaatncgtccc

SEQ ID NO: 26669 - DNA, 537 bp, Homo sapiens
  misc_feature (1)...(537): n = a,t,c or g
gcgactctgggagtggggaaacagagagccggttcctctgctgcagaagtcctcggggttccttctcacaactctgcgaaggggaaagggttgtgagacccaaccagaccccaactccagctcccagcaggaggtggctgcgccacactcgggaggcctcttggtttcagggnnnnnnnnnnnnnnnnnnnnnnnnnnnnnnnnnnnnnnnnnnnnnnnnnnnnnnnnnnnnnnnnnnnnnnnnncactcccccaaacatgtccaccggctccctcagcgatgtggaggaccttcaagaggtggagatgttggnatgtgacgggttgngaatgggttcgnatcagggaatttgtgacttccancnanagcaccgannganagctccanctgcgagaatgggtctccccanaagggccgcngntgcctgggcaagangangaangggccnccaatnaanagccccctgagcggggttagcnngntgggaacagtctanggnacgccgnnanggctgcgntaancnggncctnntgcaa

SEQ ID NO: 26670 - DNA, 549 bp, Homo sapiens
  misc_feature (1)...(549): n = a,t,c or g
ggctcnnnnnnnnnnnnnnnnnnnnnnnnnnnnnnnnnnnnnnnnnnnnnnnnnnnnnnnnnnnnnnnnnnnnnnnnnnnnnnnnnnnnnnnnnnnnnnnnnnnnnnnnnnnnnnnnnnnnnnnnnnnnnnnnnnnnnnnnnnnnnnnnnnnnnnnnnnnnnnnnaaactgnnnnnnnnnnnnnnnnnnnnnnnnnnnnnnnnnnnnnnnnnnnnnnnnnnnnnnnnnnnnnnnnnnnnnnnnnnnnnnnnnnnnnnnnnnnnnnnnnnnnnnnnnnnnnnnnnnnnnnnnnnnnnnnnnnnnnnnnnnnnnnnnnnnnnnnnnnnnnnnnnnnnnnnnnnnnnnnnnnnnnnnnnnnnnnnnnnnnnnnnnnnnnnnnnnnnnnnnnnnnnnnnnnnnnnnnnnnnnnnnnnnnnnnnaatcacaaaaaggaaaaggaatcagtatattgaacgggtcacactcccatatttncgcaaccccatttactanncctaaggcttgtgtccatcaacagatgaatgggtaaagnatattgctnatcacaac

SEQ ID NO: 26671 - DNA, 532 bp, Homo sapiens
  misc_feature (1)...(532): n = a,t,c or g
gtgaaagaacacaaggttataatctgagaaaaggatgctattaatataatttcaaaggtacagtatttctgacatggcaagtccaaggtgtagccatggacaggtttgcttaagtggaatgaaggcactgctcattaggtttgatgacagaaatgggagactagggtgttgagcgggtctcctaatgagatttttttttttcattgaaatggtgncntgcacnccacccngggcgncagcactntnntccntcccatnnnaacatngnaaannccnngcccnnctaaaagnncttnactnngcccggtntgttnctccattnntnccaancnanatcccngncncgnnntnacngcngngaanttngancnnnacagggctcnngnanntngncaancggacnnanaagcangnttactgnggcccacancnccgatttttncgcancngnanatttntccccnntncttttnnnnccngnnacaccncgttnngccncnnnttnncncnnngnnttgtnnnnaacnaggtg

SEQ ID NO: 26672 - DNA, 548 bp, Homo sapiens
  misc_feature (1)...(548): n = a,t,c or g
gnnnnnnnnnnnnnnnnnnnnnnnnnnnnnnnnnnnnnnnnnnnnnnnnnnnnnnnnnnnnnnnnnnnnnnnnnnnnnnnnnnnnnnnnnnnnnnnnnnnnnnnnnnnnnnnnngtgctttgttttgtatctgtattttgaggcagtggttctcaacccaggccatatggtaaaatgacctagatttctcaatttcacatgaaattagatattttttgcttcagtttcaaccataataaatcacagattcnataattgcaaaaactgcagttgttttgcatcaacccagtaatttccaagttaggaggcagaataaaattttggatggctggacttcctatgtaacagtttttcagctttatgttatttgcctcttatagtttttgctgtttgtttgctttacctcnttttannttattttanatnnnnnnnnnnnnnnnnnnnnnnnnnnnnnnnnnnnnngtatagncntttttttttngagacaccatcntgttntgtttcncaagntggngtgnannggtgtgaccccagcncatgaaactttg

SEQ ID NO: 26673 - DNA, 553 bp, Homo sapiens
  misc_feature (1)...(553): n = a,t,c or g
gaaacaacctcaagttgactgttatatgtggtgccagtctcctaaaactgaccctccagatgtaatgagcaaagagcttattcttatcacttttatgacctgaatgctgaagtgccaggttttgaccagggcaggaggtatgaattgaatatcccttatccgaaatgcttgggatttcggaggaaaaaacactttcagaagtgtttttcaattttggattnnnnnnnnnnnnnnnnnnnnnnnnnnnnnnnnnnnnnnnnnnnnnnnnnnnnnnnnnnnnnnnnnnnnnnnnnnnnnnnnnnnctcattcgcttgagggtcatatcagcgttcaaaaagtttcagctgttagggatgcttggcccttacagganaggaggagcatctttggctcccgatgagcacttttctccacgtgctttccgtctcctggntctgaagcaaagcaagaagcntagctgaaaagggtgggnnannaaaanttgggnggaanntcctntnngggnngaanaaagggnnncnnccccnnnnnnngcnnnntngnngnnggggg

SEQ ID NO: 26674 - DNA, 559 bp, Homo sapiens
  misc_feature (1)...(559): n = a,t,c or g
gcaggctggttccccagaagcatcccagagatgcagatttgtgagaaagtgatgtgttgggcagtgtccccagcagggaagtgaggatgcaagacagtgagaaggaagccaagcaagagtgcaatgtcaagcaaggtcccgtgcttgcagggcactggctcctcccacagaggagatttggagactgagagcccctccctccattggtcaagggccatctcagagggatgcatgtttctaggtatcccccactctctctgcacacaggtaaaggagactccagaagcatgagggcagccctctcacaaagaagcatgggttctggataccgagagtaaaagcaaacgtggagccaaggggtgtgaaaatgggaaaaggacccaaggaaatanagtatgcatccaccatgagtaagtgccacagtcactgggtcagcaactgctgtgtccaacaacaagctaagtntcctnggnaagggnnaaanttcnnnnntcccngngggnnnnccntnntnggnnnnggnnccnccccnnnnanncnnannggggggntttggggg

SEQ ID NO: 26675 - DNA, 560 bp, Homo sapiens
  misc_feature (1)...(560): n = a,t,c or g
gttacattctgtgactgcagtagagaccacatctgacatttaagtaccgtanaaggagaaatgatatcnnnnnnnnnnnnnnnnnnnnnnnnnnnnnnnnnnnnnnnnnnnnnnnnnnnnnntcattttttgagcaggaaaataaagtgacaagagattaanatgctgcattatttggaggaaatanaacccacaaatttgaaggccactttcanaaatctaggtttgaggtaaataagtgccttgctganagtgtaagcagtataaaagtgaacaaagagggttaatcaaagaaaaganacaatgtttaatggtgaaaaangaannanatatttcacaantganagagttgnnaaaccacgaagcaccacnaaaagtgatcactttgacaaagantanatttgganatagataataggctgacttgcaatacaatgaacttnngtttcncanatggcaggatccgngtatgnngnanttggcagccncannggnaagcnnnngngnctnccnnnggggngnncannaangncccgnaagnaccccccggggggngtggg

SEQ ID NO: 26676 - DNA, 468 bp, Homo sapiens
  misc_feature (1)...(468): n = a,t,c or g
gattttatcnaaaagggaactggtttcccatttccctctgggattctgtacagaaattgaatgttggcccttgggtctcttttttttttttgaaacggntncaacccggggnggaaaancnaggctncaaaaanaaggactttgnccnaaaanaaaaaacaaaaacaaaaccnaggngtgaaaacnnangctnccaaaanggntgaggttgggggancttgaggctnaantgacctncnattgcccaanngtntncaaaccnggatnacngaacnaaatncaacccctncaggnaaaaaaaaaatttgtaanaananttannaanaaaaanggnnaaaaanctgnggacccntaacggtnatcccnanccnaaangcnagtancccccngccngttgatggagggaaacaatccnnaaatttngggcncgggantngnctnaggnnnnggnnannccnnnngcngggg

SEQ ID NO: 26677 - DNA, 548 bp, Homo sapiens
  misc_feature (1)...(548): n = a,t,c or g
gtaaaaatatctgttctcagactgtaaattaagtattagattcaagaagagaaaatgcttccctgtctttaagaagcttataacccaacatgtaaataagtctctacaatttcagcatgataagagctgtaaagaagtatagatttaggtacgtttgaagagttgcaagaaaaagaaagaagtanagatagaatttaaccactgatgaggaaaaatcattctgcgtgtggtagggaggacgattagagagaagatattaaatttggctttganggatgaataggagtttgctgaaattgggtcaggaaacaggagatatgaatgaaaaccagggataagtgngcaagtatagnggtatgtttgaggaatgtgttgtagnccattgtactgaaggccanggtgtgtaaaaannggnggntggctaaaggagatggggccnggannnanatggnaantaagttgnnangnttcctggnggnnggnttnggggcacnaaanttgccngggngggggggggtccnnnccccccnntnggggagaagnacggg

SEQ ID NO: 26678 - DNA, 547 bp, Homo sapiens
  misc_feature (1)...(547): n = a,t,c or g
ggttaattgccttttctcattcaggttgcgattttcctggttcttggcctgacaagtagtttttcgtgttttcctagacctttggatgttataggacactggatcctatgaaatctttcattttaccaagtagccgttatttaagtttagtatgcagcttctggcctactcttgtgggctgtggtttcagtaacaatttaanatttagcaaggttattctggtctacttcattcatgggctatcaggaggccactcaggaaacctgagtggaattccacactgtgtaatttacttctcaaacctttgggtgtgttaatgctcatctgtttcacatgtanattggtcagagcctgccaggacttcctatacagctttaaagcgtggntttccagcttcctcctcttcagatcttccctgaaatcccaatttggantntntagggaacccatcaatgctgggnaaggcatggnaaatccgggntcnccaacaatccccnccgnnaaaaancnntcnnnnnanggggggaangtccccnaaancnncccc

SEQ ID NO: 26679 - DNA, 510 bp, Homo sapiens
  misc_feature (1)...(510): n = a,t,c or g
gtcttttttgaattgatttttgtgtgttgtgtgaggtangggtccaactttantttttcctcanggagtttcctaagcaatgggtgcttaccaaggcagtactgtgggcggggtggnagcggagactctgnacganagtggtctanctccnctcgctccgacccancngnnngaacgaacntcantcncncagcancccacgatatncacncgtanangtngntnnnnaccaccancaacaantgnaangatgnccactttgcgtcaagnanaacctntaaggangncannacnanctttctnaatnaagtgcgacnacnnnnancanaaannccanggngcnccgaaggnacncgcaactcngngctacaaccncncttcnacgnnaacnctcccatggtcncnccggnttnncnntcgngncnanggngccngttnncacggggnnagnnccnncagggttcnnccncanccnannancgccnaangnggcccccccgggggggccca

SEQ ID NO: 26680 - DNA, 548 bp, Homo sapiens
  misc_feature (1)...(548): n = a,t,c or g
gtaatgcagtcgttctttaaatgaaactgacaccaaggaccacatggccaaaggaagcccacgttcctgtgtgtggttctgaggagggagcataggatgcagtttgataacagctgagagccctgaggagtttgttgctggatgtggagtattccatgtctcgtccctcccccagtctttttccagttgtgtcacaactccctttgctaanaatattttgcacagcattttacgtctanaaagcaccatttccatgatgtcgctcacccttcgacaccaccctgtgctgggggcatcancatcattctgagttaccaacaggaggggtatcagacagtccaaggggcaaggcagggactcccagctccaggctccagcctctcctcccctccaacctctcctggtcctgtcctgaaatctttggctcccttgaaacttgttatgcccgggcaaatgccaacctcntggcaatngtntcccaacaactccaaanantgtcccccacccgnatnggggnnnaaaaatnttnnnccanccncccnaaaaaa

SEQ ID NO: 26681 - DNA, 378 bp, Homo sapiens
  misc_feature (1)...(378): n = a,t,c or g
gaatcaccccccagccacctcggggaactccagaccaagggtgagggcgcctttccctcaggactgggtgtgaccagaggaaaaggaagtgcccaacatctcccagcctccccaggtgcccccctcaccttgatgggtgcgttcccgcagaccaaagagagtgtgactcccttgccagctccagagtgggggggcgtcccagggggcaagaaggggtgtcagggcccagtgacaaaatcattggggtttgtagtcccaacttgctgctgtcaccaccaaactcaatcatttttttcccttgtaaatgcccctcccccagctgctgccttcatattgaaggtttttgagttttgtttttggtcntaaaaaaaaaaaaaa

SEQ ID NO: 26682 - DNA, 508 bp, Homo sapiens
  misc_feature (1)...(508): n = a,t,c or g
ggctgctcctagctttattaggttcttattcttgtaaaattaaaatagccatatcatctgcaatatggttgaaaaatcattaaagtgaagtattgaaaagcaggttatttgccactgttgttttgccatcaccctcctcccccagtggtatatctcactccagaccccaggtgaccttatattcttttcttctctacccccatcaaggcctgatctgcattaatgtaacagtgttactaccatgtagtctggtgtctgatcaggcaacactagaaacttttgtcaggctggtgttanttgggtttanaatgaatgttttaagacaaaaagtttagggaaaggatgcacagacagatggngagttgttcatganaactgtgtacntccaaggnttggaaaatnnnnnnnagagattcangantnnngagacatnngcaanaatttanagtgngggnttggtcctggangngngncctgngtncanccccgggnccnnnnnnngnngttc

SEQ ID NO: 26683 - DNA, 547 bp, Homo sapiens
  misc_feature (1)...(547): n = a,t,c or g
gtcaaactgttaggttttagcagttaaatcaggatgtatagaacagtttactccatgtcgattaatgctagtgcttttggtcaatgcacaggctctgtgactgatgatgtgttttttttgcagacaccagttggcgctccgaggcaacctttcagttcactgtggagcgcttcagcagactgagtgagtcggtccttagccctccgtgttttgtgcgaaatctgccatggaagattatggtgatgccacgcttttatccagacagaccacaccaaaaaagcgtaggattctttctccagtgcaatgctgaatctgattccacgtaagacagtttaaatgatgcaactacaaacccccacatcgttgtatttcattactggaagccaaatttgatcaaccnagtgcaantttacctaagttaattgcggcctctanaaancctttgatttaaattanattaatacgtgttcccttaaaanccactgggaatgttaatancaancnanaaaagtanattttaacctggtagnggaaaactaaaatagtt

SEQ ID NO: 26684 - DNA, 552 bp, Homo sapiens
  misc_feature (1)...(552): n = a,t,c or g
ggggccttggttatcttctcaggtttatctcctcccctgccacattcactgtgtgccagccatacgaatctacatgaggttggagcacactgcttcctcatgtttgggctctgcatgctgctccctctgctggtaacaccctttcctcacttgtcaacctggaaaattcctgctgatttttcagctcttgggcccaatgcttcctctttggtgtgaaaccttccacaacttctctaggcagacttaggcactctgtctatattctcagtgcactctttacactacaccttggtagttgcatggctaggattgcaggagtcctttctgcttttgtacagtgaacttcctgaagtgaaagacagagtcttgttatcctcagtgcctctcacaatgcctggatatactagttattcagtgactgtttcctggatgaatgaatgaatgaataaataatgaagaaatgaatgaagaattacgtatgggtggttgcaagnnggaacagtgtggaanatgtttgtcaacaaggatanngtgcagtaangggcacagggt

SEQ ID NO: 26685 - DNA, 550 bp, Homo sapiens
  misc_feature (1)...(550): n = a,t,c or g
gtacagaacacataacaagaaaaagaaagaggaaagtgggtcagaagcagtagggctagaatcttgcagttaatatcaaaaggcaaatggcctcagacactgtgacagaggtctgaaaccagcagcatgaactctaagggggtaattgaaaggtcgtgtagtctctgtaccactaaatcctagaggtacacagtcttttctactgacttcccttccatctgattctttgtacataaagctgtatccaaaaggctcagaattcttgatttatgtgaaagcatgtggaagcaggtggggtactccattacctagtgagtcacatttgtattgttattaatacatgcaaagtctatgttttaagagtctaagagcctttttgaaagcctgttccttccttttacttctttcccaggtgtgggttcaatagggtagttttaaggccttacccaatcagncnnannanttgngctaatcaccaactgtcgngttacantncaattgccgttngctcagagcaacatncananggggcctgacatnacaattgttc

SEQ ID NO: 26686 - DNA, 542 bp, Homo sapiens
  misc_feature (1)...(542): n = a,t,c or g
ggattttagaaggcaggggtgtgcaaagtctcctaagacgtggttgataccatcattttggagagggcaacaaaaagaggtaatccctgccctttacaactggtccgtnnnnnnnnnnnnnnnnnnnnnnnnnnnnnnnnnnnnnnnnnnnnnnnnnnnnnnnnnnnnnnnnnnnnnnnnnnnnnnnnnnnnnnnnnnnnnnnnnnnnnnnnnnnnnnnnnnntnnnnnnnnnnnnnnnnnnnnnnnnnnnnnnnnnnnnnnnnnnnnnnnnnnnnnnnnnnnncannnnnnnnnnnnnnnnnnnnnnnnnnnnnnnnnnnnnnnnnnnnnnnnnnnnnnnnannnnnnnnnnnnnnnnnnnnnnnnnnnnnnnnnnnnnnnnnnnnnnnnnnnnnnnnntcctgctttacaatatttgtaagttatcttcagatgaaaatatttgttctctaatgttttaagcaggaaaantgttccatagntgctgtgaagcactcatctanaagctgattanggctccgntgtggctcacgggacctcc

SEQ ID NO: 26687 - DNA, 532 bp, Homo sapiens
  misc_feature (1)...(532): n = a,t,c or g
gtagacgctttgtgaattatggtgagttttttttcttggaccagtactcatcaacgttgttatgtccatttgtccctaatgtcacctcctggattttgttcctctcaccatgctaaaagttgattcccattttcctgctcagaaatgttgggggcannnnnnnnnnnnnnnnnnnnnnnnnnnnnnnnnnnnnnnnnnnnnnnnnnnnnnnnnnnnnnnnnnnnnnnnnnnnnnnnnnnnnnnnnnnnnnnnnnnnnnnnnnnnnnnnnnnnnnnnnnnnnnnnnnnnnnnnnnnnnnnnnnnnnnnnnnnnnnnnnnnnnnnnnnnnnnnnnnnnnnnnnnnnnnnnnnnnnnnnnnnnnnnnnnnnnnnnnnnnnnnnnnnnnnnnnnnnnnnnnnnnnnnnnnnnnnnnnnnnnnnnnnnnnnnnnnccttgtctccaaaataaacatgggggctggcantggctgggcanggtggnncccanctgtgncccagnanttggganggtgatgcaagngantgcntgggtc

SEQ ID NO: 26688 - DNA, 545 bp, Homo sapiens
  misc_feature (1)...(545): n = a,t,c or g
gtttccttttatgaacaagtccaatgggggtgggaggtgcacctatagaatactttgtatggtgcaagctctgtgttaattgttggaaatattaaaaatatttaccaagtgtgacttccttctggaagacgtgggaatatagaagagaatttgtagagactactccaggcctagaagactagttgaggtaggagtgggacctctacagacctattccgcattccacgccaaccacatttatttcagatttagttgattttaacaaattactcatttaaatgcagatactccatgggaaaattaattcacattctggtgggcactctggactgccagaaggtaatatgaagaccccggagttaaggctggggaacgggagggggagctgctcctgtctggggctttacctagaattctagtgcaatagaacccaagtcatatcccagattctagctacncatacgactctcacccatgttgccaaagtcnantnaagatttaccgccattttgganacanantcagctgtcancatccagccagca

SEQ ID NO: 26689 - DNA, 468 bp, Homo sapiens
  misc_feature (1)...(468): n = a,t,c or g
ggagcttactccatctaactcgttttcaagtgcatgattttcactttcacttttcctttttccttattattttgcttaacttgtacagtggcaactgaaatgcatttcagaaataggaggtttcgtccagcaccctctgcagccttggtgcctgtagctctggacttccctgggcctttccctgtgggagggccctgtagaccacatcagggtggggtgggggtcacttggcaaaaagggccgaggtctggtgatgtggttcccaggatctggaacctctcccacccctcctgcagttggactgaattcttccctttcatccgaagaaacccacttgctgtttccagccgctgaatctgctgagtgtgcagcctgcatcacctgctgtatgccgatcatctcagaaagggctgtgtagagtagggcctgttctccttaagatgttgctcctgantttttttttttttt

SEQ ID NO: 26690 - DNA, 540 bp, Homo sapiens
  misc_feature (1)...(540): n = a,t,c or g
nnnnnnnnnnnnnnnnnnnnnnnnnnnnnnnnnnnnnnnnnnnnnnnnnnnnnnnnnnnnnnnnnnnnnnnnnnnnnnnnnnnnnnnnnnnnnnnnnnnnnnnnnnnnnnnnnnnnnnnnnnnnnnnnnnnnnnnnnnnnnnnnnnnnnnnnnnnnnnnnnnnnnnnnnnnnnnnnnnnnnnnnnnnnnnnnnnnnnnnnnnnnnnnnnnnnnnnnnnnnnnnnnnnnnnnnnnnnnnnnnnnnnnnnnnnnnnnnnnnnnnnnnnnnnnnnnnnnnnnnnnnnnnnnnnnnnnnnnnnnnnnnnnnnnnnnnnnnnnnnnnnnnnnnnnnnnnnnnnnnnnnnnnnnnnnnnnnnnnnnnnnnnnnnnnnnnnnnnnnnnnnnnnnnnnnnnnnnnnnnnnnnnnnnnnnnnnnnnnnnnnnnnacctccggttncccaacatgacaatganctgggaantcngaggctanttgnaaaagactgctgggtcangtanttctgcaanaaggcacttgacattgnngntgcaantttaaat

SEQ ID NO: 26691 - DNA, 537 bp, Homo sapiens
  misc_feature (1)...(537): n = a,t,c or g
gcagaagggagagcttctccagtagcagccccagtattcctaagttacagtgagccagagggttctgcaggcccctctccagaggttgaagaaggccacgaagctgtagagggagatttgggtgggatgtgtgaagaaagaaaagtaggaaanaactcatctcatttcctacagccaaatcttcgaggtcccctgttcttatgtgaagactcagagctggagtctccgctgtctgaactgggcaaagaaaccatcatgctcatgactccaggcagctttctctctgacaggattcaggatgccctgtgtgccctagagagttcccaggctctggaacccaaagatggtgaggcatctgaaagagcanangctgangagggtccagggacaganncagngacaggcctgccggtctcanacngaattcctgnccanngatcatantgnnncannanncanggngtnacannggnnatgttgcggcncngtnaanctttcctggnngggncnnnnnannctgncctcacggngtntctt

SEQ ID NO: 26692 - DNA, 548 bp, Homo sapiens
  misc_feature (1)...(548): n = a,t,c or g
gagacagttcccaggaaaatggaccctagaaaataatgaagtggtgaatcatttcaaggcttgttgctctgaggtaatttgtatcatttttttcttcatccccaagatcaacgttggctgttcgactgatagctcatccgcggatccagtgagactggaattttcaagggacttcggggcgacctggcaccttctgctgcccctctgctaccacagcagcagccacgtcagctctttatgctccaccgagcaccaccccagcagcacctactacgcaggaaccatgcagggctggaggagggaggtcgtgcactttgggaagctgcacctttgtgggtaaggaccgctgnttgacgccacatttggttcgcctttgagagtttattcctgaantcatcgntcacttgncactttancatgaggnaattttcacctgacgtttctccacngttctcnagcacgtcagtggananntacatgtnggccacgtnctganatgnntncanantcngatnggaggggnnttnncaggagacatgggcnggacg

SEQ ID NO: 26693 - DNA, 535 bp, Homo sapiens
  misc_feature (1)...(535): n = a,t,c or g
nnnnnnnnnnnnnnnnnnnnnnnnnnnnnnnnnnnnnnnnnnnnnnnnnnnnnnnnnnnnnnnnnnnnnnnnnnnnnnnnnnnnnnnnnnnnnnnnnnnnnnnnnnnnnnnnnnnnnnnnnnnnnnnnnnnnnnnnnnnnnnnnnnnnnnnnnnnnnnnnnnnnnnnnnnnnncatataacccatgtggtacaggaaagggtggccccttgcactctgaaaacctgtaactggagtatccaactagtctgagaggtctgggggagccatcttgaggaaggggcacttgggctaggatctgaaggatggacaggaggtaagtagacggagggtgggaaggtcccagacctaggacatttgaggggctgaaagaggacctgtggctggactggctacccagatgtctgggtaggtgaaggagtggngntnnngaggggttnggnncangcncancccgnncangggcatanggnnngntggcnnggcgnggcntcgngccngcnatcnncnangccctccangggggggnncccccg

SEQ ID NO: 26694 - DNA, 517 bp, Homo sapiens
  misc_feature (1)...(517): n = a,t,c or g
ggaggggtttggcttgatgaggtatcaccaanttcggggggtgcagaccaaantcgccnangtctatgcagcggttggtgtttgggatcaatttctaacgtggatggggagaccatgtggatcacncccctttaggtactggggtaaagcttggtctgtgtgaanaggtcagaggatggtggtgttttgtgtnaacaatcaagggtgaaacaaganccctggctctganattttagaacaananttnagtcnggcattttgcanagctctgaattgacatttancacatctatccttcatttcnatgtcctcctatgggcataaaagagtcctattttaanacctaaaccanagctgtnantgtcataangccacttcttgatgaaaattgtgacccacacctnantatcacttcaaaanttnnggatnggagggtttcccccantttattataaanatttccgtnggaaatncctnatnacccctttaaattttnctttacntaaaactcnccgtt

SEQ ID NO: 26695 - DNA, 519 bp, Homo sapiens
  misc_feature (1)...(519): n = a,t,c or g
gggaggaaaagaagtaaagccgataccataatcttcaacaaatgagtgctgatgacggaagattcacaggtagaaaagtaacaaaaagggatagctgttatgactagtgttatggcatgtgcttctagggtgaggattggggtaggagagattgtgtcagggtgtgtggtgacaaatgcaaaccatctttttgggggagctattggtggtagggtcatgtggtcaaagtagactgcactttgctgaagaacgactttaccttctggagaggtttgggcaggctgggggaagagagtaataggggcccattagataggtctgagtgggaagagagtttaatgagggaaaagagggatatgagatttgatgtggcagctggatangctctcagggaaaggtgagtaagcaaccaattgtcctgatagccttcatcctangctaatctcnctacacattgatggnggaacanacctnctgttcnctaggaanaaanttggtttaaagatncaccgctccggg

SEQ ID NO: 26696 - DNA, 516 bp, Homo sapiens
  misc_feature (1)...(516): n = a,t,c or g
gagttaaatcagcacggagttaacgtcttgctttctacccttcataagctctagtctctttgcttctacttgtgtctcttccagtctgttctccacacaggagcaagagagatcttcttaaattgaggatctttgctctacactttgatataaagtcccaagtccttaccatggcctcctaggaaggccctgcacggacctcgatcaaaaccagatttatttattctcatcanggtggggtgagattgaatacaagtgctcctcaaaggcacatcttaaagcatcttgacacctgccanctagtaatcacccccanngtgccnaatgtggtgtcttctactacntnggcattcaattagtatntgctcatttgggtatgacntgnggtctgnatgtggctcnatatccctttccantgcnataaattnttccncntcagatggnggnccgacngcctgaaaacnattggcntcnagantcccggattggnccaancntngttgancnagnctccaa

SEQ ID NO: 26697 - DNA, 506 bp, Homo sapiens
  misc_feature (1)...(506): n = a,t,c or g
nnnnnnnnnnnnnnnnnnnnnnnnnnnnnnnnnnnnnnnnnnnnnnnnnnnnnnnnnnnnnnnnnnnnnnnnnnnnnnnnnnnnnnnnnnnnnnnngggnnnnnnnnnnnnnnnnnnnnnnnnnnnnnnnnnnnnnnnnnnnnnnnnnnnnnnnnnnnnnnnnnnnnnnnnnnnnnnnnnnnnnnnnnnnnnnnnnnnnnnnnnnnnnnnnnnnnnnnnnnnnnnnnnnnnnnnnnnnnnnnnnnnnnnnnnnnnnnnnnnnnnnnnnnnnnnnnnnnctccatctcaanaaaaannncnaaaaganatcttttattaaccggnngctagnnttntccctttaantnggggntattttnnatnggaaggngccgnattttaaaaggcctggaangcgngaaaaatgggggttatgnncccntngtngcctcnatanntgggctagtggganntcaggtgtaaaattacacntttangtnggnagcctcagggcnnttgnntaaatg

SEQ ID NO: 26698 - DNA, 522 bp, Homo sapiens
  misc_feature (1)...(522): n = a,t,c or g
ggtgttctaacggttgcatgtgagttccaggaagaaaggctttaggtgttgttaaactgagttcacttattcagtaggttaagacccaccatttaaaatgaacagagtttaccaacagcacatccattttctttctgtctcactctccgagggttcaatgtgtgtccagcagggtcctttcaatgggacacacagccctgggggttcctgttctggtgcccctcacagtacttcccagagtacggatgtctcagtggctgttacctattcccgagggctgttcagangaaggagaagcctccagaggacatcacatctgagctgtcaagtttactaagcagagagagtanggcgtggtgactaagcaanggaacngcatttgcaanggcctgcangcctgcgangatgctggttaatggacccctggnccctaagtagttccccgttgtgggacataaggnggtgcaacatnacagcnncacaaggttganaagccnttaggcccactggnnggaaaatggc

SEQ ID NO: 26699 - DNA, 522 bp, Homo sapiens
  misc_feature (1)...(522): n = a,t,c or g
nnnnnnnnnnnnnnnnnnnnnnnnnnnnnnnnnnnnnnnnnnnnnnnnnnnnncacttgagccctggagtttgaattcagcctggacaaatggcaagaccctatctctaccaaaaaaaccccccaaaaaaacaaaaacaaaaacaaaccagaattgaggacnnnnnnnnnnnnnnnnnnnnnnnnnnnnnnnnnnnnnnnnnnnnnnnnnnnnnnnnnnnnnnnnnnnnnnnnnnnnnnnnnnnnnnnnnnnnnnnnnnnnnnnnnnnnnnnnnnnnnnnnnnnnnnnnnnnnnnnnnngtgaattgaggacattgggtgtaacatcggtagtcagttaaagaagatagtggttttacttggctctgatgaaccaacagatgttactgacactgatcanttattcaaagagccaatgctgagtttgaattgactgaaaaattactttcatgaaaagtcnatgaagcatccgnnaacgtgaatatttccaaaaatttgggaaaacctnatcnccctaanctgg

SEQ ID NO: 26700 - DNA, 501 bp, Homo sapiens
  misc_feature (1)...(501): n = a,t,c or g
gagattanagtaacacttgatgtgtttcctgttgactaaccgtttgtgtgatttctgtagtaattaaggtgtttggcttagttacctcaattggaactataaagaattgaattttaagtatatactatgtgtatgtctatatagtttttttttttttacttgtttgnaccccancgatgcttnaaanttgananacaanaccnccccaaacaccccaanataggagtttccaccatttttnanttttttaaaacngatntttgacccacnttngtttgncttgcattgtgtttgnccnggncttgggaaaaaaagaaactgtccgaaatgggcnggtttncacggaggcaagggtgaggtagggtaacctggcctccnatcngaatctgggccttttgttgccgaccaaatgggcttggaaaggaacctgcttgtcctgccaaactcaggacggccccngngggtgntccgtaacgnnncctaagggnantaaggnttaaa

SEQ ID NO: 26701 - DNA, 520 bp, Homo sapiens
  misc_feature (1)...(520): n = a,t,c or g
gtgtgtatgtataggtagttcatactctacatgtgtgtatgtgtataccttgacttcaggtctagggaaaaaagttccatcgtacactttttgctaaataaagaatgaatagagggctccttctcctcttgccttttcaaaatcccacaaaccctgaagtttgctttccctgcatttttctgggccggcatttgctgtttagagtctgattggacaaggccaggacctgggcttgagcagggcctttgttgcctacctccctggctgggaggccacancaccccacccanggtgagagagaaaaacaggaagcgttgctagaantgatggcagaggagggtttcttanggagtgtggantctgttcctcgaagctctgcagcaacaggcggnaactgccttctgngcanccntcttgcngattgtaacaaggctgtntgccccccttccctggnggcgccannancattgggtgtccccgaaccgggaacccttntaatggggatnaatcccncngtttg

SEQ ID NO: 26702 - DNA, 515 bp, Homo sapiens
  misc_feature (1)...(515): n = a,t,c or g
ggggggcacctcagaatttatcacaggcaaanacaggatgcagtccaaggctctcaggactctgaaacgcnctctgcagcctgtggtanaggatgtctctctgagctggcatttgcctcctggtctgtctgctanaatgctttccccanaacagactgtcatctttangggtcagagattantcagctatgcccagctgaccgggaggatgccagcagcanagacaacaggagaagtatgcctcaaatatacactccatggcantnacttttgaggataaggtgacatttcctctacaacccaagcctgatgtcaacctcaccattcaccgccttgctgccaagtccttgctccanaccacggacatgggcctcanggagactccancaagtgataaaanagatgcattgtaccttagccctgaatctgggtcaanaactccttcanagcttcaattgcaacaataaggngctcaacaancccgntnaagggccncggntcataaggactttcaa

SEQ ID NO: 26703 - DNA, 513 bp, Homo sapiens
  misc_feature (1)...(513): n = a,t,c or g
gggcgccgcaggggattgaggggttgactgagcgttgcgagccttagctttctcccgaacgccagcgctgaggacacgatgtcgcggctctcccgctcactgctttgggccgccacctgcctgggcgtgctctgcgtgctgtccgcggacaagaacacgacccagcacccgaacgtgacgactttancgcccatctccaacgtaacctcggcgccggtgacgtccctcccgctggtcaccactccggcaccagaaacctgtgaaggtcgaaacagctgcgtttcctgttttaatgttaagcgttgttaatactacctgcttttggatacaatgtaaagatganaactattgttcacataactcaacanttaatgattgtcaantggggaacacgacagacttctgttccgtttccacggcactccaatngcaacaancanttctcangtacaanaaataacactgtgacncaacctcanaaaccntgcgaaatcnacctttattcaaccattt

SEQ ID NO: 26704 - DNA, 509 bp, Homo sapiens
  misc_feature (1)...(509): n = a,t,c or g
gcggcacgnnnnnnnnnnnnnnnnnnnnnnnnnnnnnnnnnnnnnnnnnnnnnnnnnnnnnnnnnnnnnnnnnnnnnnnnnnnnnnnnnnnnnnnnnnnnnnnnnnnnnnnnnnnnnnnnnnnnnnnnnnnnntccaanaggtctacttctgggtatgtatccaaaagaactgaattcaggggtttgaacagatacttacatgccctgttcacagtagcatggttcactacagtcaagaggtggtagcaacccaaatgcccatggacagaggaatggatgagcacgatgtggtccatccacaccacaggacatcagtctggttccctgcccactgcccaccacccaccataccaccggagggggcctgatggagaangtggaanttcaaggggcccagctccctctgacagtgctgtgggcttccaatgggaaaattnctaaagaaaccaggaactgggcaagnacantggctcaaacctgtatcccaacattttggaaggtncgttgg

SEQ ID NO: 26705 - DNA, 497 bp, Homo sapiens
  misc_feature (1)...(497): n = a,t,c or g
gctcacgtgaagagagcattaggtgcccttagctttggagggagtggagctttggagcctggagacaggggaccaggaccagattacccagcctccctagattctgctgaactcatctttcagtaaagaggccagatgagctgagctccacttctctctggctccatgttcctgtgacttttgactcatctgaggttgactttgagaaggcaatcccttttaaatatattggaatccatgtagtatgaccctatccactgtggaatcttactccattttactttaaagagaatgtaaatggtttggctgcacatcactatgaaaatggctaagtaagcagaacgganaagctgccaggagagcanaggtggagantggaaggggccaagccggttctaaatcgtttctgcagctcctgtcctcaaatgtactcacttcatgggaancaaatcacatttactgngctccanctcttaaaacagggtnncttgnccctc

SEQ ID NO: 26706 - DNA, 560 bp, Homo sapiens
  misc_feature (1)...(560): n = a,t,c or g
gattgtaagtanaggacttttattaattggtttanaggttcactgctgctttgtcactttctcaatcaaattggccacttaagaaataaagagctggtagaattgcatcctcagatgattattgactgtgtgtgtgtgtgaaaacagacattccagtgccacccaaatatatatctgtaacgtgcccaagaaatcctanctgcgctcttgagagtgcatgccatggagactggtttagacaccgcgtggagcctagttgcctgttgtcacggcatcttgcactttaggagactaagaccgtcctggttcgtctgtgtgtggtgtgaccaatggtgtgcccagagcactactctcaaaatcactagtgttagcaagtcgtcccgggctggggagcgttcgccgtagtctttggaagctttggctttagatttaccangccccgcctccccgctgccagtgcctgctctcccgttcgcctctttcgttcgtgtgaacttcccggtaatacactctnaaatagtttccttaactaataancggcgcagctatcccttatgagg

SEQ ID NO: 26707 - DNA, 565 bp, Homo sapiens
  misc_feature (1)...(565): n = a,t,c or g
gcgagtatttttcaaagacggttatcagcctttgtagggcctctgaaggagcctgtgacttcctcgtacaattanaaaaataatgctctgcattagttatcttagaaaactgctgctggtcttaaattangttccctagaancanactctgagaccaggagtggggtgctgaaggattttgggggtgagctctcagganacacctgtaaggaaggaacaangcaagattgggcanaggagaagctgactggcaaatgtggttgcgtctganaccccagccacttctatggggagcgctggatggttcttcananctgtccccatttgnncaaggggctggacttttgtttgcctacatcagctaattcctggcanctggccaccccttctgggggtatcacnttgggtgacgctgtgtcntgcagctggctgangaccttccttgtgaaccatcaacagctggggatgggtgtattggcctaaaaaggactctgggtggagnatatanngtcnacatactgtccaaanntctancctttgngaaagancaangggtancncaaag

SEQ ID NO: 26708 - DNA, 564 bp, Homo sapiens
  misc_feature (1)...(564): n = a,t,c or g
ggattgaagaagctggtttattanaaccagcctgtcgcttttcaaagctgcttaaaaataagatactgacctcacccctagagatgattcagtgggcctgggtggggccaagaaatccgtggtgttttgtaagcactgctggcgatttctcatggcagtaaagaccacactgagactgcactgattttgattaaagtacataggcttggctgtttttacacagctaactaaatttggactcttaaaattgtgtttgtaatcacagtgtgttacacctttcccagctctcagcagttgtactgcatgatggagcagcgggcccctgggacctgttccctgtgctccctgcctctganagcccagcttgctctgaagttggactaaaccacttagatgctgggggtgcacagcctgctcctggaagcctgcattcaagtcaggttgcatccttctggtgctgacanaacccagtggtgaagcanagcacangaatgcttaaaaatgaacagtttatgcanaataagggcaggatcatgcanacanaactnatgcncnggtctgttt

SEQ ID NO: 26709 - DNA, 561 bp, Homo sapiens
  misc_feature (1)...(561): n = a,t,c or g
gagaaaatacttgttgatgctgttttgattgtacagatgctctgttcttanccccanaaaggtctcctgggtaccacnccaggaccanaggaaagtctttcgttcccaaagctcagggaaagggctacaggctgggtttttagctcactgggtctctgcggnattgccattgcccacgggcttggcgcangtgggcccccanctgaatggctgggtttgatggcanagccaccgtcttgctcttcagcccaagggaaaacatggctatggtagtttcttcnattttcagcacattacagaaaccaactttgtatggaggacatgaaagctcatttcataggccanaggaggcccgtgaaaganaacactgtgtgcaaacagcaggananaaagacccgaaggaaatttccatcncggctgangnctctcctggacntggtgctcacaggagcctgtgaanatanaatgtctccttcntccaggccttttcanaccccttctccanaagaaatccgaaaccagctcctgtnaagggtgctaccgcatcctcttgncttaatt

SEQ ID NO: 26710 - DNA, 596 bp, Homo sapiens
  misc_feature (1)...(596): n = a,t,c or g
gnnnnnnnnnnnnnnnnnnnnnnnnnnnnnnnnnnnnnnnnnnnnnnnnnnnnnnnnnnnnnnnnnnnnnnnggtttaannnnnnnnnnnnnnnnnnnnnnnnnnnnnnnnnnnnnnnnnnnnnnnnnnnnnnnnnnnnnnnnnnnnnnnnnnnnnnnnnnnnnnnnnnnnnnnnnnnnnnnnnnnnnnnnnnnnnnnnnnnnnnnnnnnnnnngtaatgaaatttttttatttccagtgatagaatggggtgagtgcagnnnnnnnnnnnnnnnnnnnnnnnnnnnnnnnnnnnnnnnnnnnnnnnnnnnnnnnnnnnnnnnnnnnnnnnngacnagcctgagcnncatggnatagccctgncncnacttaaaaaggagccatatgtggtgatgcacttgnggtccagctacgtggtggatgangnacagattgcttgacctggaggcggggngcagnnncatgattggtngnggactgnacccaggggcaganggnnncccatccnantngnnagnncaggggntnngcccggnnagcngtcnnnagngggggnnttgncngacnggncgttngactcgtngcgggaacaccgc

SEQ ID NO: 26711 - DNA, 167 bp, Homo sapiens
ggccaaaggagaaacaatcttggaaatttcatgttcatgcttaagaaagtaaaatggaaagcggggggagggtgaggggtcattctgatgatatagttttaggacctggatgtagccatacctgtagctgtcaactctgtgccatagtactgctttttttttttttt

SEQ ID NO: 26712 - DNA, 615 bp, Homo sapiens
  misc_feature (1)...(615): n = a,t,c or g
acgaggataaattaaggaaatctgacgaaccccatcagtagccattgcagcaacaggtaaactagaacgagtgtgaatttggaatgaggaaacccgatgttggccatcattctgtaatgtcatgtattatgtaatgtattatatattaatgtatgtattatgtaggcaagttccttgacctctctcactggtaacataagagtagtaatctttgtgctacttcactgggttattttaaagatcaagtgaggtaataatgtctgtaacaacattctgtaaaatgcaaaccgccacatgaatgtgaaagtttattactagggatttagccaaccacaagggaatgtgtgagcataagagctatcatattgcaagcctacagtttctgattttgtgctaggtgcttttccacattacctgattttatcctcacaacagccctgcataaaataagtatgtcgccagtgcggtggtcatgcctataatccagcacttgggagccgagtgggaaatcacttgagacaggagttgaacagctggcaantggtnacctnctcacnaaatcaaaaaattaaagcctgtggngatccgaanccacattggagcnngnaggaaagt

SEQ ID NO: 26713 - DNA, 609 bp, Homo sapiens
  misc_feature (1)...(609): n = a,t,c or g
gaaaatctgtgaggacacaaatggggtgttagcctgtgtcacagcaacacagcaaagaaagtgacatataatctttaaaagtgaagaaaatgatgaaaattagcaagaactgctctttgataagcagaagagcaggccagtacctctgctgacaacctgaaagtaccctgcctccaagctgagcaacgctcaggatcccagagaccggctgagttccatcttctatttacagcttatgaagaagatacctatacctgagctctcccttctcaggactaactaacccaagcaatcagactgggctcagaattaagcccatctgtgaattacagcagatccaaaaagtcataaagtcatggttttcagtcttgaagctatggatcaattttgcctagttcatggcccagaaccttccttcccagagcagtcctacagtgcaaaaccttcagtgaaagaagagaaacaaactcatcaagcatgtcgatgctctagcatcaaattcccaagatactggaatctatgaaacatgtaatacacagtttaacatctcaaaacacaagttgacaagctancatacantacanatttgttgcttattacggcncactt

SEQ ID NO: 26714 - DNA, 624 bp, Homo sapiens
  misc_feature (1)...(624): n = a,t,c or g
acgagaaaagggcagtggatgtagagctggcaaaaacaatgacattgagatgaagcgtgctcaggtcagagctctaacgaagccctctgctgcannnnnnnnnnnnnnnnnnnnnnnnnnnnnnnnnnnnnnnnnnnnnnggtgatgttatttggaagtgggcctttgggagggattacagcctgataagaggagacttganagcttgcttcttctctgtgccatttggggctacaataggatggtcgtctgtacaccagaagtcaggcccttggttgccagcagaatggaatttgccagcaccttgatcttagactcttcaccctgcagacctgaggaataaatgtgtgttgtcaagccacctgctccatgctaaattgttatagtagcccaagcagattaagatgcctctgtttggctgtcatggctgcataacagaccactccaaatccaatgatttttatcatctttcacaattctgtgggtcangaattgggaanggctcaccgggtggtctgccntgggtcnctttgtggtnnatggaaccggacacggggagnngncactggactgcnacanctctncaatagccnangcnccnagttgtcctgaggccattgggtc

SEQ ID NO: 26715 - DNA, 603 bp, Homo sapiens
  misc_feature (1)...(603): n = a,t,c or g
gtctggcctcccagttcctcactgcagggtgccctggcagtaggctgtgaggacagacacaccgtccatgtcagctctgctctccatgggcacacgaccaggagcaaattgtccaatgtcagcgagctccagaggtgcctcccatgaacagaaaggatgctgtcaggcctgtcgtgagtcccagggcactgagctgtgcagggactggcacagggctgggagctggtaggtcccanaaacaggagctgtgctgacacttccatgattggtcctgggctctgaccccactcacctctccccgatgcagagctgaggatgggggtggagtagagagagctcccctcccacttggggtctctttctgctgctcctggtttaaagctgctcagtcgtgcagccagtgtgctagctgtgctcctctgacgatgtccctggncatgcacaggctgtggctctgatcantcctgtaacccagtgatgatgtgctcgcactctccctggtgcaactgattgagtgnnggngcntctgccacancnatnctctgcncagcnactggccgggacatanctacttnntcgtngtnattngaantccccaatgag

SEQ ID NO: 26716 - DNA, 566 bp, Homo sapiens
  misc_feature (1)...(566): n = a,t,c or g
gcggattcaagtaccttttcctacacagcggtcagatagcatcagacctgcattgaacagtcctgtggaaaggccaagcagtgaccaggaagagggagaaacttctgctcagaccgagcgtgtgccactggacctcagtcctcgcctggaggagacgctggacttcggcgaggtggaagtggagcccagtgaggtggaagacttcgaggctcgtgggagccgcttctccaagtctgctgatgagagacagcgcatgctggtgcagcgtaaggacgaactcctccagcaagctcgcaaacgtttcttgaacaaaagttctgaagatgatgcggcctcagagagcttcctcncctcggaaggtgcgtcctctgaccccgtgaccctgcgtcgaaggatgctggtgccgccgcggaacggaggttcanaagcagcagacctcctagcgctcccttgcttcctcagctgctcctgcgcctgttgccnactgatggangaggctgtccaattctgcccgctcatggaaanccggcttgatgattgcccngttaaanatgtgtctaaatttt

SEQ ID NO: 26717 - DNA, 567 bp, Homo sapiens
  misc_feature (1)...(567): n = a,t,c or g
gaattaaagatctttttttttcacaaaaggctttaattgttgccatcattaatcactatctttgttctaacctgccctagccttgcttttactctactgttcctcccaaatcacacccaactcgccacatccataactatgacttcttaactaggaagtttgaatatgttgacaatactgaactcttccacaacacctgttgagagtttagtacagtatcacaaccatctgtttaccagccagctagcccaaatggcctactcaatgccttcattgatatggaaaattcttgcaagagcttggtttgtttcttttcagaaatgcaaatgaaaaatccctcccactgggcaaggtgtgtagcactcctgtaatgccagcactctgggaagctgaggtggagtacttcttgaggcctggagctggagactcctanagctgggctcacagcaaaaccttgcctctatttaaaaaacaaatcttggcangcgcggtggtcacgcctgtaatccagcatttggaagncaaggtgggcggtcactgagncangagtttngacancctgacaaa

SEQ ID NO: 26718 - DNA, 373 bp, Homo sapiens
  misc_feature (1)...(373): n = a,t,c or g
gaaacaaaattatatttcaaaggccagaacatgccacaaattcttgacactcattgaatattctgtgtagaatcaggcccgatgtaaacaacaggcacttggagtataaccgttcatctccaggaccctcaaaaatggcagggaccttctcagcctccgacataagcaaagccttgccccagtgtgggagaaggacagagagcatctcagggccaacccattccagatacaaccaggacgagcagaaaccatgcaggaagtggnagaggagagatgaancaagcacatagcggngcttgcccatcacgcctggggncgggcaggncaccngnnngnncnnnggnggnnnnnngnggggnnnngnnncangggg

SEQ ID NO: 26719 - DNA, 474 bp, Homo sapiens
  misc_feature (1)...(474): n = a,t,c or g
gcagtttaccattgccatggcaacacccggaagttgccgccccctttccatggcaacaccctgatggccgaaagttactacccttattccagaaatctctgcataatctgtcggtttgcatataattaacagtggctataaatgtgagtgcagccctgtcctgtcctcagctgctgccctgggcgcactgccttgcgggtcactgtggctgctcctgtgcttcancgggactagaanctgccgcccacgggcaacnggggagaaatctgggcaaanccatgagccctccgaggctganctccagtttaagggctcacctgccttgcatcgttccgagtcctgtactggactgcatcaagccgcntctcctcanggtgantacntntnggccncanggtnaaggggttttttnaagganccnnggncatngcngggnaaggatnttnngccngggntccgnanccnttccaactt

SEQ ID NO: 26720 - DNA, 499 bp, Homo sapiens
  misc_feature (1)...(499): n = a,t,c or g
ggttaaatgaaacagcatcaggactaaggctaagtgaaatcatacaggctctgagtgattttattaaggatgatatttatgacttaagtttggaacagtgcatcaagaagattcaagagtaaactccctggcctcatcataggtgagggcattgtctttttggcctgagctatttccttagcctcttaagtgaccactccgttctcagtctctcccaactccagcccaactttcgcatgaccaccgtgaccaccctctacgttaaggcctttatatcttgactattacttggagaaaaaatcccaaacttcttaataatagtaannnnnnnnnnnnnnnnnnnnnnnnnnnnnnnnnnnnnnnnnnnnnnnnnnnnnnnnnnnnnnnnnnnnnnnnnnnnnnnnnnttanaacaacccngggccaaaatgntgaaaccnatctctgctaaaaatacaaaaanttggctgggtttggtgacggatgcctgtaancccacc

SEQ ID NO: 26721 - DNA, 488 bp, Homo sapiens
  misc_feature (1)...(488): n = a,t,c or g
gatcttttcttgtgtgttgatttgttaattacctgcctcccgtgtctggaatgtcaattctgtgatgtctattcattgctgctgcatcccagcacctgggagagtggctggctctggcaggtgcttactgtttgttgaatggacagacagctagatggctcaattctgtttattaaagagtcctgcttgataaaagaaaagcaaaacaatgttctaatgaaaacaatggcaagtgagattccatggatgctttttaaaataattaactttagaacgcatccatgacatttattttggaggtttcactaaggaattagggctttaaggtggaccctaatgaggctgttttaatcttcgggagagactatggtttccttctcatgggaaccanctaagagtccccantttaaaaatttaagccnaaagnaagggtnaaggtnnggaanccccaanncatccacatcatacnggtangggtttattttcca

SEQ ID NO: 26722 - DNA, 497 bp, Homo sapiens
  misc_feature (1)...(497): n = a,t,c or g
gcacacacacacacacacccacagagaacaatttaanattaaaaggtgaggggctggganaaaactgagaaaggatggtcatctaggatttatcagccgctcccagcaatcatcgaanaagaaggcagataactggacaaaggaataggcactgaaaattcccanaagaggagattgggaanccggtaaacctaaggaaatgtgcttaatctcattaggaatcaggaaaatgcaaagtaaacaaagccccacccctaagagtagtagccatatgtaaaggagggaagtgggagcangaggagcctctccccctgggatggggaggagccggccatgttctgcggaagcanaagggggtgggtgtnctactgccatggcgcaaanacacatccaaaggccccgcangggggcccaanccttacccccagaccatttcnaggnttaggggctgaanaggncccactggagggctaccgccctgcattgggaagggttaa

SEQ ID NO: 26723 - DNA, 491 bp, Homo sapiens
  misc_feature (1)...(491): n = a,t,c or g
gagcaggtgtcagaggaggcataatattaatagcgccaccttctgttgggtcagtggagatgggtgaggaacagcacagagcagcagggatcatcacatgcagccaaacttggcctctgaagggggaaggtagtgggaataggtggtgagagaactcacatttttctcttgtcctggttttatatttcggagggaaaggattatttggccccattaagaattaagnnnnnnnnnnnnnnnnnnnnnnnnnnnnnnnnnnnnnnnnnnnnnnnnnnnnnnnnnnnnnnnnnnnnnnnnnnnnnnnnnnnnnnnnnnnnnnnnnnnnnnnnnnnnnnnnnnnnnnnnnnnnnnnnnnnnnnnnnnnnnnnnnnnnnnnnnnnnnnnnnnnnnnnnnnnnnnnnnnnnnnaggttaagncagnnaatccatttgacncnaggagncggaatttccggtaanccaanattgngccattgcacccaacccngggca

SEQ ID NO: 26724 - DNA, 493 bp, Homo sapiens
  misc_feature (1)...(493): n = a,t,c or g
gcagntacacaccataaccaggccantggttgtctgggaaatcttcaaaggccgttancactcaacaagggtcaatgncanctctccccactgtctcctcaccaggtgcattcatnccatccatccangcantcantcacccaccntgttgtccaacactacgtatattgcngcagaaacaatantaatatnctgcttgccttcaanaacctcccanagtggggagatagtcgggatncaggtgnngtaatcattgtnccccngctgctataggaccacncaagcagggcaactgatgnccacagtnntgaaantggtgacgagacnctggaaaacccctnncgaatttgncttnancnggtnancnnggcanggnngtncatgctgtgattccancnacctgggaagtttanggcaagnaannccattttaaccccaggaggcggaattttcggggnaccancatttttccattttggccggancnggggga

SEQ ID NO: 26725 - DNA, 489 bp, Homo sapiens
  misc_feature (1)...(489): n = a,t,c or g
gtgcatctttagcgtgctgtttggccacagggaatagaaacccaacaaatagtggcctaactcctagatgcctgtttctctcaagggaatggattcagaggagccacttcaaaagctagtgcagtgcttctgcagtttcattaatgcatcaagcccgttccatctttccacttaacagagcttctctttggtcctcatagtttcaagacggaagtgaaaggactgtgggagtcaggacctcacatggaataaaccaggaaggcaggaggtgaagatgagaatggaatgcatgaatttgaagttgaggaaggtacagtaggtattcataatgataaggtctactatggtatgattatggaggtgagtgangttggatggacaagacccttggngaagaaatccagaaatggggaaaccagntttaaaagnntcacctncaggtacattgaanctccaaatnttaaancanaattggaattttaaatgaat

SEQ ID NO: 26726 - DNA, 489 bp, Homo sapiens
  misc_feature (1)...(489): n = a,t,c or g
gaactggttcaagtatttgctgggtatgaaaaaaaagcaagaggaactacctagcttatttaaatttgtttatttaattcttgagaccgggtgtgggggaattgctctggtgccnnnnnnnnnnnnnnnnnnnnnnnnnnnnnnnnnnnnnnnnnnnnnnnnnnnnnnnnnnnnnnnnnnnnnnnnnnnnnnnnnnnnnnnnnnnnnnnnnnnnnnnnnnnnnnnnnnnnnnnnnnnnnnnnnnnnnnnnnnnnnnnnnnnnnnnnnnnnnnnnnnnnnnnnnnnnnnnnnnnnnnnnnnnnnnnnnnnnnngtanggattataggcacaagccacagtgcctggcctaaattaaaaatttagccatcttaaactangattggcanatgttccgttaacancatgtnaacaccatgtngcantgaattttcacggggaaaccacctcacaggcngatgaaaanactgcnctcattaggcttatctttca

SEQ ID NO: 26727 - DNA, 563 bp, Homo sapiens
  misc_feature (1)...(563): n = a,t,c or g
gggcgtggctatctccttccagcgaggcccgtctctagataaatgctcctctaccacagtgccagaggctgcttctccaagtagcttcctactggcctttaatttggtagcacccaagcattctagtctgaacccaaccatttcaggttgcaaaatgtctctttaatcgttgggagtatgtagaccagagtttaggagcacacaagattagaagccacactctaaaattgagcccttcatttccccttaggttttaaataggcatatgaccacttggtcatattatacctaaaagcatacacactcacagcctctggtaacatagaattgcaggcaacagggctcttgtgtgtcaggagacccctctactctaaaatagcaaaatccgcaacgagagcacttgactagtagcttttgcttacatcaagtcatagttgcttcagcctccaagcctgtttccttctacacaaacactaccaccgtcaccancaacatcctcatcatcaatacagtgagcaactgctacacatctggactgtcacagtacactaggaantnactat

SEQ ID NO: 26728 - DNA, 544 bp, Homo sapiens
  misc_feature (1)...(544): n = a,t,c or g
gcacnnnnnnnnnnnnnnnnnnnnnnnnnnnnnnnnnnnnnnnnnnnnnnnnnnnnnnnnnnnnnnnnnnnnnnnnnnnnnnnnnnnnnnnnnnnnnnnnnnnnnnnnnnnnnnnnnnnnnnnnnnnnnnnnnnnnnnnnnnnnnnnnnnnnnnnnnnnnnnnnnnnnnnnnnnatatcaccactcctagccatcactgaagtcttaaaggtcctctaggactgccantgggggtgttctttatcagagtcatgatttngataattccccatccctttttaaaaatggcatttnnnnnnnnnnnnnnnnnnnnnnnnnnnnnnnnnnnnnnnnnnnnnnnnnnnnnnnnnnnnnnnnnnnnnnnnnnnnnnnnnnnnnnnnnnnnnnnnnnnnnnnnnnnnnnnnnnnnnnnnnnnnnnnnnnnnnnnnnnnnnnnnnnnnnnnnnnnnntttnnccaactaattanaaggtnangcaggnaatcggttaacccgggaggngggcttaaatnnnccaggcanncaatgatccacctgggcaaaa

SEQ ID NO: 26729 - DNA, 528 bp, Homo sapiens
  misc_feature (1)...(528): n = a,t,c or g
ggatgggtgctatctccttcttcatcttcttcttcaccctccttgtcctggctcgccagaatgagtactactgccgcctggacttcctgtggaagaagaagctgaggcaggagagggagganacncacgngatggatncnnggactcgggggctcttgtcganagtgcgcgcngcacacgttncgccccnntncantggccggatccngggcgacgatgatctcngcancagtcctataantgcgtttgtgtcctctncncctcaatcccagtcttcaacgagttcnncnctgaagtcnaanatcaatcatnagggcntanagtntctgnngntgnaaatgagatanttgctgattttgatatgtgntccacaancccnaattnagtgtggtggttancacancttngtcancagtttcancatgtnnntaaagattanantcacnctggcnnngngtggnnnanntgcttnacncancttntnnncttgnagtacngngnnttncnnnnnnctgggggnatgnggat

SEQ ID NO: 26730 - DNA, 557 bp, Homo sapiens
  misc_feature (1)...(557): n = a,t,c or g
nnnnnnnnnnnnnnnnnnnnnnnnnnnnnnnnnnnnnnnnnnnnnnnnnnnnnnnnnnnnnnnnnnnnnnnnnnnnnnnnnnnnnnnnnnnnnnnnnnnnnnnnnnnnnnnnnnnnnnnnnnnnnnnnnnnnnnnnnnnnnnnnnnnnnnnnnnnnnnnnnnnnnnnnnnnnnnnnnnnnnnnnnnnnnnnnnnnnnnnnnnnnnnnnnnnnnnnnnnnnnnnnnnnnnnnnnnnnnnnnnnnnnnnncaggctgctttttaacatttttttatagagttagggtcttgannnnnnnnnnnnnnnnnnnnnnnnnnnnnnnnnnnnnnnnnnnnnnnnnnnnnnnnnnnnnnnnnnnnnnnnnnnnnnnnnnnnnnnnnnnnnnnnnaattcaattattaacttctcccagcttggtgatgaatttcaaccacgtagatgagagagttaaagtgaaacatggttaggaagggtaagagatgcctggnataaaattatgttctcctatcccangggantggngactaagggaggatgnncttnggctgnccnnccttg

SEQ ID NO: 26731 - DNA, 542 bp, Homo sapiens
  misc_feature (1)...(542): n = a,t,c or g
gagctcaatgaagtcattgtcacgcgctcccacgacgcccgcctggttctcctaaacatgcctggcccacccaggaacagtgagggcgacgagaactacatggagttcctcgaggtgctgaccgagggccttgagcgggtgctgttggtgcgcggtggtggccgtgaagtcatcaccatctactcctgagcccagtgtcatcttgtggcctggagtcgaggtcttggccaggacataacaagctgtggtctggggtaacagcctcttcccagcacccacctgccagccctgcttgcctggccctgtcctggacccagctttgctaggtctccttggaaaccaggcctgggcctcaaaatggagatggatcccangtcttgtgggaccctgggattttgggannttactatctagcacccagtangcctgtcctggccananaagactggtangggcgantggggtttgangnanccggccggccanccangngcgctattantcananttantgttgnttcacatcannannanggaaggta

SEQ ID NO: 26732 - DNA, 554 bp, Homo sapiens
  misc_feature (1)...(554): n = a,t,c or g
gctccaaagtccggtctctgacccttgactcatgggagccagaactagtgaagctcatgtgtgagctgggaaatgtcatcatcaaccagatctatgaggcccgcgtggaggccatggcagtgaagaaaccagggcccagctgctcccggcaggagaaggaggcctggattcacgctaaatacgtggagaagaagttcctgaccaagctgcctgagattcgagggcgaagaggtggccgggggcgcccaagggggcagcctcctgtgcccccaaagccttccatcaggccccggccagggagcttgagatccaagccagagcccccctctgaggacctgggaagcctgcaccctggggccctactgtttcgagcgtctgggcatcctccatctcttcccaccatggctgatgcccttgcccatggagctgatgtcaactgggtcaatgggggcaagataatgccacaccgctgatccaggcacagctgctaattctcttctggctgtgatttctctccaaacgggcgaacnnaacaagcggacagtcgggccggg

SEQ ID NO: 26733 - DNA, 552 bp, Homo sapiens
  misc_feature (1)...(552): n = a,t,c or g
ggactgcatagggctcgnnnnnnnnnnnnnnnnnnnnnnnnnnnnnnnnnnnnnnnnnnnnnnnnnnnnnnnnnnnnnnnnnnnnnnnnnnnnnnnnnnnnnnnnnnnnnnnnnnnnnnnnnnnnnnnnnnnnnnnnnnnnnnnnnnnnnnnnnnnnnnnnnnnnnnnnnnnnnnnnnnnnnnnnnnnnnnnnnnnnnnnnnnnnnnnnnnnnnnnnnnnnnnnnnnnnnnnnnnnnnnnnnnnnnnnnnnnnnnnnnnnnnnnnnnnnnnnnnnnnnnnnnnnnnnnnnnnnnnnnnnnnnnnnnnnnnnnnnnnnnnnnnnnnnnnnnnnnnnnnnnnnnnnnnnnnnnnnnnnnnnnnnnnnnnnnnnnnnnnnnnnnnnnnnnnnnnnnnnnnnnnnnnnnnnnnnnnnnnnnnnnnnnnnnnnnnnnnnnnnnnnnnnnnnnnnnnnnnnnnnnnnnnnggcggnngganaaattnnttanccanttgattanggtgcttactgttaactaantgttgtgggttaatccatggccnntanggcttac

SEQ ID NO: 26734 - DNA, 513 bp, Homo sapiens
  misc_feature (1)...(513): n = a,t,c or g
nnnnnnnnnnnnnnnnnnnnnnnnnnnnnnnnnnnnnnnnnnnnnnnnnnnnnnnnnnnnnnnnnnnnnnnnnnnnnnnnnnnnnnnnnnnnnnnnnnnnnnnnnnnnnnnnnnnnnnnnnnnnnnnnnnnnnnnnnngagagagatcaattgatagctgactgcagtagtctaananataantgttcnctttgatattaattaagaagataaatgatgacctaantctaggaagtagcaangggaggggatggagggtatgactacaagacanttgtgttatggtgatggaaagagaaaatgatcaataatagatcaaggggttaaaaagaactgttggtggcttccanatctccggtttgggtaactanatggatatgccactcaccaaggcaaggaaggtannnagatnnncangttgnnaggaaggacantnantgccatatcanatnattgggtgtnaggtcctctgngggactagggtaanctgcnntntnnntcntggnncactgg

SEQ ID NO: 26735 - DNA, 493 bp, Homo sapiens
  misc_feature (1)...(493): n = a,t,c or g
gataacatacatgtgtaatgtaaaggtcaataggctctgagtgagggccagaggctcttctatggccataacgttagtgtttgggccacctggcacgctttgtgtagagacttttaatttcttgttcttcccatgatctaagtggtgtctgcaggcccatctctttttatcaaacaagcaaatgtaagaggatgtaagaggaggaggacccttatggtcctggcggcagcaggagccagagggtggatgggtacgcctagtacctcccacaggatggggaggtatttatgctttgaggccagaacccaaatgtgactgtgggcttggtgagtctctgggagcccttggaagggggaggagaatcgcattgatgaagncctgntacgcctcaagntcaaaacgntgggcctncaancttaaggtggnaaaaggctgncncatttnccanggnnatcntcagggtgggganaccngtgttcccaccaagcaagac

SEQ ID NO: 26736 - DNA, 493 bp, Homo sapiens
  misc_feature (1)...(493): n = a,t,c or g
gctgaagaatcaattatggatggcccaacctctcaggtcccaagtagcagaaacatcacaggtcccaataccttcctcctcccacaaaggggttcttttgtttcctagacacccaccaatatttggccctaaggcccagggactgcttgtctctcccctcctgtcagccactgatcccgtatcttagctggagattgtctccaagctcagtcaaagcccagaattcacaagtaaaaaaggacagtgagctgacccagcttcaatcttgcctcagtggatgccaagggccctgctgcaggagccaggggtcagggctggggtcagggctacggccaggagggacaagatctctgaaaccacaaacctgaccttccctcataaatctgtnagcccatccttaangnnntncnaanctttttnggaaacnttcagncccctcaanaccttttanancnngctttgacacaaagatgatttagctncaatttggggc

SEQ ID NO: 26737 - DNA, 487 bp, Homo sapiens
  misc_feature (1)...(487): n = a,t,c or g
ggcctcaacctcaaactcagctgcaacaacagacggtaatgatcacgccaacattcagcaccactccgcagacgaggatcatccagcagcctttgatataccagaatgcagctactagctttcaagtccttcagcctcaagtccaaagcctggtgacatcctcccaggtacagccggtcaccattcagcagcaggtgcagacagtacaggcccagcgggtgctgacacaaacggccaatggcacgctgcagacccttgccccggctacggtgcagacagttgctgcgccacaggtgcagcaggtcccggtcctggtccagcctcagatcatcaagacagattcccttgttttgaccacactgaagacanatggcaaccctgttatgctgcngttcaaaaaccgggccttaaaggcttaanaaccctatccaaaagggnngcccttnantncaaaccctggtgggcaaaattgggacatttgaccaca

SEQ ID NO: 26738 - DNA, 485 bp, Homo sapiens
  misc_feature (1)...(485): n = a,t,c or g
gggggctgagtggcatcatggcggctcagaaagatctctgggacgccattgtgattggggcggggatccagggctgcttcactgcataccacctggccaaacacaggaagaggatcctcctgctggagcagttctttctaccacactcccgaggaagctcccatggacaaagccggataatccgaaaggcgtacctggaagacttttacacccggatgatgcatgagtgctatcagatatgggcccagctggagcacgaggctggaacccaattgcacaggcagactggattactgctgctgggaatgaaagataatcaagaattaaagacaatccangccaatctgtccaggcaaagggtanaacaccaatgtccttcatctgangaactnaancaacnttttcccaattntccgntttccnagggaaaaanttgggcccttggnaatttccggngggnttatcnatcntttaaggccctcaaa

SEQ ID NO: 26739 - DNA, 493 bp, Homo sapiens
  misc_feature (1)...(493): n = a,t,c or g
ggagactcnnnnnnnnnnnnnnnnnnnnnnnnnnnnnnnnnnnnnnnnnnnnnnnnnnnnnnnnnnnnnnnnnnnnnnnnnnnnnnnnnnnnnnnnnnnnnnnnnnnnnnnnnnnnnnnnnnnnnnnnnnnnnnnnnnnnnnnnnnnnnnnnnnnnnnnnnnnnnnnnnnnnnnnnnnnnnnnnnnnnnnnnnnnnnnnnnnnnnnnnnnnnnnnnnnnnnnnnnnnnnnnnnnnnnnnnnnnnnnnnnnnnnnnnnnnnnnnnnnnnnnnnnnnnnnnnnnnnnnnnnnnngccttaggaaactcacactgccacctacctgtacaacacagagaatgtagcctcagacctgggcctccatgaacaacagtgcatcagtgggattcaataacaatttggtcccataaaatttttttccaaaggggggcctcccctttgtannaantgaaacggctttcaaattacacttaggatgtaaagttccttttaaaa

SEQ ID NO: 26740 - DNA, 482 bp, Homo sapiens
  misc_feature (1)...(482): n = a,t,c or g
gatgcaaagaaaacagaatgtgcaatagtagagaggtgtggaggagcattatctatgggtgccggggagggtacataagaggcatggttttgggaaccagttcatgcagagtgttcagcacccttctgtggagactgaactggaagtggtaggcaatttctgaaagtccttaagcagaggaggccgccagtcagacatgcattttagcaatctctttctggcagctgtgaagggcactgatcagagtaggagggagacccagggcaggagaccagttagaaggctgctgaaatagccttagccagagacaaggagagactgaagtaggcactgggagtgggggcaatcttttgtgtgtatgtgcttgtgttatttccttacttgtagcatgtctcttgcctcctcagttttgtnactgcctnanagatccttgatggcnnttaaagtgttccntgacagtnaaattatnngtacatagttca

SEQ ID NO: 26741 - DNA, 484 bp, Homo sapiens
  misc_feature (1)...(484): n = a,t,c or g
ggctgctcactacagaaatgatcagaatgaaaagcattggtggcgnnnnnnnnnnnnnnnnnnnnnnnnnnnnnnnnnnnnnnnnnnnnnnnnnnnnnnnnnnnnnnnnnnnnnnnnnnnnnnnnnnnnnnnnnnnnnnnnnnnnnnnnnnnnnnnnnnnnnnnnnnnnnnnnnnnnnnnnnnnnnnnnnnnnnnnnnnnnnnnnnnnnnnnnnnnnngggtggaaanttatataagcccattttggaaattgtgaaaatccaggattttgccccttccacttcctgaacctgaaatgaagctttctggttaagttgtataaaaatgtttttctgtgaaaaggtttttgtcccncnnnnnnnnnnnnnnnnnnnnnnnnnnnnnnnnnnnnnnnnnnnnnnnnnnnnnnnnnnnnnnnnnnnnnnnnnnnnnnnnnnnnnnnnnnnnnnnnnnnnnnnnnnnnnnnnnnnnnnnnnnnnnnnnn

SEQ ID NO: 26742 - DNA, 483 bp, Homo sapiens
  misc_feature (1)...(483): n = a,t,c or g
gaccttattcttaataatgctagataattccatatccactaatagaaagaaagggaatttgtgatggtgactgctttggtaccaacaggacagagggagaaaaagaacagagaaaaactgactggattcttctagtgccagccagtggaaaatggaaagaaaatttctccatacccacatttcccccaaatctcccttgtaaaaacacccctcccccagaaaaaaaaaaaggcaagctaccaatttcagacataggttttaaatgcagcatcatgaaaactgagcaatttggngggcgagaaaacatgtgagtggctggcatttggggtaggaacagccggtaaaggtctaaaagttttgtcnacncatctccngttcataccaccatgagataaaggggcanttttctacccganacttttggttgngtacttgaaaacttgtttcangggggtgcaaangaatttaccatgaaatctggtc

SEQ ID NO: 26743 - DNA, 501 bp, Homo sapiens
  misc_feature (1)...(501): n = a,t,c or g
nnnnnnnnnnnnnnnnnnnnnnnnnnnnnnnnnnnnnnnnnnnnnnnnnnnnnnnnnnnnnnnnnnnnnnnnnnnnnnnnnnnnnnnnnnnnnnnnnnnnnnnnnnnnnnnnnnnnnnnnnnnnnnnnnnnnnnnnnnnnnnnnnnnnnnnnnnnnnnnnnnnnnnnnnnnnnnnnnnnnnnnnnnnnnnnnnnnnnnnnnnnnnnnnnnnnnnnnnnnnnnnnnnnnnnnnnnnnnnnnntcttttatgttgttaatgtcacaaatcacatctttatatattgagtgcccaatatcatagaaatataattatttttattacttttcttgagaaagcannnnnnnnnnnnnnnnnnnnnnnnnnnnnnnnnnnnnnnnnnnnnnnnnnnnnnnnnnnnnnnnnnnnnnnnnnnnnnnnnnnnnnnnnnnnnnnnnnnnnnnnnnnnnnnnnnnnnnnnnnnnnnnnnnnnnnnnnnnnnnnnnnnnnnnnagtanagacag

SEQ ID NO: 26744 - DNA, 485 bp, Homo sapiens
gaatgggccaaagtctgtgcttagtcctggggtataacactaagtacagagatatgctccttgccttcctggacattctgctgtgggaaggcagacattaaaatatcactaattcaaataggatacaggtacactgagcaggtttctctaagggacatactgcatttaaactgagcttgacgaatgggtaggagataggcagacaaaaggaagggtgtgtgtgtgcgtgcgtacgcgcatgtgtgcacacatgcatgctgggctgtatggggccctggaaaaggctgtttcagacaaagggaagagcaagtgagaatgccaagatatgggaaggagtttaatcaataacaaacagaaagctgggagttgggtgtctggcaaggattttgggcacaggcttaggagcattgggggcccacgaaagagtttaaccttaagggctcatctcttaatacagtcacattggcagttaagttcagcatatg

SEQ ID NO: 26745 - DNA, 506 bp, Homo sapiens
  misc_feature (1)...(506): n = a,t,c or g
gcgttaagcccttttattattgatccatttatttttcttagggagggaagctatagaaaaaaagcaatagatgcttagtattgaatcctgttttacattcatcgtggccaaaagacataatcaaggaggcagcattaactcagacacagagtgttgccttgttaattttttttancagtaattacatcacattttaacttgtaatatgttgaaaggccaaatattaatctgttactgtattttgccttctttgtgcacctcctccctctactatagcagacactgggaatttgactgtattttttattactttttaagccaatgtccaaggtgtctggtatgacacatccggtgaccacacagaagcatgccctgtcctctgagttttccccataccagctctttatgctggtaaactggggataggatanaaacactcagccagcangttacttcataagctgacggcacagagctggtgatgaaatcnataagaatgtgtttgg

SEQ ID NO: 26746 - DNA, 427 bp, Homo sapiens
  misc_feature (1)...(427): n = a,t,c or g
ggtcaagagcattgtgatgctgcatttcttaatanaatcagtataaaagctaaaagccagtgatatgggcttttaaaccaggtttgcagttattgatgtgtaaagttagttatttttgtgtccaacagtcttggttctgaggggttagagtgccccacaattgtttccaagatttacttcttanctactatcatttatatctttatcatttagatcttagctacnatcattttccangcttggtgtttgtattctgatgttcacacatggntaatccatgacaactatgactgctgcttggctaacagtggttttaacacatcatcaattgttaagacacattcctattttcagatataccagnataggnaaacaanattcatccgaggagctgtnaaancngtatttcccantgnncctcncgaaa

SEQ ID NO: 26747 - DNA, 445 bp, Homo sapiens
  misc_feature (1)...(445): n = a,t,c or g
ggaagggatgggggaagattttatgcacagcctagttatcaaggggatgatttgccnacatgtttgagaaccccctaacctctaaccctcattgctgtcttgccccagtttggggtgccaagatggaagtcacctttctgggctttctcctggagatagctggggcttatgggtggctttcaaggctggggcatggcaaatcaggggccanagagcaggggagcttgggactcaggtctgtaactgcccagccccttttctctgctcttgtttcactccaccatcactcactcactccccactcccccacccatggggaggagacctttgatgaattcttcctctccttcccacaanagacagacccagtgagtgaatcangcaaagtgcntataatgtgtgttgtgttanccttggcctgggaagacatgcctgtntcanggat

SEQ ID NO: 26748 - DNA, 428 bp, Homo sapiens
  misc_feature (1)...(428): n = a,t,c or g
nnnnnnnnnnnnnnnnnnnnnnnnnnnnnnnnnnnnnnnnnnnnnnnnnnnnnnnnnnnnnnnnnnnnnnnnnnnnnnnnnnnnnnnnnnnnnnnnnnnnnnnnnnnnnnnnnnnnnnnnnnnnnnnnnnnnnnnnnnnnnnnnnnnnnnnnnnnnnnnnnnnnnnnnnnnnnnnnnnnnnaatcananannnnnnnnnnnnnnnnnnnnnnnnnnnnnnnnnnnnnnnnnnnnnnnntttagtgggcanatcacctgangtctngacttntaaaccaagntgtccaaaanngtgncantccntctctactnantntacatattnncnannnatggtngggntcctgtaanccnagntgcttgaaagtggatgcatngtcaaatcnctttnccngggagggcnagtttcggcatccanntcnnacaat

SEQ ID NO: 26749 - DNA, 488 bp, Homo sapiens
  misc_feature (1)...(488): n = a,t,c or g
gctaatatttcatgattacttctcaaaggaagtgcttatatgaatcattgtctatcaacgttttcccaaaacttttgtttattacatcctgtagttaaatgataaaaccacttttgtcaagagaaatgaactttttcaaatgaatgtttattttttctctatcaataaagatgattttattgtcttgattctcttgctcttgatgtatttaaaaaatagatacagtgatgtgtgactttaaaattgattagnnnnnnnnnnnnnnnnnnnnnnnnnnnnnnnnnnnnnnnnnnnnnnnnnnnnnnnnnnnnnnnnnnnnnnnnnnnnnnnnnnnnnnnnnnnnnnnnnnnnnnnnnnnnnnnnnnnnnnnnnnnnnnnnnnnnnnnnnnnnnnnnnnnnnnnnnnnnnnnnnnnnnnnnnnnnnnnnnnnnnnnnnnnnnnnnnnnnnnnnnnnnnnnnnnttgatggaggtgcngtgaaccaagatc

SEQ ID NO: 26750 - DNA, 491 bp, Homo sapiens
  misc_feature (1)...(491): n = a,t,c or g
ggagagctagcaccatgagttcaaaccctggatttagcaatttgctaacttacaagattctttcaaaaaatggaattnnnnnnnnnnnnnnnnnnnnnnnnnnnnnnnnnnnnnnnnnnnnnnnnnnnnnnnnnnnnnnnnnnnnnnnnnnnnnnnnnnnnnnnnnnnnnnnnnnnnnnnnnnnnnnnnnnnnnnnnnnnnnnnnnnnnnnnnnnnnnnnnnnnnnnnnnnnnnnnnnnnnnnnnnnnnnnnnnnnnnnnnnnnnnnnnnnnnnnnnnnnnnnnnnnnnnnnnnnnnnnnnnnnnnnnnnnnnnnnnnnnnnnnnnnnnnnnnnnnnnnnnnnnnnnnnnnnnnnnnnnnnnnnnnnnnnnnnnnnnngaatttcaaggaaaaggcaaggactgaagccagatatcaacatactaaagtaaagtgnaaagcagcaaatcccctagttagaattggttntaaactgagnaaactaatatggg

SEQ ID NO: 26751 - DNA, 490 bp, Homo sapiens
  misc_feature (1)...(490): n = a,t,c or g
ggagcttcatagaaagttgggcaaaacaggctagcaattgcaaagtcaggctttgaccaacatatttctttgcactgaggccttgctgctgtggatacggaaatggttaagtactgtgcttcctcagcagctgggctgtcagggccatagtanctccctttggagaacagggaaagcctggaggcttcccaggtggcccagcgtggtgtcctgtcagcttcctctttaggaactcaccagagggcagcaagctcctttcacttcgctagtaagaacccctccgttttnnnnnnnnnnnnnnnnnnnnnnnnnnnnnnnnnnnnnnnnnnnnnnnnnnnnnnnnnnnnnnnnnnnnnnnnnnnnnnnnnnnnnnnnnnnnnnngctgtgggcannnnnnnnnnnnnnnnnnnnnnnnnnnnnnnnnnnnnnnnnnnnnnnnnnnnnnnnnnnnnnnnnnnnnnanacagggtctccctgtgttgaccaagt

SEQ ID NO: 26752 - DNA, 506 bp, Homo sapiens
  misc_feature (1)...(506): n = a,t,c or g
gannnnnnnnnnnnnnnnnnnnnnnnnnnnnnnnnnnnnnnnnnnnnnnnnnnnnnnnnnnnnnnnnnnnnnnnnnnnnnnnnnnnnnnnnnnnnnnnnnnnnnnnnnnnnnnnnnnnnnnnnnnnnnnnnnnnnnnnnnnnnnnnnnnntaataataataataatctccactcaccaaggatctttcctgtactgcctcatcaccatccacagccagccatcccttaccaaagacctcctgtgtacaatggtagtgcaggcaggtggctggcggcctcacagcctagctgcacagcaaggccagacagtatgctctaagtgccaaaggatctgtacagaacaggtaacaggagcctcagctgtagggctgaaaacaccattatggagacactatctgaatcatgccacagaagatgtggtgctgaccangtgacagtgccaaggtggggaatcttcaagaactgatagcaaggtccatacacaggacaaaggaggttcccactaa

SEQ ID NO: 26753 - DNA, 488 bp, Homo sapiens
  misc_feature (1)...(488): n = a,t,c or g
ggaaaaattaaggattcatgagttgtccaccctcaaaagacatctccatgcccttcctcatgacagactctcttagcgctttcctttctttcattttcattttatttcttattttattatttattttaaagaaaagnnnnnnnnnnnnnnnnnnnnnnnnnnnnnnnnnnnnnnnnnnnnnnnnnnnnnnnnnnnnnnnnnnnnnnnnnnnnnnnnnnnnnnnnnnnnnnnnnnnnnnnnnnnnnnnnnnnnnnncaggagccactgcaccaggctcttcagggtttttcttcgtaattgggcttattggggtcagtggtaggaaggctgtgtagttacaaggctctgtggagcagaagtggccccacatccagtaagctgcatatccataaatcccaaatctccatcccaagattggagatttttggangtatgcccttactggggctcctcctatacaacccccgattttantaattatttatttt

SEQ ID NO: 26754 - DNA, 500 bp, Homo sapiens
  misc_feature (1)...(500): n = a,t,c or g
gatttcttttttatgtagaaagccttttcctggactttgtcataagcaagagctgctgtactttcattatctcaaactgtgaagttgacctattgaccagaggctccactgtttcccctgctgtgtcctctcctgggtgtcacatttgccttgagacctctagggtctcagcccgtccttccttgacatgtgatatancttagatgtctactnnnnnnnnnnnnnnnnnnnnnnnnnnnnnnnnnnnnnnnnnnnnnnnnnnnnnnnnnnnnnnnnnnnnnnnnnnnnnnnnnnnnnnnnnnnnnnnnnnnnnnnnnnnnnnnnnnnnccttgagatcatgagttctcacaggatctggttgtttaaaagcatgtggtacctccccctcctcttgctcctgcccttaacatgtgacacacctgctcccactttgcctcganccttgaataaaanctcctggccgacgcggtgactcacgcctgtatcccaacactttggg

SEQ ID NO: 26755 - DNA, 488 bp, Homo sapiens
  misc_feature (1)...(488): n = a,t,c or g
gccttnnnnnnnnnnnnnnnnnnnnnnnnnnnnnnnnnnnnnnnnnnnnnnnnnnnnnnnnnnnnnnnnnnnnnnnnnnnnnnnnnnnnnnnnnnnnnnnnnnnnnnnnnnnnnnnnnnnnnnnnnnnnnnnnnnnnnnnnnnnnnnnnnnnnnnnnnnnnnnnnnnnnnnnnnnnnnnnnnnnnnnnggnccncaaaaangggtcngaaatgaaatctgngggcnacccanatnaangggnngggnaannggannnnagagganggnncnggaaaanaggnaggaanagagaccatcanggnaaggggttttgccnnaannggttcnaaagnggtttggccnaaatttcagggagggaggaccgncnattcattgncaaaatttgntgcagcccctgtcngtcaatcaancnggggaggatggggacaaaacccaggctggaaaatttttggnaaaatnggtcctgaaaaatnggggnttaaatttt

SEQ ID NO: 26756 - DNA, 487 bp, Homo sapiens
  misc_feature (1)...(487): n = a,t,c or g
gcattatatcaggcaaggtccttgaagattttctagccttagccatgcattttgctgatgaggaaacaggccagaaaagggtactgtgacttggccaagctctcanagtggcagaactaanataggaacccagctcccttggctgttagcctagtcccctttccaccacacttcaaacactgtcactgcccatgtcacagggacatggcatgttanaatcacccctgtcaagggaaaagtggatggtctcagtaaaatggagattagtacacagctttgagcctttcagagtttccagttgcccgcacctgatgtcccagaactattttttccatcttcccctagaactggcgccagcactatggtggngtggatgtgagatganggcctgtttagaaaaagctggacagcaaattcaancaattgttaatgcgtagtaataaaggctcctggggtgtaaattttgtaagacacctgnaacatttta

SEQ ID NO: 26757 - DNA, 493 bp, Homo sapiens
  misc_feature (1)...(493): n = a,t,c or g
gaatgggaatgccaaataagaaatttctggttaaacaaantccttctgaaacaacagtcnttcagccaaaccaaggacagaatgcacctgttcataggctacttattacacanggaanccctaanacatcagtgaagggggttgtgcaaaatatanagaacccttcacagagcanagtgcctaacanagtgcctgtttcaggagtatatgcaggaanaatccaattaaagcggccaaatgttgcgacaatttaacagagacaacattcattangataaantggggggaangattattattcangtnattttcccngcccaanactttatttaaccctggactccgtttagacagncaaagtgacatcataaggcttttcacttatctggatcatttggtcactttggtaattcntgntcnagatccnattttccncttancaatacntttggggtggnnacaattaatggttagtaattgctccccactgtgc

SEQ ID NO: 26758 - DNA, 484 bp, Homo sapiens
  misc_feature (1)...(484): n = a,t,c or g
gctttgatatattttgttacactgttaacttctgagagaaacattgataagctgaagtttgttgggggaattaagtanttgatgttatagttcagaaaataataggttggcttttccttttggggggaattttcttggtagcagtttgctatgttaatttgaaatttaaaatactgaaatcacttgaaaacacggtacagatcccactgtttctagtattaataactagttagcaccatgttttttctctagttataaaaccctaaagcattaccaatttgacagtttgaaaatatgttagcttttagtctcagtgttttatactanaaagaaatctgaatagttattttacttttcatgttatgtttcatcatcaagtatattattctgttatgtctattaaagatctctttctcaattctgatataaactgtganttgcgttacatatccccaaaaattttttttanaagactaactgaagt

SEQ ID NO: 26759 - DNA, 499 bp, Homo sapiens
  misc_feature (1)...(499): n = a,t,c or g
ggaaggaagcttttaaaacaaatgctctccctgtgcganacccttctgatagatgtgccaagactgtgacacatatggcgtagcattcatgcctgcagcccaccaggcctggggctgcaagagcatgagccctgggtctgtcatctgtcagcatgcatcctctgtttgcagcagtgtgccctgtaaatattttcatttcctgtgtgtgcgganacttggaaaaggttgggaagcactggactgtgctaactggaattttaaaagactgttgccagaaatttgccttttgacaattcattaattttagtgataaaattcttgtggatttttagttaagactccttgttgctgagctgccttatagactgcttttggaatctgtaaacagcttgtgtgggcggagctgtccttgttgtccttgattaaagctttcttgagataangaacggtgagactccgagtttcctaagtccacaattccaagnggntactnccaact

SEQ ID NO: 26760 - DNA, 491 bp, Homo sapiens
  misc_feature (1)...(491): n = a,t,c or g
gccacgcagccaaaaaagttttcactgtgtggcagttacttcagagttcatgatgagtaaaaaacaaccagcaaagtgaaaaattacatggtcagggacatttactgccctcatgaataactgaccttttacatttgcaaatgttaagcatttccttgagagaatagttttaaatccgggtgctttgggggtaagattctagttttgttcctgaataagacattcttaaatctagaaatttggtaagtatgggtgaaaaaaaactcccagaaaattgtgatcatccataaccctatcacccatcaccttattttatgaaaaagggataagcattttgcttaaacctttcatgttcaaaatgttttgaggctgggtnnnnnnnnnnnnnnnnnnnnnnnnnnnnnnnnnnnnnnnnnnnnnnnnnnnnncacttgaaggcaaggantccanatcaannnnnnnnnnnnnnnnnnnnnnnnnnnnnnnnnnaa

SEQ ID NO: 26761 - DNA, 485 bp, Homo sapiens
  misc_feature (1)...(485): n = a,t,c or g
ggccacagcatctatcttaaaggtcattgtgagtattgaataaaatattcatgtcagttgcacatacaaatattcaataagtgttcactgctgctgttttgttgtagctgttgctaactggaaggtttggtagagataatttttaccaaaaaagttgaggttgagactcaggctttttgtgttggtcagtttgctttgatgtgtttccagccacttcttgctggttctcagtaccccagagataacctattatatctaaacatgttaatatgaaaagctnnnnnnnnnnnnnnnnnnnnnnnnnnnnnnnnnnnnnnnnnnnnnnnnnnnnnnnnnnnnnnnnnnnnnnnnnnnnnnnnnnnnnnnnnnnnnnnnnnnnnnnnnnnnnnnnnnnnnnnnnnnnnnnnnnnnnnnnnnnnnnnnnnnnngtgtggcacttgtaccccanctactcgggaagntgaantanaagatcattgacccag

SEQ ID NO: 26762 - DNA, 487 bp, Homo sapiens
ggacagttgtttttggaagatattttattatgtagaaggtaggcacaatttcatatgattcatgattgtttaaaaagaccgtgagtttgttacaaatgaactttttaacagaatgtaggtatcattgtttggtaagcttgtgtctgcagcttgtatctggtgaatcaaaagcctgtgtatttgatgtgtttttgtgtttcattctaatttgaaaattaacctgtgcatgttactaatgagtactttggatgtgaccagatagtttaacaaatacttgaggatcttttgagtaggagtagggtttatatgcttgggggataagacttagccatgaacataaaccttcaactgacattaggttgttgaaaaagaccatgtgtgtatgagtgcaaaaacataagatagtaagaatccaaaaatggtgcaagcaataaataaaggttattgaatgccgggcgacgtggctcataccccagcacttggggag

SEQ ID NO: 26763 - DNA, 503 bp, Homo sapiens
  misc_feature (1)...(503): n = a,t,c or g
agactggaagtacattttctacttaattgctanagttaacactgaggggcaaatactgaaccctctttgtgaacaaaaagcatgtanaaaagcccaacccttttgactatgctgctacctggggagaacccctcacacccanagccccaacatatactcaaggagggactgggagaaggacaggagctgatgaactganatactaattaaaatagtctccaagggtggaaggtaaaaaggcagaaacctaggtagtgcttgagctgtcctgaactggcatgtgtangtgtgtgtctgtatnnctggaacaanacaagtcaccatgggtgtatgttcatgctgtcatatgatatccangtttgggaattgaaaacttgctcttttctgaaatgttanttttatgtcataacaacagaccatcttgcatttctgatgcctttctcatgcgtgccgcacanttctaaagtctcaatncaacacggcancatttggaggatatcatg

SEQ ID NO: 26764 - DNA, 482 bp, Homo sapiens
  misc_feature (1)...(482): n = a,t,c or g
ggcctgctcaataacaaaaggtaagttttacatgtgtagacaaagaggtttaatacaaagcaagagttctacccaagtgttcaaataatggaaagaattgaaatttgggtatgttaagaaagaaagcactaaggttttaagctgcctgaatcttttagtagaagggaagaaagttttctctttctcttccctcctgttctggaatgctgccgaagggcatgtgtctgacaagcattggcactgtggtgcggcagggtctctaagcacagtgcacagtcagtgaacttcttcattattctccagtccagagattctgactctctactaaaagtagaaagtcacaggactgggaaagtcaaaagggtccaatataaaaaacatccctgtgaaattctcaaatattagaaaatttcaagatgttagaaangntttaatccgtataaaatttcccatacantaaattgctgaanttgaaacccgta

SEQ ID NO: 26765 - DNA, 287 bp, Homo sapiens
  misc_feature (1)...(287): n = a,t,c or g
gcccacaaatcctgtaatttttgacatggtatcaagaatgaggaggtttgtattcaataatctctgtcatttaagttttcattctagaatgaagttctgatgtggattcccctctcaaactctatatctaaacctgtagtcccactnnnnnnnnnnnnnnnnnnnnnnnnnnnnnnnnnnnnnnnnnnnnnnnnnnnnnnnnnnnnnnnnnnnnnnnnnnnnnnnnnnnnnnnnnnnnnnnnnnnnnnnnnnnnnnnnnnnnnnnnnnnnnnnnnnnnnnnnnnnna

SEQ ID NO: 26766 - DNA, 485 bp, Homo sapiens
  misc_feature (1)...(485): n = a,t,c or g
nnnnnnnnnnnnnnnnnnnnnnnnnnnnnnnnnnnnnnnnnnnnnnnnnnnnnnnnnnnnnnnnnnnnnnnnnnnnnnnnnnnnnnnnnnnnnnnnnnnnnnnnnnnnnnnnnnnnnnnnnnnnnnnnnnnnnnnnnnnnnnnnnnnnnnnnnnnnnnnnnnnnnnnnnnnnnnnnnnnnnnnnnnnnnnnnnnnnnnnnnnnnnnnnnnnnnnnnnnnnnnnnnnnnnnnnnnnnnnnnnnnnnnnnnnnnnnnnnnnnnnnnnnnnnnnnnnnnnnnnnnnnnnnnnnnnnnnnnnnnnnnnnnnnnnnnnnnnnnnnnnnnnnnnnnnnnnnnnnnnnnnnnnnnnnnnnnnnnnnnnnnnnnnnnnnnnnnnnnnnnnnnnnnacccgttacttancagacccggaaagggaatctccctctctccangagaaaaaaaatnnancaactgtgcccggtgggagcaagactggagcaagacc

SEQ ID NO: 26767 - DNA, 487 bp, Homo sapiens
  misc_feature (1)...(487): n = a,t,c or g
gggcagaatcacttgccttttctctgagttcataccagagaagataagcttttgttacagcacttaattacattgtgctgttttccctgagtgttttccagataaagctgtatctctagtagctagaacaaggaatggcccatagaagacagtggttnnnnnnnnnnnnnnnnnnnnnnnnnnnnnnnnnnnnnnnnnnnnnnnnnnnnnnnnnnnnnnnnnnnnnnnnnnnnnnnnnnnnnnnnnnnnnnnnnnnnnnnnnnnnnnnnnnnnnnnnnnnnnnnnnnnnnnnnnnnnnnnnnnnnnnnnnnnnnnnnnnnnnnnnnnnnnnnnnnnnnnnnnnnnnnnnnnnnnnnnnnnnnnnnnnnnnnnnnnnnnnnnnnnnnnnnnnnnnnnnnnnnnnnnnnnnnnnnnnnnnnnnnnnnnnnnnnnnnnnnnnnnnagaaanncaannncaaaaaagtggtttgtatganaccatccgggg

SEQ ID NO: 26768 - DNA, 500 bp, Homo sapiens
  misc_feature (1)...(500): n = a,t,c or g
gacttggacttggcttgagaagcagcagaaagccagctgaacatgcacatgtgagggctgattttgaaagtctaaggtggcccaggtgatgctaaagcatactttgantgacactgccttggggcattccaggagacctctgaagccacagcaagctttggggacacaggtcactaaatgatggttaagtcccctgaattgctaaggaaacagataatcactttaagtcacaggcacctcatgttaagaaagctgttgacagaatggagtggagtaaaacaagaattcagaaacatgaactctcagagtcctctttacaggcgtgcatttaagattgctttttccatgatcagcatgtacgcttgaccccaattctccacaactgaaacaacttgggctanaagttgcctcaaaaaatgagctagattttctgggaaataactgacaaagatggtacattgcatattaatgctcaanttaataaatcctaataaaaactt

SEQ ID NO: 26769 - DNA, 502 bp, Homo sapiens
  misc_feature (1)...(502): n = a,t,c or g
ggatatccacatgcaaaagaatgaagttggactcattcctcatatcatacataanaattaactcaaaatggatcacagacttgcatgtatgagccaaaactagaaaactcttagaagaaaactctaagccccctttcacaggcacctagtacctggaattcttgagcctttataggatagtgatatggattagcttgcactttcattctctttctacaagtagttttcagttttctcttctaaatatttatcaacttgctttctagcttcctaaattttgttagcatcttanatcccnactcttctttgtcctttagctttantcctttttccaaattactataacttaatgaaatttggggagacantggngataancacagggattaaattctacancaagccctctggggnagcnattattancccattttcaaacgagaaaccnaaggncaatgggggnttaaaaaacttgtctaagacatggggaagtaccgagcta

SEQ ID NO: 26770 - DNA, 497 bp, Homo sapiens
  misc_feature (1)...(497): n = a,t,c or g
ggcaaccaaccatagttaacaagcagtgctcttaccaaaaggtaactctttctanaatctggcacaccatttaatatcagtatgagcatatggtgggtttaataattgttttccatgtttataagttttctttagttttataagcagttaaaatgaatccctttcactgaaatacaatctgtggtgggacttctagcttttctcgatcttacgctgctagatttatgtcactgccatagctatgcaatgggtgatatttacactatgctcaaacaaagcaaccagaaaaacacatcattgaataatacagatattctgaagtcaagcaagccaactttcattaacagatcaatttccttagaaaagttgatgaaactaaagactgaagttcaaagaaaaagccctctcaagggggtatgaatttctggtaacttatggggntatgaaanagagcannaaacttgnnagtanggaagagaaanaagaaaaggggcaag

SEQ ID NO: 26771 - DNA, 505 bp, Homo sapiens
  misc_feature (1)...(505): n = a,t,c or g
gcttaantaacatttatgccnnnnnnnnnnnnnnnnnnnnnnnnnnnnnnnnnnnnnnnnnnnnnnnnnnnnnnnnnnnnnnnnnnnnnnnnnnnnnnnnnnnnnnnnnnnnnnnnnnnnnnnnnnnnnnnnnnnnnnnnnnnnnnnnnnnnnnnnnnnnnnnnnnnnnnnnnnnnnnnnnnnnnnnnnnnnnnnnnnnnnnnnnnnnnnnnnnnnnnnnnnnnnnnnnnnnnnnnnnnnnnnnnnnnnnnnnnnnnnnnnnnnnnnnnnnnnnnnnnnnnnnnnnnnnnnnnnnnnnnnnnnnnnnnnnnnnnnnnnnnnnnnnanccnnnnnnnnnnnnnnnnnnnnnnnnnnnnnnnnnnnnnnnnnnnnnnnnnnnnnnnnnnnnnnnnnnnnnnnnnnnnnnnncagtctcccaaaagtgctgcaattacaggcatgaancattccttctttacctatncactttttatttggttctcnattccttcgtnctttntcccc

SEQ ID NO: 26772 - DNA, 418 bp, Homo sapiens
  misc_feature (1)...(418): n = a,t,c or g
ggttctaacaatangcagaaatgtcatttgctcagggagttcntattaaattaaaanaaagagacccgantgctcttcctgggtcttctaanggagtcttcctgaattaatcaccctttacacaccaantttttactgttttacnctnnnnnnnnnnnnnnnnnnnnnnnnnnnnnnnnnnnnnnnnnnnnnnnnnnnnnnnnnnnnnnnnnnnnnnnnnnnnnnnnnnnnnnnnnnnnnnnnnnnnnnnnnnnnnntccaaaatagctgggcccacaggttcatgccacnatggctggctaaggttttgnnnnnnnnnnnnnnnnnnnnnnnnnnnnnnnnnnnnnnnnnnnnnnnnnnnnnnnnnnnnnnnnnnnnnnnnnnnnnnnnnnnnnnnnnnnnnnnnnnnnnnnnnnnn

SEQ ID NO: 26773 - DNA, 430 bp, Homo sapiens
  misc_feature (1)...(430): n = a,t,c or g
nnnnnnnnnnnnnnnnnnnnnnnnnnnnnnnnnnnnnnnnnnnnnnnnnnnnnnnnnnnnnnnnnnnnnnnnnnnnnnnnnnnnnnnnnnnnnnnnnnnnnnnnnnnnnnnnnnnnnnnnnnnnnnnnnnnnnnnnnnnnnnnnnnnnnnnnnnnnnnnnnnnnnnnnnnnnnnnnnnnnnnnnnnnnnnnnnnnnnnnnnnnnnnnnnnnnnnnnnnnnnnnnnnnnnnnnnnnnnnnnnnnnnnnnnnnnnnnnnnnnnntgtacagagttggcactacattacccttggttaaatgctgtctgtaattcctctgagtttgttttcatataccaagtcttgccacctcaagccagcctgaaagcccttgcaggcaggaactgtggttgttctaatttaagatctgtaactcatctatagataataaac

SEQ ID NO: 26774 - DNA, 436 bp, Homo sapiens
  misc_feature (1)...(436): n = a,t,c or g
gctggaagaannnnnnnnnnnnnnnnnnnnnnnnnnnnnnnnnnnnnnnnnnnnnnnnnnnnnnnnnnnnnnnnnnnnnnnnnnnnnnnnnnnnnnnnnnnagcgncntnantnnggnganattgccncnacanngggggnntancactgngggcnganttcctancacctncannccgantgggcctcatgnacncnaggntgnggntncnnattttngctngggtccccntcgtaancggggaaggaatgtcccncgtncnttctngcgccncgcnttttctgaggtctcctgtctcccactccttccctttcctaggattttatggggaggtttgatgagcatttgcctttctccccagagagcttgaccaagttacatattcnanagatcgtcctgagtgccaagcacgtttanaantanggcgtgtatcca

SEQ ID NO: 26775 - DNA, 440 bp, Homo sapiens
  misc_feature (1)...(440): n = a,t,c or g
gaagaatttaggtttcagtcacaaattcctagatgatattgcccatctctttattgtaaaactgtaccggttgtttttttcccttcagcttgtcagagctattcccgacagtcaaaggcaccaccatcagacagttctaagaagggaatttggcttaattctccacattgttctttcagctagatacggtgtacaatcaaattttgctaagcttacatggttgccactcagaatgatgaattctctcagctaccagtgtataatgtaagactcttattttccctttctttgttttaggttagaannnnnnnnnnnnnnnnnnnnnnnnnnnnnnnnnnnnnnnnnnnnnnnnnnnnnnnnnnnnnnnnnnnnnnnnnnnnnnnnnnnnnnnnnnnnnnnnnnnnnnnnnnnnnnnnnnnnngtgtatactaaaatacaaa

SEQ ID NO: 26776 - DNA, 438 bp, Homo sapiens
  misc_feature (1)...(438): n = a,t,c or g
gttgagttatacttttttaagttttaaaaaagtttattccctgtccctaggttataaaaatatcttcctacttttttctattaaattcataattttaccttttatgtttaggtctttaagccatttggagttcacttatataggtggtgttagatagggatctggtattatttttctccatatagtgatccnatttatcaaacgctttcttattatacaatccaatcagcctttttgccagttttcaatgtattgccttacagttccaaatctanccttcattgcctgctcagcaaaaatcaangatggnnccnttaaataattcncctttgccaagggcatgatncaaanctttgtcaagtaaaacntgccaaagggacccagangaaaatgggttctccncctccaacnttcaaacccncnggagttgcnnagttg

SEQ ID NO: 26777 - DNA, 438 bp, Homo sapiens
  misc_feature (1)...(438): n = a,t,c or g
gcagttacacacgccagtgagctctgagggttcagccaagattgaatacactctgttaaagaaggggaattgggggaaaagccagattttaaaagcatgatttatttcttacttgtttatgtatttttgaataggccacacctggtgtgtgactgccccagtcattaggggatttttttttttcttccctggaggcaaccaccataacnggtttcttgtgaattcttccagagagctatcaagcatttatgagtaaactcccccctcccttacaaatgttagcatactagtcacactttttggtaccttttaccacttataatatcttggngggggttcttttccttagccgcctcattcttcttaatgtaactattaanccttcttcngttttttgttttgntttttgacaagggcctgccttgttgccaagcaaac

SEQ ID NO: 26778 - DNA, 436 bp, Homo sapiens
  misc_feature (1)...(436): n = a,t,c or g
nnnnnnnnnnnnnnnnnnnnnnnnnnnnnnnnnnnnnnnnnnnnnnnnnnnnnnnnnnnnataactagtgaccactacactacagtatcagttcagaaagaaagcaagacctatactanacaggcagcatcanaangatgctggcaggaggtacctacagtagtcattattatagcaaatttattatataccaggtactgttttggatgttttacataggccaactagcttaatgctcctaaccaattattaggtactattcccattttacagatgtggaagcatgggcataaatagattaaggaacttgcccacagagctactaaatgggagagctgaaatttgaatccaanatgacctagcttcaaagtctgcttctctagctagcaaatgtgcgttactggctctctaatgagcaagtggganttggcctggt

SEQ ID NO: 26779 - DNA, 489 bp, Homo sapiens
  misc_feature (1)...(489): n = a,t,c or g
gatgagtttggcttggtttttgagtgcggtactgtgcagaacacctaagtactgattttgccataaaatgatactgggattagacaaacaacaaaagaaattcaagcataatcattgtcctcagagaccttataatataattgataagttaacatttactgataaatagttaagtgttaacttgtacgctacctgcccagtaagcttttaaaaagaataaaattgttatggattggaatgattaggtcataaaatctttatgaccaantttgggcattagctagacctctaagtggcatagcttttcaaggctggaggggaggaggaacagatcagggatgggtgatcatgcagtcagngggggggactgtgngganacacntgttnnggganatgggtaatccccggngttcaanaaaattccccggaanacactngggggaaaancccgggggaaaaattggggnaaactnangnngngggattatt

SEQ ID NO: 26780 - DNA, 437 bp, Homo sapiens
  misc_feature (1)...(437): n = a,t,c or g
ggcttaataggagacaaatggattctctanagctttctttgcaatttgctttaaagnnnnnnnnnnnnnnnnnnnnnnnnnnnnnnnnnnnnnnnnnnnnnnnnnnnnnnnnnnnnnnnnnnnnnnnnnnnnnnnnnnnnnnnnnnnnnnnnnnnnnnnnnnnnnnnnnnnnnnnnnnnnnnnnnnnnnnnnnnnnnnnnnnnnnnnnnnnnnnnnnnnnnnnnnnnnnnnnnnnnnnnnnnnnnnnnnnnnnnnnnnnnnnnnnnnnnnnnnnnnnnnnnnnnnnnnnnnnnnnnnnnnnnnnnnnnnnnnnnnnnnnnnnnnnnnnnnnnnnnnnnnnnnnnnnnnnnnnnnnnnnnnnnnnnngcaattaactggtggggngcaattggttaaanccgttanccaacnattttggaagcccaggggggtnggcc

SEQ ID NO: 26781 - DNA, 440 bp, Homo sapiens
  misc_feature (1)...(440): n = a,t,c or g
gctannaaattctcccaaatgggcgagatcctactgcatggattgttaaaacttactctagctgctgcttatccaaggaagagaagccatgctctggcccttacatttcctgccttatctctaccttgctcacccaccagttcctcaaacatgcctatggtctcccatccttcacatttgcttgggccagtcctgcagagggaatgcctccctgcatcttccttgtctgcctagttggttgcagttttacccatcccttggggccagtgtccacctcccccagagactcagctactccagctggaagggttactctctcttccaaacctcttgagctcctattagcctgctcccttcacatgacagtgggtgtgtacaactgcttaggagttcctgggttatctctttcactctggagttaaaactgggtgtgatcccgg

SEQ ID NO: 26782 - DNA, 439 bp, Homo sapiens
  misc_feature (1)...(439): n = a,t,c or g
gtctcaaataaaataaacagaatgagctattttttctctttgcccattccttcttaaaagggacagtaatttcctctcctantttcttcttgcttgatgtggccacctcacatggggccttagaggagtttgtgtgttatggaaagatttgtatactattccatacctctgttaccatttaaaatggatttggggtnnnnnnnnnnnnnnnnnnnnnnnnnnnnnnnnnnnnnnnnnnnnnnnnnnnnnnnnnnnnnnnnnnnnnnnnnnnnnnnnnnnnnnnnnnnnnnnnnnnnnnnnnnnnnnnnnnnnnnnnnnnnnnnnnnnngnctgggcaacagagcgagactccatctcanantanntanatttcaaaanaaaatggntttgggganggagaaattangtggatctgcacaaaaacataagactncctgtc

SEQ ID NO: 26783 - DNA, 416 bp, Homo sapiens
  misc_feature (1)...(416): n = a,t,c or g
gactggaaattggcttttcccgttggggccgaaggtaccttccctgcggcggcgactcagcggggtgtcgttcggccggcgtgacgcagccggatcggcgccagacggaaacctagcggtgagtagtggggtgtcggggcagcctgcctcccttttctgcttagctcgcggcgtgtgaggtgcgtccaggtgcacccagccccgcgtcggagcttggcccctagcgtcccaagtcgcgcatctcaggactttccctcggcacttggggcatggtctttgcgcctcgctgccccccgcaggctgcccgggggctcgagaacccttactggtggagcgcagccaactggccagaggctggaggcgcaagccaaagtcctttaagacttgangtgagangctcactctggggnagactt

SEQ ID NO: 26784 - DNA, 426 bp, Homo sapiens
  misc_feature (1)...(426): n = a,t,c or g
gtggaaaattccagtantagcatgcaaggtaaattccgccactgctccatgctgctgcacttgcttagcgtactggcgcttcaccagatggggtgggtgaggaatcatgggggcaagagctgttgaactcttcaaaggaaatactcatctgcctaaggcatttccttcccccgcccccccaaagtgttgatactggaagagatcccaagaatcaggctgtctgtttgataccatgacatgattactttcactatgtaatggtcaacttggggatanaaagaatcttgactttatgttgctttcttgaataccaacatggttctaggtacaaaaggcatttaataaatcctttttgattgcngtgaaaactaatggtgatcaaaagctaccttgtttatcanctggtcatagaggactaaggggttg

SEQ ID NO: 26785 - DNA, 423 bp, Homo sapiens
gcggagcagctgaaataggcacaggagagagaaaggggtgggttgctgctattctcttaggtttatgtgattttttaaaaaaagatctgatggggttacatcagctggttcacagtaaaggtgggaaatgcctcttgtttcaggttccgatgtgattcagaagggcagttccctggggactgaatggcagaccccagttatctcggagccctttcggagccgcttcagccgctgttcaagtgtagccgacagtggggacacagccattggtacatcatgctcagatattgcggagggtaagtttgtattaatgatttgattaccaatatgtgttctcattttcagattgcattttgggtatattggcatttccagattgtgttatttccagaatgttcataacgtcattccatttcattcaag

SEQ ID NO: 26786 - DNA, 410 bp, Homo sapiens
ggtaaattgctcctgtgtcctactggttccttggtctaaaagccttgaagtcatctttggccactttttttctcttatactccacagtttaacccatcaacacatcttgtcctcctctgtaaccaccaccaccctggtctaagccagcatcattgttttatccggtctccccgattctgttcttgcccactactctgcacacctgccagagtgatcattgaaaaacttgtcgaattgttaccttcctctgctcaaaagcatccaatagctttgtctcactgcaggtaaagttcttaaaattgcactgtatgatctggcctcagttttcactgtcttactatgtatgtccttgctcacttggctccagtaacactgacttttttgctgttgcatgaatgtgggattctctt

SEQ ID NO: 26787 - DNA, 411 bp, Homo sapiens
  misc_feature (1)...(411): n = a,t,c or g
gctcacaaaacaataacagtaataatgatggtgttagcagcaacagcagtaatcatggaaacgttgattaagcatttactgtatctgaaccctgcggctgttcctgctttcagccacttctgcattgagaagggccggggatgtggtggaagctagatgtcaccaagtagggggatgtagattcacagcggtctattctggttcctcttgggaggttcaaaccttggggaggttcaaaagccagttttggccacttgtgctcttctgctgtgcctagacaggatcgtttctgatggttatatgcatgggtggtggctgangtccgctgtctggaattgaattggggttccttgcctcccactccctcatttggaaaccttttcttgttaataaatcagttanagggggcca

SEQ ID NO: 26788 - DNA, 394 bp, Homo sapiens
  misc_feature (1)...(394): n = a,t,c or g
gttatatagtccaaatctttaccaattaactacaacttctcaatcatttgtcgatctgattcttttaactcttttttctattgaacatccatcaaacttttcctggtcacattttttccttccttgtgtggatcttgtaacttttttcttatttgaggacattgaattaaaagtactaaaggattgaagttgatgtgatttttctcccaagagcagatttgcccttttttcttttaggcattctanagattgatgacctcaagagttgagcctgggttgcaactttagntagacncaatcnggntgtnncaagtgtcntaagggtnannnangcantgnnngntngngtngcagannnngcnngcaggannngncagcnngnngnnnnggggga

SEQ ID NO: 26789 - DNA, 425 bp, Homo sapiens
  misc_feature (1)...(425): n = a,t,c or g
gnnnnnnnnnnnnnnnnnnnnnnnnnnnnnnnnnnnnnnnnnnnnnnnnnnnnnnnnnnnnnnnnnnnnnnnnnnnnnnnnnnnnnnnnnnnnnnnnnnnnnnnnnnnnnnnnnnnnnnnnnnnnnnnnnnnnnnnnnnnnnnnnnnnnnnnnnnnnnncaacaattaaatacagtttagaatctagttcctcagtcacgctagccatagttcaagtgcttatagcccatgtgactggtggcatttgtcttggacggcgcagaccatagagcgttttcatcactgcagacagttctgtgggatagcactgatctaagactgtagagagcaaatggaatggagggggtggcctaaggaccatcagtagaacaggggctccctggaggaggggacgattgcnctgtgtcctgcanacctgttacatg

SEQ ID NO: 26790 - DNA, 406 bp, Homo sapiens
  misc_feature (1)...(406): n = a,t,c or g
gcnnnnnnnnnnnnnnnnnnnnnnnnnnnnnnnnnnnnnnnnnnnnnnnnnnnnnnnnnnnnnnnnnnnnnnnnnnnnngctctggatatattactggcattatatttagtggaagagcatatatatattagagtaatggagatttatttcatttagtagtataagaaattatgtttaggtgcagttctaatttgagacattctgtatctgtcctgtctgatatgtctccaacattgacagtggagatataaaacattttcatcagtgtagaaagttctgctggacagcactgttgtaggtcagtgattctcaaagttttagtgtgtgtagggaaaccttggtgtnttattaaatgntgaatncganncnatnactccgggggnggcctnnaaattggaattaatt

SEQ ID NO: 26791 - DNA, 406 bp, Homo sapiens
  misc_feature (1)...(406): n = a,t,c or g
gcggcacgagnnnnnnnnnnnnnnnnnnnnnnnnnnnnnnnnnnnnnnnnnnnnnnnnnnnngcagatgaatgggtgaacagtggtctctccatacagggggatatgattcagctctaaagaggaatgcagccctggccacgcggcagcacggatgagctgcaaaaacatcacgcggagtgaaagaagccaggcccaaaaggccantgtgtgactccatttgcacgaaatgtcnnnnnnnnnnnnnnnnnnnnnnnnnnnnnnnnnnnctggtgtccgaatggggctgggggagggaggnntggggagtnantgccgatgggcangnagttccctttgngganganggnnctggaccgggtttagagntnggttgnngtctngcannagtgnncatgtnactggtc

SEQ ID NO: 26792 - DNA, 488 bp, Homo sapiens
  misc_feature (1)...(488): n = a,t,c or g
ggctgaaagcaggcactggtgatggaaattgggtttttccttttgcttcaaatcttcctggttgtaaactttttcttacccttattgacgtcagactcaaggtgggtctaatttctcccagcccatgggaaggcagagtgaattactgcttgttgtgccacccctttacattttgtgtgtggctgtttgtctctacccagacaggttcttcacatattacctggggagcaggagagggggaggacaggaagagcacagttgggcagaaagagcaaagcctctcaagtctgatgggtttgggtttgagtctgacagttattagctatgtggtgaccttgggtactttgcttcaacttattgagccccagtttctgcatctgtaaaatgaggatgaaactacctacttcatagaaatcaanccaagtgtccgggcacggtgggtcatgcctataacccaacactttggaagccaaggggatgggcncctg

SEQ ID NO: 26793 - DNA, 489 bp, Homo sapiens
  misc_feature (1)...(489): n = a,t,c or g
gttaatataattctcaaagtgtgtgcaatgcagtccgttactcttgttanaggtaggtcatgatttgcctcnaaatcgttgtagtcagtacagagagcttgccattaaagacagccagcgccgtggggtacgatcggctagtaactcagaagaatgatttttcttgatggtcagagctgaggatactttctccantggctcatcctaaaaagcatggtagtgccgtggacagcatcatcagcagtacactcacaaggaaataggatgtcaagtccttgggtagtttgatagttttccatgacaccagcttatagcacaatgccaaaataaagttcaggagaagggtcaaataatgcanacttgtaagttcctgttaattcttgactatacaattgattccattttgaatgtttaacacacagttgctcancantcctggatgttactgtantcccccacaaagacagntctgtaaangacaaaatcagg

SEQ ID NO: 26794 - DNA, 472 bp, Homo sapiens
  misc_feature (1)...(472): n = a,t,c or g
ggagggttttcatctgatggtcactaaagagtatttcataattgaaattccacatttgtttaagttgtaatgattaaaatgtgaccgggcaaagtgctgggaatgcaggtgtgatccacctccccagcccagactactgtctttatggtagatttatgttggtgacatttgccatcatgggtagataacacatatgtatattgccttttctactttatatcaatacaaataaaaaaaaacacacacacacacaatccaaaaaccagtaagggtcatgtcctgggaggctaactcagccgactgttaggtcaccatgcttatagccaagaaatgtgggatgctgctgggccctgagcggtcagataaactactttctctgataattagaaggctacaggaaatgttttgttttgttttgttttgggttccttgggtgnttttnganacaggncctngtctgtncccangccgg

SEQ ID NO: 26795 - DNA, 385 bp, Homo sapiens
  misc_feature (1)...(385): n = a,t,c or g
gaccgatcctcagactccagtttctggcgcttagtgtaccacatcaagattgacggcgtggaggacatgcttctcgagctgctgccagatgactgatgtatggtcttggcagcacctgtctcctttcaccccagggcctgagcctggccagcctacaatggggatgttgtgtttctgttcaccttcgnttactatgcctgtgtcttctccaccacgctggggtctgggaggaatggncagtcannggatgagctctagccacggcctgcaggacctgcctgtnngccactctgctcgccttannantancactcntgccanngnngattccatttgganancttcntccangtgcncannnntnnctgtgncncngnntttctca

SEQ ID NO: 26796 - DNA, 482 bp, Homo sapiens
  misc_feature (1)...(482): n = a,t,c or g
gagtcttggtnnnnnnnnnnnnnnnnnnnnnnnnnnnnnnnnnnnnnnnnnnnntaataataaacgttctagatcttcttcacttgttttcatgcttatttggcagttctgctccattgtatactatcacgtgacattgttttgattgcttataacttctctgcttagctttaagaattcccttcttgcttgatgttctggttagccgttgctgcataacaaactactgtaaagcttagtgctttaaaatcaccatttgnnnnnnnnnnnnnnnnnnnnnnnnnnnnnnnnnnnnnnnnnnnnnnnnnnnnnatcannnnnnnnnnnnnnnnnnnnnnnnnnnnnnnnnnnnnnnnnnnnnnnnnnnnnnnnnnnnnnnnnnnnnnnnnnnnnnnnnnnnnnntacacttttgaccacaaaagtatttcaagaaattgtgttttgtgggttccccccaacctatngggaacaaaaacnggac

SEQ ID NO: 26797 - DNA, 487 bp, Homo sapiens
  misc_feature (1)...(487): n = a,t,c or g
gcagaattccattatatgaatatgccataattttaaagttcacgttactattgttaagtgtttctaaactggaaattactccagacaatactatgagcacacctgtctgtggcttttgatgagcatctgaatgcaggccaaacttggcctgccaaacagtttctgccgttgtttgtaccagttcacactccctgccaaacagtttctgcaatgtttgtaccggttcacactcccacggcagcacatgaaagctttatttgctccatatcctctcaaatttagaaataattacaaacttatgtaaaagttaaaagtactatacaaataattttgtgcctgaaagttgccaagttcatgccatattacttctaaatatgttagtgtgtgttttctacaaacaaggagattctcctgtgtaaccagacagcagtcatcaaagtcagagaaattaacatcantncattgctggcaactaaagcctancccc

SEQ ID NO: 26798 - DNA, 484 bp, Homo sapiens
  misc_feature (1)...(484): n = a,t,c or g
gcttaggttccatcgaacacccactaccagccaagtttttgggtttactggtcttaaaaaaagatatatgcccttctgaactgagggaaagaagggggagatgtaggaaaacactgaggaagtgacagcaaatgaggtaactggtgaaagtgacagatggaggatactcactggaatacagctggagtgacaagagcacatccaaagtcctgcctaacaggtgagttgggaggaaagtttacagtcaaagtcaagtataaccctccaccacattcttctctcccgtgttccacatttcaggcaaatgaacaaaggaggcccctgtgagtgtaaaacagtccagactcctgatttctgtccccagctctgtctgacccactcctcttctttgggcaggtcatttctctccgggcctgagtttccttactttttaaatgagagaatttaacttgcaatccccaaaggcccctntnaatccgnaaaa

SEQ ID NO: 26799 - DNA, 485 bp, Homo sapiens
  misc_feature (1)...(485): n = a,t,c or g
gggagacttggtcagattaaatggtatggggcaaagaaaaaggggcatatttccagtgtgttgaagccaacatgcctgggagtatagtgtatcactgaaacactatactctgaaacactgagttagtagggcaggcacttttcaaatcantgatgncacatctaatgttgaacactgtgggttgtaagtacccaacctganctaaagatgantatttcacagttanttgcataggagtgatacttaaaagacatgacagtnnattcantcnttgnnagattataggtaaanactaanaaccaggggccaaggataatacatcatatgtctatggcatatangtanatgatcntangagaattagaagctagtcntagcacattancatgtacatgaaaagttgatgtnagacaancatactggtttgcaacacctgtataaatacaaccatcctaaatttcccantancanttccgcaagcccca

SEQ ID NO: 26800 - DNA, 453 bp, Homo sapiens
  misc_feature (1)...(453): n = a,t,c or g
ggggtggcctcctcttcctctttctatccctggctcagagtcggagctgcagattgccctcattgccctcttctctgagatgctctatcggttccccaacatggtggtggcgcaggtgacccgggagagtgtgcagcaggcaatcgccagtggcatcacagcccagcagataatccatttcctaaggacaagagcccacccagtgatgctcaaacaggtatagacaggctccaagatgtcagaggctggcagctggtgngacatgatggaaaagaaaaaggggcatccaaatctggggaagaaacagagggccgggttgtctggggcagtattctgagtccctanagtcaacccttgctccttgcanacacctgtgctgccccccacatcanngnnnangatccngntctggganctggnaangggannnnntccggntcanngnnggtgtcc

SEQ ID NO: 26801 - DNA, 276 bp, Homo sapiens
  misc_feature (1)...(276): n = a,t,c or g
gtggctgacaggaaattgttggaattggagtatttcctangtttaggcangaatcctgattatagaatttcttgtctcttacaaggcgtgttacctctttttttcttcttttttctttattctttctttttcttcctgttcactcctgagatcttactccattttaagacagttctaagtaagacttagctgcaataatctacaacatatggcttgtgaggaagatggaggaatgatttccattanttgnctgttnnngtcctttggnnganttta

SEQ ID NO: 26802 - DNA, 474 bp, Homo sapiens
  misc_feature (1)...(474): n = a,t,c or g
ggctgggtaatggcagcagccttttaacaggttttcctgcttctacccttgccctctgtagtctgttattaacacagcagtcaaaaagatcctttgaaaatctaagtcatatggcaagagattttgtactacatttaagaagtttcatgagttgataagattagagattgttctagccaatgatattttactaaatcatgtcagccttgaaggcacatttaaggcaggctttgagtatgcttgttagtgtgggtggggaaggagtggtcagagatggttcatagcctccctcttttctcctcactaacacttgtcttttccaccatatgcacgaaaagacatatttgttcctgaggaaattanaaagggagggcctgagttggttgctattcctgaaagtttctttgaatggatactggtcatcgtttttgaagaggctgttgntactcatantacctcctttaacaacacctt

SEQ ID NO: 26803 - DNA, 474 bp, Homo sapiens
  misc_feature (1)...(474): n = a,t,c or g
gagagatactccacagtaaggtctcatatganactggcaggcaanaagggaattattantgctcagaccattataaanctctgaaatancacctgagttctgtctgtcattatccaagttctcacaatgcatggctgatggtaattagtgcagtataattaataggtgaagtattccctacttctaaaggaaacacanagaaatggattttacttccatttattaacagttaacagaagagagaagaggtgctggtcactaaacttttggcggtaaaagaatatgtcaaaatcagtaataataattggactattttgtaatgttcttgaggcttatttccagaatcacagtttgagagattttagaaaatagcaaaatacatgattatgggcattagtttcttaatgagagcatagtgcatttaaaacttattttagaccgggtatgatggttatgcctgtatcccancatttg

SEQ ID NO: 26804 - DNA, 477 bp, Homo sapiens
  misc_feature (1)...(477): n = a,t,c or g
gctggtgtttgtgtgctgtggacaaagtggagcagctgggttaaggggctaggatgggcagtgggtagggtggctgcactgaagtgtgagatttgagcacagacagaaggaggtgagggagttggctgtgtccttatctgggggataagcattcccagccgtgggaacggccaatgcaaagtctgtgtgaggtgggagcatgcctggtggggtccaggagctgcagggaggagggtgtggctagagcagcatgggagaggcggcaggggtggggggcagagaggcaattcaggccagattgcagcggccccatcatcattgtaaggaccttgactttgagaagggagtcttggagggtttggagcanaggaagggcatggcctgactctganatggcactctctgggtgctgtgcttgaacagctgggttgagggcanttaatgatggttaattgtacaaaaaaatgttanaaataa

SEQ ID NO: 26805 - DNA, 471 bp, Homo sapiens
  misc_feature (1)...(471): n = a,t,c or g
ggaaaactatgggggcaaatggnnnnnnnnnnnnnnnnnnnnnnnnnnnnnnnnnnnnnnnnnnnnnnnnnnnnnnnnnnnnnnnnnnnnnnnnnnnnnnnnnnnnnnnnnnnnnnnnnnnnnnnnnnnnnnnnnnnnnnnnnnnnnnnnnnnnnnnnnnnnnnnnnnnnnnnnnnnnnnnnnnnnnnnnnnnnnnnnnnnnnnnnnnnnnnnnnnnnnnnnnnnnnnnnnnnnnnnnnnnnnnnnnnnnnnnnnnnnnnnnnnnnnnnnnnnnnnnnnnnnnnnnnnnnnnnnnnnnnnnnnnnnnnnnnnnnnnnnnnnnnnnnnnnnnnnnnnnnnnnnnnnnnnnnnnnnnnnnnnnnnnnnnnnnnnnnnnnnnnnnnnnnnnnnnnnnnnncancgtttccgttaaantgactttgtactctgaaaactcaattatattgaacttggnggatttgggaaatctga

SEQ ID NO: 26806 - DNA, 477 bp, Homo sapiens
  misc_feature (1)...(477): n = a,t,c or g
ggaagaggaattgtgcctagggagaaacagttttactggggcagaaggcacccatcttctctcttgagttatgatgtattcaaactattctatataaataactgccaggacacagttttgttagtgcagctgactttcagttagtccctctggaatgaaaagctgtctgaagtcaaggaaggcctggcaggtgttccctcaccccgctttctgttccatacatgtttcttgagcgttgatatggcctaggcctggctctgggcactccgtcatatatgatcccataagagatggtgttttgctctaagaacatgggtgtggtaggaagctagcccttgggaggggtcagggtacatctcagtcctctgtcactgtggggaggacctcagtgtcagtaaagttcanggttagtctggctggnaaaaaggtggcagcattgatattcccttccctgtatataaaaccttgagaggagtc

SEQ ID NO: 26807 - DNA, 476 bp, Homo sapiens
  misc_feature (1)...(476): n = a,t,c or g
nnnnnnnnnnnnnnnnnnnnnnnnnnnnnnnnnnnnnnnnnnnnnnnnnnnnnnnnnnnnnnnnnnnnnnnnnnnnnnnnnnnnnnnnnnnnnnnnnnnnnnnnnnnnnnnnnnnnnnnnnttaggtaaaaggaaaagttcttccttatgtagtagtaagtaaatttttaaaattttatacaannnnnnnnnnnnnnnnnnnnnnnnnnnnnnnnnnnnnnnnnnnnnnnnnnnnnnnnnnnnnnnnnnnnnnnnnnnnnnnnnnnnnnnnnnnnnnnnnnnnnnnnnnngcanatctcttnnnnnnnnnnnnnnnnnnnnnnnnnnnnnnnnnnnnnnnnnttacctgggtgtggtggttcataccaaaataaaaattttatgtaaaacattggttcaagaaggattgagatcaggcattctgatctgggatccancaatgggcttcangagattaatgaancttctgaaattat

SEQ ID NO: 26808 - DNA, 472 bp, Homo sapiens
  misc_feature (1)...(472): n = a,t,c or g
gnnnnnnnnnnnnnnnnnnnnnnnnnnnnnnnnnnnnnnnnnnnnnnnnnnnnnnnnnnnnnnnnnnnnnnnnnnnnnnnnnnnnnnnnnnnnnnnnnnnnnnnnnnnnnnnnnnnnnnnnnnnnntattaanagttctttttataaaatgtcagcgatgcanacatcttataaaaatgttattaaanaataanttcagganattgtttcaggtatattattctgctaaaggttaaagatcataccttcaaacnctttttttcancnganccttcngtcanaanataggctttatcnccatcanttccttcaanacttaggaagcaattggttatatggccaatcccactaggganaactttatcccacaanattgcattgataanagagctcttcccactgcttgtcctgaanaatatacaaaatcatgaaaancaaancatacagtaaaaaaagtattcttcactgggtc

SEQ ID NO: 26809 - DNA, 472 bp, Homo sapiens
  misc_feature (1)...(472): n = a,t,c or g
gaatgaaaatgaaagtacaacatatcaaaatgtgtggaatgcctctaaagtgtctgtaagggaacatttctggcacaaaatatctatactagaaaagaagaaaggcctcagatcactgcttcagcttctacctttagaagctaaaaggaaaagagcaaattaaaaccaaagtaaggctaannnnnnnnnnnnnnnnnnnnnnnnnnnnnnnnnnnnnnnnnnnnnnnnnnnnnnnnnnnnnnnnnnnnnnnnnnnnnnnnnnnnnnnnnnnnnnnnnnnnnnnnnnnnnngccatctctacaaaaagttaaaaactagctgggtgtgacnnnnnnnnnnnnnnnnnnnnnnnnnnnnnnnnnnnnnnnnnnnnnnnnnnnnnnnnnnnnnnnnnnnnnnnnnnnnnnnnnnnnnnnnnnnnnnnnnnnnnnnnnnnnnnnnnnnnnnnnnnnnnnnnnnnnnnnnnnnnnca

SEQ ID NO: 26810 - DNA, 469 bp, Homo sapiens
gaaaacagagaagaaattccttcattataaggaaaaaagaaatgcacataagcacagttacaatattatatttcctgattaaaaatatgtcttcttttaatggactacaaatattataatttttcttaaaatggcccgtgtgtaaaaagtttattcccctttactttacttttatatagtaatgaaatttcataattaaatctatattttgtattatcaatatttaaccactagaagaattgatgatgctacttattaaaaatgacaagtgatgtaatagagttagtgggatgtctgcctgttgaaaccattttactaggtaagtatttttattacaaaggggttggatataaactggcctcatatccaaaaacctttttgcaaaaatcaaaactggatatatcctgtgttcgcttccttttccctgggcccctctgttaaaatcttttagcaaaaagattttaccaaa

SEQ ID NO: 26811 - DNA, 474 bp, Homo sapiens
ggaggaaacaataaggaacagcttatttctagactcagctgattcctctacagaatttcatgaactttcattgagatttcagcagttcttccaaaagaccaagggaaaagtctgccttgaatgttaaaactgtcatgaaagttgattcctggctgcttcacagactgactcccctcagctttctccttgggttgggggcggttaaaaagaaaaaaaagcaatctcatgctgatggctctctttggaaatggatgttttccacaagagaaaattctttccaaaacttggtgcttattttaggagagttgtgtggattcccagccatcttcacacagaaaatcttatacctcagaatcaagaataaactcttcaagtaaatttcagcaacccgattggtcattaaagactccaaaaaataaacaacaaagagcgagacagggagagttgcactgctggccagaccatttataaata

SEQ ID NO: 26812 - DNA, 470 bp, Homo sapiens
ggtccttaagagaggacaaagaggggcacgtgaagatggaggcagagactggaatgatgttgccacatgccaaggaatgttgggccaccagaagctgcaagaggcaaagaagaattcttcccttacacttttggagagagcatcgccctgtcaactccttaacttcagacttctagtcttcgcaactatgagagaataagtgcatttaagccatgttgttacggcagccctagcagccctggaaaatgaatacactgagtgctcggatccagaccagcatatggagctggtgatcttatcttgggtttcgtgatgactgttttccacgtctccaccttcttccccatggctgcactgcacatttactgtggatctacactaagatctcctccaaaggacaggtcagtcccagccgagttcacagaagctttgcatgcagctgtggggctcacagtcttccgaagcttttg

SEQ ID NO: 26813 - DNA, 476 bp, Homo sapiens
  misc_feature (1)...(476): n = a,t,c or g
gggacttcagctgagtgggtatttaagaaacccaagagaaggagttaggaagggtaagagctttaaagaagggaggaataaggagagaatctgccgcatcaccgcatctgagcctcctcacatgcagctcccctcaagcagcacaatacccagcccttctccagcagagattaggtgagaccttccctgcttatcgcctttcccagaaagagctaagcaaatttttaaaaatatctactcaaattattatcctcattctataaataagaaaacaaacacttaacaagattaaatagcttgtggtcatgcacagtggtttatgcctattatcccagcttgaggccaagtcnnnnnnnnnnnnnnnnnnnnnnnnnnnnnnnnnnnnnnnnnnnnnnnnnnnnnnnnnnnnnnnnnnnnnnnnnnnnnnnnnnnnnnnnnnnnnnnnnnnnnnnnnngatccgtggtccaactattca

SEQ ID NO: 26814 - DNA, 480 bp, Homo sapiens
  misc_feature (1)...(480): n = a,t,c or g
gcaggaaggacaactgaattcaggcaaaaaacaaatagaaaaactggaacaggaacttaaaaggtgtaaatctgagcttgaaagaagccaacaagctgcgcagtctgcagatgtctctctgaatccatgcaatacaccacaaaaaatttttacaactccactaacaccaagtcaatattatagtggttccaagtatgaagatctaaaagaaaaatataataaagaggttgaagaacgaaaaagattagaggcagaggttaaagccttgcaggctaaaaaagcaagccagactcttccacaagccaccatgaatcaccgcgacattgcccggcatcaggcttcatcatctgtgttctcatggcagcaagagaagaccccaagtcatctttcatctaattctcaaagaactccaattangagagatttctctgcatcttacttttctggggaacaagaggtgactccaagtcgatcaacttt

SEQ ID NO: 26815 - DNA, 471 bp, Homo sapiens
  misc_feature (1)...(471): n = a,t,c or g
gctggtttctagccttcgcaccaagtcatgcttcttccaggcagtgtcgtaagaacttgctaacacagttgccctgttcataaccagctgagagaacttccctatctggatgttatgttccaccgctttcttacagagatcatcaacagaaactttgctttcggcaccaaagtcctttgcctctacttgagcaatgatgtctacacccagagcactgataaaactgcacagtgtgagtccgagggcttggttgggtagccctatcaagagctgcctcacaaagtcagctgtgaatgccttgataggtttggccatttggtcttcactgaaacaagagtttctaaaaagggttttcacattgacaatctgtacaggcccattcacagtattctgatcttcaagtgaacttgatcctgacaatgttttanaaaaggtaccacagagcctgaagaactccttaatatctgtagt

SEQ ID NO: 26816 - DNA, 472 bp, Homo sapiens
  misc_feature (1)...(472): n = a,t,c or g
nnnnnnnnnnnnnnnnnnnnnnnnnnnnnnnnnnnnnnnnnnnnnnnnnnnnnnnnnnnnnnnnnnnnnnnnnnnnnnnnnnnnnnnnnnnnnnnnnnnnnnnnnnnnnnnnnnnnnnnnnnnnnnnnnnnnnnnnnnnnnnnnnnnnnnnnnnnnnnnnnnnnnnnnnnnnnnnnnnnnnnnnnnnnnnnnnnnnnnnnnnnnnnnnnnnnnnnnnnnnnnnnnnnnnnnnnnnnnnnnnnnnnnnnnnnnnnnnnnnnnnnnnnnnnnnnnnnnnnnnnnnnnnnnnnnnnnnnnnnnnnncagacaaaaacatggaatataaagcctaaactaaatgcacttttctcatgtgtacactgcttacaaattctactgtacttagaatcttcaagctaactcactttcagaaaaaaaatgttcaactgaaccttggtcaaccatcattgttataaaggttctttactttgaa

SEQ ID NO: 26817 - DNA, 472 bp, Homo sapiens
  misc_feature (1)...(472): n = a,t,c or g
gggaacagggtttgattacttgttcgttctcagtggagaatcttctcagtgctaaagttggggaatactggatagatttttaataaaagaggaaatttcctcacacctgtttataccctgcagcttcttggatagaggtagggcagttgcgggcatctgtggctgctgctaagaacagccatagcacactctggaggcaaactacctattcttggtggcaattccaagggattgcttccaccttcttccctcttttttttttttnccctngaaacggntncccncncnntcaccnaggcnggattanantggaatgaccncagcncacngnaaccncaanttccnaggttnaancttttcccctttcnnancccccngantaacnnnnnnnnnnnnnnnnnnnnnnnnnnnnnnnnnnnnnnnnnnnnnnnggatttttanaaaaaanagggnnccaatntggccaaaccgg

SEQ ID NO: 26818 - DNA, 458 bp, Homo sapiens
  misc_feature (1)...(458): n = a,t,c or g
gcggcacgagtaaaaactgagtcatatgcatccctcctcctttcctctcccatgcccaaggaagataaaacagcttctctgccacaattgacccagagtggtaaagatagagaatcagcatgaaaactgcagttccccagctttgtggtactccacggaccagcctccttgctgcattttcatagaatctcttccttataaaagtaatcactctcggataaaccttactacagtttaaaaatgcttccctcttctctttacagctacctgccacttcaatgtgccacatttttccccccactttcacgttaagcttaatgctattccctagatctgagtgaacttcagttagaagaagaaaactaaaatccagaaactggtgataatcaagtttccccttttangttctaantttatcccttcaaaagtttccttttcccngcnaagatttaanagtg

SEQ ID NO: 26819 - DNA, 473 bp, Homo sapiens
  misc_feature (1)...(473): n = a,t,c or g
ggtcctgggtctcagggtctgcctggaaagaggtgttcttgggcctttggggctgctttggaggggatgtcctgagcttccangccagcccaggaaggagcctcccaggccacggggcgggtccccagccctcatgtccccccagggggcctggntgtagccctcatccccatggccctggctggggaggtanagactgccaggggcatccaaacanacaccactgcctgctggactccgggagccctgcaaggggtgnaggggttccccgngatggaccanngttntcctgcctgcatctccgantgtgctganagaccannggtgncannnggtgtacnggtgctagggttctgatcagacctnggctaacattgcctgtctcttnccgtcagggnntccctcttcctccantngncaccanggngcatnttcgcagccgggcatattttnagtnagtncattnngnccca

SEQ ID NO: 26820 - DNA, 519 bp, Homo sapiens
  misc_feature (1)...(519): n = a,t,c or g
gaggcaagcaaaatatgtttccttgtcccccaaaagtttgtaatccagtagtggaggcagactcataaatacagggttataataaaatgtgctcagcactgcactggaggaatgcacaagggccccatggaagaggcactttctcatcttagtggagaaaaggagggtagtcaaggaggggctcacatctgctttctcaagcagatggaatgtaagttgaactttgaaaaacaggtaagatttgtcaggtnnnnnnnnnnnnnnnnnnnnnnnnnnnnnnnnnnnnnnnnnnnnnnnnnnnnnnnnnnnnnnnnnnnnnnnnnnnnnnnnnnnnnnnnnnnnnnnnnnnnnnnnnnnnnnnnnnnnnnnnnnnnnnnnnnnnnnnnnnnnnnnnnnnnnnnnnnnnnnnnnnnnnnnnnnnnnnnnnnnnnnnnnnnnnnnnnnnnnnnnnnnnnnnnnnnnnnnnnnnnnnnnnnnnnnnnnnnnnnnnnnnnnnnnnnggggccattgactccagct

SEQ ID NO: 26821 - DNA, 531 bp, Homo sapiens
  misc_feature (1)...(531): n = a,t,c or g
gaatggataaaataataatacctatcttatcaggtttttaggagaataacaataataataggtaacacttacctggtaggttatactttttatgtaccaagcactactctaagcaccttaaatatttcaacctagattaatcccatattacgatgaggaatctgaggcacaaggaggctaantaactttcccaggatcacacagatcatgtgtgtcagactcagaatttgaactcaggcaggtgcagctccagggccagtatcttcagcctcttcatagtcctacctctggcatggttctgtacttggggtgttaaaagccagtatgaactgttagttgacattattcatatgaagatgttaagcaagaatttagaaatttaggcttgggngtttangccaaagcctggactaatggtcatctctatanggctgttatgtaaagagtgagaatggttgagctcccngaacangaagtatgtncagtaaaagagaagcnngcatacagtcctcangggacccngatattaag

SEQ ID NO: 26822 - DNA, 525 bp, Homo sapiens
  misc_feature (1)...(525): n = a,t,c or g
ggtaatttcggaggccanagagtcccaagaggatagtaaatcgtctttgctttttatattcacattcatcttcaaatagagggaggaaggaaagctgtttcctgaatttgggacgtgctgagatgtataagttctctagtgcctctcttttgctggaggtttgacatgtgggtggccctttctcaggcgcactcagtactgcttccgttctttcttcctgctgtttctccatggctgtttaagaaccagttcagagccactgcgcccagccagctaataattattgaatgcttaaatatgctttaaaattatggggcaggtatattcataagtggcctggctaccatttatgaaacacctactatgtgccgtggaaacatgacatgtagaaacgacaaacatgtttcccgttttcatgggcagacatactgtgtatagttggntgaantatatgtgtacntaattatgctaatcaatgatatgcctttggaanaagagagaagacagngaagggaanaaaggaag

SEQ ID NO: 26823 - DNA, 501 bp, Homo sapiens
  misc_feature (1)...(501): n = a,t,c or g
gctggaaataatgaaagaatcagaaaaaaaactggtggaagaatctgtaaacaaaaacaagtttatatctaagactccaagtaaggaagaaattgagaaagaatgtgaagataccagtttgcgtcaggagacacaggattatgagttcctttttgacaagaggcggacatctaaccatggtcatgccaggaaaagagccaagtctaattccaagctaaagttggtgcgtagcctggcagtgtgtgaggagtcctccaccccatttgctgatgggccattagaaacccaggatataattcaattgcacatcagttgcccttctgacaaggaggaagaaaagtccacaaaagatgtctctgaaaaggaagacaaggacaaaaacaaagaaaagatcccaaggaagatgctgtccagagactccagccaggaatatacggnctccactggaatagacctacatgaatttcntttaaatacactgaaaaagaacccanggacaga

SEQ ID NO: 26824 - DNA, 514 bp, Homo sapiens
  misc_feature (1)...(514): n = a,t,c or g
nnnnnnnnnnnnnnnnnnnnnnnnnnnnnnnnnnnnnnnnnnnnnnnnnnnnnnnnnnnnnnnnnnnnnnnnnnnnnnnnnnnnnnnnnnnnnnnnnnnnnnnnnnnnnnnnnnnnnnnnnnnnnnnnnnnnnnnnnnnnnnnnnnnnnnnnnnnnnnnnnnnnnnnnnnnnnnnnnnttgatnnnnnnnnnnnnnnnnnnnnnnnnnnnnnnnnnnnnnnnnnnnnnnnnnnnnnnnnnnnnnnnnnnnnnnnnnnnnnnnnnnnnnnnnnnnnnnnnnnnnnnnnnnnnnnnnnnnnnnnnnnnnnnnggggtatcaacagatgtgctgtgccnaggcttctttgntcctatanagcagaggaagagtatnttggngtcctctggggnnananttttnnaangnaatgngcntttttcnccttaagtcccaccnnaaatttcccggccggnnaacttnnntccaaggnnaggcttttccancncccananaaaactctcncnnanggggggg

SEQ ID NO: 26825 - DNA, 440 bp, Homo sapiens
  misc_feature (1)...(440): n = a,t,c or g
gtccaaatgggccctagttattgctctcctcgctggcctcctggcctgactgagggctccctgccggcagttccctantgcctgtagtcctcacgtaatcgccaacttacctcctgtagctgccacaaagccccgtgaaccctaggcatgcagtgctaaagtaccaacacttagggcctcacctatccacgtagagtctggggctgagccgcaagtcctgagctcgcgctcccacccaccaccctgggggaatcagagccctcaagcgctggaacagagaagcccctttgtgtcccggccatttcctggaaagtagagccagagtcacaatgaggcctttgaaagccttggggtgaggattgggggggtcagggaaaaatggagtcggctcctcacacttaggttttattcccactcaaaccangtggggcgacccattg

SEQ ID NO: 26826 - DNA, 440 bp, Homo sapiens
  misc_feature (1)...(440): n = a,t,c or g
gcaantcttatgacccagtgagggagcagactgttctgccaaatgccatcgctactaggacaaaggacagtcacctggtgaggatctgccatcaggccacattttcccattgggtgactcctgcaaaggccctacactttgacgtcctccccatctccggcagctccttaaactaagaactcattttaatttctgaattctccctttttaaagaccagataaatttacctttgggacagttagatgtgcacaaatgcaccatgtgtttaaagatcaccaaagaggagagaaaaggggattccttagtccagagaacaaaaactggtgagctgtgatttaaacaaanacgaatgttgttaaaatcaggttgtactcagaagtcnaaatttctagcttctcttgagaaactggatccgacaaaccanaaatgttcattccta

SEQ ID NO: 26827 - DNA, 516 bp, Homo sapiens
  misc_feature (1)...(516): n = a,t,c or g
ggaggccgaagctcaggcggaagagctgtcctttccccgctccgtggtggagttcctgcagggctacatcggtgtcccccatggggggttccccgaaccctttcgctctaaggtactgaaggacctgccaagggtggaggggcggcctggagcctccctccctcccctggatctgcaggcactggagaaggagctggtagaccggcatggggaggaggtgacgccggaagatgtgctctcagcagctatgtaccccgatgtgtttgcccacttcaaggacttcactgccacctttggccccctggatagcctgaatactcgcctcttcctgcagggacccaagatcgcagaggagtttgaggtggagctggagcggggcaagacgctgcacatcaaagccctgggcgtnagcnaactgaaccgggccggcaaaagnaagncttctttancncnatgggnaannngngnncaacttngnnaagggacccnaggcntnaaggnaaannnttcanccaa

SEQ ID NO: 26828 - DNA, 483 bp, Homo sapiens
  misc_feature (1)...(483): n = a,t,c or g
cactggaagtaagactttagtgaccctgacttgtgagcattcagggagatttggaagctggttaagcctcaagagtgctgatgggagaaggtgaagagttgtatttaatgggtaccagccccttctaattctgatgtctctggttgatgtgtgatatttttgtttaaaagataagtactccttgacagcctggccacatttctcccaactgttatcgtttttgacacccaggcagctggtttcattatcagctgtactcttcctccttacatcttcctcccccctcctcttcttgcttcctaacattttctccactttctctttttttttttccttnaccttaananggccncaangtcaggtttttnattcaantacaaaaaacttaaaattccagctcaggtgagaaacanaaacttggggtganttnaanttgggggggcctttttttttgnaaaagggncgnnantttccnnngggggg

SEQ ID NO: 26829 - DNA, 529 bp, Homo sapiens
  misc_feature (1)...(529): n = a,t,c or g
gtggttttctaaggcgccnccatagntttaaatnacaanagacggcccgnnaatttggaaccaangaggccattcaattcagcacgangtgtgngngcacngggccttgataggcannngactcnctgctcatccttgcctctanctgcctattgctcgtggggctttgttgctggcccgccccgatcanangtgcaatgctgggttttggcaggagctgctggcactgctgaagtgtgtggaggctgagattgcaaactatgaggcgtgcctcaaggaggaggtatagaanaggaagantttcaagattgatgaccacgagaaggacccacaactacgatgagttcatctgcacctttatctccatgctggctcaggaaggcatnctggcnaacctattggancagaacatctccgtgcggcggngccaangggtcagcatcggccggctccanaancagcggaagcctgancggcngaaacnctctcncccctacaacgncanncnccagtgaggacngctngccct

SEQ ID NO: 26830 - DNA, 512 bp, Homo sapiens
  misc_feature (1)...(512): n = a,t,c or g
acgagaattaagagactgtcnnnnnnnnnnnnnnnnnnnnnnnnnnnnnnnnnnnnnnnnnnnnnnnnnnnnnnnnnnnnnnnnnnnnnnnnnnnnnnnnnnnnnnnnnnnnnnnnnnnnnnnnnnnnnnnnnnnnnnnnnnnnnnnnnnnnnnnnnnnnnnnnnnnnnnnnnnnnnnnnnnnnnnnnnnnnnnnnnnnnnnnnnnnnnnnnnnnnnnnnnnnnnnnnnnnnnnnnnnnnnnnnnnnnnnnnnnnnnnnnnnnnnnnnnnnnnnnnnnnnnnnnnnnnnnnnnnnnnnnnnnnnnnnnnnnnnnnnnnnnnnnnnntntccccanntttattggaaatggccnattntcnaatttaagaccctgnttaaggccatttnaaatntttaaaataggaaacngctaaacccagggggcacatttagggttgggcccatttananaaggccaaccaaggttccccattaatgggacacctacttggtaaaaaggaangtncacccc

SEQ ID NO: 26831 - DNA, 524 bp, Homo sapiens
  misc_feature (1)...(524): n = a,t,c or g
ggtgtttttgagggagcccggntttccataaaacacatggccgnccaatttggcccaangannggattcaattcngcacgangttgcttnnnnnnnnnnnnnnnnnnnnnnnnnnnnnnnnnnnnnnnnnnnnnnnnnnnnnnnnnnnnnnnnnnnnnnnnnnnnnnnnnnnnnnnnnnnnnnnncaacacgggattcaaactgtgcttttgtgtaactggaaaaagtaaagtttatctgtttcacatgattgaagcccttatggaattttagagaaaacagtggcaaatttacatctcaaagcacagagagtgatggaaagtttaagcttaaagatgattttgtgttagttagaggaagataaagaatgatgctaaggtagcacaaaatcacaggaatttaccatagggttttgtaagaagaccagtttcatttanataggtagcttttaatttgatctctttcccaactggacaactgagctcanggtggagtccatanaagnaacagagccancaaagtat

SEQ ID NO: 26832 - DNA, 438 bp, Homo sapiens
  misc_feature (1)...(438): n = a,t,c or g
ggcttgggcattccttttttcctgagtgatcatggaaggcacatgccactgtccccggcctagtgtgtgatgtctgtagctaagaaaaaggctccgtccttgcctcagctctgaggggtggggcctcagagataaggaggaccctacccttgtgttgctggcccttcttttcancatgtcagacgaatttgtaatttcaaccccancctttccctgccccanccatanttgctaaggcaacaattgggcctcaatttcctgatgaccagagtccaccantggctgccatcatcctgttatctcctggtcagctatttgtggcaccatctcagcagtgccccantccggcnaacgcataggaagtcaccaaggaggctgggangangagcctcaagttttgcagaaactatncacngnatctncngtgtcacacctcat

SEQ ID NO: 26833 - DNA, 524 bp, Homo sapiens
  misc_feature (1)...(524): n = a,t,c or g
gttcttttnagngacnccacgntttccntaaaaacncatgggcccgnccaatttggcccaaanaagccattcaattcggcacgatgagaagaatttgtctaagtctgccttcacncaaacaactgngtatatgtatttggacnganataggatgaaaaagtggtcacggtggtcagagtgtatcataccantgaaaaacannnanactancccaggacataagccctgcttacaactttgaaacttgcctgtgaatttgataagaactagaataaaccataaatgaaaactgatagctctganagtggcangatgatgggtgaagtttttaactctggggcgttggtacccttgttttacaggtgagggtatgaagatgcagagatgaagcagtttgcctaaggatgcaggatttcaactcctgtgctcagcttccanctgttcngttcccattgttctanactgaagccagccctgncctgggtttcactaagtactctcngagtttatctgncttctgtggg

SEQ ID NO: 26834 - DNA, 432 bp, Homo sapiens
  misc_feature (1)...(432): n = a,t,c or g
gaactgggtgatttttgttcctttttgttttttgagaaagggtctcatttagtccnnnnnnnnnnnnnnnnnnnnnnnnnnnnnnnnnnnnnnnnnnnnnnnnnnnnnnnnnnnnnnnnnnnnnnnnnnnnnnnnnnnnnnnnnnnnnnnnnnnnnnnnnnnnnnnnnnnnnnnnnnnnnnnnnnnnnnnnnnnnnnnnnnnnnnnnnnnnnnnnnnnnnnnnnnnnnnnnnnnnnnnnnnnnnnnnnnnnnnnnnnnnnnnnnnnnnnnnnnnnnnnnnnnnnnnnnnnnnnnnnnnnnntgcatggccanattttanaacatcnngaanaantanggtgcttttcnctcgtttanatngcaaatnnacngcngcngcgtgntggctcngncctggnnccaccnnnttccngcngnnanggcttagctccg

SEQ ID NO: 26835 - DNA, 524 bp, Homo sapiens
  misc_feature (1)...(524): n = a,t,c or g
ggcggttttctatggngcnaccntangnttanaanacgactcgcnggccgggaatttgngaccacnaggccatnnaattcggcacgagtgtatgtatccattataacataattttaaaaactgatgacacgatctggttttcaaaacctttctttattatttgtggaataaagttcatggtacaaatatcaacagagtcgaaggcttctgtgatgggtcaagtgagatggggcctgggaagtgactgatattgaccacaggatgcagcaacatggggatgactgatgaccttgacaggagcancgttggttcagtggtccccaaagacctcctgacaggggaaggtttcacaggagaggaactggagttgagtgcagaggacaccatggagcagttttgccacagagtgaaacagggagatgcctggcagctgcagaggagggtgcagtcaaaaagatttgttacagaactgccgtttgactcagcaatcctattactaggtatatatccagagaantagaaat

SEQ ID NO: 26836 - DNA, 507 bp, Homo sapiens
  misc_feature (1)...(507): n = a,t,c or g
gcctcttgagcggataaaaactaatgtcataaatcctgcatatgctactgaatcaggtcagacagaaaactcactacatatgggctatagtgcactagaaataaagagtaaaatgttagccctagagaaagcagatacctgtatttacaaccctttgtttggatcagatcttcagtatacaaatcgggtagataaagtggtaataaatccatactttggtctaggagctccagactactcaaaaatccaaatacctaaacaggaaaantggcagagaagcatgagcagtgtcacagaagacaaggaacgacagtgggtagatgattttcctctccaccgaagcgcctgtgaaggagattcagaattactaagccgtctccccagngaaggatttccagncaccaatttngagnggccaaaggggnaaccantcatanncatgccgggtggganagtngaggcantcccatcntggtnganaagggaagtngaatccaaacctttaaa

SEQ ID NO: 26837 - DNA, 513 bp, Homo sapiens
  misc_feature (1)...(513): n = a,t,c or g
gcggcacgagggcttctgtcagctgctgagtagcacccgccagatggattccagattccaaggatggcttctccactgatggcccgggcaggaccacaggcgttccgtcatcctgggggggtgtgcagggtctgccctgtgctcttcatcggcgtctccctgatgagtaatgatgagcgttttctcatctttttttgtcatccgtgtatctgcattattggtgtctgttcaaattgtttgctcactttttgaaaatannnnnnnnnnnnnnnnnnnnnnnnnnnnnnnnnnnnnnnnnnnnnnnnnnnnnnnnnnnnnnnnnnnnnnnnnnnnnnnnnnnnnnnnnnnnnnnnnnnnnnnnnnnnnnnnnnnnnnnnnnnnnnnnnnnntcnaaattnacccggcaatgggnccaacacctgttaccaaccacctnggaagcttaaggcaggngaatcacttgaacgttggaaggcggaggtttnantaaccaagntcangcaatggccccca

SEQ ID NO: 26838 - DNA, 522 bp, Homo sapiens
  misc_feature (1)...(522): n = a,t,c or g
gaaataggaacatcttctagattgtgaaggtgaagatggatggaataaactttttgactggattcagtcagaactttatgtaagacctgatgacgtccatatgaacatccggctagtggagttgtatcgctcaaataaaagattgaaggatgctgtggcccgctgccatgaggcagagaggaacatagctttgcgttcaagtttagagtggaattcgtgtgttgtacagacccttaagttttgatagtgctcttcagtctgcaaaatcttctttgggtggaaatgatgaactgtcagctactttcttagaaatgaaaggacatttctacatgcatgctggttctctgctcttgaagatgggtcagcatggtaataatgtncaatgggnaanctctttcngacncgggtggcatngggnaangtcacagcaatttccggnaaancctccaccnnnttaggggcaattgnnaattcnccgggnccnngagntntttaatnaaaggngtgcccgggnaacgtaat

SEQ ID NO: 26839 - DNA, 523 bp, Homo sapiens
  misc_feature (1)...(523): n = a,t,c or g
ggtttggggatcgatgtgctcanccaaatttcctgtttgaaatatcatgttaaattagaatgaatttatctttaccaaaaaccacgttgcgttcaaagaggtgaacattaagatatagagacaggacagaatgtgttcttttctcctttaccagtcctatttttcaatgggaagactcaggagtctgccacttgtcaaacaaggtgctgatcctaagaatttttcattctcagaattcggtgtgctgccaacttgatgttccacctgccacaaaccaccaggactgaaagaagaaaacagtacagaaggcaaagtttacagatgttttcaattcnaagtantttatctggaacaacttgtagcagctatatatttccccttggtcccaagcctganactttagccatcataactcacnaacaggganaantagcnantacaangtgcctngattgattaaanaaagantctagtagcagcnaannacaaatcncagtngttgctcntgcaacaaangnncaag

SEQ ID NO: 26840 - DNA, 527 bp, Homo sapiens
  misc_feature (1)...(527): n = a,t,c or g
ggcttatttgttcatttattccatcattcaacaatgttttacagagcaccttctaggctccaggtactgttttaggtggtgaggattcagcacgaaatgaaaattgattttgatctgctagagcttacattttaagaggaaagacagataataaaataataaacatgacctggcttacggtatataaggaggagcttatatgtaaggagaaaatgatattatccgtaaaaggaccctctttaagacctgcagtctggctgcattgatgaaaagaatataccataaattccttttatggatagtatcattttctcttctacttaaaggatctgtctatagctccaaagactgggcgtaggtccatccgtctctttgatcagagggacactgtagtaactgctacagggtagaagaaacagttttcccatttattaattccttccgtgaatactgagccttctaaacctgggactgtatagtcaatggaacatcatctccaaaggttgtgtacctgcatgnaatgggaa

SEQ ID NO: 26841 - DNA, 525 bp, Homo sapiens
  misc_feature (1)...(525): n = a,t,c or g
nnnnnnnnnnnnnnnnnnnnnnnnnnnnnnnnnnnnnnnnnnnnnnnnnnnnnnnnnnnnnnnnnnnnnnnnnntgcctgaccctcagggtctagccagcgctgggctgtgactttgtgacttgcagctggtgaactggtctcctgctcagtgcccaactcagggcacacggttaatgtcgagcccacacagaggccggggcccagggactgggtcctcagcttcctggggtcactggggagcccacccacctggagctgccacctcggtgggccttgggggacggggcgctccctcctggtgacaggcagcctctaggtctgcagggacccagccccatcctaaggcagccgacttgtggccagtgccctgaattcaacacccacagaccacctgctgggtgctggccgggcacacaggccacacccttggtgtgggctctgcnaggacagtaccggcctccaacacctgaccgccccagcccacccancctgtgcttctcttgcagaggcccangtggagcag

SEQ ID NO: 26842 - DNA, 520 bp, Homo sapiens
  misc_feature (1)...(520): n = a,t,c or g
agatgaactctatgaagcttattgtntccaccgacgcctccaggatggtgccagcaaaatgaagcaagccttcgcaacatcccctgccagcaaagctgcccgggagagtctgacagagatcaatcggagcttcaaggagtacacagagaatatgtgcaccattgaagtggagctagagaatctgctgggagaattctccatcaagatgaaaggtctggctggctttgcacgcctctgtcctggagatcaatatgaaattttcatgaagtatggccggcagcggtggaaactgaaaggcaaaatagaagtaaatggcaagcagagctgggatggagaagaaacagtttttctgcccctgatagttgggttcatctccatcaaggtcacggagctcaaagggctagcaactcacatcctggtaggtancgtgactgtgagaccaaagactgtttgcagcccgacctcaggtatggtgtcgacatcaatgaccttggtaccatcaaactgaactgggaatcac

SEQ ID NO: 26843 - DNA, 520 bp, Homo sapiens
gcgggattcttcttttatccctgttttcatccaagcacatctacccttggtgacattatctgtgtcattcggacaatgggggtatagagtttaacttcatgaggacaattacgaggcattggtccttggggacggcgtgaactgggaagacagcttctgtcctcccacacagacagaaggtggctttgatggctactgggtgctcttcctttaggattccgtttacttagaataggcattggaagcctatagcatccagcaacaccaggctggggatgccctgggcaccctgcagtggtttctctttggtgcctcccactacccattctgtctccctctgccctcataaccttcattgctgagtctcctttatctctctttaagggtcagaaactgcagcctgggagattcccttagagttgttacaccctgttcttccagcttgacctacccattctcccacctcacttcagccgtcattcttcctttttaaaaatggtcagttgatagagtctaaatt

SEQ ID NO: 26844 - DNA, 517 bp, Homo sapiens
  misc_feature (1)...(517): n = a,t,c or g
ggcaaaaacaaacaaaaataaagttattgaggtcagtagctccttatacatctttgtatcccctctcatttcccaaacagcacttgacacgagaggaacttgatgagcattggactggatttgttccatctttaaaggccatggttctgaacatgtggtatttctaaactgccagggatgagggaatattcccaatctgatctgccaaaataatccctccaagtgttatctaatgcttgcgatagcagattcagacttggggagtgagaaacgcctaaagggccgtgtgttgaagtgggctactgaagattaccatggttcaccaggttcacagtgccctaggttgtggtgtggctgcattttccttaacttggatattccagggaagtgtnttgtattnattttacaaacaatctcttanaganaaaggctaaangtaagtccttttgtatcattccatcaagcacattgctttgatcatcacaagcaanacaaggaccgggtcntgtgccttttt

SEQ ID NO: 26845 - DNA, 505 bp, Homo sapiens
  misc_feature (1)...(505): n = a,t,c or g
gcgttccctaacctagagtgctgcatcctctcacagacatcagagcgcaggactgtgtctgctggctaagcttacagacacacactgcattctagtgactgtgccagggtgagaaataaaaaaagatataagagtgacatccagcaaggggacagaagaggaaggaatctctctccgcaccgagacaaaaattggagtggcagaatctgtctgaggtaaccgttttggaactctggagtctaatttggatgcttgcaacttccaaggaaaatcttggctggtaagttgcagttaatttcggtcaatttcagcctttaggatattagcgtctccccatcctgagtcttgtggtaggcagccatgcccgtgttcctggcatnanttcctggagncagcggtgaaaattaggatccggntccacttncaaagtcnantgttttgntgcannaagtgcannnntanaagngggntannancnnttcagnccnctcnntgantcnatcca

SEQ ID NO: 26846 - DNA, 499 bp, Homo sapiens
  misc_feature (1)...(499): n = a,t,c or g
ggacgggtcgactacgaggcaagcagggcctgttccccaacaactatgtgaccaagatctgaggtgcccgtgactgtgacacatggggcagaggagctccaggcacagaccaggggaggggatatttaggggctccccttacaatccacaatgagcaattgcttctccaaggcctggagctattctggtaccttccccatggaggacactgaaaaggctgggttggggacagggagtatcactccataagtgatcctaaaaggtagcccctnaanaggaaccaaggaggacaaaaccaccatgcattaagatttatttattgtatttaaacctggtgagaggacaaantgagggcctgccaagaccttgtaggcttctatcaaaacagcaccctgcttgctcacaaggcctaaagaatggctgttagtggccgctganaaatgcccttanttnaagagccaattncttnaacccccctggcaaaacctgaaaaaaaatt

SEQ ID NO: 26847 - DNA, 491 bp, Homo sapiens
  misc_feature (1)...(491): n = a,t,c or g
gaaacaaagatcttgaggaagatgagggaagccctcccctcttcatagtccccatctcttctcctttgtacctgtcaacaccagagttcagtgtttaaacagacaaaatataaagtattgagtaggtggttcatatgccgaatccacttggtaggaagaaaccaccagctttatagtgtgcctgatagattttaaacattcctgggcacccactcaagagtgctctttttatcaccttctggaaatccgcaaagttgcaggggcctctggagtgtctcttctctagagagaattggtgggacccccctcagtgcagtggccccaactagtggagggaaaaaagacttaagtcagatggactcaacagaaatgggtttccagaagaataatgaaaagttgtgggtaggaaaatgaancatttggcncttcaatgaaatgggntgancccagggaanccanccaaaaangggaccccgggaaaccgttnttaa

SEQ ID NO: 26848 - DNA, 496 bp, Homo sapiens
  misc_feature (1)...(496): n = a,t,c or g
gggcagcgcctgagcctgctcagggcctggcttcctgcctgctgtgaggaagggtggaggaggggttcgaggcctcaaccatcccttggcccagagcctcaggccaagcagcctccgcctctgcccaggcctgtctcctcccggcctcctgctctcctgtttcctaaagctttcccgctgggtggctcccagttcttccagaaatcccctccaggaaatttgcttgttgccacaaaataatgcaaatctgttcctggggccgcccaggcaacctgcagtctctgtctccccaagacctgaggagggagggngaggcaggccctgtgcccgtcagggtcccttttccagccatgaggacaaaggataagccgcaccctcgtcacctctcataagctgcaananaaattcctgggtttacctctaanggaancaactccacctanggaaaaggcacacaagnacctnnaaagggacaaagggncttttttcttttaaa

SEQ ID NO: 26849 - DNA, 492 bp, Homo sapiens
  misc_feature (1)...(492): n = a,t,c or g
gcctgtctgggggccaggtgctcaaaaagattgcccagaaagccctggacctgcccagctctggcgagggcctggccttcttcaccttccccaacattgccagtgccaccaagttcaagcagctctaccgctcccgcatgaactccctggagatgactcccgcagtcaggcagagggtgatagaagaggccaagactgcgttcctgctcaacatccagctctttgaggagttgcaggagctgctgacccatgacaccaaggaccagagcccctcacgggcaccagggcttcgccagcgggccancaacaaagtgcaagattctgcccccgtggagactcccagagggaagcccccactcaacacccgctcccaggctccgcttctccgatgggtccttacactcaactttctggtggngacagntcctgttnggnntttncangtttnatgcaagnattctnggtcccaangggcantnaanttngccgggg

SEQ ID NO: 26850 - DNA, 501 bp, Homo sapiens
  misc_feature (1)...(501): n = a,t,c or g
gaggattcactgtgttgcccataaaatactaaacattctcctctcttggttaaaatgagtgactgccacttccttaccaatgacagcgttagcctcactctagtctgccctccctatagataagatttattgaaatacccaattgtaaaattgcccttgttttctgacagcatctaatctanagtgagcccccacttccttanaccctacccccaaatcactcaatcaaacccgaccaccccacacttccccatggagtgcgttctccctcactgcaatgagtaancatcccaacttgttccactacaggtatgttcctgggtgnggcngggggcnttggtnaggganannggngngntgtaccctgggnnccanctcagancgnncngtanannnccggcnngngtggntngggannatgcnnnnnntnnagnnggtggangnntgtgtncttntngnggtngnggntcncnntctnngnacncnncgnnggcngttggg

SEQ ID NO: 26851 - DNA, 497 bp, Homo sapiens
  misc_feature (1)...(497): n = a,t,c or g
gcaaacaaatatttttttcatactaagtcttcaaagtctcgtgtattttatactcatagcacatctcaatttaaccacatttcaggtgctcagtggccatatgtaggtagtggctactgtattgaacagtgccagtccaccctatggagaagaatcaggagacagattgacactaagaaaggaacaacctacccaaaaaggtggaaggggttggcataagtgaagcaaatgtggagagttaaaatttaaataggatgcaacttccttaggaagtaaagaagaaaacttagattcggttactgataagtttgaagcaaggagtatgaagagaaagttgaatgaatttaggtctgattaatttccatctcaaagcaagaggacatgtcatcttctganantgggggctgcaacagacaagtcttactactcaatgtcagcatcacctgggaattgttnaaaatacaaaatctcacggggtgttcaaagggcccaaacgg

SEQ ID NO: 26852 - DNA, 491 bp, Homo sapiens
  misc_feature (1)...(491): n = a,t,c or g
gatgagcttcaataccctgtctccaaatacantcaccttgaaaagtaatgtnnnnnnnnnnnnnnnnnnnnnnnnnnnnnnnntgggggtggacaattcatcccttaaganttagcaatattatggtaggtttgattccagaaagactgtgtttgaggtgatggccacacatcccaagtatgaacatccancaggtgtatcacagacctgggcatangacttcagganagaggccttggctacaagagactagaagatcctgcntgnctgccctacttcagcagggcatcccacagtgtgtgctgtctgggaaaggcacaggcatggcatctcaccctatgtgtgcnngctcagantcncantcatatctantcaagtggtgancaacccccccatcagncagttctcctgctggnncaaancacataggcngcttactgnnaanattgtcnaaataaaaaatttccccacngaatnccgggnnngnaaat

SEQ ID NO: 26853 - DNA, 489 bp, Homo sapiens
  misc_feature (1)...(489): n = a,t,c or g
gnnnnnnnnnnnnnnnnnnnnnnnnnnnnnnnnnnnnnnnnnnnnnnnnnnnnnnnnnnnnnnnnnnnnnnnnnnnnnnnnnnnnnnnnnnnnnntatccannnnnnnnnnnnnnnnnnnnnnnnnnnnnnnnnnnnnnnnnnnnnnnnnnnnnnnnnnnnnnnnnnnnnnnnnnnnnnnnnnnnnnnnnnnnnnnnnnnnnnnnnnnnnnnnnnnnnnnnnnnnnnnnnnnnnnnnnnnnnnnnnnnnnnnnnnnnncccctcatcatcgttataacaaagtaacattgaacaaaacagcactatctgtggacctgctgtanaactccaacctagcctgataagtgaaatcnacangatttaatcaatgaaatgtgacactgtgaaccnttggggtttggctanggggtcctgntctgccatcaaatcnttttagtccncaacangggtgggtttggngccncctttttggaangggttnaattccca

SEQ ID NO: 26854 - DNA, 490 bp, Homo sapiens
  misc_feature (1)...(490): n = a,t,c or g
gccgcatggagcctggtgggctgcggcggacacgggtgaccgactcctccgtgtctgtgcagctccgggagtgactggctggctcctctgtcctgaccccacagcacctccctgacctttaggagccccaactcttagtcacctcctaggcctcttatttctccctggcccttggcttctcacttgatggacagcttcacacacccttaagcggtggactccagcattttcccagcactgtctgagccccatgagggcggagccactccttgtaaattcagtgcccgacagatgctctggcacagatgctttgtanatctctgttgagagaatgcatagacacctgtgcccaaggatgctgagggctggtctctgcttctttgaacttcactgaaactgaatgctcactgctgtgttgccannaacaaccaanccangggtgtnaaaacgnntnggtgngaanaaattttgntttaangggaannaaccc

SEQ ID NO: 26855 - DNA, 574 bp, Homo sapiens
  misc_feature (1)...(574): n = a,t,c or g
acattatgangccnnnnnnnnnnnnnnnnnnnnnnnnnnnnnnnnnnnnnnnnnnnnnnnnnnnnnnnnggnncgagnagatggnanncggantnnancgntnngtcgtggncancctccacctgctgcngctgntngccgcccngccntgnncaaccatgggggtcagtcngantgcctnacccngnccagaggncanaaattatcaccaggcnanccattttgaattcatcncgctcttcggcaaattgcannaaggcaccagtatctctgaaatgtggcaaaatgacttacaaccattgctgatanagcgatacccgggatcccctggaagctatgctgctcgtcagnacatcatgcagcgaattcagaggcttcaggctgactgggtcttggaaatagacaccttcttgagtcanacaccctatgggtaccggtctttctcaaatatcatcaagcaccctcaatcccactgnnaaacgacatttggtcctcccctggcactatgacccaaatttttttccacngggacaaaanantnttntntgnccccagnnntnnncctntccaattt

SEQ ID NO: 26856 - DNA, 500 bp, Homo sapiens
  misc_feature (1)...(500): n = a,t,c or g
ggaaaaaggactgcagggctctctggtgtgccagctgccanctctcatgcagcactcagttttcagtgactctcatgttaattcagcatgccagctgttcaatttaatgtctataccaatggggaatggganagaggtagataatgaggaaacagaagaaataatgaggtaatatgtcatctcctaaaagctcattttgtaacagaaattgtccagactgttactgcattacattttaggtttttctcaatcccctcagaaaacaaagaagctcatacagaacattgcccctaccactagcaagaggcaaatctttcagccctcccaaggctggctttcangctcctgaagctgtgccttctgaatgtgacaccttgtcctggccacatctctggagagacaccacacacatcagtgnttaagtggnacacatngnccctttnaccanaaatgtcccngaatnccggggggcctttttaaaanaanggggggggnttttt

SEQ ID NO: 26857 - DNA, 514 bp, Homo sapiens
  misc_feature (1)...(514): n = a,t,c or g
gggggaggagcggagcggtgcggaggctctgctcggatcgaggtctgcagcgcagcttcgggagcatgagtgctgcagtgactgcagggaagctggcacgggcaccggccgaccctgggaaagccggggtccccggagttgcagctcccggagctccggcggcggctccaccggcgaaagagatcccggaggtcctantggacccacncanccggcggcgctatgtgcggggccgctttttgggcaagggcggctttgccaagtgcttcgagatctcggacgcggacaccaaggaggtgttcgcgggcaagattgtgcctaagtctctgctgctcaagccgcaccagagggagaagatgtccatggaaatatccattcaccgcagnctcgcccaccaacacgtcntangattccacggctttttcgaggacaacgacttcgtgttcgtgggtgttgnantcngacnccggagtntctcctggtctgcncatnaggngaangcctnantgagctt

SEQ ID NO: 26858 - DNA, 508 bp, Homo sapiens
  misc_feature (1)...(508): n = a,t,c or g
ggaaaggccacgcgctgctcattgactgcaggtccttggagaccagcctggtgccactctcggaccccaagctggccgtgctcatcaccaactctaatgtccgccactccctggcctccagcgagtaccctgtgcggcggcgccaatgtgaagaagtggcccgggcgctgggcaaggaaagcctccgggaggtacaactggaagagctagaggctgccagggacctggtgagcaaagagggcttccggcgggcccggcacgtggtgggggagattcggcgcacggcccaggcagcggccgccctgagacgtggcgactacagagcctttggccgcctcatggtggagagccaccgctcactcagagacgactatgaggtgaagctgcccagagctggaccaactggtggaggctgcgcttgctgtgcctggggtttatggcagccgcatgacgggcggtggcttcngtggctgcacgtgacactgctggaaggctccgctgctcccca

SEQ ID NO: 26859 - DNA, 504 bp, Homo sapiens
  misc_feature (1)...(504): n = a,t,c or g
nnnnnnnnnnnnnnnnnnnnnnnnnnnnnnnnnnnnnnnnnnnnnnnnnnnnnnnnnnnnnnnnnnnnnnnnnnnnnnnnnnnnnnnnnnnnnnnnnnnnnnnnnnnnnnnnnnnnnnnnnnnnnnnnnnnnnnnnnnnnnnnnnnnnnnnnnnnnnnnnnnnnnnnnnnnnnnnnnnnnnnnnnnnnnnnnnnnnnnnnnnnnnnnnnnnnnnnnnnnnnnnnnnnnnnnnnnnnnnnnnnnnnnnnnnnnnnnnnnnnnnagcctgtgtttatttctctacaaagccctttccctagagtagctgctcctaccttatattccagtaataccctgaacttcctttataacatgtgctatacttaattgttcatcctttatgtcctatccaatctgcctccccactgccaactagattctgaacccctttgatgatgtatctcttgtttantgttgtanctcagtatctaacacagtgcttcacatgcancangtacgcaataa

SEQ ID NO: 26860 - DNA, 506 bp, Homo sapiens
  misc_feature (1)...(506): n = a,t,c or g
ggtccttttaagagccaaaaaatattggcctgaccccattgtgcgtcctgttatatacaactgagggaataaaacacacccagggattctggaaacaaaacagtatgaacactgcatctcatgagccctagtagataaagcactgagtaacactgtgaggtaaaagtaagttatgtccattagaggaccggcaggtaggcctccttccaagggccagttctgattcattcatggcggctgtctggagcacttctttgggaatgatgcctaggctaagtctcaaatcaaagggaaaaaaatactggaaaaantaaacttataatgcaggggtaatataagtcattcttaacacatatttgtcactcctgagataaatagtatcctagagggatttacttgtgttgctgatggaataacccaaaagtaattgtagtgagattaagcatatagtcccagaaaggcatcatatacttatctacacacacncncacacacaacacatgcac

SEQ ID NO: 26861 - DNA, 504 bp, Homo sapiens
  misc_feature (1)...(504): n = a,t,c or g
gctcactctgtcacccaggctggannnnnnnnnnnnnnnnnnnnnnnnnnnnnnnnnnnnnnnnnnnnnnnnnnnnnnnnnnnnnnnnnnnnnnnnnnnnnnnnnnnnnnnnnnnnnnnnnnnnnnnnnnnnnnnnnnnnnnnnnnnnnnnnnnnnnnnnnnnnnnnnnnnnnnnnnnnnnnnnnnnnnnnnnnnnnnnnnnnnnnnnnnnnnnnnnnnnnnnnnnnnnnnnnnnnnnnnnnnnnnnnnnnnnnnnnnntgactctttcttagcagatgcattagagttagcaatgagatcaacttttagggagacttttttggagaagatgctcaagaaggcaccccatgccatgtacatttttagagagaataaaaaaaaatggttacaaagaaaatcttggtgggtttcccatttagtatctgctatggattgaatgtatcccccaaagttcatgtgttggaactttgatccccagtgcaatggtgttggaaggggacatc

SEQ ID NO: 26862 - DNA, 523 bp, Homo sapiens
  misc_feature (1)...(523): n = a,t,c or g
gaccancaccgtcanaggtctggggctgtccacccggaccccgtctgtgagcacttctgattcnagcgcgggcgcgggcacgggcacgggtatcagcaccncgtctacacccaccaccatcagccagagccncctcatcacctcgtcccccnccctcatctcatcggatcaccctgcccccctctcntggnctccagnannntnnngggncncnncctgcttggctcccccaagtccgtacgctgcctgcntngaagatcaaggnggnnnaccctnggggtnctcccgtncatggnttcnntntntcctanactnntnctccangtganatnttcnntngcngccncntctttatatttttnngncnctgctctcttnnncnnttncannatttcngtnntttcnganncnncgnnctgtanttnnctannnnggctgccnnagnctgtctcctactnngntcnnnctcttncnatctctnngntcnccttngngnttnnttnctnttctnncnnctattctt

SEQ ID NO: 26863 - DNA, 473 bp, Homo sapiens
  misc_feature (1)...(473): n = a,t,c or g
ggacctttgccgtggtgggcatcttgggacacttcagcaagaccatgctactattcttcatgccccaggtgttcaacttcctctactcactgcctcagctcctgcatatcatcccctgccctcgccaccgcatacccagactcaatatcaagacaggcaaactggagatgagctattccaanttcaagaccaagagcctctctttcttgggcacctttattttaaaggtggcagagagcctccagctggtgacagtacaccanagtgagactgaagatggtgaattcactgaatgtaacaacatgaccctcatcaacttgctacttaaagtccttgggcccatacatgagagaaacctcacattgctcctgctgctgctgcagatcctgggcagtgccatcaccttctcnattcntatcancttcgtncacncttctatgatgtcngctccntgacattgtnntttanncaca

SEQ ID NO: 26864 - DNA, 471 bp, Homo sapiens
  misc_feature (1)...(471): n = a,t,c or g
gacaaggtatgctgggagggagggaggctagtgatttgtggggtgaagtgggtggtgaggagtgtttacaactctgcctatctgggggaaattcaaaggaggggtggaatatagcccagtcttgatctaatggaaaataataggaggaaacaattaagcattcgcatagcagtgaataccttacaagaaatttgaacatatagtatctaatttgattctgagaaaaaccttgaaaatagcatgaattcccatttttttgggtgatgaattggaaacagagaggcacactctactagagaaggaaaatataaaatgaaatgaagatacacacaangaaaagtaaggcatctcatcaggctacgtcactaatctctgtattccagagctttatgcctgagcctgcagactatangagacagtgggctagtctggcgcagaaattcccaaagaaaccaataaatgcctgagtga

SEQ ID NO: 26865 - DNA, 467 bp, Homo sapiens
  misc_feature (1)...(467): n = a,t,c or g
gggctgttcaggtaaatgatttcttgtttgatcattggagatttcaaacctgttcccccatgatattgacaggtgaggaagacttgtgagaaaggagcccatccaagacatgttccttgttgctcatcatttccagatgagctgttaagactccttctgattctcttctttactttatcccaagcctcattgggtcccttgtctttacctagacataattggctctataaagtatttgggtgaggctttaggcagagattgagtgtagcctggtctggttgtaaagttccctgacaccttgaccgtgggtctgagagaacagaaatacagctccatcgttggcccgctcttatgctgggacatgcatttcctgttgaaacggccatggggtagcacatgctgaggactgcagtgaggaaatatgctaccctttgttgcangacagcccgtataatgtgttaacacat

SEQ ID NO: 26866 - DNA, 474 bp, Homo sapiens
  misc_feature (1)...(474): n = a,t,c or g
gactggtaatattattcccccgctgacttcatgtcaaaaccaaatgatgatgtattttccttaaggcattgtttatatggcaggtcttcaaccatatattactaacagtttgtaccttatcagacctgacaagattacagcctgaagagttatattttgattcatataagagtatggacttgagcttcaaaggaataataaggccaaattattatagttcaaggactttaataaatattaaatgataaataaggctggttccacactggcttcagggcctgtggataataaaagaaaatcttcaaatggtgccaaacagtattatggctgtcttgccttttataatctgtctttactgcttgccactgtagttgtcagagctgggaatgatgaggtagcatatgtagtttttgttgctgacagaattaanagtaaaggagacttaaaagtaatccatctctgtagcangataaa

SEQ ID NO: 26867 - DNA, 477 bp, Homo sapiens
  misc_feature (1)...(477): n = a,t,c or g
gggcacatctcacatggcagcaggcaagaannnnnnnnnnnnnnnnnnnnnnnnnnnnnnnnnnnnnnnnnnnnnnnnnnnnnnnnnnnnnnnnnnnnnnnnnnnnnnnnnnnnnnnnnnnnnnnnnnnnnnnnnnnnnnnnnnnnnnnnnnnnnnnnnnnnnnnnnnnnnnnnnnnnnnnnnnnnnnnnnnnnnnnnnnnnnnnnnnnnnnaaaaccatttacaaaactctaagcagccttaaaggaaaccaccaagggaccaaggcctgatgaagcaagagtaggagggaacagatgcttggatagggcaggtgagtcacaggctgatgggagctgccaccgtcagtagaggtcctgatgacctggganggtgggagccagacagatgggagtatcctagcctcagttcctttcatcctcagaactcctcccagtgcctctcaatggctaaaccaaccaaaggttggagctcaag

SEQ ID NO: 26868 - DNA, 475 bp, Homo sapiens
gcctaagagggccttctgtagaagttacttgatgcttttgtaagaaaggagggaagatcgtgtagcctacacttactcagtgcttccttatgtgcccagcagtattctaagtactttggggcagtggcacatttcatggatatgagcaaaaatcctcttaattgccattaggactctgcttcttaagtgcagtggtgatggcagggttacaactccagctagcttctgggtcaaacaaaagtatgtatgctgtatgtacacatacacatgcctacatatgccatgtgtcttttgcttctaaagaatgttggaaggtatcaacatttgcagcatttttatgcacccagagcttgatactggtcacaccagccatcctatcttttccatacagctcacgccagtgtcagcaagtggtgctcaaataattgtacatattttgttgtgttttaaaataccacttttagggacccatggg

SEQ ID NO: 26869 - DNA, 468 bp, Homo sapiens
ggacgtgatagccatcagagtacttacgtgaaagatgcgatgtaaagatgatgagggaggagagagtgccgaatgcaaatgtttttacactttcatatttgtgtgttccacagacttccctctcccatgcccttctgctatgtgtgctgccattttctctgaatgaagggaaaagaaatattggcagctctcagctaaaattcccagtgatggacgtgctgtcatgcagccagggtgagctgtgtatcagggcatgaaccctgagtcacgacttgacctcggaacttcctttctgaagcaccatcttcaagtggtgcttaaaaggaataaaaacaaaactcaagagcactatctagtacatccgcccagacagcccctcagaggcgctgggagaagccctgtgcctgtgtttaagccacacatcccaagacagactctacaccatgtcccagacaccacaggagcgct

SEQ ID NO: 26870 - DNA, 474 bp, Homo sapiens
  misc_feature (1)...(474): n = a,t,c or g
gatataattgaaattatgttacatttaagtaatagtaagattatttcnnnnnnnnnnnnnnnnnnnnnnnnnnnnnnnnnnnnnnnnnnnnnnnnnnnnnnnnnnnnnnnnnnnnnnnnnnnnnnnnnnnnnnnnnnnnnnnnnnnnnnnnnnnnnnnnnnnnnnncctgccagtaatagtaaaattattaatgancnattttattccattttttaatactaagtcttgcaaatccantgtgttttcacacttantgcanatctcatttcannctanccacagttaaagtgctaaatggcctcangtggctagtggctgaattgggcaagtgcagattgagataaattcacacatattgcatccgatactatgtgttgactangcacctgaantgagganantacgtgaattctaaagtaccanaattttttagggtanacgangtcaacagcatttgcantacattggggccg

SEQ ID NO: 26871 - DNA, 478 bp, Homo sapiens
  misc_feature (1)...(478): n = a,t,c or g
ggagctctgaggcatcattcactctaacagcggctgcagaggaggaaaaggtcttaggagaaactgccaacattttagaaacaggtgaaacgttggagcctgcaggtgcacatttagttctggaagagaaatcctctgaaaaaaatgaagactttgccgctcatccaggggaagatgctgtgcccacagggcccgactgtcaggcaaaatcgacaccagtgatagtatctgctactaccaagaaaggcttaagttccgacctggaaggagagaaaaccacatcactgaagtggaagtcagatgaagtcgatgagcaggttgcttgccaggaggtcaaagtgagtgtancaattgaggaggatttagagcctgaaaatgggattttggaacttgagaccaaaagcagtaaacttgtccaaagcatcatccagacagccgttgacantttgtacgtacagaagaaacagccaccgaatgt

SEQ ID NO: 26872 - DNA, 474 bp, Homo sapiens
ggaagtccctgctggcaccgtctctgccatagcattgggggagcactttagttgtccgtttttccaggctaatccattccttaatgacttaagttgacatttgttgaattatggagtacgagttcgctagcactgctataacaaagtaccacaaactgggtggcttgaagaatctcagtgtatggtctcagctctggagaccagctgtctgagatcaaggtgtcttcagggttggttccttccaagggttgtgaggaaaagctggtcctgtgcttctctcctggctcctggaggtttgctggtaatctgtggcattccttggtttatagatacattgcctctgtctctgcggtcatcttcacgtgattttcttgctgcgcaagtgtttctgtattttcccctttcgtaaggacatggtcatattagattagggcccgccctactgactcattgcaacttgatcatttcaaagac

SEQ ID NO: 26873 - DNA, 474 bp, Homo sapiens
  misc_feature (1)...(474): n = a,t,c or g
gataaaatnnnnnnnnnnnnnnnnnnnnnnnnnnnnnnnnnnnnnnnnnnnnnnnnnnnnnnnnnnnnnnnnnnnnnnnnnnnnnnnnnnnnnnnnnnnnnnnnnnnnnnnnnnnnnnnnnnnnnnnnnnnnnnnnnnnnnnnnnnnnnnnnnnnnnnnnnnnnnnnnnnnnnnnnnnnnnnnnnnnnnnnnnnnaacccatagatccatanatctttggagaatagtttatataacaactctgttttaattgatcatgtctccttgtagccatttacacattgctgtaagaaggtgtacagcccagcatttatcagatgtattggaatttatggaaccagaacgtattttatctgcagcaaaggatatggctgaacgcatattaccagctgctgctaagtttgctcaagacagttcacaagaaacaggtgaatatctgctaatgtttgcnaatcattattaataaggcttaaa

SEQ ID NO: 26874 - DNA, 469 bp, Homo sapiens
  misc_feature (1)...(469): n = a,t,c or g
ggtgaaattaattgattcatgaggaatattttccacatgtttttctgcattgtgggaacatgttcatatagcgcattattaagactgcnnnnnnnnnnnnnnnnnnnnnnnnnnnnnnnnnnnnnnnnnnnnnnnnnnnnnnnnnnnnnnnnnnnnnnnnnnnnnnnnnnnnnnnnnnnnnnnnnnnnnnnnnnnnnnnnnnnnnnnnnnnnnnnnnnnnnnnnnnnnnnnnnnnnnnnnnnnnnnnnnnnnnnnnnnnnnnnnnnnnnnnnnnnnnnnnnnnnnnnnnnnnnnnnnnnnnnnnnnnnnnnnnnnnnnnnnnnnnnnnnnnnnnnnnnnnnnnnnnnnnnnnnnnnnnnnnnnnnnnnnnnnnnnnnnnnnnnnnnnnnnnnnnngtgacaattgctttggatccaagtttangtttgctcctttttgtttttgntttgttttttgtttganacaggtc

SEQ ID NO: 26875 - DNA, 473 bp, Homo sapiens
  misc_feature (1)...(473): n = a,t,c or g
ggacttttataaaaattgtaatctaggattgaatcaaaaagtatgcattgcatctgttaatcatgtttttnnnnnnnnnnnnnnnnnnnnnnnnnnnnnnnnnnnnnnnnnnnnnnnnnnnnnnnnnnnnnnnnnnnnnnnnnnnnnnnnnnnnnnnnnnnnnnnnnnnnnnnnnnnnnnnnnnnnnnnnnnnnnnnnnnnnnnnnnnnnnnnnnnnnnnnnnnnnnnnnnnnnnnnnnnnnnnnnnnnnnnnnnnnnnnnnnnnnnnnnnnnntgccnnnnnnnnnnnnnnnnnnnnnnnnnnnnnnnnnnnnnnnnnnnnnnnnnnnnnnnnnnnnnnnnnnnnnnnnnnnnnnnnnnnnnnnnnnnnnnnntcctggttatcatgttcttttaagccagattctanaatggattttcanctttttatacngacacttgtgaaatgtcnaattcanatcccttangtttaa

SEQ ID NO: 26876 - DNA, 465 bp, Homo sapiens
  misc_feature (1)...(465): n = a,t,c or g
gggtccaggctgctgtcactgcattttcttccttgtgaatctcttctcttctgtcgttgacttactgggttgattccgtgtggtcaacttgcgtgatgtgtacataccaggctagtcagacctgccctggctgctcattcaccgattatgagattccttgtagacgtgattctgagaactcaggaggccaccatgtaggaaaggtatgcttcttagagctctggatgtttttagtttgattattgtcagtattatcttgggtcagtgcttctcaaactaattccagtttgtgaatcattttacaattgagttgtttacaaatgcccaattgttgggcatttgaccttgctgacccgcagacctattgttcccacttgtcattatagaagcaaacacttnnnnnnnnnnnnnnnnnnnnnnnnnnnnnnnnnnnnnnnnnnnnnnnnnnnnnnnnanctcactgac

SEQ ID NO: 26877 - DNA, 578 bp, Homo sapiens
  misc_feature (1)...(578): n = a,t,c or g
tgggnnnnttgnngcctanttctatgagtntcntacggcctcnataacgactaangggcccgnaggncnggccctaaaaggccaaaganattcgggtncnacgcatnnannnnnnnnnnnnnnnnnnnnnnnnnnnnnnnnnnnnnnnnnnnnnnnnnnnnnnnnnnnnnnnnnnaagtcccttctgcctnnnnnnnnnnnnnnnnnnnnnnnnnnnnnnnnnnnnnnnnnnnnnnnnnnnnnnnnnnnnnnnnnnnnnnnnnnnnnnnnnnnnnnnnnnnnnnnnnnnnnnnnnnnnnnnnnnnnnnnnnnnnnnnnnnnnnnnnnnnnnnnnnnnnnnnnnnnnnnnnnnnnnnnnnnnnnnnnnnnnnnnnnnnnnnnnnnnnnnnnnnnnnnnnnnnnnnnnnnnnnnnnnnnnnnnnnnnnnnnnnnnnnnnnnnnnnnnnnnnnnnnnnnnnnnnnnnnnnnnnnnnnnnnnnnnnnnnnnnnnnnnnnnnnnnnnnnnnnnnnnnnnnnnnnnnnnnnnnnnnnnnnnnnnnnnnnnnnnnnnnnnnnnnnnnacttctcacagctccaca

SEQ ID NO: 26878 - DNA, 166 bp, Homo sapiens
gaaaatgaataaattcgtgccctgttttcaaagaactcagaggcaggtaaaaggtccagcttgcagataaaagattacaaattcagtatcgtaagtgccatcctgaaggagtacaggagatgtttttgtccgtgtaatcattcattcaacaatttttttttttttt

SEQ ID NO: 26879 - DNA, 470 bp, Homo sapiens
gcatcagggcagggctcacagctgagccacaaggtggacgtgctcactcaggaagcatgtggaagggaaggggcagcccagggaatacgtgtcaggcactttcctggggctgtctcatcataagttccctcggcgtgggaagaactggcttggaaaaacaagagtaaccccaacaggaagccagtgggtaggggcaaagtggtagttcctcacataagtgcaacttcagacttatgggtgccagaggtgggaggtttttagagacgagtgtttttcccttcccttccatgtagatctcagtgaggaacagagaaagcaaaaaactccccagagtcaccccggctgatatgtctttcatacttgaaagagtttatgaaacactggaattatttctgccttgcatattcagaagaacttaccacttaatttttttgcctggaaaataacatttgctactcaatcagctttgt

SEQ ID NO: 26880 - DNA, 470 bp, Homo sapiens
  misc_feature (1)...(470): n = a,t,c or g
gggcaaggctagatgaagaagacttaagcagattaatggtacatctatgttgtaaatgagcaggaatgatgctatttgtatttcttagtgtgacacaaaatttgtgatcacataatcacagtttcacaatgtgatgagttattgaaattttcaggagcactgtttgtattaatgctaataatataaagtctgtgcattgtgattttaccagtaaaatanaacatatgtttatccttcaaatgtgtagccttccttacttcatctgtggagtttanagctgancaaagaatcaacatccaattaagnacatcaagctcagttaanaatttgattagtcatatttatttntgctataaaataatactttgaaatattttacgggctgatttcattactcacatgcttacagatnatttaangatttgtcttancgaataaaaggttattttgtttacttctctggcattttt

SEQ ID NO: 26881 - DNA, 454 bp, Homo sapiens
  misc_feature (1)...(454): n = a,t,c or g
gaaaacaatcttgtcctaaaacaattcttagatccaaatttacactcccctacagatctgcttttattctcaaagacagtgattacattgacataacaaatgtccattggggcaggcaaatttctactgagtctaaaaagcattccaaattctaggagcaaaagttctgattttccttaaaatctttgcaaataaacagcaaagggtattctggatgtcttgtcaatgcaaattaggtttgatttagagaagttttaaatttaatcgcaatgaaaagattagttaatacatgaatctttttatgagaaaaaatcattattctggataaagtcataattgtttgtttacaatattaagagcagacacctaaacatacaataataccaaagtattgagaaaattaccactgggaacaccatctcaagttatcacaccatttaccnctttngagcca

SEQ ID NO: 26882 - DNA, 444 bp, Homo sapiens
  misc_feature (1)...(444): n = a,t,c or g
gcgacttctggtctattacatcgtcacaggagaacagacagcagaattagtgtctgattcagtctggttaaatattgaagaaaaatgtggcaaccagctccaggttcatctgtctcctgatgcagatgcatattctccaggccaaactgtgtctcttaatatggcaactggaatggattcctgggtggcattagcagcagtggacagtgctgtgtatggagtccaaagaggagccaaaaagcccttggaaagagtatttcaattcttagagaagagtgatctgggctgtggggcaggtggtggcctcaacaatgccaatgtgttccacctagctggacttaccttcctcactaatgcaaatgcagatgactcccaggaaaatgatgaaccttgtaaagaaattctcaggccaagaanancgctgcaaaagangatncangaaat

SEQ ID NO: 26883 - DNA, 448 bp, Homo sapiens
  misc_feature (1)...(448): n = a,t,c or g
ggattaacatacaaggccgggcatggtggctcatgccggtaatatatatatattttagatgagacnnnnnnnnnnnnnnnnnnnnnnnnnnnnnnnnnnnnnnnnnnnnnnnnnnnnnnnnnnnnnnnnnnnnnnnnnnnnnnnnnnnnnnnnnnnnnnnnnnnnnnnnnnnnnnnnnnnnnnnnnnnnnnnntacttcaaaatattctatcttggtaaagaaactgggaaaagtagagtgaaaatagctaaaagttttaggtattgtagttgtcaaaaacatcgttaacattttccagatcctaacattaaaagaacaccaccgagctaggtccattgggtaagaggactacntgaacactgaaccatgttaaagaatgttggcnnnnnnnnnnnnnnnnnnnnnnnnnnnnnnnnnnnnnnnnnnnnnnnnntgggcaatcaccta

SEQ ID NO: 26884 - DNA, 449 bp, Homo sapiens
  misc_feature (1)...(449): n = a,t,c or g
gggcgagcgccggaggggcaaggggcacgatggcctttaccagggtctcagtacagccaccaaggacacctacgacgcccttcacatgcaggccctgccccctcgctaacagccaggggatttcaccactcaaaggccagacctgcagacgcccagattatgagacacaggatgaagcatttacaacccggttcactcttctcagccactgaagtattcccctttatgtacaggatgctttggttatatttagctccaaaccttcacacacagactgttgtccctgcactctttaagggagtgtactcccagggcttacggccctggccttgggccctctggtttgccggtggtgcaggtagacctgtctcctggcggttcctcgttctccctgggaggcgggcgcactgcctctcacagctgagttgttgagtcngttttgtaaagtc

SEQ ID NO: 26885 - DNA, 533 bp, Homo sapiens
  misc_feature (1)...(533): n = a,t,c or g
ggccagctagttgtttaccaattgagttttctcttgcataatcaaagaatcaactcttgtaatgtttaatgctgttactttttattttctaattcattaatttgtgcttttatctttattttttctgatttttcttttgctggctgggggtttataattagcgacttcttgaattgaatgcataatttatttcttttaattccttaccaggtagttttgtaagtgtttaaatctttgaatttttctgtggacccagttttagggtcttgcagaatcacatatattttgatatgtttnnnnnnnnnnnnnnnnnnnnnnnnnnnnnnnnnnnnnnnnnnnnnnnnnnnnnnnnnnnnnnnnnnnnnnnnnnnnnnnnnnnnnnnnnnnnnnnnnnnnnnnnnnnnnnnnnnnnnnnnnnnnnnnnnnnnnnactcctgcaacacgccancgaatttttatttttagtaaaacanggttcacaagttggcaaggctggcctgaaccccaaccncaatnatccgcccccccnactc

SEQ ID NO: 26886 - DNA, 523 bp, Homo sapiens
  misc_feature (1)...(523): n = a,t,c or g
gctctgatctctgaggtttgttttctgtttttttaatgtttaagttttaggttaagctctcagcttcacagtctgctgagtttctgtgtagtaccttaaatacccttagctgtctgttgataactacttatatttacatcggatggattttgtctctgccttttagacttcccaagtaagaagcggaagaggagccgctggaaccaagacacaatggaacagaagacagtgattccaggaatgcctacagttattccccctggacttactcgagaacaagaaagagcttatataggtaaatatacgttctgcatccaaatgcactttgagattgttaacgatttattctgagcaagatctgcattttttgaaagtttgagattgtagttatcttttttgagatgagatactttcacgactttggatcatccgtcagttttgcccantgagttctgcattgcancncctggttttggccggtcngnactgnatgtcnccaganttcaaggaagnagggtcccta

SEQ ID NO: 26887 - DNA, 547 bp, Homo sapiens
  misc_feature (1)...(547): n = a,t,c or g
gcaagattgcannnnnnnnnnnnnnnnnnnnnnnnnnnnnnnnnnnnnnnnnnnnnnnnnnnnnnnnnnnnnnnnnnnnnnnnnnnnnnnnnnnnnnnnnnnnnnnnnnnnnnnnnnnnnnnnnnnnnnnnnnnnnnnnnnnnnnnnnnnnnnnnnnnnnnnnnnnnnnnnnnnnnnnnnnnnnnnnnnnnnnnnnnnnnnnnnnnnnnnnnnnnnnnnnnnnnnnnnnnnnnnnnnnnnnnnnnnnnnnnnnnnnnnnnnnnnnnnnnnnnnnnnnnnnnnnnnnnnnnnnnnnnnnnnnnnnnnnnnnnnnnnnnnnnnnnnnnnnnnnnnnnnnnngtatatggaggnnnnnnnnnnnnnnnnnnnnnnnnnnnnnnnnnnnnnnnnnnnnnnnnnnnnnnnnnnnnnnnnnnnnnnnnnnnnnnnnnnnnnnnnnccacatggtccanggggggaacaacaacactggggccgtcaattnttgggggtanccgnnggaaancancnngcntntannntngnggnngggctaatncctcntggg

SEQ ID NO: 26888 - DNA, 535 bp, Homo sapiens
  misc_feature (1)...(535): n = a,t,c or g
ggtggtttctcctaaaaaatgatcttatatctcctgatcttaatcaggaacaaggcaaggatgtcctctcttaccatttctattcaatgtcttagcanaagtcctagtgaatgtactaagactataaaaggaaacaaaggtatatagattaggaaggaattaaactgtctttgtttgcagatgatatgattgtctatgtggaaaatcccaaagaaacagcaacaaaaaaaaaagccncctggaactaatgaccaattacaggaaggtaccaggatananccttgttaatatccaaaataaattgctttcctanatatcagaantgaacaggctannnnnnnnnnnnnnnnnnnnnnnnnnnnnnnnnnnnnnnnnnnnnnnnnnnnnnnnnnnnnnnnnnnnnnnnnnnnnnnnnnnnnnnnnnnnnnnnnnnnnnnnnnnnnnnnnnnnnnnnnnnnnnnnnnttanccacctgatggganatcctgtaatccanctacncaagangnttatcnggngaacacttnaaccaggg

SEQ ID NO: 26889 - DNA, 451 bp, Homo sapiens
  misc_feature (1)...(451): n = a,t,c or g
gacctttttagatggaatttggaatactgaatcagtgacatgcagtttatcaatatctttccgtttgtcctcagatttccaagttctgcaagcacaagtttctttgacttagttaccttttaactgttcattgaaatcattttcaatgtctctcatggcatttaacacatagcacattctataaattttttattggttacattctgagttctaattgagagttgaacttacacacagaatttaagataaaaaatgaccatgtgaagacacaatagtatagtccagggattggcaaaattttgggtaaggaatcagatagcacgtattttaagccatgagatctannnnnnnnnnnnnnnnnnnnnnnnnnnnnnnnnnnnnnnnnnnnnnnnnnnnnnnnnnnnnnnnnnnnnnnnnnnnnnnnnnnnnnnnnnnnnnnnnnnnnnnnnnn

SEQ ID NO: 26890 - DNA, 448 bp, Homo sapiens
  misc_feature (1)...(448): n = a,t,c or g
ggcccggggattagccccagcacctgggaccctgaatggtgagaaggcacctagggggtgttggaacacattctgagttcagagcctggtcagggagaaaaaaccaaacggagatcaggaaggggaaggggccttcgagggctttcccatcccaacttcccaggatgcctgaccccagagctcctggatttgatccacgcctcgtgacacacacaacccctgggaggaaggagcccaggccccttggagagccccagaggcctctaagggccggtgagtctaggacatggggcangagctgcaaatggggcctccctgctccccacccttccttccctcctcctctaaacattgccccacccacctcgccctgtgagcccagccccctgcacggcccacactgtangggcatggggtgttccaagagatgctcctgtcgaccaggcgc

SEQ ID NO: 26891 - DNA, 456 bp, Homo sapiens
gcgaggcttcgtcctggagaaactcagggttgaaagtagagcaaggaggggccagggcaccgggctgtctgtgacttgtcgttagtcatgtcacgtttgtgggctactggacagctttatgcttggaggagccctgtcccggtttttcagtggtgtcgcatggagaggggaaaccgaggcttcccaggggttaccatcctgcttctgccattcccttttctaatgacaattgtactgtcatccagcagatctaagacatgaccatttggaaaatacacagttattttatttgccactaaggacctgattgcgccttccgcagtaagacccatcccaagcccagagacatgcgtaggtggaaagccgcggcttactgatgaaatacgctgatttcacagagggtcacacacattgtgccgagagctttacgtttcttacctcatgtatccacccaaa

SEQ ID NO: 26892 - DNA, 526 bp, Homo sapiens
  misc_feature (1)...(526): n = a,t,c or g
gctggcatggaaagtgggggnnnnnnnnnnnnnnnnnnnnnnnnnnnnnnnnnnnnnnnnnnnnnnnnnnnnnnnntgctggaagtgagttgaatcggggctgcccagtaggaaacacagaactgatgaatccccgggtacccgtatctggttccgcaactcctctgtgttgactgcggagagcacaggaggaaccgtgttgggtccttcctacacctcacactgctggaagataaaaacagctccaagcagtccgtgcccagtgaggcatgcaaaatgcatcaggtccagagagacaagagcaaggatttcagtcacgcctcccaaccacaccaggggcaagcgtggaaaggcatctatctgttcctgcatcctggtctcggacactatcttcctgttcctggaatctgtaacaccaagagtgatttgcagccatcaatggccaatatacttgaacaaaaattctttttcccttanccaaatttgtcngtttgtttgagacaaaatctcatccgtcgccaatctg

SEQ ID NO: 26893 - DNA, 236 bp, Homo sapiens
gaacgagatgatcaaaaacaaaaataccataatgaaatgcctgatttcaacaatatcagtcattatgatacatttaaattgactaaagcatcccgattaaaaggcagagattgtcagactggattaagaagcaagacccaactgcatactgtccattttaaatacattttgcactatgtagtgcattttggctacagtgcatattggcttctatgtagcagctttttttttttttt

SEQ ID NO: 26894 - DNA, 501 bp, Homo sapiens
  misc_feature (1)...(501): n = a,t,c or g
gagataatgctgattgcaataaccacattaacaaagcctagttgaagaaggcaggcatttgaaagtggtttattttcttattcagttttgacagttcttaatttattctgaatgtaagtcctttgttggatatatgattagtaaatattttnnnnnnnnnnnnnnnnnnnnnnnnnnnnnnnnnnnnnnnnnnnnnnnnnnnnnnnnnnnnnnnnnnnnnnnnnnnnnnnnnnnnnnnnnnnnnnnnnnnnnnnnnnnnnnnnnnnnnnnnnnnnnnnnnnnnnnnnnnnnnnnnnnnnnnnnnnnnnnnnnnnnnnnnnnnnnnnnnnnnnnnnnnnnnnnnnnnnnnnnnnnanagnctcgnggntnccnnganggaagnncnnaatcttntttnagtgggggngnnngncnntnggtggcgnannnccnngnannnncgagnggtcngngggggccgggnaannatgggnncngngggntcaggtcnnagnnncgacc

SEQ ID NO: 26895 - DNA, 520 bp, Homo sapiens
  misc_feature (1)...(520): n = a,t,c or g
ggtcacttcaacaatannnnnnnnnnnnnnnnnnnnnnnnnnnnnnnnnnnnnnnnnnnnnnnnnnnnnnnnnnnnnnnnnnnnnnnnnnnnnnnnnnnnnnnnnnnnnnnnnnnnnnnnnnnnnnnnnnnnnnnnnnnnnnnnnnnnnnnnnnnnnnnnnnnnnnnnnnnnnnnnnnnnnnnnnnnnnnnnnnnnnnnnnnnnnnnnnnnnnnnnnnnnnnnnnnnnnnnnnnnnnnnnnnnnnnnnnnnnnnnnnnnnnnnnnnnnnnnnnnnnnnnnnnnnnnnnnnnnnnnnnnnnnnnnnnnnnnnnnnnnnnnnnnnnnnnnnnnnnnnnnnnnnnnnnnnnnnnnnnnnnnnnnnnnnnnnnnnnnnnnncctaggtagctaagggcttaaaaaatgtatttcctaaataatacttgaaaagtgaaattactctttgatccatangctgcanaatggatgttttattancaaacatgaaaacattaatctccttctgatcccatcagagcttt

SEQ ID NO: 26896 - DNA, 529 bp, Homo sapiens
  misc_feature (1)...(529): n = a,t,c or g
gcttgaaaaccttaaatactttctaaacagaaagaaaggtgttaccagtaattatcatctattaaaatataacccctgtgtctaatagtataatgaatcanatgtnaagagggaaaaactgaaaggatggaaaggataatggagccaagagcaggaggcagctttggggatggataaaggacaaatcattccagacaaatatgatcactgttttaaatcgcattatgagattaatggatgaagggaatgcactagaggtaatatatatggattttactgaagcatttgatacactactccatgaatttccacttgcaaaattaattcaaattgggtagaatatgtgcatggncacatagattgaaaattggcttaaggaccataaacaaagagcagtgacaaatatcggtccctcacatttangtgggaaacagtgtccactgcattcgtgaggacccatgcccactttggcatcacacaaccacttcactaatgatccggggcaaggaaaatgaaagtcanaantccc

SEQ ID NO: 26897 - DNA, 524 bp, Homo sapiens
  misc_feature (1)...(524): n = a,t,c or g
ggtatgaggaagccgctctctccacctaacaccaggtaacaattaattgagatgtcaaaagcatagcctcncttgtagaaaagtgtttttgtttcatattagttagaggaaaggaaacagtagctctagaaacacacaactgcggtgtcatcactgaatatcatcaaaagacttgattgtaatggcggaaaggaactgtcctttgctcttgtttgaacctttcaggaccagtgcatantattgcacaagtctcattgttaaaaacaatctaaaatccaggttttttttcctttgaggcaggatcttnnnnnnnnnnnnnnnnnnnnnnnnnnnnnnnnnnnnnnnncanncannaacccttttgttatgcangcncttangntanagtaaaataccgnntaanaaaangaaaaacttttgggacctgtttgnggcntttgggttatccaccagnccanngtcagaaaagtcnacttagttgncnctcanggnnanggnagnncacanccaangtttcgnngttg

SEQ ID NO: 26898 - DNA, 614 bp, Homo sapiens
  misc_feature (1)...(614): n = a,t,c or g
tttgnggcctnntcnatagncgattttacnngcccatnaacgactcangcccnggaaggtccgcaaangaggccaaaaaattcggcncgagcaattggcaacagataanaaacctttattcgtcatttccatgtcagacaatggcgctcagatttatgaactggtggcacagacagtttctgaaaagactgtctggcaggacctaatctgtcggatggctgcatcagtgaaggagcaatccacaaagccaattccattaccacagtcaacacctggngaaggagataatgatgaagaagatccttcanaattaatagaggagcagcatggcatttcagtcactggtttgcanagtccagacaganatttgggattagaatctaccttaatatcgtcaaaacctcagtctcattcactgngtacctctgggaaatcagntgtacgtgatctgtttgtggctgagagacagtttgcaanggncnaacatncagatgggacactnntnggaagttggtgaagattncanatcgcaatcccagnttcacacctngctgtcgcacaanagtgngggcttggntgacnaanaaatttgggtttgttnnancnttgntggt

SEQ ID NO: 26899 - DNA, 504 bp, Homo sapiens
  misc_feature (1)...(504): n = a,t,c or g
gccaacccagctgccattttggtgacaaaaaaaaaaaacancaaaaccccanaatncanctttctnggatanncnggnaaanaannanccnacncncnatnncccnagggnaggngggaaaatnctncccanggggggnggnattggaaaancnttgcccnaanantgnacncngaccantggggnctacnannggntttagttgaaaaccccaaangntaaaccaacntnttaaaatncggaaannggttggaaanaatnccaggtnngggnccaggantaanaatncatgaggnngggcanatnggcccannccngtanccccaanantttggnaggccanggngggtgggnnaancngaatncaggttttgacnccancctggccaanatggnnnnnnnnnnnnnnnnnnnnnnnnnnnnnnnnnnacntgggtttatggngggnncctgtaancccagctttccaggnggttnggcagggnaancttttanccnaggggg

SEQ ID NO: 26900 - DNA, 514 bp, Homo sapiens
  misc_feature (1)...(514): n = a,t,c or g
gtgcccagcagcgcctggggcagtctanactgtggggagaggcggaggcggaggcggaggcggcagaggcagangcagcagaggcagaggagacataggaggcanaggaggcagaggcagaggcagttgtgctcttattacagtgttgttcttgaatctattgccantgtgtgatacgttatttacaaccaggttttatgttatctgcggaagctttttagaatctctctctctaaggttctgaaattttataacagcttgttggggatcttttcattttattgangctactaaacctgcagactatctcttcttgagaatttttttttttttncccggttacttttttacngataatcttgttnttcagatgntaggctgcttanaccattacacctgcattgatttttatttttccccttccattttttcantttggcctttaatncnagttctggnanancctgtgactttanccncnacaattncattgganttntaaatttttggggag

SEQ ID NO: 26901 - DNA, 527 bp, Homo sapiens
  misc_feature (1)...(527): n = a,t,c or g
gcttatttaactcaacatattgaaaatattactttttccatgtgtaatcatgttaaaggtgtaataacacattccgcacattttctttcatgctaagtctctattttacgttcatggcacaactattttacactctcagccagcggccacaccgcacaacctgggtctgggatgccaaaagccttcggtcctgggacgcctcgttggtgcccacgactggcacagacgatgcacccgccaaaggacacaggagtggcggccgtctaaagaaccaaacgtgtgagacaggaccagtggttccctgggcagcaaggctgacaggcacttttatttgctgctttgcacttccctctatttttcaaattttcaaaagtgatcacgtgccatttttaatttaaaaaaatatatataacttccttaaaaagcaacggatgtgcgaaaacatgtcctggctgagctgagcacagtcccactcgtctgtccaagggaccggaacacggngcaagagganggcggtgnggccgttg

SEQ ID NO: 26902 - DNA, 515 bp, Homo sapiens
  misc_feature (1)...(515): n = a,t,c or g
gaaaattttaacaagatacataatgtggccttgttaatctcataatgaatatatattagttttgattaccagctttattggagactagggactgaatgcataagtggcatccacagataactcagaattaaacgttttagagaaaacttttttttaagagtgcttactgggtacaaaagtggagggatgtttatttctttcttttttttggctctggaaatctaagtgtacagttaaatgacctaaagaaaggtaatagaagagaaaatctttatccatttataaactggataattagtgttctaatttgtgtttgcaaggttacatgtacaaaattgatacagacatcaaatctatgaatctattctgtagatttatagatttgctctcaacaccttccaataataggagtgtagacataanatatatgataaatatagtttttaggtcacttangtggcaaatcacagggctgtccgaattccatgaaagaatgttaatggccggcacggggg

SEQ ID NO: 26903 - DNA, 521 bp, Homo sapiens
  misc_feature (1)...(521): n = a,t,c or g
gtatcaccataatttaatataatgaaacatcagttgattgcagtcttaggaatagacgtttactttcatttaatctttgctttttttggttaaagcaataaacaaaaactctcgtttgaatttttcagagtaaaaagtcttattttgttaaatcttgcagcgcctgtgacataattctggaaagtattttccttatatagtgttctagagtagaggtttataagtgatatgttttggatctattcaagttccatgaaacccctcagaaagtgtgcagtgggccaggcgcagtggctcatgcttgtacnnnnnnnnnnnnnnnnnnnnnnnnnnnnnnnnnnnnnnnnnnnnnnnnnnnnnnnnnnnnnnnnnnnnnnnnnnnnnnnnnnnnnnnnnnnnnnnnnnnnnnnnctgggcttggtggtgcacgcctgtggtcccngntacttggaagctgaggnacaagaatcgcntaaacctggaagcggaggttcaatnanccganacacacactgtctcca

SEQ ID NO: 26904 - DNA, 479 bp, Homo sapiens
  misc_feature (1)...(479): n = a,t,c or g
gactaccattagaaatctttcaacctaggcataagggtgggcgtcggtgtgggtgtggaagtgcagatgctttaaccatgacttctgacagagcatcaccaccagtactagaagattcaaccctgccttttatttcccctaagtaacaccatatggtaccnnnnnnnnnnnnnnnnnnnnnnnnnnnnnnnnnnnnnnnnnnnnnnnnnnnnnnnnnnnnnnnnnnnnnnnnnnnnnnnnnnnnnnnnnnnnnnnnnnnnnnnnnnnnnnnnnnnnnnnnnnnnnnnnnnnnnnnnnnnnnnnnnnnnnnnnnnnnnnnnnnnnnnnnnnnnnnnnnnnnnnnnnnnnnnnnnnnnnnnnnnnnnnnnnnnnnnnnnnnnnnnnnaggctggtcncaanctcttgactcaggtgatgcacctgccttgacctcccaaagnctgggattanggnnttcnccannnnncnancccnttttt

SEQ ID NO: 26905 - DNA, 497 bp, Homo sapiens
  misc_feature (1)...(497): n = a,t,c or g
acctaacaccttcattatcggctgacgccataanctttggggaatggacaagactgnaaaggagatgtggaacacaggatanaaggcacatcgaggctggancttatcttnactagaccacancccacacccganaccgccctatgggcatgggccantggngggtaatcaaanactttggtgtgacncctccttaanantctcttcccactttcttctcccaaaataaatncattttctaagacaagaccctgaatcagaatcagtttttctacaaactttgggtggtgttaattcctgccancacagggcaaagcanattacagtgaatggagttacagtattcagaatgnattatagggcnctaggcacgtgatttaccacctatagtanncaaggcttcacanatggngtatttcngctgtgttggttagttttanctncnnanngangacanngaaggntntntttcagnnggngcnntttntncntttttg

SEQ ID NO: 26906 - DNA, 499 bp, Homo sapiens
  misc_feature (1)...(499): n = a,t,c or g
ggagcaactgggtcccctctttttaaacaaagcagtgtttttctgaaggcccagatatggacactcactccattgtgtagtctcatccggtttgctttccagctatgtgatgaaatccggtacaacacccgtattccattggctttcaaatgcaacccgttcacctttccataggaatgcatgtggagcgtgctttcttttgacatgctgtgcctanaactcttctttggccttagagatggaggaaatccactgacacacccaagcctgtacccactggccatactctgactggtatttacccagggaacaatgcctgctgcctaaaatcctgcctgtgatctcatgagctaatcagagccaggtatcgtcagtagtcagatggaagaactccagaaaaaatanttggggctgccacaggtcatctcaatgattcnttggnagtacngggnctcanaaantagggacccattgccccaaattgtgccnggnancttaa

SEQ ID NO: 26907 - DNA, 488 bp, Homo sapiens
  misc_feature (1)...(488): n = a,t,c or g
gggccgggagaaccgttcgcggaggaaaggcgaactantgttgggatggccaccaactgggggagcctcttgcaggatanacagcagctanagganctggcacggcaggccgtggaccgggccctggctgagggantattgctgaggacctcacaggagcccacttcctcggaggtggtgagctatgccccattcacgctcttcccctcactggtccccagtgccctgctggagcaagcctatgctgtgcatatggacttcaacctgcnatgtggatgctgtcagccanaacgctgccttcctggagcaaactctttccagcaccatcaaacaggatgactttaccgctcgtctctttgacatccacangcaagtcctaaaagagggcattgcccaggtaaccattccnagccctactccantctgtaacntgtccctcccatctcngtttgttttctgttttgcttgangaatttttccaggcccat

SEQ ID NO: 26908 - DNA, 496 bp, Homo sapiens
  misc_feature (1)...(496): n = a,t,c or g
gcgagcccaggcacggtcacccctgtgccacctccacagtgaggagccagccagacatctctccccctcaccccctgtggacatcacggttccaggaacagcccttcccccaccactgggaccctccccagcctggagagttcatcactacgtaaggaaagctccttccgcccctccaaagccctcaccatgcctaacagaggcatgcatttttatatcagattattcaaggacttctgtttaaaagatgtttataatgtctgggagagaggataggatgggaatgctgccctaaaggaagggctggtgaaaggtgtttatacaaggttctattaaccacttctaagggtacacctccctccaaactactgcattttctatggnttaaaaaaaagaaaaaaaaangnncttttttaanngggngnannnttntccccttnanngggggtnattttnnctnggaangggcctcttttaaannncnnnanggggaaaa

SEQ ID NO: 26909 - DNA, 497 bp, Homo sapiens
  misc_feature (1)...(497): n = a,t,c or g
ggcagaacaaccctatgagatagttgcctttataatccccattttattaatagggaaaccgaggctggggagatgaagcctcttgcctaagatcgcataaccggaaagttgcaaagtcagaatgtgagcccagatttctctccaaagccacaagattaaatgtattaacatttgaatgcttccttccaggtagaaattttttaagaattaagatctaccnnnnnnnnnnnnnnnnnnnnnnnnnnnnnnnnnnnnnnnnnnnnnnnnnnnnnnnnnnnnnnnnnnnnnnnnnnnnnnnnnnnnnnnnnnnnnnnnnnnnnnnnnnnnnnnnnnnnnnnnnnnnnnnnnnnnnnnnnnnnnnnnnnnnnnnnnnnnnnnnnnnnnnnnnnnnnnnnnnnnnnnnnnnnnnnnnnnnnnnnnnnnnnnnnnnnnnnnnnnnnnnncnttanccaaattgtgcaaaggacncaaccnngggaaaaangcaanaacccgtt

SEQ ID NO: 26910 - DNA, 496 bp, Homo sapiens
  misc_feature (1)...(496): n = a,t,c or g
gaaacnnnnnnnnnnnnnnnnnnnnnnnnnnnnnnnnnnnnnnnnnnnnnnnnnnnnnnnnnnnnnnnnnnnnnnnnnnnnnnnnngagaaccatccaaaaattgctcagaggtcaagaatttcagaagaaaatacaaaaactttggctgaagaagatttaactagtgctatagaaggcttaagaagtgtggttctagcacttttccaactcatatttgtatcaaataccaggaaaaatagttatcaccatttatcatctagatttctgggccgttttactgttttgtcattttaagttgttttacacgtaatttacagaagtaagaataaagcaataatttaaaacaactttataagaaatttgatccaacctctttgtatcaagtaagttttgacacacaaacattagaagtgtcctcttaagggaattggtggnccaggtcctttgaantgtgnccattcatgngaccgggnanntgnttgnnananngggtc

SEQ ID NO: 26911 - DNA, 486 bp, Homo sapiens
  misc_feature (1)...(486): n = a,t,c or g
gaaaaaaaatttttttttttgannnnnnnnnnnnnnnnnnnnnnnnnnnnnnnnnnnnnnnnnnnnnnnnnnnnnnnnnnnnnnnnnnnnnnnnnnnnnnnnnnnnnnnnnnnnnnnnnnnnnnnnnnnnnnnnnnnnnnnnnnnnnnnnnnnnnnnnnnnnnnnnnnnnnnnnnnnnnnnnnnnnnnnnnnnnnnnnnnnnnnnnnnnnnnnnnnnnnnnnnnnnnnnnnnnnnnnnnnnnnnnnnnnnnnnnnnnnnnnnnnnnnnnnnnnnnnnnnnnnnnnnnnnnnnnnnnnnnnnnnnnnnnnnnnnnnnnnnnnnnnnnnnnnnnnnnnnnnnnnnnnnnnnnnnacaagctatttgggattttttccttttttttttttnnnannggcccggnnncnataccnngccccaanccgggnncnaattgaanccctnnctaaaaaaaaaaggggnnantngggggcnaannnngggnccaa

SEQ ID NO: 26912 - DNA, 444 bp, Homo sapiens
  misc_feature (1)...(444): n = a,t,c or g
gtgggaaatgactgctactgaggtttnnnnnnnnnnnnnnnnnnnnnnnnnnnnnnnnnnnnnnnnnnnnnnnnnnacaactttgtgaatttatgaaaaaaacacttaattgtacacttttcaccccacttcctctgccatcttggtcctgctgtcctgaggagctacctgtgcaccctgcctccggctctcctgagcagagagatcctgatggctgactcagaagcactcccctcccttgctggggacccagtggctgtggaagccttgctccgggccgtgtttgggggttgttgtggatgaggccattcagaaaggaaccagtgtctcccataaggtacacatatgaaatcgcccccgtgtttgtgctcatggaagaggagttctgaggaaactgcgggccctggnggctccacctcnacaagtangcnttaatcggccccc

SEQ ID NO: 26913 - DNA, 454 bp, Homo sapiens
  misc_feature (1)...(454): n = a,t,c or g
gccagcgtgttctctctctcagggtccttcccttaaattctcaagtttgacatggaatagaagaatgtcgggcgtttcaaaaaaggattttgagatgctgcaaagctcactggatttagagtcaagagatgtgggctctagcgccagatttactacagacaggctgcctgaccttgggcaagtcacttatactttcttggcttcaccataatgggctgaactgaatgttctctaaggtgcctctcagccctaacataatatgattcttttcatgagaagagcaggacttgatccccccatcacttgggggcatccccaaggagccccctgttcttcctctgcaggcagccaaggctaattaggaatctgagagaatgaaccaggaaaggggcagtacaggacatacattctcttcattgaaggtggnacccctccccaantgaacgatcctcaa

SEQ ID NO: 26914 - DNA, 453 bp, Homo sapiens
  misc_feature (1)...(453): n = a,t,c or g
gcgaatcatgcccagatacgaaaccagaatggctttcattactatgaagacataagataggtgtctgctgaggaaccatgctcaaaccatggccgagatttttcggagatcttggcaacttctgttctctggtcccctttggttcctggcctctgcttctgggctgctctctgggatctacactgtttcaactcaaatgagaaatgtagacccttctatgatttccaccgtaaacctattcataacattcatgcacattgcatattataaatgttacagaagctggaggtagggtggcatgaaagaagttattcacattcctgaaatataaaaccctcaaactgtatattgatccatcccgagttgcaaaatattcttcacccacctccctcctcaacaatgaaagtttgtggccttcangggaatgancctcannccttcancttgaaaacc

SEQ ID NO: 26915 - DNA, 445 bp, Homo sapiens
  misc_feature (1)...(445): n = a,t,c or g
gaataccctgaagatagaaggcatgaactagaatgatggggccgaaagtagaaaaagcctggtccctggtgaccaggaaagccaccgttaccagccccgaacttactgttaggtgaaagaaagctgtattgtgcccaagctactctgacctggccaaatgcaattccaaactgatgagggggcattaggtggggttttctgtttgcttttgtttctggggagggtggtgtttggtttttgtcattgttgataaagaggttaccacnnnnnnnnnnnnnnnnnnnnnnnnnnnnnnnnnnnnnnnnnnnnnnnnnnnnnnnngnagnaagatcanctnaggncaagggnttaagaccannctnggcnanatnnggnnaatcccngncccnacnaaaaancaaaaattntcccggnntttttgggggggcccttntccccctntccc

SEQ ID NO: 26916 - DNA, 450 bp, Homo sapiens
  misc_feature (1)...(450): n = a,t,c or g
gaaatatcaagagccctaaaaaaattcatatttttcgacttaattcttcatttaagaatttatctgaaggatacacttagatagttgtgaatgagagcactgatcaacagtcatttattctgtgctgcaaaatattgctgaaacctgcttaattataggagagtggtgaaatctttgcatctccacatggtgggatactatccagtcttaaaattcatattttaaaagaaannnnnnnnnnnnnnnnnnnnnnnnnnnnnnnnnnnnnnnnnnnggctaagatgnnnnnnnnnnnnnnnnnnnnnnnnnnnnnnnnnnnnggcaacatagtgaggccctgtctctttagaattaaaaaatgtttaataatttaaaaggaaagtacacgggaaaatgctcctaatattaatgntanatcagtttgcaactacatatccannatggcgtcaa

SEQ ID NO: 26917 - DNA, 454 bp, Homo sapiens
  misc_feature (1)...(454): n = a,t,c or g
gggtgtgagaaatgaagctcaagaagagatctataaaaagggacagtccaaaagaatatggggtgagctctacaaggtgatagattcatcagatgttgtagttcaagttcttgatgctagagatccaatgggtactcgttcccctcacattgaaacttacctgaagaaggaaaaaccttggaaacacctcatttttgtacttaacaaatgtgaccttgttccaacctgggcaacaaaacggtgggttgctgtcctctcccaggattatccaacacttgctttccatgcaagccttactaacccgtttggcaagggagcattcattcagcttctgcggcagtttggaaagttgcacactgacaaganacagatcagtgttgggttcaatgggtatccaaatgttggcaanaantnngtggntaantacattncgntctaanaaattttgaacttg

SEQ ID NO: 26918 - DNA, 446 bp, Homo sapiens
  misc_feature (1)...(446): n = a,t,c or g
gctaggtccaacacctataaaatgggagactaccacctgggctctttctacagagggccttgtgacatacctctgcatcaataacctaggagatgtgatgctccatttttgcctgtacgtgccccacagaaaaaattgtggctggcccaggtaccaggtgatgtgtctctgctgcctgggcctggaccacagagagcattgttactgattgctgggctcagcacccaggtgatgtgactctgctgcctgtgtgctgctttcaggagaaggttgtaacttattcctggctgagtatgcagtcacactcctgactgatctctgccctcagaaaaggttgtgtcaagccgggcccggtggctcatgccagtaatccccagcacttagggagaccgaggtggggtgtcnctnaaganttganaacaaatggcaacatgtgaaccccttcc

SEQ ID NO: 26919 - DNA, 448 bp, Homo sapiens
  misc_feature (1)...(448): n = a,t,c or g
ggtggtacccttccaggaagtgtggggccgcagctactgccgggcgctggagaggctggtggacgtcgtgtccgagtaccccagcgaggtggagcacatgttcagcccatcctgtgtctccctgctgcgctgcaccggctgctgcggcgatgagaatctgcactgtgtgccggtggagacggccaatgtcaccatgcagctcctaaagatccgttctggggaccggccctcctacgtggagctgacgttctctcagcacgttcgctgcgaatgccggcctctgcgggagaagatgaagccggaaaggtgcggcgatgctgttccccggaggtaacccaccccttggaggagagagaccccgcacccggctcgtgtatttattaccgtcacatcttcatnactcctgctggnactggcctcnanttattaccaactgttccctgccgaa

SEQ ID NO: 26920 - DNA, 447 bp, Homo sapiens
  misc_feature (1)...(447): n = a,t,c or g
gggacttttactagataattggcccnnnnnnnnnnnnnnnnnnnnnnnnnnnnnnnnnnnnnnnnnnnnnnnnnnnnnnnnnnnnnnnnnnnnnnnnnnnnnnnnnnnnnnnnnnnnnnnnnnnnnnnnnnnnnnnnnnnnnnnnnnnnnnnnnnnnnnnnnnnnnnnnnnnnnnnnnnnnnnnnnnnnnnnnnnnnnnnnnnnnnnnnnnnnnnnnnnnnnnnnnnnnnnnnnnnnnnnnnnnnnnnnnnnnnnnnnnnnnnnnnnnnnnnnnnnnnnnnnnnnnnnnnnnnnnnnnnnnnnnnnnnnnnnnnnnnnnnnnnnnnnnnnnnggcccatattccccaaattgtcctaagtcctggaaaacaaagaaagactgaagaatcatttcagatagaacacgtggganaactacatgcaatccggggccaggaanttnttttt

SEQ ID NO: 26921 - DNA, 554 bp, Homo sapiens
  misc_feature (1)...(554): n = a,t,c or g
gctggagccccgggccaggttctacgctgctgaggtggccagcgccattggctacctgcactccctcaacatcatttacagggatctgaaaccagagaacattctcttggactgccagggacacgtggtgctgacggattttggcctctgcaaggaaggtgtanagcctgaagacaccacatccacattctgtggtacccctgagtacttggcacctgaagtgcttcggaaagagccttatgatcgagcagtggactggtggtgcttgggggcagtcctctacgagatgctccatggcctgccgcccttctacagccaagatgtatcccagatgtatgagaacattctgcaccagccgctacagatccccggaggccggacagtggccgcctgtgacctcctgcaaagccttctcacaaggaccaanaggcancggctggggctccaaaagcanactttcntgagattaagaacatgtatcctcaaccccataactggggatgactgtacacaagaagntaactcacccttcaaccnaattttacaaggactgg

SEQ ID NO: 26922 - DNA, 523 bp, Homo sapiens
  misc_feature (1)...(523): n = a,t,c or g
gcagatgtggtgtatanacttaagataatgtagatacaggttcanatctcnctcttcttactattagaccaggcattatttaancactttaggtttantaagttcccccancaattctatgaggtcagtancattattatccttacttcacaagtgaggaaactgaggtaaagttaagtaantcnaagatatataggtaattagggatagagctgggattcatacataggtccttatccagtgcccatgctttaaccatttaactctactgcctcttggctataagtatttattgtaatttcaggcttttttcttaaatgaagtctgccaaanaatnttcttcttaattgagggtactancncaaataagtanaaangagaaatgtcagtgtagganactgtggaaanaggtatataaaaccatnaccttaattttgggatactaaaattganaaatcagtcttgttaaanttgacaanntactttgctctttgttggcattgacaggaggtttttttttact

SEQ ID NO: 26923 - DNA, 541 bp, Homo sapiens
  misc_feature (1)...(541): n = a,t,c or g
gaataaaatgtattaagtaaatgctatgaaggtgaaattttcatacattgctactctgtttactttcttccattctttgtttcacaatcacttatcttcgcatacgttgctaccctttttaggtttcttttgttctttatttcacaatcatttctctttatccaaacataacaggaaaggagtgccacctatagagcattgagtttctaaatagataatatgaccgggttgcctccttgctttggtaaactttggcagccagcagtatcttagtgggtccctgaattataactgaagctactgatagaaaatatgaagtaatgatttcacatcntttatactgatttcatttaggaagggtcttgagaaatttagacacctcccccaaatgacaggaatgcataacattttgcacaacactanattgaattantttagttganagagnttcaccataangttatctcaaagagttacgtccggtacctgttttaaaaatcncacagnancaagaatggatttataatanaagtgggggagc

SEQ ID NO: 26924 - DNA, 546 bp, Homo sapiens
  misc_feature (1)...(546): n = a,t,c or g
gaacagatcagagagcacagatagcttcctgtaagaaccttcttaaatctgtctaggacagaccgggtcatgcagctcagacatcctgagctcagcacacctggagaaagtgagacatgaggactgcttcacagtggtagattcatgtttgttttttgttgttgtggatgtttgtgtgtttgaaaccccagaaacacacaagtaccatctaatctgtgatagaacaaataccctacagtttgctgttacagatagtttctgcccaagactggtctttccatactagacaccaaagccatccattaggcaaggatgctcaggatcatttatttgggagaaggtgatctcantgatatcagaagagtgatgtgagatganacagggaaggaaaggaaccangnncntaagnaccattgncangtcgttcctgtgggcaantgaagctcaatcccatctgggaggtgttgtcaagncagccagtgttctccanccgaagggaaaggaagacangtgatttcccttaatcganccgncattgcagagtgc

SEQ ID NO: 26925 - DNA, 550 bp, Homo sapiens
  misc_feature (1)...(550): n = a,t,c or g
gggactggaagcaataaagatgtcatatgtagaaaatcaaaatgccaagcatagccaggatgctcttggaaaataatgaaataggaggaggactttattgcgtatcagaactcattgtgaagctaaaaaagtttaaaagcatggcattggcataaggctagacaaaccaaccagtagagcagagtagacacttgatctatgacaaagatggcactgggcgtagtaggcaaaggatagtcttttcagtaattggtgctgggtcagttggatggcaaaatgcagggaaatgaaatgtgctcgctacctcactacaatctgcagttgattttattaaggttgttattgatattgttatgtttttaaaacatgtcccaggctgggtnnnnnnnnnnnnnnnnnnnnnnnnnnnnnnnnnnnnnnnnnnnnnnnnnnnnnnnnnnnnnnnnnnnnnnnnnnnnnnnnnnnnnnnnnnnnnnnnnnnnnnnnnnnnnnnnnnnnnnnnnnnnnnnnnaancangagaatcnttggaaccnggggtaaagggtgcat

SEQ ID NO: 26926 - DNA, 528 bp, Homo sapiens
  misc_feature (1)...(528): n = a,t,c or g
gtgcaacattcctgtcatatctgactctggttctgatgctttttctgtctcctcaaactattttttgctttttagtgagctttgtaattttttttttaaaaggtggacgagatgaactgagtaaaagtagctgtgataaataggcctttagtaatgtattggtaaggtgtaggggaggagaagtgttccatagcagggatccgcaacccctgggccacggaccggtacttctcatggcctgttagaaaccaggccacacagtaggaggtaagcgtcagacaatcaagtnnnnnnnnnnnnnnnnnnnnnnnnnnnnnnnnnnnnnnnnnnnnnnnnnnnnnnnnnnnnnnnnnnnnnnnnnnnnnnnnnnnntaaattcncataggaccatgaaccctgttgtgaactgtgcatacaagggatcaannnnnnnnnnnnnnnnnnnnnnnnnnnnnnnnnnnnnnnnnnnnnnnnnnnnnnnnnnnnnnnnnnnnnnnnnnnnnnnnnnnnnnncaagtcaaggctccc

SEQ ID NO: 26927 - DNA, 545 bp, Homo sapiens
  misc_feature (1)...(545): n = a,t,c or g
ggtctttatctgtctttgtttagaaatagtgttttgtgtttatgctacaggatattttgctaaagattatttattcagaattcccacttacaagttcagtgttgaacaatgagagagagagctcccttacagaaccccctttgttgtgatggtgaagttcagcagatcgctatgtggtgttcttatgcttgattctttagagtgttgtagaggaagccagtgtagtttgtacagtcatatttttgttcatacgccacccctcaatctcatacagagggctttatgataaagtcttggagtttctctaggttaattgaattgagccaatttgaattcaagtcngaaaaaaataagaagttatagcctagctttctgtattttgtctcgttttattcancctctttttaccttatctgtcctntaangtttccantgggtaacnaaaaaataanananccggctgggcgtggtaactcaangccgtnatccccanaantttggaaanngaggngggngggcnancngggggntnnggngccnnaacg

SEQ ID NO: 26928 - DNA, 540 bp, Homo sapiens
  misc_feature (1)...(540): n = a,t,c or g
aaatacataatacacacacagacacacacacacaatagtttaaaaatgactgatctacagaaattaagagccaagagaaagaancagatgacacaagaggcccacaatcatccatggttggaatgagccatctccatggacctaagacttgggatcaggggtggcggaaagtataaacagaagaggcaaaaaaaagagtttgttggaatgaanacttaaagaaccaagtcagctcacagtgggaatggaatgggggttattcagctatcacatgggccanagcangntcanaaangctgttnggttaaagcngggttgaattggttgnttggcaangnagncccnnccanaaancttanggttnggggaaacnagggangnagaacngcanttcaagnggnnanggntaanaaaaaccctttnnccncnaaaanccggaagggatttcccnngnaaanaattcccttttcccngggtnntcggaaaaaaacttnccccnttttnnttncccccnccaaaaatccgntccccggggggggg

SEQ ID NO: 26929 - DNA, 556 bp, Homo sapiens
  misc_feature (1)...(556): n = a,t,c or g
gatgattccattcaaatgaaacatcttacnaataggcaaatctatttcaaacagaaagtggattagtggttgccagaggataggggaaggggagaataggagtgatgattgctaacaggtaanagattcctgcttggggtgatgaaaatgttttggaattacatgtgtggttctacaacaaaaaactgaagtacatgcttcaagttggtgaatttcatgtcatatnaattanaaagaatcaaaaaaccctgttctgtctacaaagtancatcaaatttgcgactgccatatttgttgtagacattatttctatcaaagccaggacaanattttggcttaatgcctcctctcattgctgactctgtgctcaatttcacggttgaatttangtttganggaagaganaangaaaatatgattcagttcatnctctacaccattgccagacttttgcnaaggacaataggtacantatatngatgttagccactgcntacgtgtnaattantaaaactgttcagaatgggttgncgaatacaatgttcnagnaaattag

SEQ ID NO: 26930 - DNA, 534 bp, Homo sapiens
  misc_feature (1)...(534): n = a,t,c or g
gacatctggccctggacaattgaggaagtctgaccccattcatgaagcagcaagtctttctcaggggtcttcatgctccatatggaatcgaaggggctgtttccctaaagtccaggttgccgtagggccacagcatggttatgtttgacaatcacttcaaatgattgggaacatttgttacagattttcaatgactgggaacatttgttggagattttcttctctgtcctttcttcaggacccacctgaatgggtcccctctgacattcaggtgttgccaatgtgatgtattaagacatgggacctttaanaggtgtttaggccatgagggtccttcccttgttaatggattaaggcccttaagaaanaggcttcacacagcattttcttgttggcttgcttgtccttctgccttctgctacatgangacgaatgaataatgcctcacaaatgcaaatgtcctgatcttggnctccanctccaaaactntgagaaaataattcngtcttatantcaccatccagtatcngtata

SEQ ID NO: 26931 - DNA, 557 bp, Homo sapiens
  misc_feature (1)...(557): n = a,t,c or g
gcggcacgagcatccagagcaaatcaggtggaatctccatgacaaagccccatgagcctcttcatacccgttcagtctgagcagtgtcacaagtgaagggactgaagtattctgacaaactcaggccaagctgaatgttgctcattttttgtccagtttgggtcgtggacacttgattgttccaccttgttgggggtatcacatggaaccaggaaattttcaagtggcttaaggatctctgaaatgccagtaactcagatcttgtggtatttgacatgttaaacttggaatctgaatatgccgttgcctantttggacatacaaaaaagatanatttttctgttagtataaaatgatacgattaggttgcaaactcttttgtgtgtgaaaaatcagaccttttccgggtgcggtggtcatcccgtaatcccagcactttganaagctgangcnggtggacaactgaggcaggagtcaagacaacctgggcaanatggtgaancccatgtctacaaaatanaaaagttccagcgtggtggncatgccgtttccaacaa

SEQ ID NO: 26932 - DNA, 549 bp, Homo sapiens
  misc_feature (1)...(549): n = a,t,c or g
gagctggtcatgccctgttcttacagggtggtattttattttactaatttaatgcctgctgactcagaaactggaattttctcagcagagccacctcttagccatggatttacattaaccaactaacctgtaaaattgagtatcagttttgcataattttcaaataaatacagtggtcatagaatcccaagtgctggtgtcctcagagccagctgtctttggctataggtggactaagaagccaagcccttttcctaggatcctgtggctgtgatcaccttccctctcctcatggccatgtcctttttaaaacttcttgccctatggggactttgtttgtcttaaggtgattttacctgtctctgccataatctgtgttaatgcacaagcttaaaccccacaggangccgggcgcggtggtcacncctgtatcccagcactttgggaagctgaagcnggcggtcacaagtcaggagaccagacatcccggctaaaacgtgaacccgtcncacaaaatcaaaaatnaccggctatggcggcccgtatcca

SEQ ID NO: 26933 - DNA, 543 bp, Homo sapiens
  misc_feature (1)...(543): n = a,t,c or g
ggggaacacgggtgggaggaatgaccacatgctagacgtggtcattctctcttggggccagtgtctttcaatgataataatgatgatgatgaacaagatggttacatgctagagacaacgctagacccttactttatatgatcttggatcttgctgancggtaactggcattgttcccattttagagacaaggagactgagattctgagccataggttctgaattgccgagagccacacagactgcagcacagtanctgcaattcagacccaggacagtgggacaccaaagctcacanccttcccacttccccttgtgccccttcacctccaggctccggggaggggctaagtgcttgggaacctcagtgccctccttccctctgccangtacctgaattactttgccaccaaagcgagccccacgggtgtgatcctggacctctgggaagctctgcancaggacaatggggactcaaannctgggaatgccttggaggaaaangnaaaantnnatncngnggtgtngcaaanancgggaatg

SEQ ID NO: 26934 - DNA, 558 bp, Homo sapiens
  misc_feature (1)...(558): n = a,t,c or g
ggganaatgggaggtccttgtctgacaagatgctccgtgctgaggtggacacgttcatgtttgagggccacgacaccacagccagtgggatctcctggatcctctatgctctggccacacaccccaagcatcagganaggtgccgggaggagatccacagcctcctgggtgatggagcctccatcacctggaaccacctggaccagatgccctacaccaccatgtgcattaaggaggcactgaggctctacccaccggtgccaggcattggcaganagctcancactcccgtcaccttccctgatgggcgctccttgcccaaaggtatcatggtcctcctctccatttatggccttcaccacaacccaaaagtgtggcccaacccacaggtgtttgaccctttccgttttgcaccgggttctgctcaacacagccacgctttcctgcccttctcangaggatcaangtganactcctgtgtggaaatccaatanaggaatganggaatcccngggaacctcggaccttgtgagccngatgtcaaaagtgnanctcaag

SEQ ID NO: 26935 - DNA, 548 bp, Homo sapiens
  misc_feature (1)...(548): n = a,t,c or g
ggtgggatccacatanctcanaacagctggatcttgctcacactctttcaaganaagcttccttggtaagttaggggtggtctgaccttccccatctccccatcctcacagcagctctataaganaagggtcattcaccttttgtagatgagctcanagaggttaggtaactgactgaggtcacatctcggtccatggcagagcctgaatttgcacccaggttttanctggacttctccctccctctctctgggcccccaaacagtanagacagaggcagaatcanctcagctgggttcacaaagcttcctanggctcanctctagttccagcctgcgtgagacatggcccggtgaccccagaaggaaggcagatgttgggactgtccattcctttagaatatttggaggaaccanacaangtggangacangaggtgatccanagcctggcctgtccttcttgtggcctggcaacntgaggtgggcccaaggtgtgtgctnaggccnatgggganaaagattcccttgagatanaagaancggccgg

SEQ ID NO: 26936 - DNA, 545 bp, Homo sapiens
  misc_feature (1)...(545): n = a,t,c or g
gctcttatgggataggggctgttgctggatatgttaacctgttcaacaatgtgtccttcaaatagataacttaaatgtttttgatgatctggtcactacctgcttaaaanatatggnatcatcttgttgcctgcaaaattaagtcagaactcctctgcatggcatcantctgggccangcttactgttttgacctgatctctaancactcacanttcagccctcctagtcngtaccttttgtgtatgtgtaccccagacacactgtacacctttacatcttcatatttctgcctgtgctttttgcctgacaaactcctantcatccatcaaggtcaaattagtcatcttctcttttctatatctgtccctaatgccccccanntaaacagaattanactgttcttcatttgcatntatagggcacttaattcatatctctaanataacattttcccttnnagttacttcccanccctcagctatgaaaccttganagaataactacttcctaattttgnatccaaagcaaaatcantgatnaaat

SEQ ID NO: 26937 - DNA, 555 bp, Homo sapiens
  misc_feature (1)...(555): n = a,t,c or g
gcctgtgaaagaaactangaggtggctggaaaagattgggagagccctcagattgcaagttaagtctgaaaccagtaaagaaaanaaaganagaaaatgggtaagagcatcctggaacaccctacagtcnangggaggctgaaaaangccgttagggagtccttganccaagtctcanatctcccagctacaggccangcccantcattggctgagagccactgtgggaggtgtgacctctgtgtaaaantgtaatgaagttcanaggtcagcatcanccccttgaaaaaatgtgctcccattagttgaanatctgcaaggtcagtttttatgaccaccanagcaatggtggagttttgggctggagaanacctaaattctctcttgccctcgccaccatttcctagctgtgttgccttgancaagtttctcgatctcnttgggccaattcctcatctggaaaatgcnacaatgttccttcccaacaaattgtgacaatcaaatgggtttttttaatgaaaggaaggccaaancattnncacaaacngtttccca

SEQ ID NO: 26938 - DNA, 557 bp, Homo sapiens
  misc_feature (1)...(557): n = a,t,c or g
ggagagctancaccatgttgtancacaattacttgttaatatcagtnnnnnnnnnnnnnnnnnnnnnnnnnnnnnnnnnnnnnnnnnnnnnnnnnnnnnnnnnnnnnnnnnnngcaacccctcacgctcacccactgcctcgccagagcaacctccagtcccgcgagacccactcgtgatgggcaccccaggcaggtgtggcatttttaccttttataccatacttttacggtcccttttctaggattagcttttgtgttcaggcacatactcagcattatgtcacaactgcttccggcattaagtggatgacagctgtggtttgtcacctaggggcaatggctacaccacacagccttggtgtggaanaggctgtcccatctgggtgtgagtgccctccgtgatgctcacacaaaacgaaaccacctaatgacacatttctcangacgcatccccatcattcagcaacaccanctgtatcccgaacaacggnggctgnnccggnatcaagctgctcggtccaaaggcganaangtggaaattaaaaggtcccggcg

SEQ ID NO: 26939 - DNA, 546 bp, Homo sapiens
  misc_feature (1)...(546): n = a,t,c or g
ggtctcctcacttcatggcactggtcaagaanaggtcacagctcgctaattgtttttccaagtctcaaggctttttcttggcatgtccagacaacctatccagttttactccctcctacccttacgcttatatcatcttattgccaaccataccacagtccttctttctgaacttgatttttgttactctgctaggagtagcctttccttttttaagggggtaggagttcccaagtcttacaactcaagtcccagcttaaactcctctgtcttgaanatgacttccttggctgcttcaacacctattaggctttcttttcttgacctcccgganaatgcattgggtaagattcagttctttacccaaatttaatgtgtctgtatttgtgtgcaacacacaaacttcattatttttatttgaactcttggtgtgctgcatangtgaaagtganatttacaaatttggacacactttcaatacaattgtgccantataanaccgtncatgctnnaggcatggngtananagccgtatanagnnaagga

SEQ ID NO: 26940 - DNA, 556 bp, Homo sapiens
  misc_feature (1)...(556): n = a,t,c or g
ggcattacaggatattgagcagcatcccaagactctactcgatgccagtancacctcctccccaccatctgcgacaatcaaaaatgtcccnnnnnnnnnnnnnnnnnnnnnnnnnnnnnnnnnnnnnnnnnnnnnnnnnnnnnnnnnnnnnnnnnnnnnnnnnnnnnnnnnnnnnnnnnnnnnnnnnnnnnnnnnnnnnnnnnnnnnnnnnnnnnnnnnnnnnnnnnnnnnnnnnnnnnnnnnnnnnnnnnnnnnnnnnnnnnnnnnnnnnnnnnnnnnnnnnnnnnnnnnnnnnnnnnnnnnnnnnnnnnnnnnnnnnnnnnnnnnnnnnnnnnnnnnnnnnnnnnnnnnnncaacagcgcaagacnnnnnnnnnnnnnnnnnnnnnnnnnnnnnnnnnnnnnnnnnnnnnnnnnnnnnnnnnnnnnnnnnnnnnnnnnnnnnnnnnntccctaaanactgcctatgtcccctggggggaaattgcccctntccnnanccaacgggataccnctnggaaacgggaattttccngganaacannnccctntncccc

SEQ ID NO: 26941 - DNA, 545 bp, Homo sapiens
  misc_feature (1)...(545): n = a,t,c or g
ggtgtctagtccagagcctagcacatagtagacagtcagtaacaatttgtggaagtaaaggaagaagtaaaatctcttctgttgggtaataagatgtacccaaaacaaagtgaaattaaacagtcattgccctctacattaattcataacagtttcttttaagagctttggggccttcgttacatgcttaaagttccctgtgtgtgtgcagatgcaggtacacacatagcgcacacactcagaacaaaaccaccctcattctttattctatccctttcatctacaggcatttaatacagaaaattcagcttaccttagtggaagagtgttgatactgattgtgatccctggcatttccagagtagtttcagtgaacacatagtgaaatattggcagatactaattgttttctgaaaggnantaattttgtgatttctgtatgcccaagtggtggataagctgccgctccccaccttgacaaaaacagaagggaaaagaancaccgttcantgtagagcaaacaaatgacaattgtgacattaagg

SEQ ID NO: 26942 - DNA, 545 bp, Homo sapiens
  misc_feature (1)...(545): n = a,t,c or g
gttcaagattggattagacattaggaatttggagggctttttattgctagcatttttaagaataaccaattagagtattgattctaaagtctgaaagccacatggacagagttcatgtaattggctactttatgtgcctcttcctagattgccctgcattttcaaaacaagagcctttctattttaatcaaaagaatccagaatgaaatgaggctttgaaaactcagcctatgtttgtcttgatttccttaactgacatctagaagaaaatatgagctcaggggtccgctgggttccttccagcgcctaagcctgtaagctcttcctgctggaaccaagctttaaatgcacttgtcagtcatgtcccatgagaatagatactgccttccangtttttttgttctgatttccgtgtttgaaatgacgaaaatcanttttcggggcnttttaaaaatggaattgcctttggttgggaattgtgcgcncattttacccacccgttttgggancncaatgggggcaattnaanccaanatcanttcgtg

SEQ ID NO: 26943 - DNA, 539 bp, Homo sapiens
  misc_feature (1)...(539): n = a,t,c or g
ggggagaggcactacaacatgctccagttccaggtctcctcctcctccctggcgaggatcttccagctcctcctctcccacaaggacagcctgctcatcgaggagtactcagtcacacagaccacactggaccaggtgtttgtaaattttgctaaacagcagactgaaattcatgacctccctctgcaccctcgagctgctggagccagtcgacaagcccaggactgatctttcacaccgctcgttcctgcagccagaaaggaactctgggcagctggaggcgcaggagcctgtgcccatatggtcatccaaatggactggccagcgtaaatgaccccactgcagcagaaaacaaacacacgaggagcatgcagcgaattcagaaagangtctttcagaaggaaaccgaaactgacttgctcacctggaacacctgatggtgaaaccaaacaaatacaaaatccntctccanacccagaattagaaccccggcatccataacancttggctccanatgccccaattcancaatcncttt

SEQ ID NO: 26944 - DNA, 543 bp, Homo sapiens
  misc_feature (1)...(543): n = a,t,c or g
ggtaccagatcacagcaagatctatgtgtataggagagaacaactcaaaaagagatggggtcttcgctagagaaacgcagcctcagccagcctgtggcccagcaaggatgatgccactataaaaaaataccctgactttgctcccctcctgctctctgtgctgttgctggtgcctcccccactgaccagtgggaagccagagggcaggagagcctggttgatgcagtctggagggtcagctcctgggcacacagtacagtgaaggggctagagggtgggtctggatggagcaagtggagaatatacctagtagaatcactttactttgttttcttgggtatgctagagcaatccttatttggccttttaatgaagaaatacaatattttattcatgctatagacttcgactttacagcatatgctgattttttgttgttaaaaaggggctggcatgtaaggcaaattcattaattgngtcctatcaaacattatatccattaagtcangatgtcaatccaaaattattccccggttacgggaa

SEQ ID NO: 26945 - DNA, 528 bp, Homo sapiens
  misc_feature (1)...(528): n = a,t,c or g
gatttatatattttcatcttgaacttgaccatgagatccttgatgaaaaaaacaacagtcttatttatctttgtttctccaccaccaatggaaatattaaacccagtatcatcttaccacagattcctttatcaaggcttcctgagagtccttaaagatcaaggatgtgcaaactatgatgaaagaggtgggggctaaatccaaccctcagtcngtttggcacagcccatgaggaacactgcttctgcatttttaaaaggttgaaaaataataacaatatcttgtgacatgcanaaattatatgaaattcanttcacatgnccaataatanactgtgtttggggaacananncncgcncantcntatgtgtnatacntnagancgcttttgcgncaaaagtttanntttttcgacanngaccnnanngtgtcnggaccccnaaaatttccatnngggncttttanaanactngnggnantccctgnnaaagggtagangggnnttnaaaanggngntnttttcatttg

SEQ ID NO: 26946 - DNA, 534 bp, Homo sapiens
  misc_feature (1)...(534): n = a,t,c or g
gaagtaatgccagcataagttaaatgttagcatctgctgccttgacatgtttatgatatccacgtaatgaaacacggcccagagcagcccccagaacttgaggccgttctgcaggattcctgatgcagggtgtaggtaatttctgtcaccaccactaacagggtcataagtatctaatccaaagaccatatccccaggatcccagtcctttcctgtgttgatttggcagcaattccttccacactaaataattaactaattatgtacgtaagtgtgttttggttgcccaaaagcttaataagggtctccaggatggtaccttgtagaggtggagcagacagagaatagcagccctgttctgctctgtgctggttcangaggtattttggagagtgagacactgtgtggttctaaagggacttgactgatanaggagcccataaaagggaccaagatccgggaagatacaccattataccncatgatattgaacnctactttancccaggagttcgtaggncaaaanaanttttt

SEQ ID NO: 26947 - DNA, 539 bp, Homo sapiens
  misc_feature (1)...(539): n = a,t,c or g
gcatagggctcgtggaattgcccttgttattcctgattatacctagtgtataattaaacgctgaactgaatggcataaactatttcatacaagttcagaaggggaaaaaggagtgaggtgcgatagtaggaacagactgtgggcaggagacactcgatttgggtttagtggatgtgaaggcatgcactggcagtgaacaggtggtgggcatttcagatgaaatgaatttcatgagagggcataaaggcaagagaaggatggtgagaaacctatcctaaatggaagaaagggcattcagtgatgagtggtggtgatctggagaggacaatgtgaggaggactcgattacaaagaacacgaccttctgagcagagggattatctggatagaatcccatancacgtgctgttgtctgtgcccagcttagtctcctggaaccntccaatggtttggtacaccaantcccaagtgttctccaatgcttcnaanggtcacaccattacttccttggaacatataactactcctacccnctctctg

SEQ ID NO: 26948 - DNA, 547 bp, Homo sapiens
  misc_feature (1)...(547): n = a,t,c or g
gcagcttttttggatgattgcaaaattggggaggaaggaaatgtgatgggtatttatatatttgggcttcagtcaaagatttcatattcattcttaagcaatttgacttacaaaattagctcagactagaacatggtcaaacgacttgaaactggaagaaagtctgctatcccagggggatggtttgtgcccaagaatccaagggaatggaatggagtactgtgtgtgtgctcctgcagcctctgcaggctgctcagtgagaggtttcttggtcttcagaaggacctgcagaaaaggagtagggactgttttggagcatttgtaataagtgttccaatatgaatccacttcatcttgttatcacacaagcacacgctcctgaacacgcaggtccacatttttcctaagttcctcctattccatcagtactatgccaagccttgaagtgacggngactggatttctgggaagtgcatggggacacttggtcacctccaaaaccaatgcctgcnacnanttcaatgccnaataccaagntcacagaatt

SEQ ID NO: 26949 - DNA, 539 bp, Homo sapiens
  misc_feature (1)...(539): n = a,t,c or g
gcaaaaaaagaagaaagaaagaaagacaaatcannnnnnnnnnnnnnnnnnnnnnnnnnnnnnnnnnnnnnnnnnnnnnnnnnnnnnnnnnnnnnnnnnnnnnnnnnnnnnnnnnnnnnnnnnnnnnnnnnnnnnnnnnnnnnnnnnnnnnnnnnnnnnnnnnnnnnnnnnnnnnnnnnnnnnnnnnnnnnnnnnnnnnnnnnnnnnnnnnnnnnnnnnnnnnnnnnnnnnnnnnnnnnnnnnnnnnnnnnnnnnnnnnnnnnnnnnnnnnnnnnnnnnnnnnnnnnnnnnnnnnnnnnnnnnnnnnnnnnnnnnnnnntgggtgaatggttgaagcnnnnnnnnnnnnnnnnnnnnnnnnnnnnnnnnnnnnnnnnnnnnnnnnnnnnnnnnnnnnnnnnnncctgggcnctgtggntcatgcntgtnaccccaagcacttnnnaaactnatgcaggctggtncacctgntatnangngtttataccancctnagagaatcgggaacncnnntntntcntaataccngatantccgga

SEQ ID NO: 26950 - DNA, 529 bp, Homo sapiens
  misc_feature (1)...(529): n = a,t,c or g
gcgaactgagttaaataaggctttagtatgagattttgtgtttctctggctaggagttaggctttgtttactctttgctatatagtcatggatgtcagaggctaaaatttcctctagtgtccttgtgttgtctcccctgtcttctctggggagctccctagaggcttctttgtaaagtagctctgagtcttgcagtgtctatccctaatcatgggaaaacatcaaacaaacccatacagcgggacatctgacaaagtaccaagtgtcaaggatcatggattgaatcctgaaacagaggaaggacactgaaggaaagactgggaaaacctgactgaggtctggagtttagttagtgatactataccaagacgaatttcttaattttgataatttgttaacaattatgttaacaatgggggnaactntncangggggtnaaaangcngtnannccttaaccttggcccatggtaaggngttccantgtaagggcactgttattccttgtagttaacananatttggnacca

SEQ ID NO: 26951 - DNA, 528 bp, Homo sapiens
  misc_feature (1)...(528): n = a,t,c or g
gctggagtggggagctcagctggaggctgctggaatagtccatgaacctggcaggaaagcaccaccggttctgctctacagataaaccacaccatgcacagagggcatagtgactggtctaaaatcaccaggcaaagtgagtcacaggccgataacacaatggtatgctgaagaagaacccaggcctccctccacctggacacttgtccctgggcanagagtagcttctcttttaggtttcttgtctgtaatccgctggctggaaccagaggccagctgaagcagggggtgcttggagttccctggatcccttttggagagaaggacgaggggcccataagctggaatggcacctcagggatgggcttatgagacacagaatgttacanctggngaagacccaaggaaaanccnccttaatccctaataacaataactttttttttgaaacggnntcttgcactgtcccccgggctaaatgctgtgggcatctcagtcactgcaacctcaactcttggntcaagcaat

SEQ ID NO: 26952 - DNA, 531 bp, Homo sapiens
  misc_feature (1)...(531): n = a,t,c or g
gaaaaaacagattgctgctcagacaaatttgacactactccaagtcaacaactggttcatcaatgccagaagacgaattcttcagccaatgttggattcaagttgttcagagacccccaaaacaaagaaaaaaactgctcagaaccggccagttcanaggttttggcctgattctattgcatcaggagtcgcacagccaccgccgagcgagctcaccatgtcggaaggagctgttgtcaccatcaccacgcccgtgaacatgaacgtggacagccttcagtctctgtcctcggacggggccaccctggcggtgcagcaggtcatgatggcagggcagagcgaggacgagtctgtggacagcacagaggaggatgcnggtgccctggcccctgcccacatcagcggggctggtccttggngaaanntgacnccctgcanttaggggcaggagnanacgcacctgactttttgnggtttgcacagcaaacattttcacagttttattcnaatangttttaaaggtnatatgga

SEQ ID NO: 26953 - DNA, 529 bp, Homo sapiens
  misc_feature (1)...(529): n = a,t,c or g
gtaccctgtctatactacctgcctgtctagcagatccaccctgtctatactacctgcccatccagcaggtccaccctgtctacactacctccctgccaagtagatccaccctgtctacactacctgcctggccagaagatccaccctgtctacactaccttccttgccagtaatgcangctatntanactanctgcctggctaacanntccangctgtctanactanctcnctgtccaatanacccaccctgtctatactacctccctggccancanatccaccctgtctatactacctgactggccagcanatccaccctgtctacactacctgcctgcccagaagatgcnccatgtntacactacctgcttgtccagcangatccaacctgtctanactaactggctgtccancatgtcaacctatctaaactactggcnngtcangcagatcacccggtttaaannactggctanccannnantctacccggttaaacaacntgnctgcncagagatcaccctgtt

SEQ ID NO: 26954 - DNA, 396 bp, Homo sapiens
gggcctgcagcgcggagcagaaagcagaacccgcagagatggggttggctacagcccctcctgaccttgtgaaagccagaaattgccacctgccaccaacatcactctatttgagggatgaggactgtgtcatctggaacaaagagtggctgagttttctgtaatgttgcttgagagtcctccctgctgctgtgtggacgacacgtgggcacaggcagaagtgggccctgtgaccagctgcactggtttcgtggaaggaagctccaggactggcgggatgggctcagcctgtatcaaagtcaccaaatactttctcttcctcttcaacttgatcttctttatcctgggcgcagtgatcctgggcttcggggtgtggatcctggccgacaagagcaa

SEQ ID NO: 26955 - DNA, 522 bp, Homo sapiens
  misc_feature (1)...(522): n = a,t,c or g
gggagtggaattttttaggtgtgtcacaggagccagcttttaaaaacctaatactggataattcccctgaagatccataagatgaatacaattgtgttcttcaatattaggagtaggcaattctataaaagagagagggcttgtgatgaagatatagtcaaatgtttggttcacatattcttcaaacactgtcacagtgtttgggtgagatggtttgattttcccccttgttccagagtcaatggccgatgtttttgatgttaatccttctatacaggcttcaacagatgtctccccaaattcagatgctctcccaacagtgcatgcacaccccatctcctcccatcttatcatgtaccccagcaaagaaaagaaaggattcttttgattgggcagtgcttanctgtttcanccaataactccttgggtttcaanacaaaacctgtgaagttgtcaccttaattcaaggtgtanaaacaggctcggccangcattacaggtggccattcctgtaatcccagg

SEQ ID NO: 26956 - DNA, 402 bp, Homo sapiens
  misc_feature (1)...(402): n = a,t,c or g
nnnnnnnnnnnnnnnnnnnnnnnnnnnnnnnnnnnnnnnnnnnnnnnnnnnnnnnnnnnnnnnnnnnnnnnnnnnnnnnnnnnnnnnnnnnnnnnnnnnnnnnnnnnnnnnnnnnnnnnnnnnnnnnnnnnnnnnnnnnnnnnnnnngcgtgagacactgctcccgggtttacaataatcctttnattnnatnaaaaccccaagggacantncaatcagggccncttgnagccacccgctnaangcccgcnccnanncggtgganngtactttcacttcaaaaaatccaagccttnngcctccaatgctttgggnnttttggtnnaattctttgctnaaggnacnaagaacttggacaactcaaagtcaanactttcaancnggnaaaacctnggcaaccca

SEQ ID NO: 26957 - DNA, 516 bp, Homo sapiens
  misc_feature (1)...(516): n = a,t,c or g
ggccagaggccttgggaaatacatctgccagaaatgccatgctatcatcgatgagcagcctctgatattcaagaacgacccctaccatccagaccatttcaactgcgccaactgcgggaaggagctgactgccgatgcacgggagctgaaaggggagctatactgcctcccatgccatgataaaatgggggtccccatctgtggtgcttgccgacggcccatcgaagggcgcgtggtgaacgctatgggcaagcagtggcatgtggagcattttgtttgtgccaagtgtgagaaaccctttcttggacatcgccattatgagaggaaaggcctggcgtattgtgaaactcactataaccagctatttggtgatgtttgcttccactgcaatcgtgttataaaaagngatgtggnccccgccctaaaaaaggcntgtgcttnaactgctttcctgttctacctgcaacactaattacactcagnataantttgtggantttgcatgaancantctgt

SEQ ID NO: 26958 - DNA, 523 bp, Homo sapiens
  misc_feature (1)...(523): n = a,t,c or g
ggtggctgaacaacaaatcattacccccgacttgggttgagggtaatgtgggctcagctaggaggtttaaagctgtagggtcagggatctgagtagctcactcaaactttgcttcagagcacttagccagagaacaggggctttgtactgtttcagccattgtttcctgaataggtagcattcctatgttagtcatttgacttttctggctgcccagcattaggaccttcttcccagccttactgtgtatgtcttcataggaggcagagcccacctcccagtagaaaagccttaaaggtcatatactttcttctgcagccttctctagtcagggttagtggtacagaaaagcagggactatagagaattttttctggaancanagtggggcaacaacatctagtggaaaangngaaaaaggcatggcaattggngcaattgtgacattcactatccagggacagaatgtagganctttaatggccagggtcccangcaactcanggtctcactgggcttccag

SEQ ID NO: 26959 - DNA, 447 bp, Homo sapiens
  misc_feature (1)...(447): n = a,t,c or g
gctgcattcttttggggagtctagagtttttttgttaaaaacctttgacactgagtctctcatgagcttccctggtatagacaacatttcacatgtggtgtcattaattgctgctgggagaattaagtgcctattgtgtgtgtggtttggtggggagtgggggcaggacggccgacttttggaagcttgtgcctggtttcctttgcactttgctccatgagtctttggtgatcttgctctgtgtccttttgttgtaatgactcacagctgtgaatacgactatgtgctgaggcctatgagtccttccagtgaatcatcaaacctgggagtggtcttgagtgtccttgacatacttaatttttanccntgccntgtattggagcantanntnnaatgtnggggatnnngggggangntttcttcnannaaaatgncccnnngggaagt

SEQ ID NO: 26960 - DNA, 440 bp, Homo sapiens
  misc_feature (1)...(440): n = a,t,c or g
gattaatttattagagaaaggacacagaacttggggaagcacttattttagaaaagatgaagatgaagagatgcatgggacgaggggtggggaaggtgcagggagctttcatgccttccctgggccgccgccctgcaggnnnnnnnnnnnnnnnnnnnnnnnnnnnnnnnnnnnnnnnnnnnnnncctgggcctttgattcattggataggcgtgattgaaacacggacagcatgttgagatgagattggncagaaagggtctgactgaacactgtngactgagtgaggacacctggcagagcctgtccgtgcggattctcctgggctcnnnnnnnnnnnnnnnnnnnnnnnnnnnnnnngaaggtcctcccctaaattgggggtcctaaggccannatnnntttnaatccgggccnggaagntgaaaaaggnaanggga

SEQ ID NO: 26961 - DNA, 444 bp, Homo sapiens
  misc_feature (1)...(444): n = a,t,c or g
ggttgtcttgggaacaggaagaaacaatatctaggatgtacattttatttaagacttaattccttaaccattgcaaatgttattgatgactgccctttaaatcactgattatatatgaaagaacataatatttagaaagtgacacagggctataagaaacactgtctttcataatatcctgttttttcatgatatttacaattgctgcacattctgacactgaacatgtatgtgaaaaatcctgacgacaccatggaaataaagaatattttaagccaggtgctatgacacatgcctggagtcccagctgctctggaggctgagatggtgggattgcttgtgccctgggagttcaggctgcagttgagaaatgantgagcaactgtaccacagccctgggcaacattacaagaccccaccccaaaaaatngaanattttncaca

SEQ ID NO: 26962 - DNA, 447 bp, Homo sapiens
  misc_feature (1)...(447): n = a,t,c or g
gggatattgtgggaattctgcgtgattttggggctcagcgggaggaagggcggtctcgttctgaatacctgaaccggctcaagagggatctggccatttactactcctatggagacttcctgcttggcaagctcatggacctcttccctctgtctgagctggtggagttcttagaagctaatgaggtgcctcggcccgtcaccctccggaccaataccttgaaaacccgacgccgagaccttgcacaggctctaatcaatcgtggggttaacctggatcccctgggcaagtggtcaacgactggactaatggtgtatgattcttctgtgcccattggtgctacccccgagtacctggctgggcactacatgctgcagggagccccaatatgttcccgtcatggncttggnaccaagnaaatnnnnngngtcttggnatntttttccc

SEQ ID NO: 26963 - DNA, 456 bp, Homo sapiens
  misc_feature (1)...(456): n = a,t,c or g
ggtggtacctgtatcccatcaagaacctggagatgtcccagcagtgaggagctgggacatgtgacaggctgtggtggcaccactgagccgagaccatggcgccttggcatgcccagggcaagtggggaggttctctgctccccaggcctgctcggtgactgnccccatcatacccaaagtgcaatctcacggncaggttctatgccctgtccaagcgtaaaccctcttggaaacttcttttggggcaattttcctgtggncttcctgggctcnacttccatgtgcgcagccccacagacgttgntgagcaactctccagnctcctgagctccatnnccatcaggatctancctctnanctttccngntnnaccctaaancctggttggcanttttccaattagcnagtgncnanngcngacgcctnccaanganngncctgngnnnnttnanggtg

SEQ ID NO: 26964 - DNA, 344 bp, Homo sapiens
  misc_feature (1)...(344): n = a,t,c or g
gnnnnnnnnnnnnnnnnnnnnnnnnnnnnnnnnnnnnnnnnnnnnnnnnnnnnnnnnnnnnnnnccaaacaaaataattatatattatgaccaagtggagtttatcccaagaatatgaaaaaaaccaaaccacaagtgaatggcccaagaaacaggaaggagagacggctaatttcttaagggctggcatagaaatgccagttatctaacagtctctggagtgtcacttccatatactactggtcaagcagtcacagagtccagattcaagacggtggggacacagaccctacttcttgttaggaggaatttcatagaatttggaggctatttttttttttttt

SEQ ID NO: 26965 - DNA, 448 bp, Homo sapiens
  misc_feature (1)...(448): n = a,t,c or g
ggcagaaggatgagttgaaaccagcagtgacccagctgctgtgggagcgggccaccgagaaggtcgcctgctgtcctctggagcgctgttcctctgtcatgcttcttggcatgatggcacgaggaaagccagaaattgtgggaagcaatttagacacactggtgagcatagggctggatgagaagtttccacaggactacaggctggcccagcaggtgtgccatgccattgccaacatctcggacaggagaaagccttctctgggcaaacgtcacccccccttccggctgcctcaggaacacaggttgtttgancgactgcgggaaacagtcacaaaaggctttgtccaccagacccantcctggtcccattcaaagaggtggnatnggccccatttnccaantgggaanagggccccaatnnncntnccnaanntttccagggtgtg

SEQ ID NO: 26966 - DNA, 446 bp, Homo sapiens
  misc_feature (1)...(446): n = a,t,c or g
gctgagcttcaataccctgacaatgctgtaacaagcctgtcttccttccctctttccaagtttcttccagatcaagtatttgagttttgaattataattccccaaaaacttgctggattgaacttgattttgttattgctcatacacaaagccaatctctcctaattctctagtatgccttggattgtttacaaagttgcttaaagcagtgtccaacttaataactctgggcctgtcagtggcgaccaccagctttctcaactgcacaaggagacagaccacggtgctttgcaggcaaaaccatgacaatactctcttggaattctgagaagccantccaaatctccaattccttatctaaagggtttggatataangggaacaaatnanaagggnacattcaaggcccaggattacttaaaaaacnaaaaanncccgncaagggg

SEQ ID NO: 26967 - DNA, 439 bp, Homo sapiens
  misc_feature (1)...(439): n = a,t,c or g
gaccagggacaaggtcatggtgtgtgtgttggtggtgggctgcaaagtcagctccatgtggggagggttctgctgcagggggcaccccaccctccctgtgagttcttggagaaagttcttaaccccatggattatttctggaaagtggaagtcattacactgagtttaccggaatcaaaggagtagtaggagcaatgaggtcctggataaccctaaatttatccagttaactcttaattgtctggggactggttacccatgcagtcatggtgaaggctccctcctgcctgccccaaagcagcctgctgatgctcacaagccatcctccactggcaagttcctcaaccccgcccaagagaggagggcagccanatctcactatgccttcnccaanggtgcttanaaattgctttcccaaannccaanncaaantggcctt

SEQ ID NO: 26968 - DNA, 453 bp, Homo sapiens
  misc_feature (1)...(453): n = a,t,c or g
gtcctaaaagtgggctatcacaggcgctcttgtggggcgaggaggtgagcaaagagcgggccgagatnaggatgcggctggcaggtccttccctatgatcccttcccagtgttgtgccatgttacttcttccgcattttttttctctaaaggaatgacgatagactcatgctaaaaaggctagcagaccaaagcaaaaatctttcagctggggctgcgaggggagccttagctatcatagagagtaagtccaacagcagccttaggtagctggcttgagtatcactttcttaagggacaaaggnccattcataaaggtggcttaaanggacatantttnatcccccacattcaagagggnaattantccaaaggccaaggattatcaagggccggttcccccgaaggttttgggaaaacnngnccaangntccccnggggggnntggnaaccc

SEQ ID NO: 26969 - DNA, 438 bp, Homo sapiens
  misc_feature (1)...(438): n = a,t,c or g
ggtgcggggccagtccctgccctcccaggaggggtggtagccgttcccacctcgcagcaggacccccagtgcagaggctcacaggtggcacacaggcgctgtctctccagagccatccttcagagtggacctcagtgccagtcctgcctcagcatctgggtcacgtcggccaggagtagggtgcaggcctccagcaggtcctaatcctgtgtgccagggcaggcagtgccccaggggcaccacgcctgactctccatcacccaggccttgatgccgagcgggagtagagtgtttcctctgctcaaggcaatttccagagcccggatgcaatttctgggctgaattttgagggaaaattatggcctaatgtgnacaaancaacntccaacaatttccaagttntcccaannaaatcctgaaaantnggggcccgggaag

SEQ ID NO: 26970 - DNA, 456 bp, Homo sapiens
  misc_feature (1)...(456): n = a,t,c or g
gttgatttcttggtagaccatanctgtggagtgctgtgattactgcctggtgttcaatgcgtaattacactgttattctatacttgtaaaaaacatcgttggattggaagaatggaggcctgataaatttgtgctgtttaaacttgtgaactttctctggaatcaagacatgcctgccanaagaaaaaaatctacttgggcacgactaagtgctatctgtagattgccaaggaagctttccccgcccctgtgacttgctgtgagtcccctgggctgtcctcccctctgagcaccagatactgatttgttgtgcctgctgtggtggtaattacataaagtgtgtatcgaggtgcttcctgtctgtcttatccccagctccgtcctcagccccagtcgcagagcctttctcacancaggagtgcagggaaanatganaatgctctttaccctgtccat

SEQ ID NO: 26971 - DNA, 447 bp, Homo sapiens
ggtttattacatgatggtaaatgctctggagaaaaatttaaaaagcaagaggatagggattgggaaaggctgtaattttaaacggagtggtcagggacagtttcacggagacctttattcagaagttgcagggaccaaagctatcttacgggagtttgcaatgagaatttctttgcccatgaagtccttgccaagtctatgtcttttctgagaattctctcccccttgatttcagccctgtttgatttctgacctttgaaatgccagcccccatgctgccgttgtgtggggttccgactggacatccagaagtctccgtgtgtgttctcattagctttcactctgggggagttttctgccacaatgtgaatcacttattttgctggcagcagcagttgacagtgacactgatttttaaagcctgcacatttcacatcagaaaagtcc

SEQ ID NO: 26972 - DNA, 445 bp, Homo sapiens
  misc_feature (1)...(445): n = a,t,c or g
gggattatatgaggtaagatatacaatttttttgcacattttcttgccctattttacatttttatcgtggtaaggtcctctcgtcccaagatgagtcttcctcctgtctaaaactgtattaaagtatctcttcagcattttttgaannnnnnnnnnnnnnnnnnnnnnnnnnnnnnnnnnnnnnnnnnnnnnnnnnnnnnnnnnnnttacccgganatgggggngtgnaccngtgannnnnnnnnnnnnnnnnnnnnnnnnnnnnnnnnnnnnnnnnnnnnnnnnnnnnnnnnnnnnnnnnnnnnnnnnnnnnnnnnnnnnnnnnnnnnnnnnnnnnnnnnnnnnnnnnnnnnnnnnnnnnngagagagaaatanattggnatttggcnggaaaantcgtttccacattaanaccctttaaagcctctgctcccctattacttac

SEQ ID NO: 26973 - DNA, 445 bp, Homo sapiens
  misc_feature (1)...(445): n = a,t,c or g
gctgtttcatagaaaacaataattaaggaactatttgcatagatagctcagttaaacttacttatttggcgaatattttgagtgtctactcttttccagacactgttctggacattaaggcaacaaaatccctgccttcaccatggagcttaacttttagtggaggaaacagaccaccacccaaaaaatcaactaatgtcacttagtgatgagtgttgtgaagaaaaatagagaataaatggttactgttttagagagatatcctctgggaggaggtagtatttgagaagagacttaaatggactgggccctacgtaaatcttggggttatgtgtttattaaaaattaaggaagaggagctggtcatggtggtatgtacctgtagtnnnnnnnnnnnnnnnnnnnnnnnnnnnnnnnnnnnnnnnnnnnnnnnnnnnnnnnnnnn

SEQ ID NO: 26974 - DNA, 434 bp, Homo sapiens
  misc_feature (1)...(434): n = a,t,c or g
gcagggtttcnnnnnnnnnnnnnnnnnnnnnnnnnnnnnnnnnnnnnnnnnnnnnnnnnnnnnnnnnnnnnnnnnnngtatnnnnnnnnnnnnnnnnnnnnnnnnnnnnnnnnnnnnnnnnnnnnnnnnnnnnnnnnnnnnnnnnnnnnnnnnnnnnnnnnnnnnnnnnnnnnnnnnnnnnnnnnnnnnnnnnnnnnnnnnnnnnnnnnnnnnnnnnnnnnnnntantttatgatccttgccaacanantaaacactcgtctgtcactcactgtgcaantttagccatgtcnttgnntccttcaatatgcanntanagtgcctttnnanttatgggnaagcatatctntgancangaangatgnntnncccatcangtctagtcantctanntnnngaattgttanngatgtntttngnaatanttatgngggt

SEQ ID NO: 26975 - DNA, 448 bp, Homo sapiens
  misc_feature (1)...(448): n = a,t,c or g
gcgcgacttctcgaaggtgggcaggtcccaccttgtggaggatggaggtgaccggggacgccggggtaccaggaatctggcgagatccggactctaaagccgtgtctgctgcgccgcaactacagccgcgaacagcacggcgtggccgcctcctgcctcgaagacctgaggagcaaggcctgtgacattctggccattgataagtccctgacaccagtcaccctggtcctggcagaggatggcaccatagtggatgatgacgattactttcngtgtctaccttccantactattttttttngattggcaantaanganaantgggnatananaagttcanatggaggtnancnttggtttccaaagatcctttantttnnatnaacnanncangggggnagggttgnnnntggnnnatttggcnaggngnttnaannnananntttcc

SEQ ID NO: 26976 - DNA, 531 bp, Homo sapiens
  misc_feature (1)...(531): n = a,t,c or g
tggcnnantttttatgngccattacgaatttantacgactcagnccacggaganaatttgancccncgaggccaataattcggnacnaggancactatgggctggggcaggaggctcctggagcgctggattcntggcanagtctgaggccctgacagggaaatccatgcttttaanaactaattcattgttaggagatcaatcaggaattaggggccatcttacctatctcctgacattcacagtttaatagagacttcctgcctttattccctcccagggagaggctgaaggaatggaattgaaagcaccatttggagggttttgctgacacagcggggactgctcagcactccctaaaaacacaccatggaggccactggtgactgctggtgggcaggctggccctgcctgggggagtccgtggcgatgggcgctggggtggaggtgcangagccccaggacctgcttttcaaaagacttctgcctgaccagagctcccactacatgcantggccanggcanangggg

SEQ ID NO: 26977 - DNA, 435 bp, Homo sapiens
  misc_feature (1)...(435): n = a,t,c or g
ggcaaattcccaaactggacggatccggctcgggttacgtccagcagggccgagccggctggaggggctgggcacctctggggcggggttctgctccacctgccctcggcgcggactgtgccctcggcgggcacgcggaccggcggggtanggctagggcccggcttctctgggccaaggatcaaggtccctgcctgggttangcccccacgcattccantcttcggaacccgggctctgaacanggcgcagtanggccccaacggatcncnaaaacccgctctatagcctattgcttnccgcctgggnaaaccacctgggcatnaaacccncctcattttcnaanctctcggaatcatctttcgggacngnagttaatnancccgatcgggaagctntngcgggtnnttgtcaccttangcttntntnctcata

SEQ ID NO: 26978 - DNA, 440 bp, Homo sapiens
  misc_feature (1)...(440): n = a,t,c or g
gttaatttacatgattttgtatttccattgatagcaatacagttgtatatagatcgcttcttaaaaatgagcatatataagcatgttgtgtctttttgccaagagaacaatttgttttctgtaacaagtaaggatgtgtcaatcgtttctaacatgtttccatataaacactgccaccatgccacataagtttttaaaaatccatgcgtgtcatgtaatagtcaaaaaagtttttctttactttttcctttttaannnnnnnnnnnnnnnnnnnnnnnnnnnnnnnnnnnnnnnnnnnnnnnnnnnnnnnnnnnnnnnnnnnnnnnnnnnnnnnnnnnnnnnnnnnnnnnnnnnnnnnnnnnnnnnnnnnnnnnnnnnnnnnnnnnnnnnnnnnnnnnnnnnnnnnnnnnnnnnnnnnnatcttactgtggtccccagat

SEQ ID NO: 26979 - DNA, 443 bp, Homo sapiens
  misc_feature (1)...(443): n = a,t,c or g
gctgaattttttttttttctttatananacaaggtcncactatgttgcaaaggctggnatttctatatgtttaaacaccatcaatgtatcgatgacatcccaaaggtatattcgcaaccctgancttgaccctaggcnctaaaatttaatagncagctgcctactcaatggctattccnggatatctancaggcatctcaagctccaaacatctaaacacttcatccaaactanctccttccngtttcccatcnctgtaaatggnaccactggctccagctaaaanccttgtaatcatctttgattacncnctttcactcacctcccanagctaatctatcagcaaatcctgttggttcnaccttgaaaanatgccctgaattcaatgacttctcacngcatcnanctttatctacctcactagtccaagctactgtacctca

SEQ ID NO: 26980 - DNA, 442 bp, Homo sapiens
  misc_feature (1)...(442): n = a,t,c or g
gtggacctgatattccaatacagcttggagcatggcttccctatcccagagtgaacaggaatgaataatggaaataatgttttagacaggccagcaccttaggaggtctgtgtagtgggtctgaactcggctataacatggtgagtaactgatttaagcaaggaccaaacaatgttacaggatgtcaccgcagctgtgaccagaagcacatggggacagagtctcactgctcaggaaggacgggcagagtccacattgggcgagggggacggaagaggcagagcctgtttaaagaaataaaaatacctctttaaatattttacagagatgccgaaacgaagacctcccttaacaagatgacatgtttcgtttttctctggaaccacctgtaacatcctatcaaacagtgccctggttaantgctgcctcgcctatggttcaa

SEQ ID NO: 26981 - DNA, 445 bp, Homo sapiens
  misc_feature (1)...(445): n = a,t,c or g
ggacatccaggactcctggtggancgtgctctccatcctnaattggttcgtggagcaccaggacatantgcaaccantggccggccctgggcactggaatgaccctgacatgctgctcattgggaactttggtctcagcttanagcaatcccgggcccaggatgnccctgtgnacggtgntggcancccccctcttgatgtccacagacctgcntnccatctcngcccaaaacatgggcattctgcagaatccactcatnatcaaantcaaccaggatcccttaggcatccagggacgcatgattcacaagggaaaatctctcatctaantgtanatgcggcctctgtccaacaangctaccgccttagncttcttnagctgcaggaccnntatgccttancnctaccantcctcccttggtcagctgaacttcaccgggtctgg

SEQ ID NO: 26982 - DNA, 449 bp, Homo sapiens
gatttattaccacagaacattttagtgacaataataatgagatagattggttccttcaaagtacactggagaacttaagaaaagggctgtaaattctgaactcagagtccacataagggagtgaaatcatctgtgattgccctaaaagaaatccttatgtcttgtagccaaaggcagagatttctggacaccacacccaaagtctgtttcctgcaggtggctgaattacagcgcagattgaacttccaatcttgtaagatctcttgggttaaagtgtacaacatttattgggaaagagtggaaaattaaaaattgcatgagagatattagcagattccaatgaaactgggtatcttgaactcctcagttctatttctattgaaccacccttgccagtccttctacccctgtctgtctgaaggaggttaatctcctgtagcacctgtatt

SEQ ID NO: 26983 - DNA, 442 bp, Homo sapiens
  misc_feature (1)...(442): n = a,t,c or g
ggnnnnnnnnnnnnnnnnnnnnnnnnnnnnnnnnnnnnnnnnnnnnnnnnnnnnnnnnnnnnnnnnnnnnnnnnnnggccaggcanatnnnnnnnnnnnnnnnnnnnnnnnnnnnnnnnnnnnnnnnnnnnnnnnnnnnnnnnnnnnnnnnnnnnnnnnnnnnnnnnnnnnnnnnnnnnnnnnnnnnnnnnnnnnnnnnnnnnnnnnnnnnnnnnnnnnnnnnnnnnnnnnnnnnnnnnnnnnnnnnnnnnnnnnnnnnnnnnnnnnattcctcaaacccaggaggtggaggttgcattntnccnaaactgtgccattgcacncaacctgggcaaaaaancangaccctgtttcaaaaaaaanntttcggntttccnacaagtnancngggnnaaattannaaaannngcnttccaaggnntttnnnttgnttnannngggg

SEQ ID NO: 26984 - DNA, 435 bp, Homo sapiens
  misc_feature (1)...(435): n = a,t,c or g
gaaggaacctaacctttctaagcctgtttttttatctgtcaaataaggttgcattgagaatgaaatgagataacgtgtgtagcacagtgctgggcttaatgatgtttgttattattggtgaacttcaagaaatgcacactcaaataatagattgcagttgcttttacataaaatatcntttaactggggtaaaagcnaattaatttttcctttgcacgaattggggctttantgcngtggncatcngttttgngaaagggaacntccnccgncttaatggaaccaatgntaanttnnccctgnctngggnaccaaaagganttaaantagaattacccccggattnctttcttccgggtgaggagtttgcccatgtgntgctgaaataaanactgttgggaagcatgncancatgtgttgttaatgtcatggctg

SEQ ID NO: 26985 - DNA, 312 bp, Homo sapiens
  misc_feature (1)...(312): n = a,t,c or g
gatagatctttaaaatagcagcatgggcagagctgtattgcgttgatgtttcagagagttgtaatcgccataggtcttagttcctggcctatgctgaaggcatgtctttgatccctgtgggttccaagctgcagctctccgccatananaggtgtcagaggtttcttcaactcnaggtattttctcggcatttgaatcaggcttccccagacctcttgggtaggtggtgtgtttccatgccatatgganagtagattgcatcattaatctgaggctgggcattttctctctctctcnctttttttttttttt

SEQ ID NO: 26986 - DNA, 550 bp, Homo sapiens
  misc_feature (1)...(550): n = a,t,c or g
gggcttntngcttctttctnaggcccgccnattangtntttaatacngggcccgtacaanttaattnaaaacctccaggccaacatttcngcactatancaatctttanggatccnnctncngnaanaactataattgcatcnnnntnttaaagatntctattctcnanattcttnnttcctgncctngggngtagcgnatntntttnatccctgttggttccagagttncagctcgncgncactttgaggngtnagttcgtttctttccttnnagganctttcntctcatttnnctcttagnttccnnanctntcttganntncgcatntggatttccatccatagtgnctttagttatnanctgnatcntntggnntantctctttntcacttttctcncttangtnatcttnacttgganaanntnnanntttnttcgtnanaactttanacnctttanncnntgtantggtnatgtgtncttgacnntcaaatttnancantgaattcannctnnanantgntgncttcctatcannaantgcttt

SEQ ID NO: 26987 - DNA, 447 bp, Homo sapiens
  misc_feature (1)...(447): n = a,t,c or g
gcggcacgagaagtaatcacaatagtatttgtggtttgagtcacattgtcacagcaaaaattcatagattgtttcaagtgaagattaaccagattagagttattaacttgctcttccttgcagctaaaacattaaacagaatttcttctttaatggtccaaagtacctgcacctggcattctcaagattgcagaccacaatttagagtttacatctctggatctcctctaggataggtgagggccagtttcctagcactgtgaagcatggaaggatcgagggttctcaaataatttctcaaatagtgtttttcccaatagttcttcttcccactctcttcctcttatcacttccaggaacagagctgtttgaaaaatctgtagcatatgtcagtttgtttanctttccctttactggtttatgattcagatttcacatttttgttac

SEQ ID NO: 26988 - DNA, 427 bp, Homo sapiens
  misc_feature (1)...(427): n = a,t,c or g
gcttagcagctaaaaacaatacccatttattatctcagatttctgtaggtcanaagtgtacatggtcttagcttagggttctctgctcagggtcncacaaagccaaattcatggtgtcatgggntcttgcctgnatccangatctttccgattattggcagaatccagttcccagtatctgcaggtttgaantcnttgttttcttgcnggatggtanctggggggcantcttaactttnagnggtcacccacattcctcanggantggcccnctctcnctcttcangcnannaatgnntctcatncntcnangcncggatttcncatnnggctgncnttttctgncnnnananggnnaaagtnctnngtgttncaanatttanntgagnagntcacggnnancgtgangaatnttncttttnngtta

SEQ ID NO: 26989 - DNA, 440 bp, Homo sapiens
  misc_feature (1)...(440): n = a,t,c or g
gtagggaaggtataaatcaagatagtaagggttttgttttatatgtcattgtcttaccatgctccccacctatttaatcttctgttttaagctaaatttatggatttgcacctacctttttgagtggcagaagttcttaacaaaccagtattgagaaataagaagggatgtagttaaaatggttttctgtttctctttaaagttgaagaatgatatatttaacaanagttgtgttttatttccagttttccagtancanatatgtagatgcattgaggtcatactgtgagaaaatgtctttagggtatccctccaaaataggagccttaaactttttaacttaaaggaaggcatatctaaaaaccatantggttgcttttaggtatagtttcctatataacctatantcagacttatctataatatgaagatttaattgt

SEQ ID NO: 26990 - DNA, 445 bp, Homo sapiens
  misc_feature (1)...(445): n = a,t,c or g
gactggatctagaccacaagtctatcaggtgggaattattctgaggttatgaaccaggaactgagcttcaaaaagctgcctctatgacctgagaacagtctctcagctgtttctgttgttcatttttttaaganatggggtctcacnnnnnnnnnnnnnnnnnnnnnnnnnnnnnnnnnnnnnnnnnnnnnnnnnnnnnnnnnnnnnnnnnnnnnnnnnnnnnnnnnnnnnnnnnnnnnnnnnnnnnnnnnnnnnnnnnnnnnnnnnnnnnnnnnnnnnnnnnnnnnnnnnnnnnnnnnnnnnnnnnnnnnnnnnnnnnnnnnnnnnnnnnnnnnnnnnctggcattacaggtgacagccattgggcccagctctcagctgtttttactagttctattttaactacatatcatatccactttctggaagcctcagctgctcggtt

SEQ ID NO: 26991 - DNA, 431 bp, Homo sapiens
  misc_feature (1)...(431): n = a,t,c or g
gcattatcacttttaccccatgatcatttaattcttctattttcgaatcctcttctcttcctcaatagggcttagttcatatcctgcttccttcatgaactctttcctaatttctcaaaactacattgatatcttcctgaaccgaactgttccacacattgaacactcatacaggctctactgtattgatttttaaaatagccagtcacctacttatgaagattcaacttaaccaactaatgacacttatccaactaaacctacttggagcacttcagntggcancatggnaactaggtgaaataacaaatatcaatcaatgggtggcaaacaatgngctgaatgattaangnangnnaattcaattaatacagtaagtgttgngcccngnatttnganncggaacctnanaaggtgggnaaanntgccaa

SEQ ID NO: 26992 - DNA, 441 bp, Homo sapiens
  misc_feature (1)...(441): n = a,t,c or g
gctgcaagggcttccctgagtgcctgcaggctgacatctgcctgcacctgaaccgctcactgctgcagcactgcaaacccttccgaggggccaccaagggctgccttcgggccctggccatgaanttcaagaccacacatgcaccgccaggggacacactggtgcatgctggggacctgctcaccgccctgtacttcatctcccggggctccatcganatcctgcggggcgacgtcgtcgtggccatcctgggtatgggggttgggcgnngcactggactggaaatgccctctgcagcctcaagaggtgcgagccttctgaatatgcagtcactggggctgtggacctgggactgcctgcagggtcactgggctcctttaattcacctaaactcaggccctccaancggggccatgganaagancccacntnnggtttagg

SEQ ID NO: 26993 - DNA, 448 bp, Homo sapiens
ggaacatgaaagatgtaaatagcacagaagattggcacactgtcgtatgagataagctctggcctaagggtcttggctgactagctgcatgtcccataccttttggaccactggaccattggaccatagtgacctcatctgtggaattatagtactgatctacatgtcctatatacactcttaggcagatagtgattaaacagtcatgaatgatagtggggactgaatgacgaaatgaaaagaccttatctcttttaatacttttggtgcagaacatagctgcttttagactaccagcagcagaagtatgaatatggatgacctgtttatgtgtttgtttttaaccaattctgggataatttgagactaatgggaaaattgcaaaactatacccttcacccatgttttccaaatgttaccgctttatcacattggctgtatgattctc

SEQ ID NO: 26994 - DNA, 510 bp, Homo sapiens
  misc_feature (1)...(510): n = a,t,c or g
gtggatgcatagataaataatacggtttcttacatactgagaactttgagtgagttattaaaatttataaggattgctgtagtgcaacggtatctggtactcaataatatctgtcaaacaaatgagtacatgaacaaattattaagcagggcaggatccagcattgaccattttgcttgaatcctaccttctctgtaggtgttctgtgaagttaaactttgtgtagctattatctatccttaagaatacagagacacagtacagtgtagaggtcaagagtggtagacctnnnnnnnnnnnnnnnnnnnnnnnnnnnnnnnnnnnnnnnnnnnnnnnnnnnnnnnnnnnnnnnnnnnnnnnnnnnnnnnnnnnnnnnnnnnnnnnnnnnnnnnnnnnnnnnnnnnnnnnnnnnnnnnnnnnnnnnnnnnnnnnnnnnnnnnnnnnnnnnnnnnnnnnnnnnnnnnaaaagntgtgacaaaanaattgcctnaancccagangggaaaggtt

SEQ ID NO: 26995 - DNA, 509 bp, Homo sapiens
  misc_feature (1)...(509): n = a,t,c or g
gctggcaagtaagtatgaagcccagggtggggcagcacagaattgagaggtctgcagactattcaggtattttctccactaacccattcaagagatcacacaaaagattgatgacagtcttgagaaactaccctcaaggtacacacctgggagaggggaacaaaatctgttttgggaaggtcaaagaaatctgttcagatcctactccatctacaaaacaaagtccttactcagtgggaggaagggcaacaaacactgtggccattaggatagttgtaaaaactgtgaccctgggagaatgaaatagagagaaaaaaaaaattagctatgaagaaagagcagaantacacaatgggtccaaaattacagcaggagggaaaggcaggagtactgagtntaacacaaccacganancccagggcactggtgcctaaaactaagccttaantaaacnggcgcaagcttatnccctttaangaggggttaattttaccttgggaatggcctcc

SEQ ID NO: 26996 - DNA, 510 bp, Homo sapiens
  misc_feature (1)...(510): n = a,t,c or g
gcttgttttgcaggtttgctgacaatgaatactctcatcttcttgtcatatgaaaatcctcaatttannnnnnnnnnnnnnnnnnnnnnnnnnnnnnnnnnnnnnnnnnnnnnnnnnnnnnnnnnnnnnnnnnnnnnnnnnnnnnnnnnnnnnnnnnnnnnnnnnnnnnnnnnnnnnnnnnnnnnnnnnnnnnnnnnnnnnnnnnnnnnnnnnnnnnnnnnnnnnnnnnnnnnnnnnnnnnnnnnnnnnnnnnnnnnnnnnnnnnnnnnnnnnnnnnnnnnnnnnnnnnnnnnnnnnnnnnnnnnnnnnnnnnnnnnnnnnnnnnnnnnnnnnnnnnnnnnnnnnnnnnnnnnnnnnncatcnaaaatcttcaatttagaaggataatttgctccagaattctgggtgggcantttttccttcaacatttggnagatattgagacnacaactttgggtcnggggtccaantnnttggnggnggctcctnttggncctcccgnnagttttt

SEQ ID NO: 26997 - DNA, 499 bp, Homo sapiens
  misc_feature (1)...(499): n = a,t,c or g
gccattttgcattcccaccagtaatgagtgagaattattattgctcccctttcagcttttggagttgtagtgatttggattttaaccattttggtagttatgcagtggtatctcactgtttttaatttacattcccctaatgaaaaacagtattgaagccaggcatggtagcatgtgcctgaagtcccagctacctggtggaggagtgagatnnnnnnnnnnnnnnnnnnnnnnnnnnnnnnnnnnnnnnnnnnnnnnnnnnnnnnnnnnnnnnnnnnnnnnnnnnnnnnnnnnnnnnnnnnnnnncaaggttctgtaaaggcctgctgggaacagaactgaacttctaaaagtaaatgtcttggcagctgctttcaangcctggctataantaaggtctgcaaagccaaaaggacatacagctcctcctaaaattgaagggtttgctgggggnacgngggtcaagccngtancccannactttggangcaaagggggg

SEQ ID NO: 26998 - DNA, 505 bp, Homo sapiens
  misc_feature (1)...(505): n = a,t,c or g
ggagtgaactttgttttctttacacccttctatatttcccagattctctaaaatgagtatgtatttccagaatgtgaattttaacaaattgtttcttttaaatgaaatgagttggtgttaagaaaagacaggcaaaactttcaagaagtctgactgtagaaagaaaaataggtttagaaaatacccttgaaaatgtagaaggcttgagcatgtttacacattaagggaagaagacagtgaagaggggaccttgcacagaagggagagaagagagcatggccgggaagcaagttccctgagatggcaggagggacacacagcatggatgaatttgtaattttgtgctccaagcagcactgaggtattcatgtatgtgattctcttcacaacttcttaattgctgcaaaacacctgctttgaaaggntactgagacatcatcatctagacaaatgcctctaaactgttgagancaagtgcccatctcacagaaaatttnggccattc

SEQ ID NO: 26999 - DNA, 505 bp, Homo sapiens
  misc_feature (1)...(505): n = a,t,c or g
gacaggtgtgagcccattattttggtcctgaaaatgaggaggatcccagaactgaagaagtcccccaaagtcaggtgtggatggaatgtggttagacacgcaccccccggggcagtcagtaaactccatgtctcagggcctggcacgagatgaaaaggcggtaggaattcctcgaccctgcgaacctttctcagtattcaattttctaatactcttaggcttgtttgcttcaatggagcatgctcagctgggaagggaattgaagaatggaccggggaagacggggacggtgtgaagggctatgattggcccagccatgggctctaaaaccgggtggtcccagcgtctggtgggcacatgccttaagggtcagttactgaagggaatctgtgtcccttcccttatctgcacacacttaatgtcccactgggnacaagntgctgggtgacncnnttaaaggtgctcacaaaagctnaaagggcncggnanttnnnggggaantttg

SEQ ID NO: 27000 - DNA, 484 bp, Homo sapiens
  misc_feature (1)...(484): n = a,t,c or g
nnnnnnnnnnnnnnnnnnnnnnnnnnnnnnnnnnnnnnnnnnnnnnnnnnnnnnnnnnnnnnnnnnnnnnnnnnnnnnnnnnnnnnnnnnnnnnnnnnnnnnnnnnnnnnnnnnnnnnnnnnnnnnnnnnnnnnnnnnnnnnnnnnnnnnnnnnnnnnnnnnnnnnnnnnnnnnnnnnnnnngaccttgtctcaaaagggtaanccatttgtaaagacggggtcncantatgtcccccangctggtcncnnttncnngngcttaagnantcntncttccncaacctcacnacnngcngnnattncangnangnagnaccatgcanggttagggcatgtgcttcntatcgncntgtgaatttatttanagacagngtctcatncgtctccnngatgcaatgcgttnaatgttgtaantntnnggaaggtntnnncngggnnntcccccaatatcaanttttcnnnncccttttnanggggntttt

SEQ ID NO: 27001 - DNA, 500 bp, Homo sapiens
  misc_feature (1)...(500): n = a,t,c or g
nnnnnnnnnnnnnnnnnnnnnnnnnnnnnnnnnnnnnnnnnnnnnnnnnnnnnnnnnnnnnnnnnnnnnnnnnnnnnnnnnnnnnnnnnnnnnnnnnnnnnnnnnnnnnnnnnnnnnnnnnnnnnnnnnnnnnnnnnnnnnnnnnnnnnnnnnnnnnnnnnnnnnnnnnnnnnnnnnnnnnnnnnnnnnnnnnnnnnnnnnnnnnnnnnnnnnnnnnnnnnatttanggcctntttacnggaannngcaacaanggtttattttaangtattttanacggtttgncttttgganatanngncagcatcntgactggancctanatactttggggataaactgtttcangagtccnaaatttnccaaannccnaggnangcattcncggnaaaatgntaaagncnnnttganaatcaaagntccttttgtttgcaanatttgttcatggnacttggnnnaantccnancaaatgggttattgaancccnnncccttncccc

SEQ ID NO: 27002 - DNA, 512 bp, Homo sapiens
  misc_feature (1)...(512): n = a,t,c or g
gagcaccatgtcaataccctggaagaaaggtcttttatactaatcttaacctaatcaagatttgttaatcttattggtacccaatttaatcaagccaacaaaaggaaatgtgatttttaaaaatggctttgaatcctatttttgttgagcgtttgattttgtaataagcaccactccttattanttcactggactctcacaacaaccccacggggaaagtatttccaaaaccataaccntttttagggaaaaagaaaaaggcttaatgaaatgaanaaacttgcctaagtcantggactaattanaagngtgcagggctggctgggcgtgggtggctcanacctgttatcccagctctttgggaagnctgtggccaggagntcacccgnncccaaaaagttcaagnccanncctggcnacatggcgnaaccccatctctactangnatccaagantacctggnatggggggnacatgcctgttaaaccanctgnccgggngggngnngcagg

SEQ ID NO: 27003 - DNA, 511 bp, Homo sapiens
  misc_feature (1)...(511): n = a,t,c or g
gcttatactgttcatagttgttgactccatcatatgatggaaatctatgctacttaaatcattgacagatgatctcatcttttctgttagttacaattgtgaatcatatttccaagcacactttccaatattttcttgagcatttaattctgaaggtcactatgacaggttcattaaatgccgtacatcatctaatcttcagaatgactacgtgagatgggcactttcactttcttcattttacaaagatgaaggctggcacccaagggagtgctgtgtggctgccatgttgagctccccagtgagcagggagcagggctgctgcctgggtctgtctgacagcctcaaagcggagctcacgtctgccacacggtgtggccgtgtgcacacgaaggccaaggcatttcaattccaaattatgacaagcggtaaactggtatgtcatgaatctatacatnaaggatatgtgagatttggaaccttggtgcacaatgnctccggtgacccacgc

SEQ ID NO: 27004 - DNA, 506 bp, Homo sapiens
  misc_feature (1)...(506): n = a,t,c or g
gatttctcagtgacattgatgaggggtcctcaaaagacctcgagtttcccaaaccgaatcaccttaagaaggacagggctagggcatttggccaggatggccaccctcctgctgttgccccttagtgaggaatcttcaccccacttcctctacccccaggttctcctccccacagccagtcccctttcctggatttctaaactgctcaattttgactcaaaggtgctatttaccaaacactctccctacccattcctgccagctctgcctccttttcaactctccacattttgtattgccttcccagacctgcttccagtctttattgctttaaagttcactttgggcccacagacccaagagctaattttctggtttgtgggttgaaacaaagctgtgaatcactgcangctgtgttcctgcatctgtctgcaaacangtcctgccttttanaagcagcccangggccnatgctaaaccngtctcncttccctccntaagatgtt

SEQ ID NO: 27005 - DNA, 131 bp, Homo sapiens
gagggaaaatgcattgaaagggcttgcatattactaagtacttcataaatatagctattattattattctcaaagcatttcttacatacttacctataatagcatttgccactttactttttttttttttt

SEQ ID NO: 27006 - DNA, 500 bp, Homo sapiens
  misc_feature (1)...(500): n = a,t,c or g
gacaatggtatcacttctaggcctgaataggtcataggaggacgcaaggtaatggactcagacagcagacagatagttgtatgaaagggctgatagacaggagctgtggcctttgaatgggagacagttaacgcatgatgacctagtagagaaggaaggaaatgagtatcctggccttgatgatttccactcaccctcttgtgtcttggcatggcatccaattagttgagcccaactgccagaaggcagttaatgcaatccacaaaggtcagccacctgaagccctaagtggaatgaaaaagaaaggtaagtggatctggaaaaaaacatggaaaatattcagcacaaatattctggcattaagatactttanagtggctgatgatatgagactttacaaatagatgcaagattgttaatcagangtcctcacttcattcancttttgatgttantggaaactattganttaaataactaacttcaattgaaacaaacag

SEQ ID NO: 27007 - DNA, 511 bp, Homo sapiens
  misc_feature (1)...(511): n = a,t,c or g
gagatttactaggatctcttgggaactgcagtagaaatcactacgaaatattttgaggatagaggaaacaggacaacagcgtttactaggttttattctgaagaaagccaaagaaggtggaatggagttcatcttgagaaagcggtagaagattgagaagctaagaaaagacttacacagcagcaaaaagaagaagagactggagtagtgggcanagttttcagttagcaagagagcaccatccaattgttatgctggtcagcagcaaggaacattaatgaaggagatgaagaatgaccagggtcagtttttgttcatccaggtttgagcagggtgttgcttatgatgctccatgcagttttgcctcccacaatctctctctgatctttgcctcctgatctgctcaagtactgcagcagcaatgcattctctactgaaggctgtcacgtttacttttcactgtgcctaaaatgcccttaacctcaagcctccctccttcacttgatcaggt

SEQ ID NO: 27008 - DNA, 507 bp, Homo sapiens
  misc_feature (1)...(507): n = a,t,c or g
gagtgctatgacagatgagactttcatgcaagaaaataaatcctgcacatttgatgtactgctttaaacttaaagacctctttggacccgaaattgtaagatcctgagtggcaactggaaaggattcgtggttacttggatctaggaaaatcctgttttatctctgatgggactaagacaaagcactcctgttagtacaacccagcttgcgttcctccctgcctgcagaggaagcatttggatgcttcccttcccgttggaagttgccagtctctcttcagagtgatgagggcagaactggtcattacggaaagagtcggaggaacggtgccacagcatcaggttcaggcaagtaaggcggaagctgaactcattaagaggcatttggaacccggggttcctggtttcctgttggagaaactcnaaactctgagagtgtcctaacccgatctgagagannctttctgacttgctccctcctgntctgctgtcaacttgaccaatcaa

SEQ ID NO: 27009 - DNA, 503 bp, Homo sapiens
  misc_feature (1)...(503): n = a,t,c or g
ggaaacattgctggttgccatggcagagggaaaaagttatggaaaagcatgtattagctcttaaaacttcagcctatgttatttccattcacgtttcattggccaaattatgtcttatggtctaccaccacttcagagggggcgaggatatgtactcctgtcatgtgtcccgagagtagaagtctggagatatttgattagcaccaatgacacccctggggggagtagtcagtagtgttgccctccacagagccgggcaacgtgaccactgaacatggtgtttcggttggcattcacgtggtcattgttaatcttaatcttggccagttcagtagttgtagaaaaatgatgtataacctgattgcatggtttgaggagtgaatangagatganaaagtgcananagctanaaggaaagaattgtagacatttttaccaagaagggaatttggattacancctttcctcatccttttgtaggtatcatagaatgangncnaagt

SEQ ID NO: 27010 - DNA, 491 bp, Homo sapiens
  misc_feature (1)...(491): n = a,t,c or g
ggcaggaataactgtccaaattagttcttcctcctcaactcataggagtagctgtggacagaggaaccaacatctgccacctctggcannnnnnnnnnnnnnnnnnnnnnnnnnnnnnnnnnnnnnnnnnnnnnnnnnnnnnnnnnnnnnnnnnnnnnnnnnnnnnnnnnnnnnnnnnnnnnnnnnnnnnnnnnnnnnnnnnnnnnnnnnnnnnnnnnnnnnnnnnnnnnnnnnnnnnnnnnnnnnnnnnnnnnnnnnnnnnnnnnnnnnnnnnnnnnnnnnnnnnnnnnnnnnnnnnnnnnnnnnnnnnnnnnnnnnnnnnnnnnnnnnnnnnnnnnnnnnnnnnnnnnnnnnnnnnnnnnnnnnntacaggcctgagccaacccacccggctatttcttaaangggaacaaatgatcttgacaacatttnttccantaanccagnttanggnacaggcnattcccggattanaanaaaggactgtgggg

SEQ ID NO: 27011 - DNA, 445 bp, Homo sapiens
  misc_feature (1)...(445): n = a,t,c or g
gctgggaggtatgtacctgattcaaatcctgatacaaataaagcaacaaaaaggcatttttgaaaaagctgaatatgaactaggtgttttatgatattaaggaagtatcgttaattttgttaggtgtggtaatgataccgagattatgaaagaaaatatcnnnnnnnnnnnnnnnnnnnnnnnnnnnnnnnnnnnnnnnnnnnnnnnnnnnnnnnnnnnnnnnnnnnnnnnnnnnnnnnnnnnnnnnnnnnnnnnnnnnnnnnnnnnnnnnnnnnnnnnnnnnnnnnnnnnnnnnnnnnnnnnnnnnnnnnncacatgcctattatcagtacttttggaagaccactttagcctacgagttcaaggctgcatgagctataattgggctactgnnnnnnnnnnnnnnnnnnnnnnnnnnnnnnnnnnnnnnnnnnnnnnnnnnnnn

SEQ ID NO: 27012 - DNA, 487 bp, Homo sapiens
  misc_feature (1)...(487): n = a,t,c or g
gnnnnnnnnnnnnnnnnnnnnnnnnnnnnnnnnnnnnnnnnnnnnnnnnnnnnnnnnnnnnnnnnnnnnnnnnnnnnnnnnnnnnnnnnnnnnnnnnnnnnnnnnnnnnnnnnnnnnncattttcaatggctcnnnnnnnnnnnnnnnnnnnnnnnnnnnnnnnnnnnnnnnnnnnnnnnnnnnnnnnnnnnnnnnnnnnnnnnnnnnnnnnnnnnnnnnnnnnnnnnnnnnnnnnnnnncttacactgtccctctccattccacttgacttgtgaatcatcccatcaaccagcttatcctcgctgtacaggctaccctctcattagtcactgaacagccatcttagttatcggattgactgcagcagtatcaagatgcttgtgtttgagtaatccnanttnctaataatgacccaangnccaagagtangatgtnggaatacngttanaaatatcnatttacnacagttantttggtaacccctaa

SEQ ID NO: 27013 - DNA, 503 bp, Homo sapiens
  misc_feature (1)...(503): n = a,t,c or g
gnnnnnnnnnnnnnnnnnnnnnnnnnnnnnnnnnnnnnnnnnnnnnnnnnnnnnnnnctatctctacaaaaaatttgnnnnnnnnnnnnnnnnnnnnnnnnnnnnnnnnnnnnnnnnnnnnnnnnnnnnnnnnnnnnnnnnnnnnnnnnnnnnnnnnnnnnnnnnnnnnnnnnnnnnnnnnnnnnnnnnnnnnnnnnnnnnnnnnnnnnnnnnnnnnnnnnnnnnnnnnnnnnnnnnnnnnnnnnnngnnnnnnnnnnnnnnnnnnnnnnnnnnnnnnnnnnnnnnnnnnnnnnnnnnnnnnnnnnnnnnnnnnnnnnnnnnnnnnnnnnnnnnnnnnnnnnnnnnnnnnnnnnnnnnnnnnnnnnnnnnnnnnnnnnnnnnnnnnnnnnnnnnnnnnnnnnnnnnnnnnnnnnnagctacttgggggtcngaagcanaanaattgcntgaaaccggnaggcaaaggttgaattatccnanatcctgtcattgaccctntccg

SEQ ID NO: 27014 - DNA, 494 bp, Homo sapiens
  misc_feature (1)...(494): n = a,t,c or g
gnnnnnnnnnnnnnnnnnnnnnnnnnnnnnnnnnnnnnnnnnnnnnnnnnnnnnnnnnnnnnnnnnnnnnnnnnnnnnnnnnnnnnnnnnnnnnnnnnnnnnnnnnnnnnnnnnnactctgctttctctggaagatactgcttctctggcaaacctttctagtggaggccctgccttctcttagttctctaggttcttgggggctggtatcaaatctggagaattccttacatacccctcgaacccttctagattagtgctgccaacagaaatataattctggcctccatatgtcacttagaantttctantggtggatnaaaacataaanataaacantgaaattaantttaantangtgttttattancccaacacatcaaaaatnattattatcantactantantantgaaacngagtctcgttctgtcacaaggctggaatnccgtgggaatganccctcccaatgtgactcantccccggggttaaag

SEQ ID NO: 27015 - DNA, 501 bp, Homo sapiens
  misc_feature (1)...(501): n = a,t,c or g
ggggaagacttcatggcaatgacacttaccttgtataaaagttgaagaataagaaagatttgaatgagagattctttctcttctccctaccagcccagcttcttatttgaggatatattgggcaaaggggccttcagacaagtagagggagatttttacagaaagattgagatgaaggtatanaaggctgtaaagaccagaaaagagaattgagacagaggaagcaggaagccactgtaggtttttgagcaagatattgatgctgtaagtatggtgtttatgaaaggttagtctggaagagatttgcaggatggngaccccggaagtttttttttacaatacagaaagacttgcactgagggtnaggngttaaaantaaacaggtaagtaaatgnctaaacatcttgaaggaaaagcancanaccntggnnangttaacagnttacagtgaaaaagatgggacaaagatttggttttgganaaccgggggantgnanaaaa

SEQ ID NO: 27016 - DNA, 494 bp, Homo sapiens
  misc_feature (1)...(494): n = a,t,c or g
ggagcanagaacgaccttcatcttttctacaactagtcctgagtgggtgcctgctctgcactacactgtctgggtgctggctacagcagtgagccaaatagataaacatccctgccctcatggagctttgcttctggtaaaggagacaggtggaccctaaaaagaacaaagaggtgacgtgtcacattcagatgtgacacagcagctgggtagggcttggacatgctgggcatgctccttaagactggtgcttagggagttgcaggggtcagcccggcaggggactgggctgggattggcaaggacaggcggccaggatatgggtgtnaagagagggaacccccccgctgccanacannanaaangatggagggccanttcctganatggggaaaaccattggaanagcatgattttattcaaagnaggcaacggagaaataaaaagtcctggctttgggaaggcaaagnaagtggtcacaagncaggantcaa

SEQ ID NO: 27017 - DNA, 487 bp, Homo sapiens
  misc_feature (1)...(487): n = a,t,c or g
gcaacactctgacacccccgacatatcccctcgggagctgcctgggctgttccacaggaatctggccatcccaaagggcttgactgtcaccagaatcattggttgtagctattggttgacttcacagagttctccccactgccttgaactgtggtcccttgtagcttcattcttgataccccctcagcgcgtcaccactaactgtgacgtcgacctcctgctgggaaggagcacctgtgtgtatagttggggttcattctgtttctccttgtttcatgcagttactttaggagatgagaagtgtgctgccgtcattagtgtttggtccgttcttagtttttgaagaggcattcccattaatagaacattaactcctcaaananggggattttgggccnagttagttcactggctgcatccccaagtttcnggnactacactgggcaactcagtacataacggtngattgaagaaatangatanaaca

SEQ ID NO: 27018 - DNA, 483 bp, Homo sapiens
  misc_feature (1)...(483): n = a,t,c or g
ggagcccaggaaannnnnnnnnnnnnnnnnnnnnnnnnnnnnnnnnnnnnnnnnnnnnnnnnnnnnnnnnnnnnnnnnnnnnnnnnnnnnnnnnnnnnnnnnnnnnnnnnnnnnnnnnnnnnnnnnnnnnnnnnnnnnnnnnnnnnnnnnnnnnnnnnnnnnnnnnnnnnnnnnnnnnnnnnnnnnnnnnnnnnnnnnnnnnnnnttcacacacacacacaaaaaaattgtagattctgattcagtagggctggatggaacgaacccaagatcctgcatttctgacaaacttccaggtgatgccagtgttgcaggcccctagaccctcctgcctttgagtagcaaggtgtgcactccttgcgcttccggtctattcatgggtaacantgctgcatgacggccaaaanaaagggtttgaatccacantggactcacagtggtccaacctacccttacatcactaacctaagcaactgncacctc

SEQ ID NO: 27019 - DNA, 513 bp, Homo sapiens
  misc_feature (1)...(513): n = a,t,c or g
gctgcaattaatggatccttgagactgagcgtaatccaaataaggcacacagtttaacagagagatcgggaatcaagacaaagagagccctgcttgaaacgactgtcattccagggtcagtttgtacccctaaggttgtgccatccaaagagtgacaccagcggctacatactgtagggaaaatagacttcactgaaatagtctagccaagtcacaaaacaaataaataagcaaccacaacataaacaanctgtggagaggggaagcantatccagagttgctatatagctaaaatgtctagtttccaagaaaaagtatgaaatgtgcacngaancanggaaanantcangcancagnnatgccttgttgananntgaccanatgtcagatttcncanctgactgtnggataccatannanatatgttaacnaactgggccaagcatggtggntcaggcctgtancccnnnacnttngnaaggcnaagcacgcngatcccaaggtccgnggtt

SEQ ID NO: 27020 - DNA, 501 bp, Homo sapiens
  misc_feature (1)...(501): n = a,t,c or g
ggggactacagacaaggcacgtgcctgctctctgaagctgccttnnnnnnnnnnnnnnnnnnnnnnnnnnnnnnnnnnnnnnnnnnnnnnnnnnnnnnnnnnnnnnnnnnnnnnnnnnnnnnnnnnnnnnnnnnnnnnnnnnnnnnnnnnnnnnnnnnnnnnnnnnnnnnnnnnnnnnnnnnnnnnnnnnnaagtaaatttttactttctcaacacacagagggaagccccttctattacttctggagtctttcccttctcttcctcctccctgcnctcctgcccctcctcccattccttcctccccatgtgtcggcccctgacgtctctcttgggtgcctctcctccccaggctcagcagcacatcaccacggaccgcactggggagccaccgannggcagcaggcctacatcactcccaacatggnncaagntccgtatccttcccgcacaannagcccangcaanggaatgtgaacccgatctggtgcagccgctgcc

SEQ ID NO: 27021 - DNA, 498 bp, Homo sapiens
  misc_feature (1)...(498): n = a,t,c or g
gaggaagtgttcttaggcccactgaagataccctgggccatttatgtcaaagcattgtggaccatgcaccatttaaaccagatggcaagtcccttgattaaagagctgagaatctgcactaatttgtctgttgtacatctctcaagagtactgtggggcacaaaggtgcttagtgagtgtgagctgatagacgggttaagcgctggggactttgcagtcagaccacaatttaaatctcagctccattagttcctagtgccagtggccttgaacaaattatttgacctcttagtcttagtctccttagctataaattgaagggtggcaaggaaaaagggggaaganangattggggtaacancatttcccttgtaggattgaatgagcttatcatgcagatagctcaatccagcttttggccaaagtaagttggcactaaaggtnancanagctgtcagtaanaatccctcnctcntggctgggtggtctcttcaatta

SEQ ID NO: 27022 - DNA, 509 bp, Homo sapiens
  misc_feature (1)...(509): n = a,t,c or g
gattttactatgttaattttaacctttaaagtgaaaagactaactgttgattattggaaagcaaaaatatagctttagatttttgtgacagccgttattaatacatagttaagcagtcattatttctttggaagagttagcacttgttccttaaaaataattgtatgcatagaaatagtgcnnnnnnnnnnnnnnnnnnnnnnnnnnnnnnnnnnnnnnnnnnnnnnnnnnnnnnnnnnnnnnncagctgtggtttcttanatcatactgttaagtgtacttttaaagctttaaaaagcagtgttaaccctttcttaanacagatttcagggaagacangacgtttaaaacattagccttctctccccatctggagtatgggttggaantcatgcttcgnagntagggagtattttccnggnanattgcaaggaccagcaactgntaagncannaggncaangtgnctcnaagattngngcggctgtggnntncttctcccttcngacc

SEQ ID NO: 27023 - DNA, 517 bp, Homo sapiens
  misc_feature (1)...(517): n = a,t,c or g
gggcgtgggagagtttttcagaatgaatcaaagaatccataaacaaaaacgcaatgtattccaaacaggacaagtaaaatgaaatctgcatttggacagaatatattaaaacagcaatatatcaaaggtaaggagaaaatctgaaaaacagccagagagttaagacacatcactccgaagcaggaaccacgtanacggacaggaaacttctcaacagcaaggatggaaggcagaagactgcagaatgggggagacaatgattttccacttccatttccacactcagctaaacagacttacagaaaaggtggatgaaagaaaagacacttgttggtaaaaactgagttgaccattaacaggctgcccttaaataacttctaaaaataacttcaggaagaanagaanataaatgctttagaangaacatttganaananagaacangtgagtaaacaaatnggcaaacatgttggtggtctanancaaacanancagccanncattanaantntncatt

SEQ ID NO: 27024 - DNA, 605 bp, Homo sapiens
  misc_feature (1)...(605): n = a,t,c or g
gagagagggaaggtgacctgaaagtcacagaataattttttagagctgaacaagaatccaagcctgcaactgcagagacgagagatctttctgctgtctatactcttggaaagcacatcctaagatctttgcagattatcctgtggaaggaaaatgcctaaagtcaaaagaagccggaaagcacccccagatggctgggagttgattgagccaacactggatgaattangatcaaaagatgagagaagctgaaacagaaccgcatgagggaaagaggaaagtggaatctctgtggcccatcttcaggatccaccaccangaaaacccgctacatcttcgacctcttttacaagcgggaagccntcaccagagaactcnctgnatattgtgtttaanaaagggntgnanaaaacaaacnggntttnnnatngggnaancncnggggttatnaaattttggtnncccctggggggnttttaaancggggggacaccatnttgggggacaantnggctcngncggnttccgaaaaacnagcgggnangtgggcccntcagcgngnaanaannngtggttntcnngggcccncgggagnnggggccccc

SEQ ID NO: 27025 - DNA, 499 bp, Homo sapiens
  misc_feature (1)...(499): n = a,t,c or g
gctggcatgcaatgaaaaatcaccaggcaggtcaagaagaaggaaaaaatgacgcaaatgaggagaaaaagtaatatatcaataganacagatccagaaatgacatagataatagaattaccacacaagaacattaacatagttatattactgtattcnaatttttcaggaagctagaggaaagactgaatatgttaatttagagacatggaagacatanaaagagcccaaattaaacttctananatgaaggcnacaatttgtganatgaanatnaantgaatgggtcgagtggcagnttanacactgcanancaananattattgaacttganangtagggcagtagaantctccncggttnngcatcacagtggannctgacanagnatgnangacagtnnagagcntcantganctggtgggnacttcnagtnncgtataccttggtaccgggnncccagtnntancgnagtganngtnangggcnntntntctg

SEQ ID NO: 27026 - DNA, 544 bp, Homo sapiens
  misc_feature (1)...(544): n = a,t,c or g
gaataaaatgtagcaacagaaggtccaggcagtgctgcagtccctggtggtatcatcagagccagcaggcagcagggctggggaactccaagctgattcagtcccaagtgccggagcggggagctcggatgaggtgggggtggggaaccggggagccatggngcanancatttgctgtgctgaaggccaggagcctccttgggagatcatgantttagaacactaatactttgtttaaaaagtcccctgccttggagataagagctcaggccgctgtggtcaggttttgctgtaaatgttctgcacaaagcatgctggggggatcactgggaagtctgnggaacagattggtcatgtgcntctttgagtgaaaccttatgggttcattgaagcgggcaagcananggtntgatggggtgtggnaaccacnnaccggctcantcangntnantggggaatgcaaacccagggggcctaaaaanaanttttgnnccanancccngggggnggncccnttangggtncgtaannaaannaggggttc

SEQ ID NO: 27027 - DNA, 534 bp, Homo sapiens
  misc_feature (1)...(534): n = a,t,c or g
gctatcagtctgtctctgggcacctctaaagcaccagacactgcgctgtttgcttcctacgcatacactaatcctcatgccatcttgcaaggaaggagtctttatcctcactttagtgatgaggaaatggaggctcaggatcattctgctaatcagtgttgcagcagggatgtgaaccaaggtttgtcttcaaagtacatgagttttcttgaatcccataagactctcattttttcannnnnnnnnnnnnnnnnnnnnnnnnnnnnnnnnnnnnnnnnnnnnnnnnnnnnnnnnnnnnnnnnnnnnnnnnnnnnnnnnnnnnnnnnnnnnnnnnnnnnnnnnnnnnnnnnnnnnnnnnnnnnnnnnnnnnnnnnnnnnnnnnnnnnnnnnnnnnnnnnnnnnnnnnnnnnnagtaaaaatggggnttcnccatgttaccaagntgtctcnaatctgggcnaagcatntgccaactnaacctcccaagggggaatacangggtnaaccacaggcctggcanatttctttcttctt

SEQ ID NO: 27028 - DNA, 529 bp, Homo sapiens
  misc_feature (1)...(529): n = a,t,c or g
ggagtccccaaggcttctcctanactcagtgattctcataaagaatcacagaacttaaagttgttatacttatggctatggtttgttacagctaaaggatacagatttaaatcagtgatggaaaaagaagcaaaggacagggtccaggagacaccagacccaaatttatagtcgttctatcactgcgaagtcatgtgcacagtttgtttcttctagcagtgatgtatgagaacatgtggaatattgaaaactgggtaagctcagctgagccctggtgtccagggttttttggtaggtcggtatgtangtgtgggtgactgccctcatggatgacctccgtctgcagccctcaagctgataccatttggtccaagggccccaccattaatcacattattacatagactatatggagtggctaaaaccccaggtaaagaaagacttcctacaaggtggncattcaagggctaaaggtactcctanganctgggaagggcaaatcttcccggaacntcacgggtgggaaacc

SEQ ID NO: 27029 - DNA, 545 bp, Homo sapiens
  misc_feature (1)...(545): n = a,t,c or g
gagtagttcaatcaagctgttaccaaaaaactaataaaatgaaaagaaaatgtgttaaaaaatgaatgaatcagatttagaaagtaagttaggagtcattccctctgcaattccctggagtattcccttggtcttactgagactcacttaggtgccaacatgtccttaacacctctccaacacgtacatcttccttttggattaaaagcaggccctgggcttcagatttcagcaaggctctgtcatcttgaaaataaataaataaataacaaaaaaaatgtggtatatccacacaacgggagaatattggaccatagaaatgaatgaggtactggattcatgctaccacaaggatgaaacttgagaacagtgctgaatgagacaagccagccgcaaaggccacatactgtaggatgccacttgtatgaaatgtncaaggntgggcacggtgggtcacgcctgtaanccnggaacncggggcanctaaannnnnnnnnnnnnnnnnnnnnnnnnnnnnnnnnnnnnnnnnnnnnnnnnnnnnnnnn

SEQ ID NO: 27030 - DNA, 537 bp, Homo sapiens
  misc_feature (1)...(537): n = a,t,c or g
nnnnnnnnnnnnnnnnnnnnnnnnnnnnnnnnnnnnnnnnnnnnnnnnnnnnnnnnnnnnnnnnnnnnnnnnnnnnnnnnnnnnnnnnnnnnnnnnnnnnnnnnnnnnnnnnnnnnnnnnnnnnnnnnnnnnnnnnnnnnnnnnnnnnnnnnnnntgtttcttgatgctctcctatttccatgttctgttgattgcatttccttcagcccttttggttttttatttgtttgtttttgcagggaagtaggcatgagggagtgttgcgggaggatctggtggtataaaagcactttttatacagtacctttaatccatggttgtattcagccaaaaattcttcggacactcctattattgaagagataagtgataatttttagtaaatggntttacttctgctcaataacaattgtggctatgagaccatgccttttgcaggaacatggtgganctggaggtancangcttggnaactaacncanggattgaaaaccaattccaaatgtcccactaataaataggngctaaatgacaaa

SEQ ID NO: 27031 - DNA, 534 bp, Homo sapiens
  misc_feature (1)...(534): n = a,t,c or g
ggatttattgagttatttatcagttgaaactcagtctttgggagtctgggatgtccctatagttctgttgatgagnnnnnnnnnnnnnnnnnnnnnnnnnnnnnnnnnnnnnnnnnnnnnnnnnnnnnnnnnnnnnnnnnnnnnnnnnnnnnnnnnnnnnnnnnnnggnnnnnnnnnnnnnnnnnnnnnnnnnnnnnnnnnnnnnnnnnnnnnnnnnnnnnnnnnnnnnnnnnnnnnnnnnnnnnnnnnnnnnnnnnnnnnnnnnnnnnnnnnnnnnnnnnnnnnnnnnnnnnnnnnnnnnnnnnnnnnnnnnnnnnnnnnnnnnnnnnnnnnnnnnnnnnnnnnnnnnnnnnnnnnnnnnnnnnnnnnnnnnnnngatgaaatttacatgaacnatttggggcattttcngcacagtnntcaaaaacgtatgccgaagctggaanaccaacctttaanttccaaaaggagggacttgggccnaaaccccaaaaacattncttaaaaccancannnnnaaaaaaaaaggntctt

SEQ ID NO: 27032 - DNA, 534 bp, Homo sapiens
  misc_feature (1)...(534): n = a,t,c or g
gttcgtttctgaaacaggtgagttggtgggtgggagagggaagggtaacagactggtttcttccaaggagctggctgccttggatttgaggaaggagtagcaaggtgatagctattatcaaataggaggaactttctcctctgaccatatagtccctccaagttatatcctcagggcccctttcccgataagaaggaatcagacatcaacagtatttgttttttctatatgtgtctctgctgctgtggatgaaatcactgaccactctgcttgtgtatgtatgaatgtgtatatatgtgaccctttctttagagatgaggctgaaaggcatttcctgccctgggagatcccctctgggcccctcctgaatattttgcaatagtccatcactgacacttggggaanatgctgtatctcataggacctaaagggcatctgggtaaacaaactgctttccccaatttgcaaattaggatactgaanactanataagctcaaagtcatatgcnaaggttccgggnaaaccatgnctaa

SEQ ID NO: 27033 - DNA, 519 bp, Homo sapiens
  misc_feature (1)...(519): n = a,t,c or g
ggtctttgtttttctgagattgttgagccactcatccaggaggcagggaaaccattaatggctggcttctggacacatctgttatgaagtgtgaagcagagttaactcaggaagttcccaaagaactgaattttggcccatagagagtttatgaaatgaacagagaaacaagatgtctcttcccagtcttaggtatctgtgggcatccattttaatacctggtttcttcagaattagcctgtgacacttttctgtatttcngaaatattttccaacatgtgcttcnccctaaaagacctggttgtagtaactggnagnggtttttggttggccggttttgaaaggnatcncnctcnnggcantgcgaagntncantgncnnanatatgncacnngggaacnnaggaaaccccgtntcaaaaaaataaggttgaaatcactagttaggcaaagtgcancctaagtttaagngttancaggaaganttagggtccttgntancnccatgcaatattagata

SEQ ID NO: 27034 - DNA, 538 bp, Homo sapiens
  misc_feature (1)...(538): n = a,t,c or g
gctggcaggaaaggatttacaggagagtgggttggtgaggctgcagaggccatgagagaagggaataagctggacaaatggactgggcctgagtgcttcaaggattccgcatgccttcctgaggagtttggactttacccggccaaatgtgggattttatgtgactaaaatcaagtttgtttagaaagctctacttggcctcagtgcttcaaggattccgcatgccttcctgaggagtttggactttacccggccaaatgtgggattttatgtgactaaaatcaagtttgtttagaaagctctacttggcctcagtgtanctggatggatgggaaaaggtgggngaangtanggagaccatttggnancaacagaacanggttgnatttttcactgctaanatgtaacattttagttttaagggttgaataagcctactacattganaaatgancaaaaccannaccagtnaactaancaaantttaccttgaaaatgttcacgttggcaaaatagcaactttcaaaagatcancaga

SEQ ID NO: 27035 - DNA, 543 bp, Homo sapiens
  misc_feature (1)...(543): n = a,t,c or g
ggacaaaatgttcagcatatactacatgtnnnnnnnnnnnnnnnnnnnnnnnnnnnnnnnnnnnnnnnnnnnnnnnnnnnnnnnnnnnnnnnnnnnnnnnnnnnnnnnnnnnnnnnnnnnnnnnnnnnnnnnnnnnnnnnnnnnnnnnnnnnnnnnnnnnnnnnnnnnnnnnnnnnnnnnnnnnnnnnnnnnnnnnnnnnnnnnnnnnnnnnnnnnnnnnnnnnnnnnnnnnnnnnnnnnnnnnnnnnnnnnnnnnnnnnnnnnnnnnnnnnnnnnnnnnnnnnnnnnnnnnnnnnnnnnnnnnnnnnnnnnnnnnnnnnnnnnnnnnnnnnnnnnnnnnnnntaggccaatgcggtnnnnnnnnnnnnnnnnnnnnnnnnnnnnnnnnnnnnnnnnnnnnnnnnnnnnnnnnnnnnnnnnnnnnnnnnnnnnnnnnnnnnnnnnnnnnnnnnnnnnnnnnnnnnnnnnnnnnnncnactgggcgtgatggcacgcacaagtantcanctantggggaagntctgcangagaatttgcttacc

SEQ ID NO: 27036 - DNA, 523 bp, Homo sapiens
  misc_feature (1)...(523): n = a,t,c or g
gtgagcttcaataccctgaatatccaaaccacttccctcacctgtcgggggaggcttctgtcaaactgaatttaggtttgggtgggacatgatggggccactggaactgaatgaatacgatcaaaataaacaaacaaactctcgactgagcacaagaaaagatgacatttcaaactaccaggtgaagggaaaagaaaagtgaccactgatagtgaagttatctaggagtcngcagggacctcacctggtggggtcccctgagccctgcncacctcaggtcctaggggaattangaacacgtgggcaggctggccagangattggctgaggtgggcacatncctcanggngccccggactcctacctgacaccatagccctgatggtccaagttgccacctgagcaaaaacgaactgctccacccangggcctcaacaagtgctcncacttcaggangctcccctataagtcataatggnagggaaaaatnnaanaaagggtcttatttangnggccnagcttt

SEQ ID NO: 27037 - DNA, 536 bp, Homo sapiens
  misc_feature (1)...(536): n = a,t,c or g
gaggcaataatatttttgtcggaacagttttccagggtgccaagatgctctctctcagatacagcagattggcaagctcgttttctaagagttcaaaaaaccatttcacacttaactttgattacaagtcaaccttctcttgctaattcagcacgcttgctacgagttattggtttttctcatctcttcctgaaagtgaagcaaatgtcccttctcccatgtgaaatcctcaaactttcactaactcctccaaagttccactcttgacaaaacgtaagctgagtgagtctgagatactccatcaacaaaatcaaacatgttcaaaattttgcaaaggggaaaaaaaccagcagagcaataggtcttattctcnnnnnnnnnnnnnnnnnnnnnnnnnnnnnnnnnnnnnnnnnnnnnnnnnnnnnnnnnnnnnnnnnnnnnnnnnnnnnnnnnnnnnnnnnnnnnnnnnnnnnggggaaaacccgttcactaaaaatacagcattancctggatgatggnagtgcctanaacccag

SEQ ID NO: 27038 - DNA, 535 bp, Homo sapiens
  misc_feature (1)...(535): n = a,t,c or g
gcgggacgcgcctgctcttcgcctttcgctgcagtccgtcgatttctttctccaggaagaaaaatggcatccgttgcagttgatccacaaccgagtgtggtgactcgggtggtcaacctgcccttggtgagctccacgtatgacctcatgtcctcagcctatctcagtacaaaggaccagtatccctacctgaagtctgtgtgtgagatggcagagaacggtgtgaagaccatcacctccgtggccatgaccagtgctctgcccatcatccagaagctagagccgcaaattgcagttgccaatacctatgcctgtaaggggctagacaggattgaggaganactgcctattctgaatcagccatcaactcagattgttgccaatgcaaaaggcgctgtgactggggcaaaaagatgctgtgacgaatactgtgactgggggcaaaggntctgtggcaancacatcacagggtgatggcaagaccaaanggggcattgactggaattntggaaaanccaantcgtggtcantggaa

SEQ ID NO: 27039 - DNA, 526 bp, Homo sapiens
  misc_feature (1)...(526): n = a,t,c or g
gattcccccaaggacaggcagacaaaggggagaaatgggactatcatccctagctctgaaaactctgctttgtaactaggccaaaggagatgccacataaaagtggctgttcagtagctctattctataggaggtacannnnnnnnnnnnnnnnnnnnnnnnnnnnnnnnnnagggagganggnnnnnnnnnnnnnnnnnnnnnnnnnnnnnnnnnnnnnnnnnnnnnnnnnnnnnnnnnnnnnnnnnnnnnnnnnnnnnnnnnnnnnnnnnnnnnnnnnnnnnnnnnnnnnnnnnnnnnnnnnnnnnnnnnnnnnnnnnnnnnnnnnnnaaannnnnnnnnnnnnnnnnnnnnnnnnnnnnnnnnnnnnnnnnnnnnnnnnnnnnnnnnnnnnnnnnnnnnnnnnnnnnnnnnnnnnnnnnnnnnnnnnnnnnnnnnnnnnnnanaananaatgggatattcaaaggtccttgncagggaactnctancagncttctcaactgctgggataatcnccttgggaac

SEQ ID NO: 27040 - DNA, 483 bp, Homo sapiens
  misc_feature (1)...(483): n = a,t,c or g
gagcaccatgagcttcannnnnnnnnnnnnnnnnnnnnnnnnnnnnnnnnnnnnnnnnnnnnnnnnnnnnnnnnnnnnnnnnnnnnnnnnnnnnnnnnnnnnnnnnnnnnnnnnnnnnncatggaattacacaattttaaggaattaaatgttaaactacttcaaactccaatgcctttagaagttaaagcaggcgannnnnnnnnnnnnnnnnnnnnnnnnnnnnnnnnnnnnnnnnnnnnnnnnnnnnnnnnnnnnnnnnnnnnnnnnnnnnnnnnnnnnnnnnnnnnnnnnnnnnnnnnnnnnnnnnnnnnnnnnnnnnnnnnnnnnnnnnnnnnnnnnnnnnnnnnnnnnnnnnnnnnnnnnntactcgggannnnnnnnnnnnnnnnnnnnnnnnnnnnnnnnnnnnnnnnnnnnnnnnnnnnnnnnnnnnnnnnnnnnnnnnnnnnnnnnnnaaactcntctcaaaaaaaaaaaaaa

SEQ ID NO: 27041 - DNA, 489 bp, Homo sapiens
  misc_feature (1)...(489): n = a,t,c or g
gggaggagctgacgtggcctctttggatantccccccagcacgcctgtgacaataagctgctgggtttcaggtagagcccctttctctgctcctgattgcacggatgtttctgcacagggatggttgagattccagctgccacctcatcctagctgactttaaaactgaggcttggctgacattgggttctcagaggaacgattagaagcctggctcactgananggantgagtgcggcctggaggagggcaagcggcaaggcgaatcctgggctcggggaanggcatggggaagggagtggattccctggangcanagcttgattgtganggatgtggcccccaaggtcaaccctggaagnaanaaanngcccccggaggacccaaaaaggnggttccaaccggnanattggtcaaccngtaacccaaaantttgaagcnnagngggaaacactaattcgaatttgnccaccggccaannnccaaacc

SEQ ID NO: 27042 - DNA, 504 bp, Homo sapiens
  misc_feature (1)...(504): n = a,t,c or g
gaagtggcattttctgcattgtattcttanaaacttagactgttaganttggaagtgctctgataaaaccgttctttaacatacgagaaaacagaggcccaaataccttaagtcccttgtccaagantatgctgagtgcanaaagccacactgtggntcangtcctgggccctggccctcagcgtttctcagcccactgcactcatctccagcacttctgatggactcactggggtgacaccatcaaaccatgtgccccaaagatgccttcatgttggtttccacttgggcatttctcatgcttggatggctaatatactccctgcctggttactcntgagaacccggctttcatctgctgtgggacacagtagcctttgcgtnagtgcctacgtgcanatgtgtccatggaggcaggaagggtggcaaggcaaggnagggngggcantngnccacnnaactgnncnnnnagccttttaggaanngggccttgcaaagcaaagg

SEQ ID NO: 27043 - DNA, 489 bp, Homo sapiens
  misc_feature (1)...(489): n = a,t,c or g
gtggncttggaactctgacncctttccaaagnactttgtaccacctcngctgttttcctggtttcnaacnggtggggatgctgtgcccagggantgggnccaactcaggtcatgactaaacctgcntggnttgccnaaaaanctgtgncttccccatggagagaanccangttctgtncattcntcaatctcnaagacantggcanctatgtgacgtgccangttttaatgcattcattaccccatttacagcttagcaattatccacagangntacgtaataaccccantttacaggcaaaaggncatggatnannnaagcaancaantccnatcaggtntaancntgggggcctggaacttagcaaaaaanccctnntngaaggcccaanccaaggtgttaacaaaggacaaattttcaccagnaagggggcctttaancangggantttttggagggttccaggaggggtncaaaaggnaattttt

SEQ ID NO: 27044 - DNA, 489 bp, Homo sapiens
  misc_feature (1)...(489): n = a,t,c or g
gaaatattagccgcttccataattattatttattattattagaaggttgagtggaggtaaaagtcccttccctcttgccagttcgtaagagtaccacctaaacttgatagaggtgcttctttggctaagtggagtgctgggtttgtttctctgtccagtgtcttccaaattggccatcagtctcttccaaactgcttaaatgaggcaaaacctcctctctcttatttatattataaatctcttactaccttgcaggggaagcaaggagcacatattaaattgcacttaagattgcagcantgctcaaagtggagggtgggtgttcncaatgagtanagattgacctacaaatcaactgagagtggttttccttttcctccttcctttttttttcccggaaaccaatctggcccggtacccagggtaaanngaatgggggcaaattgggccaaaaaaaccccgcccccgggttnaaaganccccccgccc

SEQ ID NO: 27045 - DNA, 498 bp, Homo sapiens
  misc_feature (1)...(498): n = a,t,c or g
gnnnnnnnnnnnnnnnnnnnnnnnnnnnnnnnnnnnnnnnnnnnnnnnnnnnnnnnnnnnnnnnnnnnnnnnnnnnnnnnnnnnnnnnnnnnnnnnnnnnnnnnnnnnnnnnnnnnnnnnnnnnnnnnnnnnnnnnnnnnnnnnnnnnnnnnnnnnnnnnnnnnnnnnnnnnnnnnnnnnnnnnnnnnnnnnnnnnnnnnnnnnnnnnnnnnnnnnnnnnnnnnnnnnnnnnnnnnnnnnnnnnnnnnnnnnnnnnnnnnnnnnnnnnnnnnnnnnnnntttttttaaactaggtgancacggtggctgatgcctgtatcccctttgggaggcaangctgggaaatgatgtgaancccaaggantttgnaccaacccggggcaacnttaaaaaccctgncnctaaaaacatacaaaatttactnggcttgggggnccgggccgttggcccagnncncaaatggntnanggggaaggattcctttnccccagngggcaa

SEQ ID NO: 27046 - DNA, 498 bp, Homo sapiens
  misc_feature (1)...(498): n = a,t,c or g
gtaccactcaggcatttgactgaagatgcagctcactaccctattctctctttacgcttagttatcagctttttaaagtgggttattctggagtttttgtttggagagcacacctatcttagtggttccccaccgaagtggactggcccctgggtcagtctggtgggaggacggtgcaacccaaggactgagggactctgaagcctctgggaaatgagaaggcagccaccagcgaatgctaggtctcggactaagcctacctgctctccaagtctcagtggcttcatctgtcaagtgggatctgtcacaccagccatacttatctctctgtgctgtggaagcaacaggaatcaagagtgccctccttgtcaaccacctatgtgcaactggttgtaactaggctcaaaatntcaaccatggggtcctgacanaaanaantactcaanccgggananatacaggntttngacncaaatctgtcngaaaaggatgttaaag

SEQ ID NO: 27047 - DNA, 499 bp, Homo sapiens
  misc_feature (1)...(499): n = a,t,c or g
gagagaaagggaaacaaatgaggtgggttttatgaatgctccagcttactgcctggagagcttccaggccacagcagcagaagagtcactcaagcaaagcttgacaggattcctgagtagggaatatggggaggccaaggcagccagaatctcagggctgtgtactagagatgagacagttgcacaaagagctccagagatctgtagaggactccgtttgagacttcagctcagtgttgatcggtgccagtgtgtaaggaaaccatttgaggcagggaaagaatcaccaaaaaggagtaggcagaaaaatttctggagctcacacanggctgggaatattcatgtttaacaactagagtgganaatcctgcatggggaattaggttgagtactgcaaagggtatactgctcattaaaggggcaaantatcctaaacnaaattcaatccagccctccctaanaaacttaaancaagacccaagggatgcnctgnttcaat

SEQ ID NO: 27048 - DNA, 496 bp, Homo sapiens
  misc_feature (1)...(496): n = a,t,c or g
ggtaaatatggcccctgcctgaggagctcactgatgggaaagacaactgtacatctatcattgaaagtatttattgtggattcanagggacagggggctctgaaaaatagttactgcttctttgggggtttacttaaagagatacagtcaggagaaanggtaaaaacaaatacatggttcantanaaagctatgatatcaaaatgtcaacttaagggattttattttattcntactnnnnnnnnnnnnnnnnnnnnnnnnnnnnnnnnnnnnnnnnnnnnnnnnnnnnnnnnnnnnnnnnnnnnnnnnnnnnnnnnnnnnnnnnnnnnnnnnnnnnnnnnnnatctccaagtactgggagaataagtgtgcaccancacacatggtagtttttgattttgtnaaaatggggttttncaagttgccctgggnggcccnaaatcccngggccaaatggncccccaacccnggcnccaantncggggataanagggtga

SEQ ID NO: 27049 - DNA, 529 bp, Homo sapiens
  misc_feature (1)...(529): n = a,t,c or g
ggcccaggaaatggagaggctggcacanctgcagcaatgcctgcaagctgtcctgattttctccggcttggagatanccaccacttttgagcattattaccagcactacatggcggaccgtctcctgggcgtggtctcgagctggctggagggggccgtgctggagcanatcggtccctgcttccccaaccgcctcccccagcagatgttgcagagccngagcacctctaaggagctgcancgccagttccacgtctaccagctccagcagctggatcangaactcctgaagctggaggatncacagaanaaaatacaggtgggccttggggccagtggcaaggagcacaagancgagaaggaanangaanctggggcagcagcaatggtggatgtggcgganggaaaacgaggaacacgaagngaatgaggactctacttcanggggcaattgcaaaaattgcngngctgtcctgtccnaaatcctggctgttgcctcaactgcaaacacngagcccanacctgccgc

SEQ ID NO: 27050 - DNA, 520 bp, Homo sapiens
  misc_feature (1)...(520): n = a,t,c or g
ggttgtttatactaagtttatagtaaagtaaatactggaatatggttcatttaagtatggtttgcctaatgggacatcagaaaaaattcatataaagaaagatcaatggttttcacattccttgtaacaaaatggtctgtctgattttctactatacatatatccctgttcatgtaatatttaaacagatgtgaacaaatggagaagcttctggagaggtcatttanagcccatgtaacatccctccacatagactcatagaacttgtatctggaaggaagcttanaaatcactttgttccactcccttgttttattaatganaaaactgaggtcctcagactaagtgatttgcccaaatatgtgcttctggatatcagctgtgtcacatttatgcagttggtaaactttagcttttcctcctcctggggaaatacgatatgtcagaaagcattatgcatccgtccgtgtcaattttttgtgagggagananttttnggngtacagtnaaatncaccact

SEQ ID NO: 27051 - DNA, 505 bp, Homo sapiens
  misc_feature (1)...(505): n = a,t,c or g
nnnnnnnnnnnnnnnnnnnnnnnnnnnnnnnnnnnnnnnnnnnnnnnnnnnnnnnnnnnnnnnnnnnnnnnnnnnnnnnnnnnnnnnnnnnnnnnnnnnnnnnnnnnnnnnnnnnnnnnnnnnnnnnnnnnnnnnnnnnnnnnnnnnnnnnnnnnnnnnnnnnnnnnnnnnnnnnnnnnnnnnnnnnnnnnnnnnnnnnnnnnnnnnnnnnnnnnnnnnnnnnnnnnnnnnnnnnnnnnnnnnnnnnnnnnnnnnnnnnnnnnnnnnnnaataantaataaataataaaaaatnnnnnnnnnnnnnnnnnnnnnnnnnnnnnnnnnnnnnnnnnnnnnnnnnnnnnnnnnnnnnnnnnnnnnnnnnnnnnnnnnnnnnnnnnnnnnnnnnnnnnnnnnnnnnnnnnnnnnnnnnnantccagtctagggngaaaaanccncccaaaaaaaggaaaaaaaaggtcttatttancnggcnnaanttatcccttaaggnggttattta

SEQ ID NO: 27052 - DNA, 521 bp, Homo sapiens
  misc_feature (1)...(521): n = a,t,c or g
gaacaaaggataccaaaaaggcaatattttaagatagtgaaggatggtgtaattattcagtaaatggttcnagaaaaattggttgaccattttgaaaattagattattaatactgacaagtctcatatgaaaaccanagagatacagatgaaattgagataccattttcttcctgagatttccaccgtgacaaaaaaatatgatgattattgttggtgaaggtttggggaaattctcaaacactgctggtagcagtataaattgctgtagacttttctagaggacaacactatgtacttcaaggaacacaccttaaggatttcctattggacaggtccttaaagataanaanaatcattacagtattatttatgtaagtgaaaaactgatagcaacctaaatatatgccaccatgggactgcttatgggacattcatatantgggatgnctaggtagaaanagatggngacaggaaancatgttattncatananngtgggttcaaaaagnccaggttatg

SEQ ID NO: 27053 - DNA, 505 bp, Homo sapiens
  misc_feature (1)...(505): n = a,t,c or g
gcggagcctggctgtgggcccatctttggaaaaaagatctgggaatgattgtctancctccagcctcaacttacttgatgcttgagagactcaaagccccgtggtcagctgccctgcaaagaaagtattttgaccttggcatttggacagctcccatctctcccatggccctgacaatgctgaatgggctcctgattaaggactcaagcccacctatgctgctgcaccaggttaacaagactgcccagttagataccttcaactaccanagctgctttatgcaaagtgtctttgaccatttccctgagatcttatttatccaccggacctataacccaaggggtaaggtcttatataccttcctggtggatggacctcgggtgcaactgganggcaatcttgcccgagcagtctacttgccatccctgcaaagnggaaacgaaggctggccaaatntccaagtatccangaagtttatccacatgggaaanatctgtcancccgg

SEQ ID NO: 27054 - DNA, 507 bp, Homo sapiens
  misc_feature (1)...(507): n = a,t,c or g
gcggcacgagttttttttcttatatatgtcatttttccctggctttcagaattttttgttttaaataattttattatgctttacctgggaataaatttattttatcctgtttggggttctgagctttttaaatctgtaaattcatgtcttctgcccaactcangacgtttcaaatattatttcttcaaataattttttggccctatggtccttctttccttgttattccaatgacatgactgtcagatttttctgttattgttccgcaggtccccaaggctcctttttccccctcccagtcttttcctgtcttctgtanactggatnnnnnnnnnnnnnnnnnnnnnnnnnnnnnnnnnnnnnnnnnnnnnnnnnnnnnnnnnnnnnnnnnnnnnnnnnnnnnnnnnccgccgactcctgggtttaaatgatccccggtcncanccncctgagtnacctgggtaaaagnaaattacgcaanccaagctaatttttaaaaaaattcca

SEQ ID NO: 27055 - DNA, 512 bp, Homo sapiens
  misc_feature (1)...(512): n = a,t,c or g
ggtcttgtgtcaggattttatctgagagaagccactgcccgtgtgaaagttctgatganaacggtgttccaagaggatgattaacctgccagcactgtgtgagttggggcagaanagagagtctaaggcaagggagacctgggaggctgttacaggggccanatgtggggtgtacctgaccccccantggtggctgaggggagacattacaaanaaagcatctttgttatttaactggatattctaaanaaagtggtaaatgaggaggganaagtcaaagatgaccctgaagttctgagcctaagtctctgaggatgctggtaccattgtctgctgtancaaaatcaanatggggacttcccctgggttaaaanagtttaccattttccttcaatctgtatggtggttattcngatggaaaanaaattactccagatcaacaagacaagtttccaattaaaaatntcctaagccgggtgaatttcncaaactgttatccancaaccnggggg

SEQ ID NO: 27056 - DNA, 513 bp, Homo sapiens
  misc_feature (1)...(513): n = a,t,c or g
gggggatgttgtgcagtgcatccgtgacacnancaangttatgaaccatatttgttcaaaacaagattcnatctccagcaaaatcaaagagtgctgtgaaaagaaaataccannncgcggccantgcataattaactcaaacaaagatgananaccaaaggatttatctctaagagaaggaaaatttactgacagtgaaaatgtgtgtcaagaacgagatgctgacccagacaccttctttgcgaagtttacttttggatactcaaggagacatccagacctgtctataccaagagcttttaagaattgttcaaatatacaaagatctcctgagaaattgctgcaancacagaaaaccctccaggttgttaccgttacgcggaagacaaattcaatgagacaactgacaaaagcctcaagatggnacaacaagaatgttaacatttcaanaatttgggaangangtttgaatacattacncacaggccacnaagatactcccaantcncaatg

SEQ ID NO: 27057 - DNA, 516 bp, Homo sapiens
  misc_feature (1)...(516): n = a,t,c or g
gattcaaatatctaaagcactgttaacagagtttaaaagagcctcagtttatttgcttattcttggacaggaattattggggaatggaggtcataattttcnaatatgaatgactaagaaatttcatnnnnnnnnnnnnnnnnnnnnnnnnnnnnnnnnnnnnnnnnnnnnnnnnnnnnnnnnnnnnnnnnnnnnnnnnnnnnnnnnnnnnnnnnnnnnnnnnnnnnnnnnnnnnnnnnnnnnnnnnnnnnnnnnnnnnnnnnnnnnnnnnnnnnnnnnnnnnnnnnnnnnnnnnnnnnnnnnnnnnnnnnnnnnnnnatttcttaannnnnnnnnnnnnnnnnnnnnnnnnnnnnnnnnnnnnnnnnnnnnnnnnnnnnnnnnnnnnncctgggcgacanaacgagacctgtctcaaaaaaaaaaagnaattcaaggncaaacacccgggttatnccggtaatccangggcnaaattcaantncaancacccgggttatnctgtatcccaggtct

SEQ ID NO: 27058 - DNA, 605 bp, Homo sapiens
  misc_feature (1)...(605): n = a,t,c or g
ggatgcctaccttgtaattgatactgtaattaaacaccttttgatattctgtgaggtcatttatatgagtcatcattgattgtatttcattgtctgtgagatagaggagagtatgaaagtggtagttgacatgtgggagttaagtttgtgtttaaaatcaaaccctgcccttaaataaaacnnnnnnnnnnnnnnnnnnnnnnnnnnnnnnnnnnnnnnnnnnnnnnnnnnnnnnnnnnnnnnnnnnnnnnnnnnnnnnnnnnnnnnnnnnnnnnnnnnnnnnnnnnnnnnnnnnnnnncnactaaaaatacagaaaaaaattggnccaacccgggggggacacacctgtgnnctcancnnctccngnggntttggnncgggaaatttaatnncttgancccngggggnaggngngcggtgcncaanngccgggnnccccaacctttgaaaccggtcccnaanaaaaanctccctannnaacnaagggnnntttncaaaacantntcccaancttccnacaangtgattttaaaaggtttgaaattnggncanatncnaagggngcgngncnggtnnaccnatttgatttggaaacttnccggcc

SEQ ID NO: 27059 - DNA, 570 bp, Homo sapiens
  misc_feature (1)...(570): n = a,t,c or g
ggttaatggtaaggagataactgtaatgttagtcaattttggcttaagactgaggactgagaaacagccttcttcctccggaggagcagttaagtcatcttacaactgggagtagagagacaaggacgtgtgaagctgattcatgctttcattatatagttaatactatttggaaacctgtgtgtaggtctggtcaatagacttccatcttaattgctgtatgctaagtgcctcctatgttctgtatacttcatataattcttgctagccttcaacagctttttacaaagtaactattgntttacctaatttctattgagaaaaatgagcttcncntaggtaacttgtccaaagttctttancttgtnantggnngaactgngantttnnagtangggcncantgaccccnnngggccnggnntttnncnangaacacggggttnggggcannanntgggcccnncanttncaacccannggngtaanncccaaaatnnngggtngcggggcgcnncacncntgaccncnaganctnnnnttnangngnanttggnnaaaaaacttcggg

SEQ ID NO: 27060 - DNA, 583 bp, Homo sapiens
  misc_feature (1)...(583): n = a,t,c or g
gattaagttatgagacttcagaaatttttagttctgaaggtgttcattcatttgtcaagaaacaaattgccaacctaaatgagggaggaaaaaaccagcaaattccatgtcctttctatcctcagaagccattataagcttcaagccatccttccataccattggaggtcttctcaagaagctggtatgaagtatcctgaagaggcataagcaatgagtttgggctagtgtggtctagaatcaaaaagagtcattcagcatctatttaatagtagactcagatcatttaaaattgcctaaaactccagaactgtgctgtccaatacgggnactcactantaacatgtggntatttggttaacttnaatttgggntagcntaaattttaagnnnaattccccnngcaaganncccaattttacaaggggnccaaangcaaccccccgncnggtncaanatngggngaaccaatttttggggnaanttnccaaggngngccaaantcnntntnggaaaccccggggccaaaanngnncgggncctnaanaccnngnggggccaaccnnnggcacaanggttcaaa

SEQ ID NO: 27061 - DNA, 585 bp, Homo sapiens
  misc_feature (1)...(585): n = a,t,c or g
gcaaatatcaagagaccatggctggattaagctagataataattttgaggtcaattttgataaagatccaatggaaatgcgcctccctattcgtagccctattaaacgagactttttatcaggaattcagattgaatttaagcagtcttctcaccagagaagtttaagggccaggttgtactggcttcaggttgataatcagttaccaggtgcaatgttccctgttgtatttcatcctgttgcccctccaaaatctattgctttagattcagagcccaagcctttcattgatgtgagtgtcatcacaagatttaatgagtacagtaaagtcntacagttcaagtattttangggccccantcaggnnatggncntnaaaatttncnangggtctncgngcccctattgngncggngtttccccaanaaaaanccnnngacnctgaaanaangngganantttacccaacaagatnnggcccccaaatgcanattagggganacttcaangncgatagggcattcnaatttcttgaaattccaaattncccggnnantnccnttgatttgncttggccccgggggg

SEQ ID NO: 27062 - DNA, 576 bp, Homo sapiens
  misc_feature (1)...(576): n = a,t,c or g
ggaattccttcttcattagctggcggatcacctggagaggagacagggaggggagaccagtcctcttaaaatggtcaaaaagaatctggaggtcagagcagaccccaagctaaggctgagactaacactaagtctggtccctatagcacaaaaggagaaaatcccaaggctagtgttgccacagtgcttcagggtcctaggttaaagcacagaagaaaaggatggcctattgtggcactgtcccacagaactttcattattggccgggcgcggtggntcangcctgtgggcccaacaattnanggagggcttaagnggggtgaatcacntttgggnccggngttntnnaacaancttgggcaaaattgggnaanccctgtctnancnaaaagtacaaattttactggncaaaanttgcantgcccaattcgcccattgtncccaacctgggnnanaancgagacccntctcaaaaaaaaanaaaaaaaannntttntttaacgggcnnaattttncccttagggggggtantttnacttggaanggcctttttttaaaactcntcggggggaaaaa

SEQ ID NO: 27063 - DNA, 584 bp, Homo sapiens
  misc_feature (1)...(584): n = a,t,c or g
gcttttagccactgtgtcaagcacatgtagtaattattgaataaatgaatgaatagtgcctaaacgacaagagcagcttaagcaaccctagctatcattaaacggatgacatcaaagtcagtttaccttcacatcttatttatacagggatcaattcagatgcattacatcaacttgtttgacgtatataaaatgttatatagtgaggtctcaaaatgctcatagttgttaataatgagagaagtatccattcataaattcatcctcatctttgactcattcgtgaacttacaaagatatagacacagtttacttcaagttcaaaaattccaaagttttaaaatgtnttcnttcccanggncanttttattaantgccngccaatggggcacaaaacaaggnntntcttnanacttnntntnantgnnagggttcnatnggggcactngggtttnccccnaaaacccnangggntttgggaggccagggggggggggacccntngggncgnnnttttggaaccaccnggccaantgggaaancccncgtccccacaaaancaaattnncccnggggggggggca

SEQ ID NO: 27064 - DNA, 609 bp, Homo sapiens
  misc_feature (1)...(609): n = a,t,c or g
gagattgcatgggagactccggtgacaaacccttaaggcgcaataatagctatacttcctataccatggcaatatgtggcatgcctctggattcattccgtgccaaanaaggtgaacagaagggcgaagaaatggagaagctgacatggcctaatgcagactccaagaancgaattcgaatggncagttacaccagttactgcaatgctgtgtctgaccttcactcagcatctgagatagacatgantgtcaaggnaaagatgggtcnaagtgacanaaaagggantatgggcccccnanaaaaaatggtttgaccaggntaaaccngaagtcctccccccccttccaaatcccggaaaaccctaaaacctgcnnttnggggcncnntcccncaaggggggaaattntttacaangnccntttggcccncgggggngctttaaatttgggnttataccccngggagtntttctccaanaggngggancacaatanggcttcanccccagggggggtnntggatccgttttggccgtggttttggggaaaaaggnttnccagccccnnnggggaangntnggaccnnntnanacccnctagngggntcaa

SEQ ID NO: 27065 - DNA, 592 bp, Homo sapiens
  misc_feature (1)...(592): n = a,t,c or g
gcagacagacagacacagcctgaaacagacccagacagacagacagacagcctgaaacagacccagacacagcctgaaacagatccggacagacagacagaaacagcctgaaacagacccagacagacagacagacacagcctgaaacagacccggacagacagacanacacagcctgaaacagacccggacagacagacagacacagcctgaancagacccggacagacagacagacacagcctganacagacctananngacanacaggcagactnnnnctgatacngnccaggacnnagcctggaaacagacctngtnngncagnnagtcgtntcctnttaacattgccattngtcannttnngntnnnctnttnnagaccccngnnacttagnnccnngggcnttcttngtnntncccnnntcagaggnatgggnnggcagntttnnaaggccnggggaaaaaagggntaccttttttggaananagctttnnanntnnnnngggccccncttnnnnnnntggcggaantttccccccnggggacnnncggggtntttcgcnntngggggggnggnccnncnaatttt

SEQ ID NO: 27066 - DNA, 447 bp, Homo sapiens
  misc_feature (1)...(447): n = a,t,c or g
ggatctgccggacagactgaacagctgactggggggcacaaagccaaaggagaatgataaggggagagagtaagaaagcaatgagatacacatgtcttgactgcttctcttcatgctgaaatcctgggggaaagaagtgctaaatcagttgaggacatgggaacatttattctggaagaaatttgggtacagagacagacaagcaccaagagaagatgatgtgaagaagcacagcgagaacaccatgtgaaaatggaggactggaatgaagcatctacaagccaagnaatgtctganggtancaaaaaccccgggaaaangcctgggacaatcctgcactanaancctcaaagagagcatgggcccgcggananntttnttttggnntctgggcccccanntgttgtgaaaaaaattcccatttntttancccaaaaaaaaaaaaaa

SEQ ID NO: 27067 - DNA, 512 bp, Homo sapiens
  misc_feature (1)...(512): n = a,t,c or g
gctgaaaagtaaataaataaataaataaaaataaaatgcttcctcaggcacagtttagggaatgtgagagcctcctgataatcatggaagagttgttttacccgggttctgattggtcattaccacatccagtcactgtggtgagcgagaatgacctgagtcaaatgcctatcactaagttcatctgggggctggagggagggttgcagagagtcagccccacccagtccacgtggttgctatacatgggaagaagtagaatgactgactacggtattcatgaaaacaggatggtttcatacgtattttatatctcaactagtacccaaaagtattatatacatagagcatatatcacaatgtgcatttttcctcatttcattaagggagatggaaggtctgttaaggaaagtttaggaataanatgantaagtganataaatcanaaatatttataaggcctcatgaanctgaagaaacagcncagttnanttnanccanangganaattc

SEQ ID NO: 27068 - DNA, 505 bp, Homo sapiens
  misc_feature (1)...(505): n = a,t,c or g
ggggatggcagttatttaaaaaaaggttgacctgagccaccgcgcccggcccccagccatcagtttttgatgtcaccttgccacctggcgtctagcacttcctcctgaacacctgaatgtagttgtctgttggtcttgcagccccgtcctgcccgggacaccagccgcccacccctgaggctgcctgtgggcctctggcttttcctgtcctgcagggggatgggaaagatctggggccacgacttcctctgaggccccgcccagcggcaatgctggcattgttgtgaagtccaccctgtgtgcacacagcatccctgccctgggcccgctggttgccagtagtaannnnnnnnnnnnnnnnnnnnnnnnnnnnnnnnnnnnnnnnnnnnnnnnnnnnnnnacatcacctgggggacgctgctggtgaacgctcaaaattgttcattncantgactctcctttgatctctccccgaggaccantggaagnaagcacgccctccatt

SEQ ID NO: 27069 - DNA, 511 bp, Homo sapiens
  misc_feature (1)...(511): n = a,t,c or g
gctaatcactagactctcttgattccccctcaggaatgtctcacatctttccccagctctccatccccactgctacttagttcagaccttcatctcatatgactactatttcaataacctttgcacccatctcctgtcctccagtctctcctgtctccaagtctctaagctgtcactagaattatctttccaaagcataatgttacagatatgttttctcattttatatctccattgctaagagcagtgtctggaatataggcaatgctgaataaatatttattgttgactaaattactgttaannnnnnnnnnnnnnnnnnnnnnnnnnnnnnnnnnnnnnnnnnnnnnnnnnnnnnnnnnnnnnnnnnnnnnnnnnnnnnnnnnnnnnnnnnnnnnnnnnnnnnnnnnnnnnnnnnnnnnnnnnnnnnnnnnnnnnnnnnnngcttgggctganactgtatcccantggggangctgaggacangattgcttgaaccgaaagggggggg

SEQ ID NO: 27070 - DNA, 512 bp, Homo sapiens
  misc_feature (1)...(512): n = a,t,c or g
nnnnnnnnnnnnnnnnnnnnnnnnnnnnnnnnnnnnnnnnnnnnnnnnnnnnnnnnnnnnnnnnnnnnnnnnnnnnnnnnnnnnnnnnnnnnnnnnnnnnnnnnnnnnnnnnnnnnnnnnnnnnnnnnnnnnnnnnnnnnnnnnnnnnnnnnnnnnnnnnnnnnnnnnnnnnnnnnnnnnnnnnnnnnnnnnnnnnnnnnnnnnnnnnnnnnnnnnnnnnnnnnnnnnnnnnnnnnnnnnnnnnnnnnnnnnnnnnnnnnnnnnnnnnnnnnnnnnnnnnnagaggtgctaaataggactttgggttcattctaaaaaattaaactactacagaagcactatgggctgtaggaaaatgtgcgctgaactgacttaccagggaccatttggagtgtagtccaccaatatttgagcccaaataaatgaatccnagaatcangttaangttaacttgatttttttaaatccactggaggactataatacatgaactanaatatccatcntttttg

SEQ ID NO: 27071 - DNA, 500 bp, Homo sapiens
  misc_feature (1)...(500): n = a,t,c or g
ggaaccagtggggaagagggtaggcatactgggctgggcgcctttccctctttgagtagttttgcgtgagataaggaagagcagaatgtgtaattgtagggccaaaataatcttgtttgtaaacagtgcctgtgagctcctttagtgcttcctaatggccgtgctgtgcaagttgttggttgggttaatctagacagtcctcattcattcattcattcatttctcacatgaccacaacaagagtccttgcctagaggcaagtgctagacagcatagtggttaagagtaggcttnnnnnnnnnnnnnnnnnnnnnnnnnnnnnnnnnnnnnnnnnnnnnnnnnnnnnnnnnnnnnnnnnnnnnnnnnnnnnnnnnnnnnnnnnnnnnnnnnnnnnnnnnnncaaggatgataacaganagagatattangaanagtaaaagttacatgtaaaacatacaacatgtttgcactaataagaatcanaaagttactatnttatt

SEQ ID NO: 27072 - DNA, 501 bp, Homo sapiens
  misc_feature (1)...(501): n = a,t,c or g
ggagagctgctttgggacagtgaattactcttcttttgagacggtctaatgatgcctgggtggtgccttcgtaggatggtcgtcacacctgaacaagggggtccctggccccaggccccatgctttactgggccctgttctgtccctcttctggcatcatctcccatggagaaaagaatgtgttgaagccaagaagatgctccccccccaagaatatcatctctgctagaacaggnnnnnnnnnnnnnnnnnnnnnnnnnnnnnnnnnnnnnnnnnnnnnnnnnnnnnnnnnnnnnnnnnnnnnnnnnnnnnnnnnnnnnnnnnnnnnnnnnnnnnnnnnnnnnnnnnnnnnnnnnnnnnnnnnnnnnnnnnnnnnnnnnnnnnnnnncnagacaaggtcttgcnatgttgccacaggntggtctccaatggcncaagcatctccactcagctcctaaagtgctggactacangatgagcaactcgccaacctccangtgg

SEQ ID NO: 27073 - DNA, 504 bp, Homo sapiens
  misc_feature (1)...(504): n = a,t,c or g
gggtatcagtgatgcagcagccaggagaatttctgggccaggccacaagctgcatatcccaatggccaactggtcatggctacttcctttttctcatctagtgcaagctcaagaggtgtgggatgggacaatattccactgttctgcaggtaaatgtatctttgtggggcctctgaatgtcctcttcggtctgctagtctcctgacaaggggggaaaacactatccagaccttttctctgggaggccatttgttttcctgtaatctgtagaagaaaccaaggtacttttgtgggtgcagcatctcagttactgggggagcttctcagtgtgagctctgaatgcttcaggatgtcttccaatagccagcctttcctctgtgtaaaaggttctctggagtaatggagatagcatgtgtgcaagntagcangagcccccttagtgtcagcttggancaagganngaaaaggaactatcctctganacatncattttgccccaatgcg

SEQ ID NO: 27074 - DNA, 507 bp, Homo sapiens
  misc_feature (1)...(507): n = a,t,c or g
gannnnnnnnnnnnnnnnnnnnnnnnnnnnnnnnnnnnnnnnnnnnnnnnnnnnnnnnnnnnnnnnnnnnnnnnnnnnnnnnnnnnnnnnnnnnnnnnnnnnnnnnnnnnnnnnnnnnnnnnnnnnnnnnnnnnnntcccatctcttaaaacaaatacaataaaatatacaagtgtacataaaacactatccaaatatgtcttctgattatggaatcatggagaaaagcattaaagaagtaatataatctattcaggcttaacaaagattaaaaatagtaacatttctctttatcacaacagctcgattcaccaagaatacagggcttatgtgatttgaaaagctgaacaacagatgttaaattgaaagaaaattcanatctaaggctannnnnnnnnnnnnnnnnnnnnnnnnnnnnnnnnnnnnnnnnnnnnnnnnnnnnnnnnnnnnancaanagggcanttgcccccatagtttccgtgangatacaancatctttcactgag

SEQ ID NO: 27075 - DNA, 505 bp, Homo sapiens
  misc_feature (1)...(505): n = a,t,c or g
gcggnacnagnnnnnnnnnnnnnnnnnnnnnnnnnnnnnnnnnnnnnnnnnnnnnnnnnnnnnnnnnnnnnnnnnnnnnnnnnnnnnnnnnnnnnnnnnnnnnnnnnnnnnnnnnnntanagccaccacgcccggcctattgtattgttttttaaaatttatccctggaattggtttgtgtttttattttttaggaatgattatatacattgaccttgtgccacatgcttcagattttataanaagtaagctgggatgttccaagttccgtgttgcatacagttcttanccangaaaaaatgtccaaaaagatggtttagcaaatttaggattatttcaccctaatttggtattctctatagtgggagtttnanagtgtttcttgnnataatcattanagctgagactnantgaaagtttactcanaagagtgaattttccnactgggtttgggacancntggggtgacatagtgananngnccanacatngngtantgaggtac

SEQ ID NO: 27076 - DNA, 507 bp, Homo sapiens
  misc_feature (1)...(507): n = a,t,c or g
gatttctttatcagctaacagtgtattgctgctcacaaagcactctgatgtgtgtttttccatttgatccttttaacaaccccatgaaatagacattcttatccccattttagagattaaaaaaaaaggggggggctctgagaattgaattgcccaaagttacatagctagtaagtggctaggttaggatttaaacccaggtcttcaaattcccagttctagtatcattcccactgtagcacagaaaagagaagagtaggccaggtgtggtggctcacgcctggaacnnnnnnnnnnnnnnnnnnnnnnnnnnnnnnnnnnnnnnnnnnnnnnnnnnnnnnnnnnnnnnnnnnnnnnnnnnnnnnnnnnnnnnnnnnnnnnnnnnnnnnnnnnnnnnnnnnnnnnnnnacctattatcccagctacttggaaggctgagnaaggaaancacttgaaccaaganggggaggttgcantgagctgaaattgtgcggtgnacncancctg

SEQ ID NO: 27077 - DNA, 497 bp, Homo sapiens
  misc_feature (1)...(497): n = a,t,c or g
gcaggattttgggagnnnnnnnnnnnnnnnnnnnnnnnnnnnnnnnnnnnnnnnnnnnnnnnnnnnnnnnnnnnnnnnnnnnnnnnnnnnnnnnnnnnnnnnnnnnnnnnnnnnnnnnnnnnnnnnnnnnnnnnnnnnnnnnnnnnnnnnnnnnnnnnnnnnnnnnnnnnnnnnnnnnnnnnnnnnnnnnnnnnnnnnnnnnnnnnnnnnnnnnnnnnnnnnnnnnnnnnnnnnnnnnnnnnnnnnnnnnnnnnnnnnnnnnnnnnnnnnnnnnnnnnnnnnnttttancaancancttcttgganagggaatggcnganaccttgaattttgaaaaatgtttgggaatggaantttctanggngtgaaanaaaaatntngcagtccttganananttncngtaananaatggnanatncanacttgttccgattgaagcccttttattttgggggtacccaaatatatttgnangncctcnatttaaccnccttgt

SEQ ID NO: 27078 - DNA, 496 bp, Homo sapiens
  misc_feature (1)...(496): n = a,t,c or g
nnnnnnnnnnnnnnnnnnnnnnnnnnnnnnnnnnnnnnnnnnnnnnnnnnnnnnnnnnnnnnnnnnnnnnnnnnnnnnnnnnnnnnnnnnnnnnnnnnnnnnnnnnnnnnnnnnnnnnnnnnnnnnnnnnnnnnnnnnnnnnnnnnnnnnnnnnnnnnnnnnnnnnnnnnnnnnnnnnnnnnnnnnnnnnnnnnnnnnnnnnnnnnnnnnnnnnnnnnnnnnnnnnnnnnnnnnnnnnnnnnnnnnnnnnnnnnnnnnnnnnnnnnnnnnnnnnnnnnnnnnnnnnnnnnnnnnnnnnnnnnnnnnnnnnnnnnnnnnnnnnnnnnnnnnnnnnnnnnnnnnnnnnnnnnnnnnnnnnnnnnnnnnnnnnnnnnnnnnnnnnnnnnnnnnnnnnnnnnnnnnnnnnnnnnnnnnnnnnnnnnnaatgctttgggggtttaagccttgaatccttgccatgcctagtccgaatggnattgcntaggnttctcnaggg

SEQ ID NO: 27079 - DNA, 507 bp, Homo sapiens
  misc_feature (1)...(507): n = a,t,c or g
ggttttacatatgtggctccatctgtacttgaaagtgtgaaagaaaagttttcctttgaaccaaaaatccgatcacctcgaagatttattggcagcccacgaacacctgtcagcccagtcaaattttctcctggggatttctggggaagaggtgcttcggccagcacagcaaatcctcagacacctgtggaatacccaatggaaacaagtggcatagagcagatggatgtgacaatgagtggggaagcatcggcaccacttccaatacgacagccgaactctgggccatacaaaaaacaagcttttcccatgatctccaaacggccagagcacctgcgtatgaatctatgacagagcaatgcttttaatgaatttaaggcaaaaaaggtgganaggganatgtgtgagcatcctgcaanggtgaacgacccaaattgcagttcaggagtcaatgtcattcatagacacttcagacacaggaaaataaactggttttaaaaatcaaca

SEQ ID NO: 27080 - DNA, 642 bp, Homo sapiens
  misc_feature (1)...(642): n = a,t,c or g
attcggcacgagcaatgttcattccttcaataaatatttaataagaacatactttgtgctaagcatagtattctgtctcatttccaacaggctccatactatgagtaaggccagacactaactataatatagtggtttgaattctcgttacaatactatgtttgaaatataagagtgcaattggcttttagctatatattttaaaaggttagatatgtaacttgggcttgggtggtattgccctgaatatctgggtactctttcaaagtgccagcattatatttagttggtcctaaaagggagagcctggtggccctctccttgggtggcagaacttatgtcttgtctatgcagttgctctgcttccttgagacccactgatggaanggttaaaacctgcttggccaaaaagggaanggctaatttcctgctgccacagacattagaacaccaccaccttactccatctctanacggcttgcacacaacgtagttgaattgtcccnacacattaaactacttgatttaattaacnttgatccttccccgtgtaaagggatccatttggaaaaatgccacacaatcatccnaaacaattgccaattaacgtctggganaaaaaggttaaactttttttaaaaa

SEQ ID NO: 27081 - DNA, 495 bp, Homo sapiens
  misc_feature (1)...(495): n = a,t,c or g
gggaacgcactgtgttgaatgttattgtgctgacaaataagcccccaaattaaatgacttaaaaaataaactcattcttcatnaagtagngttctaggatggtgtttaggaanatgtggcagctctccttgctctcagtcacggaccaggattctcccaccttctgtttctaccatccttcacgcatcagcatctttagcatccagctggcagaaaaagaacatcaagataggcatgtgggaggagctatgagccagtcctgaaagtggcatgcaatatttctgctcacatctagtcacttggccaaatctaattgcaagggaacgagaacttcttttatgcccaggaacaggcacagaatggaatatggcangcaacaagcagaatttcctatactcacagtcctgattattgacttcatgctttcccaangncattttgtcttcagccagattccanttcaagggancatgaaaatgttcttcactctataaa

SEQ ID NO: 27082 - DNA, 413 bp, Homo sapiens
  misc_feature (1)...(413): n = a,t,c or g
gcaggctttaagtctcaactctgcccttgactgtgtaacccttttgagtctcaccttcttttctgtgacaagaannnnnnnnnnnnnnnnnnnnnnnnnnnnnnnnnnnnnnnnnnnnnnnnnnnnnnnnnnnnnnnnnnnnnnnnnnnnnnnnnnnnnnnnnnnnnnnnnnnnnnnnnnnnnnnnnnnnnnnnnnnnnnnnnnnnnnnnnnnnnnnnnnnnnnnnnnnnnnnnnnnnnnnnnnnnnnnnnnnnnnnnnnnnnnnnnnnnnnnnnnnnnnnnnnnnnnnnnnnnnnnnnnnnnnnnnnnnnnnnnnnnnnnnnnnnnnnnnnnnnnnnnnnnnnnnnnnnnnnnnnnnnnnnnnnnnnnnnnnnnnnnnnnnnnnnnnnntaataatcgcttcctatcttaca

SEQ ID NO: 27083 - DNA, 406 bp, Homo sapiens
  misc_feature (1)...(406): n = a,t,c or g
gcggcacgagagtgagaaggatgtgtctgaagtgcaggaagagcttaaaccagggcctagaaactccaaccatgcgtgtgcgttgtctgtggggttttcccgctgcagcacagaggcgagtggtttccatggctgcaaagccagaaatacttgctgtctggcccttgacagaaaagactgccaggctgaggcctaaccacggagaancctctcgggaggaggcgacacagccatggggctgctgagccccccagggagtgggtggtggttccagcaagatgttttagggggagccatgctttgggagcctcacccaggacatcgtgccttgcagagcaggaggggcccgtcccaacctttcctgggccgcccagctgccaagaaggatgtgcttgcagtcacctgc

SEQ ID NO: 27084 - DNA, 510 bp, Homo sapiens
  misc_feature (1)...(510): n = a,t,c or g
gctggcatttaccttttccctttaaggctgggggttantagctttataaataannnnnnnnnnnnnnnnnnnnnnnnnnnnnnnnnnnnnnnnnnnnnnnnnnnnnnnnnnnnnnnnnnnnnnnnnnnnnnnnnnnnnnnnnnnnnnnnnnnnnnnnnnnnnnnnnnnnnnnnnnnnnnnnnnnnnnnnnnnnnnnttgtcngcattcaaaacctgactgannnnnnnnnnnnnnnnnnnnnnnnnnnnnnnnnnnnnnnnnnnnnnnnnnnnnnnnnnnnnnnnnnnnnnnnnnnnnnnnnnnnnnnnnnnnnnnnnnnnnnnnnnnnnnnnnnnnnnnnnnnnnnnnnnnnnnnnnnnnnnnnnnnnnnnnnnnnnnnnnnnnnnnnnnnnnnnnnnnnnnnnnnactgtttccacnnnnnnnnnnnnnnnnnnnnnnnnnnnnnnnnnnnnnnnnnnnnnnnnnnnnnnnnnnnnnnnnnnnnnnnnnnnnnnnnnnnnnnnnnnnn

SEQ ID NO: 27085 - DNA, 125 bp, Homo sapiens
gagtaaattcagattatgggatattctataagacaagcagtgaaacacaccagcatctgcccccgatgaagaggctaaaagttgcaggacttaatgcaacgacaatgtgataaaaaaaaaaaaaa

SEQ ID NO: 27086 - DNA, 493 bp, Homo sapiens
  misc_feature (1)...(493): n = a,t,c or g
gnnnnnnnnnnnnnnnnnnnnnnnnnnnnnnnnnnnnnnnnnnnnnnnnnnnnnnnnnnnccagttctctnnnnnnnnnnnnnnnnnnnnnnnnnnnnnnnnnnnnnnnnnnnnnnnnnnnnnnnnnnnnnnnnnnnnnnnnnnnnnnnnnnnnnnnnnnnnnnnnnnnnnnnnnnnnnnnnnnnnnnnnnnnnnnnnnnnnnnnnnnnnnnnnnnnnnnnnnnnnnnnnnnnnnnnnnnnnnnnnnnnnnnnnnnnnnnnnnnnnnnnnnnnnnnnnnnnnnnnnnnnnnnnnnnnnnnnnnnnnnnnnnnnnnnnnnnnnnnnnnnnnnnnnnnnnnnnnnnnnnnnnnnnnnnnnnnnnnnnnnnnnnnnnnnnnnnnnnnnnnnnnnnnnnnnnnnnnnnnnnnnnnnnncatgctangtgangttgagcatttttcctaagtggtgtgtcctcctgtcancttcccggtaaaaaaggccttcatgccc

SEQ ID NO: 27087 - DNA, 495 bp, Homo sapiens
  misc_feature (1)...(495): n = a,t,c or g
ggagtgtctttaatttatgtgtgtataacattataaaggaaaaatataactaaacataatccgtatgattaaatatttctcctatatccagaaatgtaaatttattgaaagaaaaagattctaagcttgtattgccaaacacaatccaaaaatatgctatacactggcacacatggctaaaagcatgccaggaaaatgcagcaaaaagaagtagttctcctgatattcatattagttgctatgcttgaatgcttgtgtctccacagaatgnnnnnnnnnnnnnnnnnnnnnnnnnnnnnnnnnnnnnnnnnnnnnnnnnnnnnnnnnnnnnnnnnnnnnnnnnnnnnnnnnnnnnnnnnnnnactaatgtgcttatgtaagtgacttgtaggagctttttgtcctctgccacctgaggatacatanaagttgccatctatgaggaacangccctcagtagacaccaaatccactgacgcttgatcttggcctcca

SEQ ID NO: 27088 - DNA, 499 bp, Homo sapiens
  misc_feature (1)...(499): n = a,t,c or g
gaattggtgtggaatatttaagccacgagaataagtactataaaagcaagaatttataatagggtctttaatgatcagttctgttcttacacagcttctccccactcctactccttggaagcaaccaagtggtatgagttggcccctactcaccccctccctggtgtcagtggaccacatcagggaagtgaggttattttttcacttggaggaaacaaagatatgtaactcagtaccctacttttgccatgaggttgccagtgggtggagggagaagacaaacttccacctaaccagtctgcaagaaggaagtataagttagtactctacttttggtaggatggtattagtaggtcccatcaggaagataaacacgcacacccacccagctctcangttacacatcaatagggaaccatctacgaaataataagagagaaaaattctcataatataaaaaaaattcaggncacaataanntcacttatangcaaaggaa

SEQ ID NO: 27089 - DNA, 490 bp, Homo sapiens
  misc_feature (1)...(490): n = a,t,c or g
gctgaggaacacagattccttaagtaatgaaattantatctgtgggtatcattaactaaggtcacctttcaagaactgttaatgtcctttgtccccaagtttgacagatttgatgtcaggaggcatgtgggcctctgtgaaggtgctgagagaatgggaaactaaggccattctaagtgataccagattacgttaaaanccctcagcaagttcccaatttaccaagctatgcctcattaactgagggttttctgcngtatttggttccacacatgcaatttatatggcatttaatctgagagacccatctgcctcagtggcccatttcccttttattttnggntgcnaagaaatgnnttgtagctccnttgttcngggtagnctgtgntgtcncaaatcttagangcacttcagatttcgnanattggggttcngngtaagatnnaaaggncaanctggttgnngnacggaagnantcgngnncnggccc

SEQ ID NO: 27090 - DNA, 504 bp, Homo sapiens
  misc_feature (1)...(504): n = a,t,c or g
ggacatcttaagggaccgcatggcatccaaggccactggcatctactgtactcccctcccaccggcgcttccctttgctagcatctgcagccacaagtgacacttaagggagatttacctccactactgggagtgttagtgtctgtgacaaaagtgctggttgctgggctgagggggtctgagcatgctgggtggaagccctgaagaggaagggagaaggtctctgcccacatcccacatttgccgtgcatccctgagttccaaagcagcctcgctaggctctagagcccctaaatctccaaagacagcagctcctccgcgagctagctgcccctgacggaggctcacagcttgcctaggggagggcaaggcaaaagtccctgctattctcttcctttcctggctcangccttgatccaaatagctcccttcttccaagacactactcccaggctcctctcctgataataatagtggctaacaagtttactagatttangcaac

SEQ ID NO: 27091 - DNA, 500 bp, Homo sapiens
  misc_feature (1)...(500): n = a,t,c or g
ggaaatgaaatgtttaaatcttttttgaaatgaatttatcaatagactgagtataacccctgacaaggaagtattatagtttaagatgataggcaaaactgggcagaggctggctantgtacttgaaagagcactgggtgctcgatttgtgctctgccattcatttgcttctctgtaagatgagggctcagacaatatcagtggttcaaatattcagctgaactggaagttccaaggagtcccttcaggggctgtcatagcctcctctaccagagcagctatgctttttgctttcatctacgcttgtgtttttatatcnacataagattttattcaaatggatgacccatgaccccctcactacctgcagaaagaatttgaaaacctctagacnaaatgatctcctggttcttctcacctgaatgtctttgagccttgcctnnnnnnnnnnnnnnnnnnnnnnnnnnnnnnnnnnnnnnnnnntgatgttccgnaataaa

SEQ ID NO: 27092 - DNA, 139 bp, Homo sapiens
  misc_feature (1)...(139): n = a,t,c or g
ggtgtgagccactgtgcccatccttccatttttaatctctaaaaagattgctgtagggttttgacacatttaattgagttgtttttcttaaaattttatttcctgttagtgattttttaaaatantttttttttttttt

SEQ ID NO: 27093 - DNA, 413 bp, Homo sapiens
  misc_feature (1)...(413): n = a,t,c or g
ggataagacgcaaagaccacaaagaacatgatccaacatacccctgtttagaagttacctactgatctagatgcccaggacctcatttgcctctaacctcctattctactgtttaaggccaccctccaaccatgagtacaagttagggtatgaattggtacacagttgttgtcattttatttcctcttccaagtaatctcacaataaaagaagacttcaagatttctgataccagaaaaatagtagatataaaaatctttcagctaaaaatacctggaaatactagataaaagttaacaagcattattttaaatacatttctgagatgaatcttcctttttaaaatttattctgagctgggcagggtggctcaagctggnnnnnnnnnnnnnnnnnnnnnnnnnnnnnnnnnn

SEQ ID NO: 27094 - DNA, 419 bp, Homo sapiens
  misc_feature (1)...(419): n = a,t,c or g
gcaatatatagatagagagtatatcatctcactctaatcagaatggcaactatcaaaaaattgaaggataagtgttgacaaggatgtagagaaagagaacctttacnnnnnnnnnnnnnnnnnnnnnnnnnnnnnnnnnnnnnnnnnnnnnntagttgtcttannnnnnnnnnnnnnnnnnnnnnnnnnnnnnnnnnnnnnnnnnnnnnnnnnnnnnnnnnnnnnnnnnnnnnnnnnnnnnnnnnnnnnnnnnnnnnnnnnnnnnnnnnnnnnnnnnnnnnnnnnnnnnnnnnnnnnnnnnnnnnnnnnnnnnnnnnnntcacccgggcannnnnnnnnnnnnnnnnnnnnnnnnnnnnnnnnnnnnnnnnnnnnnnnnnnnnnnnnnnnnnnnnnnnnnnnnnnnnnnntnanccaaa

SEQ ID NO: 27095 - DNA, 413 bp, Homo sapiens
gcggattaagcgtttaaagtaggtctccaaagaaacttctttgtttctctcaaccagctttattgcactttttgaagtactggtaagaggtcaggagggtgtatctcattggtttccttcctgtcccaggaagccatgttacggtattctgaaagaactttttctttttcagtaactttactataagcaaatttttttttctttttaaaacttgaattttctctgtaagacattgcatacttgttgaaagcagacattaaatgataacctaacaaatacttaacttaattctagatgcctatctgtttctcaggataccttgtaggttcctcttctcttaaatactggctttactcagggctgggcgcgtgactcacaactgtatcccaacacttgggaggtgatgtgggtgg

SEQ ID NO: 27096 - DNA, 532 bp, Homo sapiens
  misc_feature (1)...(532): n = a,t,c or g
gaaaaaaagaanaagaaggttagaaatgtgttgaaaattttaataaattatagtcagagtatggaaagtaaaaagggtgacatttgggtacccaaacaagagaaaaattcttatatagctattttcaaaacagatccagaagttatcaaaagatgctgttttcagaaataaatagttcatatacaaataaatgaaagaagtcaaataaaataaatgccctcatctaggatccctctacacataccaagcctacctgaagcagacgaggggattcattgctaagatggtcttgaaacgggaagcttgagggcaggtttacagagactaaggctcacaagcttatcgcgttagtaagttgatgatgtgtgtcgcattagcaagtagataatgtgtgtcagcatgtaggtgatgcccatatacaaatccgtcntgggagtcacagganccaccanncctcatcgcctcttnctatnatatcaattgcaacttacctcaaccctacaaagggcatccctcatgaacanaaagttct

SEQ ID NO: 27097 - DNA, 517 bp, Homo sapiens
  misc_feature (1)...(517): n = a,t,c or g
gggaanaattattaaaggtatgctttgtgttttctgaccagggaactactttanaatactggtattgggggtaggagtgccacgtttggtacaggtaaggtatagtgaaccacatttcgactgtttctcagcagttacatttctgggaacgttatataacttgtggtatagccaaatccttgagctaagaagtagtggtataactgggattactgcaattgttctgagttgaanaaacttcnaaaatgtgtagtgtgaaatttggcttgctgaaatcatggccagagaggtgcattttaaaacaaaaccaatagggaaatcttaaatccaaaattgccttacacatgttaaactanttnaaaanaaaattttgtcaaaangaataaaattgngaaattgtcaaagttttgttacgtgatatcatctaatgttgnnngattttaaaaggaatggncacaatttgcaaancatggttngacagtnttaaagnnacaaaaacggnttttaccanncccag

SEQ ID NO: 27098 - DNA, 516 bp, Homo sapiens
  misc_feature (1)...(516): n = a,t,c or g
gtttgaaagaaatggttgattttgactctttggagatttagtgaaaaaccaaacaagtgactgagtgtatggattatatagtatattatttaagattatgaatttggatccagactttgttattagctgtgtagccttgaataggtttaaccaatacttctaaacttcagtctcttaatgtataaaatacaaaaatattaatagtatatacttcataaggtcctttanagattaaatgagaaaatgtgtacatgttccatanagagcctgaaagtaccctagggccttggcctgagcagatgtgtggccctcttggaatgaactgctacgtgacatgctggtggtgtatttggtcataccttttaccatgttcagcctgtttgtttatttgagaatatttttctttaagttaanatgagactttaatttcataatatgctatgttcatagactgacnntgataaacatagacgatatcatttgcagntaacgcagtcaacaatngtanttagtttt

SEQ ID NO: 27099 - DNA, 528 bp, Homo sapiens
  misc_feature (1)...(528): n = a,t,c or g
gctggggataaaaaanagataagtgaatgaataaataaatacaatagaatgtaggaatgctcatgcttccatatacaaaggcttgctggagtanananaggagcagctgccaagagtgaggggaggtgagtanccaggggaagttttgctttgcacagagactcacagaggacttgagccctggttataancggaattcgtcacacagatgtagtggggtaaggggcagggaacagtgagcataccagactgacattatgtgtgctcatataacatatgacttcagaatnncacagtttcatcaatttgccatgaaaaacaanaaaaagaaacatcataggtgaataaaacttgcccatttaaaacaggcagttttaagcagaanaaaatgganaaagtaanaaacatnaataangcctcaaattgtgtgctatacacgaaaganagccagggantcaacanctgctcaagtccaggctctacaaatgctanctgggggatcttggcaanncccctcaaacnctgagc

SEQ ID NO: 27100 - DNA, 504 bp, Homo sapiens
  misc_feature (1)...(504): n = a,t,c or g
ggggcaagggcagagctggaaggatggccaggggttcactgcantgtggggaggagacattcgctgcccaggagggttggctgcagaggctgtccctcttttctcccagccacaaactccaaccctgagcagactgcagagggttcctctatctgagtatgggttcaaatgcagctgtcaggcaccttggtggatctcccattcctctgtcctcatgtatgtaagatctccctcccagggttgctatctatganatgtctggtaatagacgcaggtggcagctgttgttaatatcacctttgttccttacctgatcccaataaatgtattgtcgacattgattttcatcaacctttattcagcaaatatttgttaagcacctactcttcttctcntgggtcctgtacaccactanaagcagctgtatgatgcatatcaggaagagacccntccaactaatgggatantcctcctgcccagtgaacncaaaaatgcttctgtgcc

SEQ ID NO: 27101 - DNA, 495 bp, Homo sapiens
  misc_feature (1)...(495): n = a,t,c or g
nnnnnnnnnnnnnnnnnnnnnnnnnnnnnnnnnnnnnnnnnnnnnnnnnnnnnnnnnnnnnnnnnnnnnnnnggcaggtgtgcagnnnnnnnnnnnnnnnnnnnnnnnnnnnnnnnnnnnnnnnnnnnnnnnnnnnnnnnnnnnnnnnnnnnnnnnnnnnnnnnnnnnnnnnnnnnnnnnnnnnnnnnnnnnnnnnnnnnnnnnnnnnnnnnnnnnnnnnnnnnnnnnnnnnnnnnnnnnnnnnnnnnnnnnnnnnnnnnnnnnnnnnnnnnnnnnnnnnnnnnnnnnnnnnnnnnnnnnnnnnnnnnnnnnnnnnnnnnnnnnnnnnnnnnnnnnnnnnnnnnnnnnnnnnnnnnnnnnnnnnnnnnnnnnnnnnnnnntgtggggactatatgcanagccacanaggcagactgcccaaanccntgggagccacccntgtgtcaatgtggctggatgtagacntgagtcaaagacatttggaggttganatta

SEQ ID NO: 27102 - DNA, 641 bp, Homo sapiens
  misc_feature (1)...(641): n = a,t,c or g
nnnnnnnnnnnnnnnnnnnnnnnnnnnnnncagagtgtctacaccaaggnnnnnnnnnnnnnnnnnnnnnnnnnnnnnnnnnnnnnnnnnacccagtggatccggtaccggtnnnnnnnnnnnnnnnnnnnnnnnnnnnnnnnnnnnnnnnnnnnnnnnnnnnnnnnnnnnntggttgagggactgggagcggtnnnnnnnnnnnnnnnnnnnnnnnnnnnnnnnnnnnnnnnnnnnnnnnnnnnnnnnnnnnnnnnnnnnnnnnnnnnnnnnnnnnnnnnnnnnnnnnnnnnccgcggggaggcactaangcccggcgagaaattgagcacaacagctgctggccaagagctaagccctcatgcccggggttccaagctgccggcgctcaaattcncaagactgagccatgccaaccanantccgctggcggnaacccatnacaacctggtctgccggctntcctcaaactccggaaactangaattgtcaactngcnaccaaaaaggggnccaatttaacctttgccnaaggccccaagggggaaatnngnngcnaggccaaanaagtnnaaggntaaaacnttacccatttaangaaattgggcnnccnnccaaanttnaattngaaggcngtccaaa

SEQ ID NO: 27103 - DNA, 624 bp, Homo sapiens
  misc_feature (1)...(624): n = a,t,c or g
tttttcttagatgggagtaaacaaatcctttgttcattcagcatgcaaagaattcagcatgcatttacggaatatataacgtgaaatgaaagcctggaccttcagttacgtctaggggctgggtggggggatgcaggcacaccaagaatcagcctanaagtccacaacaaacgactctgtcagtaaatcttacaatacatccatgtgcgacatggtccagcagagacggtaaggtgctccggnatcggaggagcacaccggctccagtgaggatgggaatgggangattgggatctgattgggcctgaaaatgagtggaatctgcaattggngaatacagaacagaaccaagcactatacatcggnacttttggcattnccgtgtgcaanaactgacgaatanttaatnccaatgaattggncatataccnantttttcnngattnaggcaaanagtaatngcttncaagggacctgnnttanccnaggtggncnggnccnaggcnngggataaggnnttcccaaggnacccccttatnancnngnancnggaagggnaaannntttgngtncnacgtggancntaggggcnnncannntnctgnnagggtctcngcggggagt

SEQ ID NO: 27104 - DNA, 630 bp, Homo sapiens
  misc_feature (1)...(630): n = a,t,c or g
tctgcaggtttcttccttctctctcttgccaagagaagggtggatagggggagcaggggcagggtattgccagccctagggctgggcagtgactcagggaagcctcaggaagtcggagagaaggccggccgtagctgcgccagctggtgctgggaaaacagctttcactgatgaagttcatacacatgccagcagcccccagacccctgccgtgcccaccaagtaaagggcacgcagccctgtttgacttccagccaccctgctggctgccangggatcaagcaggtcctgcttgagacttcatttccttggagnagccaacancatcattngatcnttttctcggggtaancgtnttgggcaaanaatttggtgcctaccctgcacnagcctctccnnanggcttggctcccnagcantcttccctcctccaatcttngnggntgggaatnatnggggccaaggaaaantgntggnnttgggnaangaaanttcggggaaaaccccccccgggggctttncnngttgnnggtttncnnnggccnnanaantntttnntccccnntgggcccccnngcncngcncncctntnnggcctnntttntnagngntnnttttttcccanncctc

SEQ ID NO: 27105 - DNA, 536 bp, Homo sapiens
  misc_feature (1)...(536): n = a,t,c or g
nnnnnnnnnnnnnnnnnnnnnnnnnnnnnnnnnnnnnntaagcagctaagaccacaggtccnnnnnnnnnnnnnnnnnnnnnnnnnnnnnnnnnnnnnnntctcaccatcgtacccaggtgagtctagaactgctgggctcaacnganccnccnacttaagccccccaanttgcgggaattnaaggnngtaancnatnctgccaanccttngacaatttnaaancacccantttgccatgaggaacaaaaacnggcaatggncaaccatacttncttagngaaancaactcttaactatnacaaaatgnccnaaaaaatttacaaaatctggttangngaaaattccaaaatgcnnccgggggactggcaatttaactttnaannaattcgnaaaanattttngttcacangntccaaagctttaaggnggnntggnacgaatntnangccaggnaccccnntgngnaggaanggctgggaaaagncccgngggnttatcncngggnaantttnnttnggggncaanctnccgggg

SEQ ID NO: 27106 - DNA, 601 bp, Homo sapiens
  misc_feature (1)...(601): n = a,t,c or g
ctgggcgtggtgnnnnnnnnnnnnnnnnnnnnnnnnnnnnnnnnnnnnnnnnnnnnnnnnnnnnnnnnnnnnnnnnnnnnnnnnnnnnnnnnnnnnnnnnnnnnnnnnnnnnnnnnnnnngacagagctagattctgtctctaaaaaaagagatcgttttagtatcctgatggattccacacactcttcaaggaactccctagggttaacaatatcagatattttgaaattacttaaaaaagagtgaatgggaatatttctagaaaaacaattacttataaagtctcttatgggacaaacaagcaagaagatgacttggctttatttcctaccatatgtggggctttccnangttatctggactgtcanccaaanttcncctgtctggatggggcggcaatggtgggaaanananaccccctttgtcccctngaagggttnctcacaacngaaactncgggaacccttacttcagggaaaccctgnnagcccaanaaatccgganggngtttatancngncaacttncctngngggnatttntggagggnccnttaaantgggggaaaaangccngnnggngnncccccgggggntngggg

SEQ ID NO: 27107 - DNA, 632 bp, Homo sapiens
  misc_feature (1)...(632): n = a,t,c or g
tctagtagattctgattcatgctgatttcactagataactgggaacagtgtgggccaaggtgaattctaatctcacaggcgagcagattctanagcctccctttcatanaggctgggcccttatacaggaagaggttaccctgatgagcaaagaaagttgaaagggcaggggacaacacatctgagaaaatggcagggcacgacgaatcctaacaaaacaaagacatatgcaatgatttagctacacatacgcanctggactgtaaatccatgaggacagggacanccttgtcacggttcaancaaggtactgaacaagggtgctggaataaatnccagttcataatncntgagggctaaaccntntttngacanaaaanatngnanccntnanttnccccattanatgccgaaattncnctggccnttttgggggcccnttnncnncnaaattnncggncgggnaaatttccccnttnacnctncggaaaaaaagggggattttaaaangggaatttccanttnangnnaactntttgnnannctcnaacgggtttttancccntnnaaancntcccntttattttnaaaaaanccggnnnnggtcctccncnccnnctgggatttttttt

SEQ ID NO: 27108 - DNA, 613 bp, Homo sapiens
  misc_feature (1)...(613): n = a,t,c or g
attaatactaaaatactgttacatgatcagctcttgatataattgaagagatttcagatacctgatgagtctcattctcacactaattcagaaccttggaaggcactgagtgttcaaaaaaggtagctcttaactgaggaccctctgttgaaccattgtgcgcacccctggctcttgggcagtgtagtagcaggaagacagggttgttgccattagaaatggaggctttaactctccctgtcccccatttaaaactttgcccttttgtcttttcagattggactggctaaggacgatcagctgaaggtcatgggtttaagtgcttgtnggnccactgaagctaagtgnaggattcctncaangannaaattccctcccnccctngtaaggttaaaacccnaacttnnaaatgtacaattggggcccctttaantggcaaggtaaccctnannaaaacnnaaaaccagnnncaacctnaanccccattaaaanggcaccaaancccggganttacccggaacannatacctcnnttaancancaaaccnaanttaaaaatngggggaccccagnccccgaantcctccaanaattacccnaaatccggtatcaa

SEQ ID NO: 27109 - DNA, 499 bp, Homo sapiens
  misc_feature (1)...(499): n = a,t,c or g
gcatagggctcggcgtggatgtggtgnnnnnnnnnnnnnnnnnnnnnnnnnnnnnnnnnnnnnnnnnnnnnnnnnnnnnnnnnnnnnnnnnnnnnnnnnnnnnnnnnnnnnnnnnnnnnnnnnnnnnnnnnnnnnnnnnnnnnnnnnnnnnnnnnnnnnnnnnnnnnnnnnnnnnnnnnnnnnnnnnnnnnnnnnnnnnnnnnnnnnnnnnnacaattcncaattgtnnnnnnnnnnnnnnnnnnnnnnnnnnnnnnnnnnnnnnnnnnnnnnnnnnnnnnnnnnnnnnnnnnnnnnnnnnnnnnnnnnnnnnnnnnnnnnnnnnnnnnnnnnnnnnnnnnnnnnnnnnnnnnnnnnnnnnnnnnnnnnnnnnnnnnnnnnnnnnnnnnnnnnnnnnnnnnnnnnnntattgaangtncncataagtcggggctaaggtatgaggttgaaaggacccagggggaaattggnagggggtnnnananaacgatgngntcgg

SEQ ID NO: 27110 - DNA, 625 bp, Homo sapiens
  misc_feature (1)...(625): n = a,t,c or g
atattccatcattctagatattatgaaattataagccatatttgtctttttcaaaaggttggacaattaaagatactgctgaaatcagtgcttgaccaatggagtagtcacaaagtggcctttgacaagataaacagttacctcatggaggccagatactctctttcccgattccgtctgctgactggctccttagaagctgtgcaagttcaggtggacaatcttcaggtaaggaattaatttaacacatccttaacgttcattttaattttagaaaactgaaaaattaccaaatggngacatcatcctgaaatattgccanaggntgttacgttaataattttaanaccctaaaattaatttaaccgggtaatggtanttgncaaactnnccggggtnncaaaatcggntnacnggnaaaaacaaaggttccaaaaccngnggaaaaaatcaancgctttaaaaanggtttngccaangaacccttgtcatggcaggcctttgccccnttcctctaaaggaccccaannttnanggattnananaacncnggaanggaantggaanttaacatcatngncccnnnaaaaaaggcannaggnnaaanctcttnnanaggggtttg

SEQ ID NO: 27111 - DNA, 616 bp, Homo sapiens
  misc_feature (1)...(616): n = a,t,c or g
ggatgacctcacctcactcaccttgcacaaactttgttatgaaaaagttcctgtggccaggtgcagtaattacaaagggaaaagtagccactttacagtacagagacctggttggannnnnnnnnnnnnnnnnnnnnnnnnnnnnnnnnnnnnnnnnnnnnnnnnnnnnnnnnnnnnnnnnnnnnnnnnnnnnnnnnnnnnnnnnnnnnnnnnnnnnnnnnnnnnnnnnnnnntggtggataccatcttaaccaatgatccaagttactatcaccaatcacagggcaagtcagcaacatgggctcctgaaaaggatggctganaaagggatnggatcacttctggaaaatccanccccantnanaacccgnttcgatttaagggaaatcaggaaccaantcaacggtccaggaataaaacccaacctcaaaaggnaanctggaaacaanaangnananttcaatcaaacatgaacctaaccagtgtctnaanccacctcaaggaaananttaaatttnttattaacggcnaactatcccttanggggtanttacttganngcntctttaaatcggggggnnaaaggnnnnnnnnnngncccccnggggnnnggggg

SEQ ID NO: 27112 - DNA, 623 bp, Homo sapiens
  misc_feature (1)...(623): n = a,t,c or g
nnnnnnnnnnnnnnnnnnnnnnnnnnnnnnnnnnnnnnnnnnnnnnnnnnnnnnnnnnnnnnnnnnnnnnnnnnnnnnnnnnnnnnnnnnnnnnnnnnnnnnnnnnnnnnnnnnnnnnnnnnnnnnnnnnnnnnnnnnnnnnnnnnnnnnnnnnnnnnnnnnnnnnnnnnnnnnnnnnnnnnnnnnnnnnnnnnnnnnnnnnnnnnnnnnnnnnnnnnnnnnnnnnnnnnnnnnnnnnnnnnnnnnnnnnnnnnnnnnnnnnnnnnnnnnnnnnnnnnnnnnnnnnnnnnnnnnnnnnnnnnnnnnnnnnnntgtctccatgatgaaacaganatnnaaaccaactgacntangggtcctaatgggaaaaacatttgtgtccggnggacggcccccccgnanaaaattcaanacctcttgcagtatacaactaancnccgatgcaanccanagttttaaggggaaattgnaaccccnctgaaaccattgggaaatggnnncacaagnctcgntaacaccaagggttggcttcggnaggancaaacntttnataaccaancgggatnnnaaaancctgananttaaaaaaanggnttttttntacanaagggattnccgnttca

SEQ ID NO: 27113 - DNA, 528 bp, Homo sapiens
  misc_feature (1)...(528): n = a,t,c or g
gaactgggatgcaagcctttgagattacacttattgacacattctaattgtctgctttctgtccttttgattttggactctgatancagagcaccaanaaaaggggaattctctaccaacagacacagtaatattgcattgatttggnaattaaggctgtacgagtttggngttttaatgccgtaagtaaacagggaaataaaaagattgtcactgttgttaatgtgttattgngttttcntgnacctcttgggggaaagtaganttattgctatacttggggattgggagaaagtgtcaacgaaattatactgcaacctgattcatganggccacgangggttcaaatccctgnctctgacccantgagaatcacacnganggcacaggaagtgaagtataggaggggactcncagagttccantggggggctcactgaaaacagcccagtcatacancacccaggtccctttgggtctaaaccaaacggngttctttgtagnaanggttnctgcaattgnatcaaa

SEQ ID NO: 27114 - DNA, 488 bp, Homo sapiens
  misc_feature (1)...(488): n = a,t,c or g
gtnnnnnnnnnnnnnnnnnnnnnnnnnnnnnnnnnnnnnnnnnnnnnnnnnnnnnnnnnnnnnnnnnnnnnnnnnnnnnnnnnnnnnnnnnnnnnnnnnnnnnnnnnnnnnnnnnttannaatngttnattncgggaatttnccatttaaaatttttgganattggnaattgaacccccaantangggagggcnacccaanttagganatgantgtganatttttaggaccnaanctaggganataataganggaatagancatttanatatttaggggataaaatattnagggtttagnggganaatttagggattaattggggttttgggggaaaantganccangggtaananggtaggggatgaaaaggcttgcacctgggannaaaaaatncaanggttttttaangtttaanggttttggttttaaangggaggnggntnggnaaattttcnatggccangtgngttnngatcntnagggag

SEQ ID NO: 27115 - DNA, 421 bp, Homo sapiens
  misc_feature (1)...(421): n = a,t,c or g
ggcagttgaagattcttccatttgttacatagattctcagttccttgaacagtgcattgcatatcaagggatcaggcattaattggtgaacannnnnnnnnnnnnnnnnnnnnnnnnnnnnnnnnnnnnnnnnnnnnnnnnnnnnnnnnnnnnnnnnnnnnnnnnnnnnnnnnnnnnnnnnnnnnnnnnnnnnnnnnnnnnnnnnnnnnnnnnnnnnnnnnnnnnnnnnnnnnnnnnnnnnnnnnnnnnnnnnnnnnnnnnnnnnnnnnnnnnnnnnnnnnnnnnnnnnnnnnnnnnnnnnnnnnnnnnnnnnnnnncagagttaattggngaacaaattaaaatttgttaacgtttatttatacttgcattanattccaaagtatggnaatgttgtgatttanttgaattaattgtgagc

SEQ ID NO: 27116 - DNA, 420 bp, Homo sapiens
  misc_feature (1)...(420): n = a,t,c or g
ggtatctagcaccatgaacttgacagcatgtcaatacttaaaaacctttctgatatgatagatggtgataataatgaaagtgggtttttttgatgtcatacagtaaaatgtcatcatttgaaagacttgcatatttagtgagccagtattctccagatgatgtgtgtatggngttatgaaatcatgcatgggtaaaaagacttgttcaatacgcaaggtaaaccgtagattttgatgcagtggaatatgagaagttcactgatagggtttcagatgctacactacatctaatttttaagaaattatcacnnnnnnnnnnnnnnnnnnnnnnnnnnnnnnnnnnnnnnnnnnnnnnnnnnnnnnnnnnnnnnnnnnnnnnnnnnnnnnnnnnnnnnnnnnnnnnnnnnnnnnnnnnnnnnn

SEQ ID NO: 27117 - DNA, 427 bp, Homo sapiens
  misc_feature (1)...(427): n = a,t,c or g
gcagaaattttgattctcattgtagaagcatgagaatgaaggccccaaaatgctccattacatacctgaaatcagttagaaagctggtggngaagttttcattcagtcaatattgttacacaaaaggtacatatctccctgggtctgctgaagtatccttagtccctttatcaataacagtagcggttnnnnnnnnnnnnnnnnnnnnnnnnnnnnnnnnnnnnnnnnnnnnnnnnnnnnnnnnnnnnnnnnnnnnnnnnnnnnnnnnnnnnnnnnnnnnnnnnnnnnnnnnnnnnnnnnnnnnnnnnnnnnnnnnnnnnatcagctgagcctggtggntcacacctgtaatcccaagcactttgggaggtggaggcaagcagatcatgaggtcacgagattganggcagcatgatgaaacccgtgt

SEQ ID NO: 27118 - DNA, 526 bp, Homo sapiens
  misc_feature (1)...(526): n = a,t,c or g
gaactaaagctcaaaaagttaggcaagttggccaaggactcaggactaataaaagacaggtgtaggctaaagactcagatcatcagattttttatgctggttctcttctgagtgaatttttaagctttttatttatttattatttatgtgtatctttttaaaaaagagatgatgtacttaatgatgaagtccttatcatgtaactttaagtaaattacatgcctttcaaaatatggttaggcatgggacgcttttcatggcttaaaaagatggaacnnnnnnnnnnnnnnnnnnnnnnnnnnnnnnnnnnnnnnnnnnnnnnnnnnnnnnnnnnnnnnnnnnnnnnnnnnnnnnnnnnnnnnnnnnnnnnnnnnnnnnnnnnnnnnnnnnnnnnnnnnnnnnnnnnnnnnnngccgggcacgggggcggcatcgtggccagctactcaggaggctaagganganaacgctcaaccgggatgcanaggtgcaatgcnccnaatcccccagggnnccnccngggaaaa

SEQ ID NO: 27119 - DNA, 535 bp, Homo sapiens
  misc_feature (1)...(535): n = a,t,c or g
gtgggctcggcgtgggatgtaataagcttgagatgtcagtaagatagccaagtcacacaggtgaagtgaccagcaggatactgtgactggngttcaagaaagaaatctgaactggacatagaaatccagaagtagcctagcccatgtgactggacgaaatcaccaagggagatgagagaggtccaaggactgtgctttgaagctctccaacatgaagaggtcagggacaagagtggaaaatgtcaaaggagactgagaaggggtgaccaggaaggcaggagacaaaccaagaaaatgtgttgctctgaaagccaaaaagtcattatgcacacttactattgtctttcacattatatcattttatatattataattatacataacacagagataatattgtcatttacataactactgtctattctccatcactaaaatgtannttcaaacagcaagtacttgctgtttgccaaaatccccattanatanactgannatacnanagccnattaggncgnngaattattaccggcgc

SEQ ID NO: 27120 - DNA, 508 bp, Homo sapiens
  misc_feature (1)...(508): n = a,t,c or g
aggtgcacctgcacagtaaggaggctgaaaagaggtgaaaaaactcccttctgaattgaaatcacagacctgtgacctgcatggtctcctaaangggaaggggtgaggagcgctgtgggaaaggctcctccttggcaaggaaagggatgatttctccagagttcaccggactccccctttccccagcgccaagcatccgggtgagtgttttgcaatggggtctgtcaccatcaggaaccgaggagagtttagactctgcatttactacaccagacccacaaagcaccacctgtgctctcagtctcaggagaaacagcctctttcacttttcaaatcaatcttctgtgcatgtatttactataatgttacagnaccattggttccagctttaaatcacgaanatatgctctacttaacngnttaantgangccancacagggccacatgggaanccattttnnggnaannancctttccaanaaatcccggggaaagggcaagggaggg

SEQ ID NO: 27121 - DNA, 335 bp, Homo sapiens
  misc_feature (1)...(335): n = a,t,c or g
gaactggacgcaacctaaacacaaatgagggaggtactggcttctgcctcagggcttctgcacatgctctcttcccttgcactgaacactgccctcaccccctgcccacatcttcacggttcttaagttgttgctctaacgccacctcctctgcgaggcccgcccctaaccactctacttaaaaacagcacnnnnnnnnnnnnnnnnnnnnnnnnnnnnnnnnnnnnnnnnnnnnnnnnnnnnnnnnnnnnnnnnnnnnnnnnnnnnnnnnnnnnnnnnnnnnnnnnnnnnnnnnnnnnnnnnnnnnnnnnnnnnnnnnnnnnnnnnnnnnnnnn

SEQ ID NO: 27122 - DNA, 518 bp, Homo sapiens
  misc_feature (1)...(518): n = a,t,c or g
gattcgtcattccattgagtgaggtcacgtgtgagacaggggagaccgttgttcttagatgtcgagtctgtggccgccccaaagcctcaattacctggaagggccctgaacacaacaccttgaacaacgatggtcactacagcatctcctacagtgacctgggagaggccacgctgaagattgtgggcgtgaccacggaagatgacggcatctacacgtgcatcgctgtcaatgacatgggttcagcctcatcgtcggccagcctgagggtcctaggtccagggatggatgggatcatggtgacctggaaagacaactttgactccttctacagtgaagtggctgagcttggcaggggcagattctctgtcgttaagaaatgtgatcagaaaggaaccaagcgagcagtggccactaagtttgtgaacaagaagttgatgaancgcgaccaggtcacccatgagcttggnattctnaaaancttcaaaccccttttttgntggcnttttnaaactttt

SEQ ID NO: 27123 - DNA, 525 bp, Homo sapiens
  misc_feature (1)...(525): n = a,t,c or g
gannnnnnnnnnnnnnnnnnnnnnnnnnnnnnnnnnnnnnnnnnnnnnnnnnnnnnnnnnnnnnnnnnnnnnnnnnnnnnnnnnnnnnnnnnnnnnnnnnnnnnnnnnnnnnnnnnnnnnnnnnnnnnnnnnnnnnnnnnnnnnnnnnnnnnnnnnnnnnnnnnnnnnnnnnnnnnnnnnnnnnnnnnnnnnnnnnnnnnnnnnnnnnnnnnnnnnnnnnnnnnnnnnnnnnnnnnnnnnnnnnnnnnnnnnnnnnnnnnnnnnnnnnnnnnnnnnnnnnnnnnnnnnnnngtatgttttaataaaaagcagcttatagcttctactgaagaactattttgatcattttgttttcagagataacaaagcatttttcaatctggcagtgcaaacattttagatgatattaaaaattctcttcttcctttataaacncngaacccaatcccttagggatgacctnaagangtgtttaaaagtgnnataanggtaangggcnaaatttnntacacattaaaacaactt

SEQ ID NO: 27124 - DNA, 259 bp, Homo sapiens
  misc_feature (1)...(259): n = a,t,c or g
gaaagtagtttaaaagtaattttgctatgatttgagagctggagggaataattattttaatagaatttantgaaacatgtcttaatgtaattcaaagtaagttttggtgtttaataatttatttttaacccaggcattagttgtggaagaattatcagaaaagtagtagtctccaggttaactgttttatgaaaaatagtttatttggtaacttttaatttaacgtgaggtgttatactgtggggtttttttttttttt

SEQ ID NO: 27125 - DNA, 514 bp, Homo sapiens
  misc_feature (1)...(514): n = a,t,c or g
gccaaaaacctggggaggaattatcttttccaaaacagatgaaaatttctgattcaaaaagaaagaaaacaaagtactttcccaaagtcacacagctagtaagtcacaaagacaagactcaaaaccaggtctcttgactccaaagtctgtcttttttgtgaagtcacagtcctctgccagcccggctcaaagcagcacagattctttatgggctgaacaaggggagtacgggtttgtccatgtgtttgagcagagatcagggttctggcttccaggcctaaggtgagggaaaagccacttctaactcctttgggcatccatgctcacggccaaaagagccccttctcaacacatccaagtgctaaggattcctgcttcattcaagctactacttaggcccaaggagcaaggggtagaatggatctantcagacaaagccatttctttgagggctnaagccntaaacaaatatgcccccttaancanttgggtttaaaaatttgtttnggggcaa

SEQ ID NO: 27126 - DNA, 516 bp, Homo sapiens
  misc_feature (1)...(516): n = a,t,c or g
gcggcnnnnnnnnnnnnnnnnnnnnnnnnnnnnnnnnnnnnnnnnnnnnnnnnnnnnnnnnnnnnnnnnnnnnnnnnnnnnnnnnnnnnnnnnnnnnnnnnnnnnnnnnnnnnnnnnnnnnnnnnnnnnnnnnnnnnnnnnnnnnnnnnnnnnnnnnnnnnnnnnnnnnnnnnnnnnnnnnnnnnnnnnnnnnggcgttggctctgacagggttgagaattattaatttagtggatcttaaccagaacttcttaaaaacagaaaagaattagaaattatcagactatactgcaaatcaggtattattttataaagtgtttgtttccattatgtatgtgttttctgggtgctataaatatgtattatannnnnnnnnnnnnnnnnnnnnnnnnnnnnnnnnnnnnnnnnnnnnnnnnnnnnnnnnnnnnnnnnnnnnnnnnnnnnnnnnnnnaacctnggtacatnggggaaaccctgtttttnttaaaaanccaaaaaaattnccgggnttggggg

SEQ ID NO: 27127 - DNA, 515 bp, Homo sapiens
  misc_feature (1)...(515): n = a,t,c or g
gggcattagattgggcgtaagtaaaatataaaggaacttaagtattgaatagtgcaggtgctgtgaggagggatacattgtgttttgttattgttcatacagagctagctgttacctgaggcttcacaatgtagcttctactctaatgctgctgcttaaaaaaccccaggccgggcnnnnnnnnnnnnnnnnnnnnnnnnnnnnnnnnnnnnnnnnnnnnnnnnnnnnnnnnnnnnnnnnnnnnnnnnnnnnnnnnnnnnnnnnnnnnnnnnnnnnnnnnnnnnnnnnnnnnnnnnnnnnnnnnnnnnnnnnnnnnnnnnnnnnnnnnnnnnnnnnnnnnnnnnnnnnnnnnnnnnnnnnnnnnnnnnnnnnnnnnnnnnnnnnnnnnnnnnnnnnnnnnnnnnnnnnnnnnnnnnnnnnnnnnnnnnnnnnnnnnnnnnnnnnnnnnnnnnnnnncnaacntcccaccccccnaaaaaaccccaagggtttttggaannggggatancctactt

SEQ ID NO: 27128 - DNA, 510 bp, Homo sapiens
  misc_feature (1)...(510): n = a,t,c or g
gcctccacgagagactgatacaccaggtctctgtgctttcctgaaatcagaggcagctgatgcagcagtggattttgtaaacgtcacaggcaggacttggtactaggaacccatgaaggttgccttcatgaacagctatcactgagaatatgttcatggcaacccctagaagcttttgttttaggctatttcttcttgtctcttctggaataacccaagtatgagcactccgatgttatagtccagggagggactttgcaggatcatctagaccatcaccctgctgctccttgaaaaagaaaatagnnnnnnnnnnnnnnnnnnnnnnnnnnnnnnnnnnnnnnnnnnnnnnnnnnnnnnnnnnnnnnnnnnnnnnnnnnnnnnnnnnnnnnnnnnnnnnnnnnnnnnnnnnnnnnnnnnnnnnnnnnnnnnnnnnnnnnnnnnnnnnnnnnnnnnnnnnnnnnnnnnngtttcttnaaatcccaaaaaaaattttnccgggatgggggg

SEQ ID NO: 27129 - DNA, 506 bp, Homo sapiens
  misc_feature (1)...(506): n = a,t,c or g
gnnnnnnnnnnnnnnnnnnnnnnnnnnnnnnnnnnnnnnnnnnnnnnnnnnnnnnnnnnnnnnnnnnnnnnnnnnnnnnnnnnnnnnnnnnnnnnnnnnnnnnnnnnnnnnnnnnnnnnnnnnnnnnnnnnnnnnnnnnnnnnnnnnnnnnnnnnnnnnnnnnnnnnnnnnnnnnnnnnnnnnnnnnnnnnnnnnnnnnnnnnnnnnnnnnnnnnnnnnnnnnnnnnnnnnnnnnnnnnnnagtnnnnnnnnnnnnnnnnnnnnnnnnnnnnnnnnnnnnnnnnnnnnnnnnnnnnnnnnnnnnnnnnnnnnnnnnnnnnnnnnnnnnnnnnnnnnnnnnnnnnnnnnnnnnnnnnnnnnnnnnnnnnnnnnnnnnnnnnnnnnnnnnnnnnnnnnnnnnnnnnnnnnnnnnnnnnnnnnnnnnnnnnnnnnnnnnnnnnnnnnnataaaacgtgatttatttaaaatactattggccctgcaatgcgcatnngnannnnaagcct

SEQ ID NO: 27130 - DNA, 521 bp, Homo sapiens
  misc_feature (1)...(521): n = a,t,c or g
gactggctaccagaggaagtccatgtgggagatgtgggaacggtgtgcccaccacctcaccgaggccattcagtacgtggtggagttcgccaagaggctctcaggctttatggagctctgccagaatgaccagattgtgcttctcaaagcaggagcaatggaagtggtgctggttaggatgtgccgggcctacaatgctgacaaccgcacggtcttttttgaaggcaaatacggtggcatggagctgttccgagccttgggctgcagcgagctcatcagctccatctttgacttctcccactccctaagtgccttgcacttttccgaggatgagattgccctctacacagcccttgttctcatcaatgcccatcggcagggctccaagagaaaaggaaagtagaacagctgcagtacaatctggactggctttcatcatnantnttgcaganttnattgccaagcatcttgcaaagntgcccccaagggaaacttcgaacctgtgtaccacatgtggaaag

SEQ ID NO: 27131 - DNA, 480 bp, Homo sapiens
  misc_feature (1)...(480): n = a,t,c or g
ggtcattgattaatttgagaactccttctgcgatctgttgtccattgttcaggatacatatctttggctgttattttaacatttatttatgacacttgtttctacttactttgacatttggatactcactattagcaacatcttatctttttaattactgttttgtggcttataaaaagagactatnnnnnnnnnnnnnnnnnnnnnnnnnnnnnnnnnnnnnnnnnnnnnnnnnnnnnnnnnnnnnnnnnnnnnnnnnnnnnnnnnnnnnnnnnnnnnnnnnnnnnnnnnnnnnnnnnnnnnnnnnnnnnnnnnnnnnnnnnnnnnnnnnnnnnnnnnnnnnnnnnnnnnnnnnnnnnnnnnnnnnnnnnnnnnnnnnnnnnnnnnnnnnnnnnnnnnnnnnnnnnnnnnnnnnnnnnnnnnnnnnnnnnnnnnnnntanctagcacagagtgagactcattntcaaaaaaaaaaaaaa

SEQ ID NO: 27132 - DNA, 499 bp, Homo sapiens
  misc_feature (1)...(499): n = a,t,c or g
gatggaagggtgtgtgggaggtatggcagattctataatagacactggctcattcaacattaattccaatatccttttccagcatttgttttggtactacagagtttagaaagccaaaagccccttctcagacttccttgaggccaaggttttaaatattacctaggtttcaccaaaaaacccggcccatgtgaggcctcagatgcagaaatgaacaatgtaggggtggtgatagcacttaggagctcaaacagctgggactgaggtccctgatgtcatagaccctgagtggcaggtgataacttcagtgaggttttctagtttagtattgtggcatagttgggtatttctcttcactatatagcagttaagctttgcatccctactttcctagaaagctataaattgcctgatactgnataattaatcactttctgntttaaattaagttcngnagattctggtttctnnnattagnacctattatnnggccgncagg

SEQ ID NO: 27133 - DNA, 514 bp, Homo sapiens
  misc_feature (1)...(514): n = a,t,c or g
gccccagcgcttaagcactttgccctacaaaatctcatttcacctccatcacaactctgtgaagacgtcatcctggaaagaaaactgaggctgaggggtgatgtcatctttctaagcagagtcctcaacttgcttccagcagctggccaggcgtctcctaactattctggccttggcagaggatgcagtgagaggcaagaaagcaaagaatcactaccatggtcctcatctcaaatcgcgtgtgcctggcattcgccaagtcctggcctcagaaaggaaacgcttcttggcaatttggggggaaaatatctacttcacatttgcgtcgcgcttcacaattttcagagcatcccccatatattatcacattttcacttcactcccactgtgccagcaatatgaataacagttccacatcgctcanaatgcatatttaagctatattcacttcagnctaatttcattncngntccaccaccattcnanaccntccntgttttgnanntggggggaa

SEQ ID NO: 27134 - DNA, 513 bp, Homo sapiens
  misc_feature (1)...(513): n = a,t,c or g
gccaaaatttatgaagttaggaattcttcaaacacaagcaagggcttgacatgcttggagccaacaaaatgagagaagtctactgcacatggtatatcttacaatgtgttctttattttagacatcaattcattgtttgtcagactaacaggccatagcatactggtgtttttacataattatttttaaacctttagagactgctaccacttgtcccttagcaagcagtaagagataaaataaatgaccaagtagcaagcaaattaataagaaaacttgtcatatagcttcttatgagtacgtacttactatctttggaagtatagataacagtgtatgtataaaatagcatgtttctaaataataaaaatgttccaagtttctatgatggaaataatatgtcaatattatatctcagcactcttcaatggaattataatgggggctacagatgtatncatntatggaaattttaactgggttaaaaagntaaaagganccnngnggcagggg

SEQ ID NO: 27135 - DNA, 427 bp, Homo sapiens
  misc_feature (1)...(427): n = a,t,c or g
gcatgagcttcaataccctgcaattctgccatgtatctccctagcatgtgaaactaggtggtagagaagatacagcaacaggagatgtatcaaagtgatctgagtgttacagaaagtggttaactaaaaacccttaaatctaacttagtagaagacaggctatatttactgaagagggagagtcagtatgaggcctaaaaataggagacaaataattcattnnnnnnnnnnnnnnnnnnnnnnnnnnnnnnnnnnnnnnnnnnnnnnnnnnnnnnnnnnnnnnnnnnnnnnnnnnnnnnnnnnnnnnnnnnnnnnnnnnnnnnnnnnnnnnnngtaataaattaaccagatgtgggagtgtaannnnnnnnnnnnnnnnnnnnnnnnnnnnnnnnnnnnnnnnnnnnnnnnnnnnnnnnnnnnnngc

SEQ ID NO: 27136 - DNA, 423 bp, Homo sapiens
  misc_feature (1)...(423): n = a,t,c or g
gacaaggtgtgctacgagggccagccagtgggtgaattcatccactgcctgcagaatcatccagaacatatgtgagtggggccagggcccaggccaggccgcttttttaccccagtggagaccagcagaagcctggggtacctagtcaccaggatctccaggactcccagggagcagagtcttctcatcttttcactggaggacaggaggctatggggcccagctacgcacctggagatcctgaactgtcaagccactggcagcctcatgccaccacatttgccagaaatgcagttgccctgtccctctccagatgtggggctttctccatatcctctgggaggggtggaatcaagccccagtgctgcctgcttggtggcgggggtgatgtatggtggagaagggttgggggagangncggtt

SEQ ID NO: 27137 - DNA, 419 bp, Homo sapiens
  misc_feature (1)...(419): n = a,t,c or g
nnnnnnnnnnnnnnnnnnnnnnnnnnnnnnnnnnnnnnnnnnnnnnnnnnnnnnnnnnnnnnnnnnnnnnnnnnnnnnnnnnnnnnnnnnnnnnnnnnnnnnnnnnnnnnnnnnnnnnnnnnnnnnnnnnnnnnnnnnnnnnnnnnnnnnnnnnnnnnnnnnnnnnnnnnnnnnnnnnnnnnnnnnnnnnnnnnnnnnnnnnnnnnnnnnnnnnnnnnnnnnnnnnnnnnnnnnnnnnnnnnnnnnnnnnnnnnnnnnnnnnnnnnnnnnnnnnnnnnnnnnnnnnnnnnnnnnnnnnnnnnnnnnnnnnnnnnnnnnnnnnnnnnnnnntttcttaaaaaactaatgttatacttatcatataacccagcaattgcattcctangcatttatcctagagaaatganaaccagtgttct

SEQ ID NO: 27138 - DNA, 423 bp, Homo sapiens
ggtctgcatctttgttgtgtgacttggcaaaagctgatcagtgagagccacttctttcctcagcctaaatgtcaatgtggacaatgccatcgtccttgcagggttgtgaaggggaatctgaagacatgtaaaatttcatggtaaatttcccattccttaactaatatttataacattgttttctgggaagacactaagctagcttataaaataaccaacagcgggaatgcatcttatttctcaagccccccttaaaggactactaaggtgtgtgtggagcataatgagctattggaagtataagagattgaactctacgacctttagagttagattccacaggcaaattatgataagccttttaatcaaaggaaattaatcaaaggaagatagagtagccagatttgtggagtagtcagtgtg

SEQ ID NO: 27139 - DNA, 417 bp, Homo sapiens
  misc_feature (1)...(417): n = a,t,c or g
gcagctgtggaaatgaatgaggcacagccgtagagctgtggctaagggcaagccccttcctgccccaccccattccttatattcagcaagcaacaaggcaatagaaaagccagggttgtctttatattctttatccccaaataatagggggtggggggaggggcggtgggaggggcaggagagaaaaccacttagactgcacttttctgttccgtttactctgtttacacattttgcacttgggaggagggaggctaaggctgggtcctcccctctgaggtttctcaggtggcaatgtaactcatttttttgtcccaccatttatcttctctgcccaagccctgtcttaaggcccagggggaggttangagactgatancatntgatggctcaagctgaacaaccggggtgctgtta

SEQ ID NO: 27140 - DNA, 421 bp, Homo sapiens
  misc_feature (1)...(421): n = a,t,c or g
ggagaagctggccagcgacctcctggagtggatccggcgcaccatcccctggctggaggaccgtgtgccccaaaagactatccaggagatgcancagaagctggaggacttccgcgactaccggcgtgtgcacaagccgcccaaggtgcaggagaagtgccagctggagatcaacttcaacacgctgcagaccaagctgcgcctcagcaaccggcccgccttcatgccctccgagggcaanatggtctcggacatcaacaatggctggcagcacttggagcaggctganaagggctacgaggagtggctgctgaatgagatccgcaggctggagcggctcgaccacctggcanagaagttccggcanaaggcctccatccacgangcctggactgacggtacggcccagctctgccccact

SEQ ID NO: 27141 - DNA, 422 bp, Homo sapiens
  misc_feature (1)...(422): n = a,t,c or g
ggataatttatagatagggccaacaaacaagaggattgagtcagaatttagatcacacattttaagagccctttttatanagtttgtaaaactaattcaaaacatttgaataaatttctcctcttaaacttgatgaactgttttaaaataatttaaaatattcnnnnnnnnnnnnnnnnnnnnnnnnnnnnnnnnnnnnnnnnnnnnnnnnnnnnnnnnnnnnnnnnnnnnnnnnnnnnnnnnnnnnnnnnnnnnnnnnnnnnnnnnnnnnnnnnnnnnnnnnnnnnnnnnnnnnnnnnnnnnnnnnnnnnnnnnnnnnnnnnnnnnnnnnnnnnnnnnnnnnnnnnnnnnnnnnnnnnnnnnnnnnnnnnnnnnnnnnnnnnnnnnnnnnnnnnnnnnnnnnnnnnnnnnnnnnnnnnnnn

SEQ ID NO: 27142 - DNA, 505 bp, Homo sapiens
  misc_feature (1)...(505): n = a,t,c or g
gctccgttgcccatgtactggatcgacttacccctgcgttgcccaccatgacgttggcccatccgcccctgaacgcccatgtgaaaaccctggttggctatgcccaaaaatgtgctcgttgccaaacgggtaccatacttgacaacttctgattgaatgcccatgcccantgccaacatccacgaacgccaatgaccaatgcagtacaatgccagtgtttcagtcccagacagcagtggccccgancggtatgtcccaacagtttatgcctcactgcctgattanaaagaganaaatgtattttattacctgccttttananaattaaatantatcccctttagacggtgtattgtttttcaagtttctgtcttattttccccattaagtctttttgtcactgaacttttaccgtgagttgcccacccanacgatccacngantttatttccgaagggaaggagnacagcttcaagtgttggatatntgccgcattgtaaatcaa

SEQ ID NO: 27143 - DNA, 505 bp, Homo sapiens
  misc_feature (1)...(505): n = a,t,c or g
gctattgttagctattatgaaacactgcttcagtaattatttattgaatgaatagataataattacaggtgaagctgtgggctatgttaaatttcatgggtattcananaatgaanagtcatagttgtgagctaggtggtaagaaagtggttcatcnnnnnnnnnnnnnnnnnnnnnnnnnnnnnnnnnnnnnnnnnnnnnnnnnnnnnnnnnnnnnnnnnnnnnnnnnnnnnnnnnnnnnnnnnnnnnnnttggaaaaaccccatctctactaaaaataacaaaaattnnnnnnnnnnnnnnnnnnnnnnnnnnnnnnnnnnnnnnnnnnnnnnnnnnnnnnnnnnnnnnnnnnnnnnnnnnnnnnnnnnnnnnnnnnnnnnnnnnnnnnnnnnnnnnnnnnnnnnnnnnnnnnnnnnnnnnnnnnnnnnnnnnnnnnnnnnnnnnnnnaangnggtccaagnaagnggtacccctngagaaggccctttatttaacgggccgg

SEQ ID NO: 27144 - DNA, 480 bp, Homo sapiens
  misc_feature (1)...(480): n = a,t,c or g
accatgcntggccggaaatatttcttgaaagcancacttttcanaagattcactggctgaagaatctttatttttctgtctttgancatgntgtgtaagatgtnaatcttcttcaaatgtaaagtggtattggagtggaaatggtggaagtagtggtcaaggtgatggnganaactgcacnagactttgaacccatacagatttgaatttggaacccagcttcactacctactagcanctgacgacttagatagtatacttaancatggagactattgtgcatggaactggttctcaaacnanntgcagtggaatcacctggatgnttctnnagagtatccctcccnggattccacttnngncnanttaantcanaatctctgcaagtgggaccangcatgaatanctngngaacattcccananaggatccaacggtnnaagaccaatgaaangcnnttaaaacttnggncctggggcc

SEQ ID NO: 27145 - DNA, 498 bp, Homo sapiens
  misc_feature (1)...(498): n = a,t,c or g
ggcttactcttcaggggatatgaaacaatctgtagattggtttccatacagggaagttctctgtcctatgcaatgtttctaattaatttgcttagttctgagccatttattctgctacactttgaaagatatattagttctgacttattgtttggggctttanttnanttntannnnnnnnnnnnnnnnnnnnnnnnnnnnnnnnnnnnnnnnnnnnnnnnnnnnnnnnnnnnnnnnnnnnnnnnnnnnnnnnnnnnnnnnnnnnnnnnnnnnnnnnnnnnnnnnnnnnnnnnnnnnnnnnnnnnnnnnnnnnnnnnnnnnnnnnnnnnnnnnnnnnnnnnnnnnnnnnnnnnnnnnnnnnnnnnnnnnnnnnnnnnnnnnnnnnncctcnggncttgcaanatgcctgggattacnnnaatntgcaacatnnccaacanntttgggnggtttaantttagnanttannaactnttgannangngatggnncnnaatg

SEQ ID NO: 27146 - DNA, 529 bp, Homo sapiens
  misc_feature (1)...(529): n = a,t,c or g
gaatgaacaaagaatgaactaagtattaagaagaaaatccaaagagattatggtaggctgagtgatggcccccaagtatgtccatgtcctaattcctggtacctgtgannnnnnnnnnnnnnnnnnnnnnnnnnnnnnnnnnnnnnnnnnnnnnnnnnnnnnnnnnnnnnnnnnnnnnnnnnnnnnaaagtgggtgggtgcagggtagtcatagtgtctttgtaagaagaggaaggcaggaggaaggtcagaatcagagagcaggccatgtgacaacagaggcggaaactggaggatgcactttggagatgagggaaagaactacaaaccaaggagtataggaaccactagaagctggaaaagatggaaatccattcttccttccgaatctctagaaagaatcagcctgccaacaacttgactttnctcagtgaactgatttgtactcnggnttccnaactgtnagatatagaattgagtaattttaaccncncantttgnggaaacttgttgagcngcaacaaaaatg

SEQ ID NO: 27147 - DNA, 535 bp, Homo sapiens
  misc_feature (1)...(535): n = a,t,c or g
gctttcttctccgcagggatgctgtgaataagattaaatcgttacccattgctacgaaagagcagcttgagaaacacaatgatatttgtgccatctgttatcaggacatgaaatctgctgtgatcacgccttgcagtcattttttccatgcaggctgtcttaagaaatggctgtatgtccaggagacctgccctctgtgccactgccatctgaaaaactcctcccagcttccaggattaggaactgagccagttctacagcctcatgctggagctgagcaaaacgtcatgtttcaggaaggtactgaacccccaggccaggagcatactccagggaccaggatacaggaaggttccagggacaataatgagtacattgccagacgaccagataaccaggaaggggcttttgacccaaagaatatcctcacagtgcgaaagatgaaacacatcctgttgaatcagcctagagngaagnacnggatgnnnctttagaccctgggggngaattaaccccgatgggatcagntccgatt

SEQ ID NO: 27148 - DNA, 538 bp, Homo sapiens
  misc_feature (1)...(538): n = a,t,c or g
ggcctgttccattgaaaaagcatattcagtaataacttccttctataatgtaatgtactgaaagtaaaataaaatcttgttagctggtgggaatattcaaaagatagagaatattgtagggaatacgggtttttaaaaagattgagatctgtggttataatagttaacaccattagttacagaaaataatatttctagctgagtagtctaagataattaagtgatattatttgatatattctcatacagatctacaggtcttccccctaccttatttttacttttttttttaactcaccactatactaacaaggattcccttctttttaaaacaatgtanctacatttcttagaaacatttttaaatgcaacaaattttataaatgtatgtgttgactccagtgaaattttatattanaaaatttttgttggaataattggggttttgaattgnagnattctcataaataaggtantccaanggcngggtcttanaccagctcaaaagcctgggnnccggaatngccttgantaaaaa

SEQ ID NO: 27149 - DNA, 532 bp, Homo sapiens
  misc_feature (1)...(532): n = a,t,c or g
gacataancctattcataaaatctttcttcttacagattgtatataactataaaatcaaatggattgtaattaatactaacaatgtaatgaaactaatatcactcaagtgaataagatggatgaaaataaatccccacccactatgtgaatattgtattaattgctactttttgtgcactggcaagcttaagaaaagtgctgggaaggttgcatcatttcatggactagaatattatggcaggactataaattatgccatgttctgtaagatgatgcaatcctcccaacacttttcttcattcaaaatattccaaaacattcatgctttctatatactgcaatgtcatttgtcttccctggtttcaaatgcatcatttatttcttaagtcacctgtgttttttttttncccatgagttcattaaanttaaacancttggtgggcctgggggnnancactanaatcccancacttgggagactaggacngaaaaaanggggnttgccnggccannntcgngancaacnngggg

SEQ ID NO: 27150 - DNA, 539 bp, Homo sapiens
  misc_feature (1)...(539): n = a,t,c or g
gcccccatgtagctctttaccaggcccgcttcccggagcacgagctgactttcgacccacagaggcagactgtgcactttcagatcagctcgcagctgcagttctcacctgaggaagtgttgggcatggttctcaattattctcgttctctagctgaagattttgcagagcagcccatcaaggatgcagtgatcaccgtgccagtcttcttcaatcaggccgagcgccgagctgtgctgcaggctgctcgtatggctggcctcaaagtgctgcagctcatcaatgacaacaccgccactgccctcagctatggtgtcttccgccggaaagatattaacaccactgcccanaatatcatgttctatgacatgggctcaagcagcaccgtatgcaccattgtnacctacanatggtgaagactaangaactgggatganccacagctgcanatccggggataggttnaccttncctggggggctgganaatgtcnncngcntcganaacncntggtgggctttannagnnccaaggtacgg

SEQ ID NO: 27151 - DNA, 495 bp, Homo sapiens
  misc_feature (1)...(495): n = a,t,c or g
gtttttttttttataaactaaaataaatataantacctaccacacaaagctganacntgacacaaggataactacatganataatgcagcaccttgancccttaaaanaatacttgatattcaataacccttggnggcantcaattaagaaaaaaatctgcagtacttaancantacaaattatttttttaaaaaaggagtannnnnnnnnnnnnnnnnnnnnnnnnnnnnnnnnnnnnnnnnnnnnnnnnnnnnnnnnnnnnnnnnnnnnnnnnnnnnnnnnnnnnnnnnnnnnnnnnnnnnnnnnnnnnnnnnnnnnnnnnnnnnnnnnnnnnnnnnnnnnnnnnnnnnnnnnnnnnnnnnnnnnnnnnnnnnnnnnnnnnnnnnnnnnnnnanaatgcgtgaacccgggaganaaacttgcaatganccganatcgtgccaatgnacnccaacttggggganaaaccaaacnccntccaaaaaaaaaaaaaa

SEQ ID NO: 27152 - DNA, 534 bp, Homo sapiens
  misc_feature (1)...(534): n = a,t,c or g
gtgcacacagtgcacgaanacgctgtcgggagagcccaggattcaacacgggccttgagaaatgtggctcttgtacctcctggtgccggccctgttctgcagggcaggaggctccattcccatccctcagaagttatttggggaggtgacttcccctctgttccccaagccttaccccaacaactttgaaacaaccactgtgatcacantccccacgggatacagggtgaagctcgtcttccagcagtttgacctggagccttctgaaggctgcttctatgattatgtcaagatctctgctgataagaaaagcctggggaggttctgtgggcanctgggttctccactgggcaaccccccgggaaagaaggatttatgtccaanggaacaagatgctgctgaccttccacacagacttctccancgaggagaatgggacatcatttcacaaaggcttccgggcaatacaagctgttgacctgatgaatgtgnttccgggcantcangggggngggtnccagnccantccagcac

SEQ ID NO: 27153 - DNA, 529 bp, Homo sapiens
  misc_feature (1)...(529): n = a,t,c or g
gcaatatgactgttcgagtgcctgaaacagtggctgatgccagacaatccattgatgtgggcaagacctcctgaactggaacaaataggaatattttcatggaattttacctatttttataattattatttcttaaagtgattaaatgagaacatggatgagtggacttcatattatgactagctttactattttaattcaccttgcataactactgaattttgtcattcttgaaagtatgcaatttttattttggttatattacaaaaatgtcaatcaaatattaaaaaatagttaatgtgatagaaaaaccttacatatttttttcttatgtttgtttagcgactttagcaaaatgttttcatataatctcatctgtttacctagaagatacgttaaggaaatatattattatccngtttgatgtgggngangcagagatcaacctggcttgtttagggcatacacnaattagaaatcgggcaaaactgtncctatccnataagctangtgtcaaacngaactggga

SEQ ID NO: 27154 - DNA, 510 bp, Homo sapiens
  misc_feature (1)...(510): n = a,t,c or g
nnnnnnnnnnnnnnnnnnnnnnnnnnnnnnnnnnnnnnnnnnnnnnnnnnnnnnnnnnnnnnnnnnnnnnnnnnnnnnnnnnnnnnnnnnnnnnnnnnnnnnnnnnnnnnnnnnnnnnnnnnnnnnnnnnnnnnnnnnnnnnnnnnnnntttcaanaccgtancctgttcccantggnggaaattctganntttcncgttgttggaactttgtttgntaccnctaagtaaatacccaaganaatggtttctaacncccccctgccgggctgggtggnaccnaaacttgtacctcgcactcacactcagacacgtcacacacctgtcagggggcacanccccaggtgancctgantgctgtgcttgcctcgtggggtnnccatggagatgggtctcccaggcccaaggcttcctgggtgcacntccgttctgcgtncaggaaggatcgtacaagacggggcgganaaattcccnngtgngagcgtacngnnaanagnantgttccnggtga

SEQ ID NO: 27155 - DNA, 543 bp, Homo sapiens
  misc_feature (1)...(543): n = a,t,c or g
ggatattggtctgtagttttctttctttttgttacatcctttcctggctttggtatcagggtgatactgacttcatagaatgaagaagannnnnnnnnnnnnnnnnnnnnnnnnnnnnnnnnnnnnnnnnnnnnnnnnnnnnnnnnnnnnnnnnnnnnnnnnnngtactgcnnnnnnnnnnnnnnnnnnnnnnnnnnnnnnnnnnnnnnnnnnnnnnnnnnnnnnnnnnnnnnnnnnnnnnnnnnnnnnnnnnnnnnnnnnnnnnnnnnnnnnnnnnnnnnnnnnnnnnnnnnnnnnnnnnnnnnnnnnnnnnnnnnnnnncatacgtnnnnnnnnnnnnnnnnnnnnnnnnnnnnnnnnnnnnnnnnnnnnnnnnnnnnnnnnngtagtattaataaactggcatgtggacagactcaggacatcctggttancanggtactgcagacaatgctgataacgggtcatgcataagttttcncctctgggtgnangtaatttactgtnntgcngnagtaaccgntccgttggcccaaccaggag

SEQ ID NO: 27156 - DNA, 531 bp, Homo sapiens
  misc_feature (1)...(531): n = a,t,c or g
ggagagctagcaccatgagcttcaataccctgcaaggaactacacgcatttatttccaagggatgtagcagagatggaggcatgagaaattagcacttttttttttaaatcaattcctggtaaatggaaaaacttggnctaaaatttcattttgcttctctacctttttcttgactgcnatgggaactcggtttgaaaagaaaaatgtggctctaaaagaagcattaaagaacccaaaaacnnnnnnnnnnnnnnnnnnnnnnnnnnnnnnnnnnnnnnnnnnnnnnnnnnnnnnnnnnnnnnnnnnnnnnnnnnnnnnnnnnnnnnnnnnnnnnnnnnnnnnnnnnnnnnnnnnnnnnnnnnnnnnnnnnnnnnnnnnnnnnnnnnnnnnnnnnnnnnnnnnnnnnnnnnnnnnnnnnnnnnnnnnnnnatcncccgaaccaggagnaaaggttcaatganccaaatgggctacgcatcaacctgngcaananggcaaggnccatcccaaaaaaaaaanaaaaantcttt

SEQ ID NO: 27157 - DNA, 508 bp, Homo sapiens
  misc_feature (1)...(508): n = a,t,c or g
gctcaagtctgaactctacctccagacagaatgaagttcatctcgacatctctgcttctcatgctgctggtcagcagcctctctccagtccaaggtgttctggaggtctattacacaagcttgaggtgtanatgtgtccaagagagctcagtctttatccctagacgcttcattgatcgaattcaaatcttgccccgtgggaatggttgtccaagaaaagaaatcatagtctggaagaagaacaagtcaattgtgtgtgtggaccctcaagctgaatggatacaaagaatgatggaanaattganaaaaagaagttcttcaactctaccagttccagtgtttaagagaaagattccctgatgctgatatttccactaagaacacctgcattcttcccttatccctgctctggattttagttttgtgcttagttaaatcctttccaggaaaaagaactccccatacaaataagcatgagacangtaanaataaccttgcagaagctgtg

SEQ ID NO: 27158 - DNA, 479 bp, Homo sapiens
  misc_feature (1)...(479): n = a,t,c or g
gaatagttttacgttttttaattctgcagaactagttaagtaagtttggggttaaggatcctttcttactaacacagatgtacctgagcaaacagttttcccattggtgctctggtgtgtcaatcgtaatctcccctcctagctcctcaggtaggagggtgtcagggggccattactgaagaaatgttggaacttcagctgagataaatgtaaggatcagtcatttctgatttgtatttttgtaaaccagttcttacgtgtaaaatattttcataaagtcacagtaagatgtttttatgaggctttggaggcttttttgcataagttaaaatacaaattttgagttcttgacccaggatcactatttatacatgaattaatgctgcttttttttttaacgaantcanctgttccaaataacttatganaaaaanngattcngggctgggcanaagcngnggncaagcctgntancctag

SEQ ID NO: 27159 - DNA, 481 bp, Homo sapiens
  misc_feature (1)...(481): n = a,t,c or g
gccaggctttgctgtttaccagatgtgtgacttagggtgagttactgatgctcgctgcactccagttgtttcacacttgcaaggagctgacatgtgccaccgagccccaggtctagtgcctggcacaccacgggtcttctctggtcgttccttccctcccatgtgctgcttctctgctaggcactgggctgaggcctttccgtggctcacttttttaagacgtgtaaggatcctttggggtcggcaccatgatcatctccattcacgtccgtggaaagatgtgaaagccaaagcataaaattgaagtgaaatgacttggtcagggccacacagccgcacttggctgctcttcactgtgttgggatgagatgccanaagcatgctgccgcggagcaccgaggaagggtcactgcgaancccganagagctgcctggaggaaagccgttaagctgangagcagccgganaaagaagnanactc

SEQ ID NO: 27160 - DNA, 507 bp, Homo sapiens
  misc_feature (1)...(507): n = a,t,c or g
gcgggatgtggcaggtgggctgcggtcactggcccaggccgctaggggagtcgctgcactgacgtcagatcctgcagtgcaggccattgtacttgatacggccagtgatgtgctggacaaggccagcagcctcattgaggaggcnaaaaaggcagctggccatccaggggaccctganagccagcagcggcttgcccaggtggctaaagcantgacccaggctctgaaccgctgtgtcagctgcctacctggccancgcnatgtggataatgccctgagggcagttgganatgccagcaagcgactcctgagtgactcgcttcctcctagcactgggacatttcaanaagctcanagccggttgaatgaanctgctgctgggctgaatcangcagccacanaactggtgcaagcctctccgggaaccctcaagactggntcnagcctcaaggcgatttngacaagactcaacaacntcctggaactgggttgaaatgcaaggcaagc

SEQ ID NO: 27161 - DNA, 550 bp, Homo sapiens
  misc_feature (1)...(550): n = a,t,c or g
gaggggggaaagggagagagagaggttggggagagagtcagcgggagggggagagagaaagagaaatttggaatttttaaaggagaatttccacgtcagcctccctccctctcatggtagacaagcttcttgcaagtgcttaggcanaattatacctgaaaaaaaaagctggaactcttgaccttttctcatgttgattattaatatgagcagtgaacttccaacaatgagattttagcagaaatgaagggctgctgtcagtgcagtgctcatggtggagctctacaggtctctgcagcgccctagcctgcctctcctgctctcctatcacaggcagatgtgcgacggggaccctgcctacccccagccttggctccagtagcattgggcacaaatccctcaggtgtccaagcttggcacaaggtgcatagtgggagcancctcaggatgcanttaggggagccctctgnnagccanactccggcaaaancangtctgggggnaaggtgccaaaaggaaacnaggttgangactttnggtaattaattcg

SEQ ID NO: 27162 - DNA, 513 bp, Homo sapiens
  misc_feature (1)...(513): n = a,t,c or g
gctccatctcaaanaannaaagaaagaaaaagtaaaataccagtcccgctcctccaaaacccctattactttttcattgtagaataaatgtgcattcagaaaagcataccatatgtatatgtacattttaaaggtaattgtgaagtgaacagccatgtaacataggttggttgaatgtcaccagcacctaccagggcttgtgtttaccttcttgatcacaacctctttcctcacctcctgtccagggaaaaccatgattcccaggtttttaaataattgttttcttgtttgtgttgatagttttaccacctgtatgtcatctaagttataggatgtttaaaattttantttccttcaattgcttcantaattgcctttttcnngagtttgctttcattggntttgcctaattttaangttggngacttctcaaatggttttaatggnccttggttgggttgttgacatttaaaaggttaaaccactatcaaaagccggattggaatctgagtt

SEQ ID NO: 27163 - DNA, 500 bp, Homo sapiens
  misc_feature (1)...(500): n = a,t,c or g
ggtctgaagtggtctgcataagctgggtgtatggggcggaccgtttctatgacaacattgaggacatgattggctaccggccatggcccctggtgaagatctcctggctcttcctgacccctggactttgcctggccactttcctcttctccttgagcaagtacacccccctcaagtacaacaacgtctatgtgtacccgccctggggatactccattggctggttcctggctctgtcctccatggtctgtgtcccactcttcgtcgtcatcaccctcctgaagactcggggtcctttcaggaagcgtctgcgtcagctcatcacccctgactccagtctgccacagcccangcancatccctgcttggatggcantgctggccggaacttgggcctccccaacaaagggaaggctgatacccggggaaaggggaccatttgnnngggnnggcaaaagcaangnggncctanccnggaanctagtcagggnaccccattc

SEQ ID NO: 27164 - DNA, 515 bp, Homo sapiens
  misc_feature (1)...(515): n = a,t,c or g
gatctgtgccaaccactacatcacgccgatgatggagctgaagcccaacgcaggtagcgaccgtgcctgggtctggaacacccacgctgacttcgccgacgagtgccccaagccanagctgctggccatccgcttcctgaatgctgagaatgcacagaaattcaaaacaaagtttgaagaatgcaggaaagagatcgaagagagagaaaagaaagcaggatcaggcaaaaatgatcatgccgaaaaagtggcggaaaagctagaagctctctcggtgaaggaggagaccaaggaggatgctgaggagaagcaataaatcgtcttattttattttcttttcctctctttcctttcctttttttaaaaaattttaccctgcccctctttttcggtttgtttttaatcttcatttttacaaggggacgttatataaagaactgaactcaacattcaggtgntttttttttttttncaagnttngcccaatgnaaatgcnttannaaancaatncccat

SEQ ID NO: 27165 - DNA, 515 bp, Homo sapiens
  misc_feature (1)...(515): n = a,t,c or g
ggtataagggactatggagttttgctgtcagtggggagtcctggacccaatcccccaagaataccaaggctggatacttctcctttaccacagcaatatcactttggtaggaaattgtcctacaaaaatacttcctaaaataaaaacaaaatnnnnnnnnnnnnnnnnnnnnnnnnnnnnnnnnnnnnnnnnnnnnnnnnnnnnnnnnnnnnnnnnnnnnnnnnnnnnnnnnnnnnnnnnnnnnnnnnnnnnnnnnnnnnnnnnnnnnnnnnnnnnnnnnnnnnnnnnnnnnnnnnnnnancnnnnnnnnnnnnnnnnnnnnnnnnnnnnnnnnnnnnnnnnnnnnnnnnnnnnnnnnnnnnnnnnnnnnnnnnnnnnnnnnnnnnnnnnnnnnnnnnnnnnnnnnnnnnnnnnnnnnnnnnnnnntgtccaaaaaattgtttaataaaataaaaaatacaanatgttcattacncgttgttggtaatacaagaanantttttaaacacaatcac

SEQ ID NO: 27166 - DNA, 427 bp, Homo sapiens
  misc_feature (1)...(427): n = a,t,c or g
gaaagctgactggaagatactcttcagcaacttgatttttttagtatttaggacttactaatttttatctttggaaagacagtttttatctttagctctaacaattttatccctgcaaaggacatgaactcaatgatgagtattcttaataacacctgaaaaccattatattatcctaaagcgtggcacctattttacaattgaattgatttttcagaattattcttgtgttttacatttttagatagattttgtttttgaaatacttaattcttaagaagcatcacaatgtctagtagataatctcatgcctcagaaaattcatagcattaccatattagtttactatttaaaaatgttaaaatatggntaataaaatcatttattttccaaatcacatgaattcactcagctttttttttttttt

SEQ ID NO: 27167 - DNA, 516 bp, Homo sapiens
  misc_feature (1)...(516): n = a,t,c or g
gactgggcatcttgtgttttatctggtaaccctaataatacacaactaccacatgaatacttcactcctccanaggtccaaggacagctatctatctgctaatgagcccctataacacacctatggagatccaaattcattctcagcttcagagccaaaggaggttgttgaagtccaatgtcgggtcatttccagccacagcttggactgtttacttcagggacactgattaagtcatatattacaaggaagcctcccattgcccctaattcaaaacagctgggtcagcttctcctgccagccaaggctgcggtggaagcctcaggaggggactgtatttggaaggagggcagtcgggggataagtttaatattgagcaaggncatctcttgatgctcctgtgggaaagtccttatagagcatcgggttacaaagcctcattnggtgggggtggananggacanagcatcngggggaccctgggnaatccctgnncatttgcgncaaaggantcgg

SEQ ID NO: 27168 - DNA, 511 bp, Homo sapiens
  misc_feature (1)...(511): n = a,t,c or g
ggtgacttgagccttctgtccacagattctgaattgcgagaaaattccagtacgacccagggccaggacctcagcacaatttcaccagcagtcatctttgaatcaatgttccagaattcagatgatacggcaattcaggaagatcctcaacagacagcttccttgactgaaagttttaatggtgatgcagagtcagtcagtgatgttccgccatccacaggaaattcagcatctttatctcttccacttgtactgcaacctggcctctccgagccaccccagcctctactacctgcctcagctccgtctgctcctccgcctgctccctccctaggacctggctcccagcaagctgcatttggcaacccccctgctctcttacaacctccagaagtgcctgttccccacagcacacagtttgctgctaatcatcaagagtttcttccgcaaccccaaggcaccgagcccaatgtacangacttcngttgntgctgggggntctgnatcaaca

SEQ ID NO: 27169 - DNA, 510 bp, Homo sapiens
  misc_feature (1)...(510): n = a,t,c or g
gaactgggagcctcttgagagtgtacagcatcaagcccttgccaactcttgtttatatgcatttaactttcanttaaccatgggaataattcatgaaaatccaatctacaaacaaaggccatcctaacgttcatgttattcttttccctaagaatctttcacaagagctataatcaagtagaattatgctttgatttgaattctaattcaattgaaaataaaaaatgannnnnnnnnnnnnnnnnnnnnnnnnnnnnnnnnnnnnnnnnnnnnnnnnnnnnnnnnnnnnnnnnnnnnnnnnnnnnnnnnnnnnnnnnnnnnnnnnnnnnnnnnnnnnnnnnnnnnnnnnnnnnnnnnnnnnnnnnnnnnnnnnnnnnnnnnnnnnnnnnnnnnnnnnnnnnnnnnnnnnnnnnnnnnnnnnnnnnnnnnnnnnnnnnnnnnnnnnnnnnnnnnnnnnnnnnntcatctacngacccaacctggngacagacnagactcngtgttaaataa

SEQ ID NO: 27170 - DNA, 514 bp, Homo sapiens
  misc_feature (1)...(514): n = a,t,c or g
gagcccacgctaaccganacaggagggagacaaaacccagcagtagccaaaactctgctanatcgatgcagactgttacaggcgcagctttccaaaaagcagagctcantgaaataaatatttttcctgtgagaagaggcttaagtcggcgatcttaacaaccccccaattcattccagattcactcggtgcagctgtcgtcagcgcgcccatcttgatacacttaggattgcttggtaactgcagtgagcccgtgtgtctggctgctttcacccactgggcagtgtgccctggggcgctgggcagggggacaagaaggagtttgtccctggggaaccctattcccaccccgtctcagctccccacaacttctgggggtttgtcactttgtttccccttgtaaaaccactatttaatctaaactggagggctgagaaccaactcntcttgggaaaagggccaatctctagcccggggacatatgcagggnnaatgtcantcagggacccaggaa

SEQ ID NO: 27171 - DNA, 509 bp, Homo sapiens
  misc_feature (1)...(509): n = a,t,c or g
gaacattagtaaattttcattgcaggtttatttgttcatatttctggatatataatccattactgttaaacttcatatcaatgttccgatatttcttcatcttatgttttatgttacaaaacaggttatttcactatatgtatgtttaattgattaattcttccctttttttggaaatgaaacagcactctcaattattgggacagaaaagttatttcatagggaatacttcaaacactgatatctacaacaggcagtaagattcgtcacaacaattggtatactgtcaatataccatacaaagttccatctggtcttgattaaaaattattttagttttctcaggaaaatgatacagagggagaattgcctagattatatgagagaaaanaaagtagagagaaacataatgttttcttaaattattacagcaatgaactattccacctggnaagaanggggcacttgagaaaggggtcaatacccaaggacaaanatgtaantccggt

SEQ ID NO: 27172 - DNA, 490 bp, Homo sapiens
  misc_feature (1)...(490): n = a,t,c or g
gcgtgtgcaggcgctcagcactgacgagggcacctccttcctgcccgcanagcgcgtggcttccctgcccgagactgcctggggctgccagggcagcatcgtgggcttcccagcccccgcccccaacaggccacgggatgacagttggtcagtgggccccgggagtcccctccagcctccactcctcggtcctggagtccacgaacccccagaggaggctgctgtagacccccgtggaggccaggtgcctggtgggcccttcagccgtctgcagcctcggggggatggccccaggcagcctggccccaggcctggggtcagtggggnaattgggtcctggaccctgggactccccatgccctttgctgnnccgccccananccccacgtggctgctgtactcccaaccaatggggcgcaaggctcggtacaatgggtatcccctgancantcccgcttgnaccggnanttggnaaagcctggtnnttaga

SEQ ID NO: 27173 - DNA, 495 bp, Homo sapiens
  misc_feature (1)...(495): n = a,t,c or g
ggattaggaaactacttcaatattcagttagcttatctgtaaagcggggatgataagagtacctagcacacagagccgtaatgaggaataaacaaactgaatattgaagtagtttcctaatctgccaagttatagtgcaagtgagtgacagtgctagaattgaaacctaggatatcttgctgaacacaccatgctgctggagacataatgctcccagccactttgctttactgattcttgtttcctccttatttcctgataatggactcccagtgctgacctctgtggggacccgttctatactgactggtttgagtgttctcagcttgtgttgtgcccatgaccactttggtcagaaaggaatgtttgtttaccttcaaaaaaaaggtgattanggctgggtagggtggntcacacctgtaatcccaacactgagaagtgaggnangaggntancttgagaccaggngttgagacccatgtcaaacanangcac

SEQ ID NO: 27174 - DNA, 514 bp, Homo sapiens
  misc_feature (1)...(514): n = a,t,c or g
gcaataccctgtgccttcattttctcaggtataaaatgagaaaattagtaacatctacctcatagaattgttgaaaaattcttagaacagtgcctagcatatcaaagcaatcaataaatgttattactaacattttcttattaatagtctaaacaaatggacaggatgatgaagaccatgtanaaaaagaagacctatccaagtagatataaaatagataatggagagtatcaacaagccaatgatacaaagctaaaagcctagatagccaacatcctctccaaaggaatggtaggtcccctgatgatatgcttccatatactctgggttccttcatagcacttcacacatgaaattaactgttcaatgtctgccttttccccaaagatatggggcatagaaaatacagattttactaaataatcagnaaatataagaaattgggaaatttcacatatagctagcaaaanggaattgcaaatccccaaggttacaattaaaaaccgccaattaa

SEQ ID NO: 27175 - DNA, 511 bp, Homo sapiens
  misc_feature (1)...(511): n = a,t,c or g
gggatgttaaatttgctgtaagttgcaaaaatcttagcatatccaacctctgcatggggaggaattgtatgtcggataaaaatgtaagccatcctactttcagtgtaactcattattagatgtatgccatgtatttcatttgatttgccagtgtagatgaaaggaatagttgtggtcaaggattcaaagtccaatgactgaggaaactaacttacgttttccacttacacatcaagaaaatcgttcgtactactttctgcactagaaagcaatcctagcatgcactatctgattttaaatatctggcacatagataggttatatttaaaagaatatctgtaaaatctagaataaattccagtttagcttcctagcagaaaagtgctaagtgtgaaataatggngatacttancttaagttagtgcttgaatttggtttttttttttaaaggggggngaaaacttaaaaacatttttaaggntcnggtaaaaagganagggggnccccccgg

SEQ ID NO: 27176 - DNA, 513 bp, Homo sapiens
  misc_feature (1)...(513): n = a,t,c or g
gnnnnnnnnnnnnnnnnnnnnnnnnnnnnnnnnnnnnnnnnnnnnnnnnnnnnnnnnnnnnnnnnnnnnnnnnnnatgctttcanaaagagatttcttccaatacagaattgtattcagccaaacattcgatgaggtatgagagtaagggggaaaaaaagacattctcagacactcacgttatcagacaaaaatttaaaagaaacaagaactagagagtagggtgtacgacacaaaggagaagcccagagaatcaccaggattagggtagacagagataccaacatggcagcagtgtgcgatagaaagaacaggttaaaaaactctggggatctttatttgttaataagatgatgtcgtaaaatagctgatgggtggggcgcggcaagnnnnnnnnnnnnnnnnnnnnnnnnnnnnnnnnnnnnnnnnnnnnnncctgaagtcangaatccaaaccaacctggcaacatggtgaancctgtcactactgaaatacaaaanttaccangngtgg

SEQ ID NO: 27177 - DNA, 536 bp, Homo sapiens
  misc_feature (1)...(536): n = a,t,c or g
atgaggtcaaagcantcacatggacaagaatatatggggccatgtacatcctantaagggctgggtgtttgctaagcattcagtgtaaagccagtggaagctgctacacaganaaggacagctctgactgggattctctctggctgctgggtgganaacaggttaaaaanagccanaggcaggggaccagttaccacaagaatccttgcnananaacancaggtggaaccagggtggtggcagcggggctggtganaagtaatcacatcacacagcaaatgtnaactggaaaggatggggtggtancacaanagctnaatggtcacagcagctctactcctcgctgcagtgaccaaagctgccatcnagcaaacacacctcaggtgcctgctgtctgccctgcctcagtaatgctggggacatggggaagagcananctgntcccttccntgcanctgggggtgcaccccatgggngactcacaggctgnggccatatcanattggacaatgtcaatctgtaagggcnaaaaacct

SEQ ID NO: 27178 - DNA, 539 bp, Homo sapiens
  misc_feature (1)...(539): n = a,t,c or g
gaaaataactctaggaagtccataaaccctctgatgttgtaagtaaaattacgggtatatatgtttgtgcatcttttttagtgataatctanaaaaatttcatcagattttccaagtaaattctctaaacctcagtatattctctaaacctcctatataatgggatttgtaggggtattatgaaaagtaatcacatagtaagcatgcaaatattagttattattattattcccctaaaagattaaaaacttgtgcatnnnnnnnnnnnnnnnnnnnnnnnnnnnnnnnnnnnnnnnnnnnnnnnnnnnnnnnnnnnnnnnnnnnnnnnnnnnnnnnnnnnnnnnnnnnnnnnnnnnnnnnnnnnnnnnnnnnnnnnnnnnnnnnnnnnnnnnnnnnnnnangcatggtggcangcgcttgtannnnnnnnnnnnnnnnnnnnnnnnnnnnnnnnnnnnnnnnnnnnnnnnnnnnngcttgcatnagccnagatggngcantgnactcancctggnaanaancgagacccacctaaaaaa

SEQ ID NO: 27179 - DNA, 539 bp, Homo sapiens
  misc_feature (1)...(539): n = a,t,c or g
ggggctcgtggcacaatttctaattcacacaatgcctccagttttgctatttcaactaaatcatttatcaattccttcacggaggtcagtaaatctcagcatctggggacctgtaaacattaaaataagaagctataaaaaatattagtaaatcaattaaaagctcaaacagcaataaaccctacttgtattacacctaaaaaacaaaaacagaccctcctcctctgaaattaataaaacattccatatcagcagttttcaatgagctttttctttcttctcaaaagacctcctgatctcccatctggtaccttggtgagctgggaattacacatcagttgtaaaaaggaataaangatggaaaaaatctgaatttctgactccagaaagcaaacacgatccatatttcattgcaagagntaggaaatggctaaaatcgttatcatttgaaaaatatccagtttgatcangactgggaattggctaatattaccaagtcaatganaaagancacaattacactaaccgcaatgataagg

SEQ ID NO: 27180 - DNA, 539 bp, Homo sapiens
  misc_feature (1)...(539): n = a,t,c or g
ggagacccactggcctctgggaanancatangacagggggacaacancatgaggaccatatgtttgccatcttgctgaaggaatttcagccaacataataagacatgaaaatggcattcnaggtgtattanacagacaaggggatgttagtgtttgcagganacttggtctgcctcagtgatgtcagtcagcagtgattgtgattccccaggggacactcggcagcatctggagacattttagtttaaacttccccagtgatctgtgatgtacaggagacactttcggttgtcacactgggggaggaggctgcatgtcactggcatctgttgggtgacacctacaatgcacaggacanccacaacaaataattcaagcccaaatgttgctggtgctgaaggtgaagtcccaangttagtaacangangaaaaccagcantctggaggagagactcctcccaaggcagccaagggcatcangagggtcatcncaagcattaaagncctgggaanaataagctcccttccnccancaaagg

SEQ ID NO: 27181 - DNA, 384 bp, Homo sapiens
  misc_feature (1)...(384): n = a,t,c or g
acgaggagagctagcaccataataccctggttaaaaaagagcaaaggacctaaacatgaaaatgtatggttaaagaaatataaatgnnnnnnnnnnnnnnnnnnnnnnnnnnnnnnnnnnnnnnnnnnnnnnnnnnnnnnnnnnnnnnnnnnnnnnnnnnnnnnnnnnnnnnnnnnnnnnnnnnnnnnnnnnnnnnnnnnnnnnnnnnnnnnnnnnnnnnnnnnnnnnnnnnnnnnnnnnnnnnnnnnnnnnnnnnnnnnnnnnnnnnnnnnnnnnnnnnnnnnnnnnnnnnnnnnnnnnnnnnnnnnnnnnnnnnnnnnnnnnnnnnnnnnnnnnnnnnnnnnnnnnnnnnnnnnnnnnnnnnnnnnnnnnnnnnnnnnnnnn

SEQ ID NO: 27182 - DNA, 523 bp, Homo sapiens
  misc_feature (1)...(523): n = a,t,c or g
agaattantaaatgaganacccaaagaaataacccaaaggtacnacagaaagagttggnaatggnaaatatganncaaaagttgagacatgaatanaaagctagaaagaaaaagttatgcatgcatcnaattggagttctaccananaatgggaanacagtggtcaacatgaccganancnganaatttttcagnattgacatatacccacagaaacnggaangacaatgtanancaaataggagtttaaanttttttangnaanaantctnactanatacatgatantaaaactangcgcantaccaantacaaacgtgtaaacgcanctgggaaaaantagacacattacntanaaaagancaatncanacggagtaccatactttctttttactcnccccaccgcccccagcantattgangtacantttanacncagnaaaattaccngntgaancgtatagattgnnaantggcanntntntaaancncgtaaccgtcacacntttagggagangggg

SEQ ID NO: 27183 - DNA, 413 bp, Homo sapiens
  misc_feature (1)...(413): n = a,t,c or g
gaaaggctggtgctatattttctactttattattaaatgataaaagtaacattcactgtanaagttttanaaaatgtagggaaattataaggataaaactaaaaataacctctacnnnnnnnnnnnnnnnnnnnnnnnnnnnnnnnnnnnnnnnnnnnnnnnnnnnnnnnnnnnnnnnnnnnnnnnnnnnnnnnnnnnnnnnnnnnnnnnnnnnnnnnnnnnnnnnnnnnnnnnnnnnnnnnnnnnnnnnnnnnnnnnnnnnnnnnnnnnnnnnnnnnnnnnnnnnnnnnnnnnnnnnnnnnnnnnnnnnnnnnnnnnnnnnnnnnnnnnnnnnnnnnnnnnnnnnnnnnnnnnnnnnnnnnnnnnnnnnnnnnnnnnnnnnnnnnnnnnnnnnnnnnnnnnnnnnnnnnnnn

SEQ ID NO: 27184 - DNA, 528 bp, Homo sapiens
  misc_feature (1)...(528): n = a,t,c or g
gctcggcgtggaggtgcaggatgacagcagctgagtgagatgaggcggcagcgggcatccgancaggaaggtcaacaanaggagcctcgttccatacagggtgaataatcaaggaagtaaacatattagagacactgggatctaagattgtcactgttgggaaacggagttatccacttggaaagcgagaaactanaataaaccctgtgctactacattggaaatgggggtactggaanaaactcatgcttttcaatacatggngatattaaaaaatganacngtgttaaaaatacacacgcatgtanctgtaggtangttttgtatatgtatgtatacacatnctctgtcgactganaggggcctgggtatagtnacactccatcaanctntctgggtgcctagaccctgttctcngatagccaactgcatnnnaaggangcaggnctcttganaaaagnagnatccagtctggggcatggnaagtcatgaagnncccagaanaccngtggncaantagnannagaa

SEQ ID NO: 27185 - DNA, 424 bp, Homo sapiens
  misc_feature (1)...(424): n = a,t,c or g
gcattatccatcatctctcccacaaaattaaagctttagcatctcttcatagcttacataataaattcttaatttttcanaacctagaccctatatgcctcaccagcttcatccctaacttgtcttctgttttttcctttcccatcctttgctctggctactttgaaatacatttattcctggaacctgccatctgtnataantttnctggncccctaaaaaaatgccaagaacctaactttaaataattggtaacccanttttcngnnaggccgnaatctgtgtaagcttanctgggtcccccggttaaagccttanaaggntgaaatcaaagnttgcttggggctcngntccttacnanangnctggggaaaatctgnntccaagccaataagattcctagccaaatcaggtcctgtcaatg

SEQ ID NO: 27186 - DNA, 304 bp, Homo sapiens
ggaattgtaatttgttttaagtaatctcttattgaacattttagctattttcactttcttttggctgttaggaaaaaaattctgcagtcaacgaccttgtacaattttcattttatacgtatactacagatgtgttttagcctatgcttttagaactggaattagtgtgtgagagtcaacgttttttattttgatgggtattgccaagtggccttccatagggattatataaatatatactctcacccacagataccagactctctctgtattcttgccaagataatgtctttttttttttttt

SEQ ID NO: 27187 - DNA, 423 bp, Homo sapiens
  misc_feature (1)...(423): n = a,t,c or g
ggatggtttctgcctgtttgtgaattgagatcatacctacatgagtgggagtgaataacatatttgcagtgaggctgtaacatagatacaggttgatcatccctaatccaaaatcccccagaattcaagatgctccagaatctgaaacactccaaaatcccaaacgtttttagtgccacaagtgaaaaattccacacctgacttcattgtatcacacacaaaattatttaaaatannnnnnnnnnnnnnnnnnnnnnnnnnnnnnnnnnnnnnnnnnnnnnnnnnnnnnnnnnnnnnnnnnnnnnnnnnnnnnnnnnnnnnnnnnnnnnnnnnnnnnnnnnnnnnnnnnnnnnnnnnnnnnnnnnnnnnnnnnnnnnnnnnnnnnnnnnnnnnnnnnnnnnnnnnnnnnnnnnnnnnnngctg

SEQ ID NO: 27188 - DNA, 436 bp, Homo sapiens
  misc_feature (1)...(436): n = a,t,c or g
ggagagctgcaccatcttcaataccctgnnnnnnnnnnnnnnnnnnnnnnnnnnnnnnnnnnnnnnnnnnnnnnnnnnnnnnnnnnnnnnnnnnnnnnnnnnnnnnnnnnnnnnnnnnnnnnnnnnnnnnnnnnnnnnnnnnnnnnnnnnnnnnnnnnnnnnnnnnnnnnnnnnnnnnnnnnnnnnnnnnnnnnnnnnnnnnnnnnnntgtcttcanactttcaattagtaataaccantccncttgagtanaaagctctctcctcttttttccanactccctcatatganagngcttctanactcnacngactgaaaaattacttatatgcacatgagtgtgtaaactttttgcaanaaacattcagcttcctaagcaccngactctgcggaagctctactcnacnccaatcccctggnccaaataaagttatct

SEQ ID NO: 27189 - DNA, 423 bp, Homo sapiens
acgagtgcacgctactcaggagcctggagtgggttaaggaacaaagctcttccctcaaaatcaatcctgaggtcacagtatttattgctacgtataatggggccatgatgcacctacactgtagctgagctggatcacactgtgttgggtagctttttcactgcatttttttttgctacatgatgaatttgtatggtataagaaagagaattatgaatcatctcacttaatccttaacccaaaaataataattctccagttttacagtgagaaaacagaggtttgcagaggttaaatgacctgactgaattcacagatatttataataagtggtaaaaaatgggatttgaacccaaataatctgacttcagagcccacactcttaatcattgtgctgtataatcactttattttcatattatt

SEQ ID NO: 27190 - DNA, 431 bp, Homo sapiens
  misc_feature (1)...(431): n = a,t,c or g
gagcttttctgttcngttaattgcttatctgcttacagagttaaaatggttacttctgcaggtgtacaagttcagtgtaacatttgtaaaacctcagcaattcctcagtatcacctanccatgtcagatggaagatgaagagaanaagactctatctcagggagagtcccaaacttctgaacacgaactctttctatacaccaagatatttgaaanagaccaaggaagtacatacagtggtgatcttgaatcagaggcagtatctactccacatagctgggaggaanagctgaatcactatgccttaaagtcaaatgctgtgcaagangctgattcagaattgaagcanttctcaaaaggggaaactgaacaggacctggaagcagattttccatcaaacncctttgacccanttaataaangncagggaa

SEQ ID NO: 27191 - DNA, 420 bp, Homo sapiens
  misc_feature (1)...(420): n = a,t,c or g
ggtaagggtctgtggaataagtgaaatgaaattaagaaagccaatagtcacctgcctgaatactgagaaaaagcaaggaagaattctgtgaagtttcccanagtgaatgggatgggataggttggttgctttgctttttgannnnnnnnnnnnnnnnnnnnnnnnnnnnnnnnnnnnnnnnnnnnnnnnnnnnnnnnnnnnnnnnnnnnnnnnnnnnnnnnnnnnnnnnnnnnnnnnnnnnnnagccactgcacctaaccataagttcttaatatatgaaaaatgatcanccncatttgtaattaaaatgcaaacaagatatanttttcacctaaggatgggcagaaatcaaaatttggtagctccacgtttnanctccccaagttcanaaacatggggaaacaacattgcccngtgtgt

SEQ ID NO: 27192 - DNA, 419 bp, Homo sapiens
gacagaaatgaaatactggggtacatgctacaaaacaggtgaaatctaataaattcttcattaaagtatgagctgcatttgtccatagattagaggtatgacttttggatattctaatttgaaaaagagcccacttcattctatctaaccagcagtggatgcttgatgctggatatcacagttgagcaaggagctgtacatttttggatatttggaagtctaagtatgacttccaggttttgatccagggataggagacttttatcccaattgcatagggaggagttctaacaacattccatccatattgcaaaacatgtagttgtaacctttttgaataaaggaataacttaagaaaaagtattgaaaacatcaaaatatcgtaaaactgcgtactatttttatgatataatggggca

SEQ ID NO: 27193 - DNA, 435 bp, Homo sapiens
  misc_feature (1)...(435): n = a,t,c or g
gggaggcgtgtgtgttccccaggtgtgtgcggtgaggggcaggctggtttgccttcctggctaacagacagacagacggccttggcagctcagttaggcactgcaagcccttcgggaaaaactgtttgtttctcgggagcctctgtttttgttggtttttgttggtgctgttgttttaacctattaaaaggttgatttgaagctgcaggtgtgaaaatgtttgggagagtgacatttacatgtgtcatttacataaacgggggagggggcgcgatgcagggtgcagaacaagaggcacccacatgggaaattctgtgaacagggatttctggttcaggatagctggtggtgcanaaagggttctgaanggctttgggtgtaaatgttnaaatcaccgacccaaatccctanttagaggcaacgccacaagggcag

SEQ ID NO: 27194 - DNA, 419 bp, Homo sapiens
  misc_feature (1)...(419): n = a,t,c or g
gaagctggcatttctaattctgggtatagacagttattgtcacaaaatttcttcaggtacccttctcttacctgtcagtttttttttttttccnacaactttccttnaanttccatnatngtnananntccggtnatncaggnattnanttcaacccangcangaaccncaagggnatncaattaaaaananctacccaccaggnaaaagggcccangccggnaacccnatnnntttggaaggctgaggngggnanattatttgnggncaggantttganacnanctnacccagnaggctnanncccngtcccaacttaaaaaaaanttaaaaatttacccaggcangggggcccnnacnngtagccccanctacccaggnggctgaggtaggaaaattnccggaacggggagggtaag

SEQ ID NO: 27195 - DNA, 499 bp, Homo sapiens
  misc_feature (1)...(499): n = a,t,c or g
ggttaggatatgggcaggaggagagggctggagttgaattgtgcccaagactggtatgggaactcctgagaacagagagagcaggggtgtagcagggggccagggaagaaataaatacttcttctctaagcctaagccagttttacccaggagaacaggagctattctccccaccctaggcccccatctgctttgaagctacacctgctcttaactgccaggaatcttgcctgtggggtggagtacggggtatgcgggtatgaagtaagaacctagaggaagagtccctactacctaatagaaaacctgagaccnnnnnnnnnnnnnnnnnnnnnnnnnnnnnnnnnnnnnnnnnnnnnnnnnnnnnnnnnnnnnnnnnnnnnnnnnnnnnnnnnnnnnnnnnnnnnnnnnnnnnnnnnnnnnnnnnnnnnnnnnnnnnnnnnnnnnnnnnnnnnnnnnnnnnnnnnnnnnnnnnnnnnnnnagcttcttgggangctg

SEQ ID NO: 27196 - DNA, 497 bp, Homo sapiens
  misc_feature (1)...(497): n = a,t,c or g
gagatagtgttctgctgtaacagttggacagattcaataaaacagtgttaacttttgaactaattttattgaaactaagtttctgtacaaataggtactcaaaacagctcaattttctaaatcacagtacagcaatttattttttttccttacatatccagaagaaaattcagatgaattatctggtgaacgacaaagaaaacgccacaaatctgatagtatttccctttcctttgatgaaagcctggctctgtgtgtaataagggagatatgttgtgaaagaagcagtagcagtgaatctacagggacgccatcgaatccggtaatgttctcattttaagtaaggcaagactcttactgttcaaagtctagtcctggcagtcctaataaggntacgggtaaaatgtacatgtgtcttacgagattgatagaaaacacagtgctaaattttactttaaaataaaactactatattgatctccaccttcaaccaaggg

SEQ ID NO: 27197 - DNA, 496 bp, Homo sapiens
  misc_feature (1)...(496): n = a,t,c or g
ggacttacctgtggtgcttatcattaagcctaagctagtaaatgatggggctcataggcagggtctgacttcagagcctaaacttctaaccataagttctttgnnnnnnnnnnnnnnnnnnnnnnnnnnnnnnnnnnnnnnnnnnnnnnnnnnnnnnnnnnnnnnnnnnnnnnnnnnnnnnnnnnnnnnnnnnnnnnnnnnnnnnnnnnnnnnnnnnnnnnnnnnnnnnnnnnnnnnnnnnnnnnnnnnnnnnnnnnnnnnnnnnnnnnnnnnnnnnnnnnnnnnnnnnnnnnnnnnnnnnnnnnnnnnnnnnnnnnnnnnnnnnnnnnnnnnnnnnnnnnnnnnnnnnnnnnnnnnnnnnnnnnnnnnnnnnnnaaccctaggtttgacttccgtaagaagggaagatttaaacaancaaacangcattaaattncaaccataanaaacaangaaacactaaactaaattacanccatantaaaatctcccaaag

SEQ ID NO: 27198 - DNA, 497 bp, Homo sapiens
  misc_feature (1)...(497): n = a,t,c or g
gctgtgaagcagtagaagccctttgttgagaatcatgaacttgctctgtgaccctgggcaaactgcttctcctcttagggccttcgcatccccatcagtaaaacgggcctaagaacacctgagagaggacagaaagcattgcgggcaaagtgtatgttgatttgtttgtttatttatttatcaaaaaaaattcatnnnnnnnnnnnnnnnnnnnnnnnnnnnnnnnnnnnnnnnnnnnnnnnnnnnnnnnnnnnnnnnnnnnnnnnnnnnnnnnnnnnnnnnnnnnnnnnnnnnnnnnnnnnnnnnnnnnnnnnnnnnnnnnnnnnnnnnnnnnnnnnnnnnnnnnnnnnnnnnnnnnnnnnnnnnnnnnnnnnnnnnnnnnnnnnnnnnnnnnnnnnnnnnnnnnnnnnnnnnnnnnnnnnnnnnnnnnnnnnnnnnnnnnnnnnnnnnnnnnnnnnnnnnnnnnnnnnnnnnnnnnnnnnnntatatatataaat

SEQ ID NO: 27199 - DNA, 495 bp, Homo sapiens
  misc_feature (1)...(495): n = a,t,c or g
gaaccaccaccacttgtaaaaagcatgcagttcatatcgtattttcacttagtaccctgtcctcagcaaccttcacctagcaacccatatttctgaagttaagtcaggtgtgtctgccttaatcgtctgcttaagttattactgtcagatgtgtctatcatgccccattctaaaaagatggtgcatcctgtcattatgcagatgccaccgttcacagggcatggggcagtgttagggacacaatgatctgttcttaagcaagacacataatgtattatagaagggagagagggtcgtgtgcccantaatggccttaggttgctcctcaatgcctctgagtaggagggggctggcttcctcctctgggaaatcaattcctagaaagactaacacaattctaagacctgtaatcaacacttagaattaaggccaaggagattgtggtgtgacattcttgggcattgttcaaccagctccctanaggatttattttat

SEQ ID NO: 27200 - DNA, 506 bp, Homo sapiens
  misc_feature (1)...(506): n = a,t,c or g
ggagagagctancaccagaagctgagccctgaggagctggcagagctgaagacctccctagcgcagcacttcacagcagggccaggcagggccagtggagtgacctgcctctacttcgtggaggagggacagcgaaagactcctanccaggagggcctgcccctggagcatgtggctggggaccggtgcatccacgaggacctgctanggctgaccttccggatctctccacacgccttcttccaggtgaacacacccgcagccgaggtgctctacacagtcatccaggactgggcccaattggatgcggggagcatggtgctggacgtgtgctgtggcaccggcaccattggctggcctggccggaaggtaaanaaggtcattggggtccagctatgccanaggctttgnaggacccccggttaacgccaagganattganttagtaatgtgggttcactgcggaaggccnaggactggtgccaacctggtgacaaatggctcca

SEQ ID NO: 27201 - DNA, 502 bp, Homo sapiens
  misc_feature (1)...(502): n = a,t,c or g
gaatcgtttgagagctctgatgaatgcatcagtttccttcagtcttctgtctgcaaggcagaaacgctcaagaaatccccctctttgccagacaccaagtgtatcttgtttgcagctctgcctctagcatctacagggcttggcatacacgtgaaatgcatgttgagtgatgaacgggagcgcacaggactcttaagaaccgagaccgtccccacagccaacgtatgaagaaatcccatgttctgcttctagagccaactgcccttgtggtttcgagttgagttctggcagttcctgtctttgctctcttaatcattcttcatgggctcccactaatggctaatttgctcagcttgtcatttataaatacaaggacatgacacccactggcttagcagtgctataaagtaacctgtaagtgccgcatgttacaacccgggtttcaaattaagagcaagngaattcccggggcaaaanacacccctaaagcaancantttgga

SEQ ID NO: 27202 - DNA, 499 bp, Homo sapiens
  misc_feature (1)...(499): n = a,t,c or g
gctgaggcagagctgtgaatggtctggccaaactttgaggagtgttctaatgcactctcttttcccatttatccaggcctttaaaaaaactgtcaatatactaattggtcactaagctaacagaacatagattcaagtggccacacgtgatgaanaatacaaactttacaaaaaaagtttataaaagtcactaaacacacacacacaacaataaatccacaataagcagcatcaaccaacctctgggtatttgggggtggagaagaatctaatctccatagttgctacataatattaaatatgtccagttttnnnnnnnnnnnnnnnnnnnnnnnnnnnnnnnnnnnnnnnnnnnnnnnnnnnnnnnnnngaaaatcncggntcaatggaacctcggtcccaggttcaaagtgatccccggcccaacccccnagttaancnggaanaaaggngnnnacaacatgccngganattttggcctaangnaaanaaggggttc

SEQ ID NO: 27203 - DNA, 502 bp, Homo sapiens
  misc_feature (1)...(502): n = a,t,c or g
gaaaatttattggaaaacattcaaggacaactcttttcctactggaaagacaacaaatgattgtgaagaacttgttgataattcaaagttacatgctatttctgttcaaaagtcagaagtaaaaacagacactgatattaatgaggtaaaatgatctttgaaaaatataaacatagattttttgctataaaatgaatacattttaaaatttaaaatgtgatttatgattaatacccacaagcccttacccaacataccctcgccaacacacacacacacttagctgctcccactgtaaaaagccatattgacacttatctcatttagttcatttgttcattcattcaccacatggtttantgagtacttactatgttccaggcactgaactangtaggcactgaaataacagcagtgggcatacaaantcccngactctggngcttaatttacaagaggagacagtaatgantgangagtacnnngaanaaataatggaaaa

SEQ ID NO: 27204 - DNA, 494 bp, Homo sapiens
  misc_feature (1)...(494): n = a,t,c or g
ggtcttttctatatctgcanaagtgatcnagggtccataagagggatcttcctgtctttctgagggtttgttttctttttctctgacaagcaggcacatgacctccttgctacctttgcgtccaggtcaaaaagcactgggaactactaacttatcaacttttattatttctgtgatanaaaaaaaaaggagccaaaggggtattccaggtagtgggaaggatcccttaaagtacctggcattgcacctgcccctgggaancagganagcngccaggaagtattgctccctcagcctcctgggccanganccgcctctgcatggaagcttcncgtnaatccaacaactcgggaggacnctnggctgcaactccgcttgattttggggggagaaaactccctttccctnaggaccctaaaaggaantttgnatatacaattcccaattttacaaaaagtgnttaaaataaaatnaaattttaagnantngcacgg

SEQ ID NO: 27205 - DNA, 506 bp, Homo sapiens
  misc_feature (1)...(506): n = a,t,c or g
gcggcacgagtagattagatgagtagtcaagccaattcaattgttgcctttacttggctcatatcacgttatgaactttttaggatcaccccaatgcaaattctgaggcaaaaccttgagtttctataatatgtaaagtaacaataacctattataacaaaccaatagacctgttctcaaggcgttgggcctacccaaagcaaaactaaatttcccaaacacttatgagtgtacagtttgaaatctcttcaaaaggaggtttcatatgggtccttgaatagggctcagcacttccagtgaggttaaaagtgggtgtccacaaaaaaggttcaaaagataanagagtcccccatgatccaccacacagaggaccagcagaatcncagagtccanggccaacctttttcaantccgggaaattcccacaanntgaaaggcaacnccttttcaaanattacccttgnaatganaaatggnaaaanntgnccttgaaaggtttgtcaagg

SEQ ID NO: 27206 - DNA, 501 bp, Homo sapiens
  misc_feature (1)...(501): n = a,t,c or g
ggatgaatttaattggtgacatcattttcagttttaaacattaactcaaatatctttgttgaaatttactgacaatctcattcctctgataagttaatcactcctttctctgctattaaagcattttgtatatatctttaatgtattttgactataccttctccactacttgtgaatactttggtttttagnnnnnnnnnnnnnnnnnnnnnnnnnnnnnnnnnnnnnnnnnnnnnnnnnnnnnnnnnnnnnnnnnnnnnnnnnnnnnnnnnnnnnnnnnnnnnnnnnnnnnnnnnnnnnnnnnnnnnnnnnnnnnnnagtcttgggagtcatgagtccctgctgccagctctttgtgagcacgttgaagacgtgctatagtaccttananttttgnatcccaaaacctaagnattttcaaantggannanngaatttcctanaaaattcccccaagaattggttaattcgganctttggnngttgctatnaacccttgcc

SEQ ID NO: 27207 - DNA, 503 bp, Homo sapiens
  misc_feature (1)...(503): n = a,t,c or g
gcacagctaacctggaccggaccgatgacctggtgtacctcaatgtcatggagctggtgcgggccgtgctggagctcaagaatgagctctgtcagctgccccccgagggctacgtggtggtggtgaagaatgtggggctgaccctgcggaagctcatcgggagcgtggatgatctcctgccttccttgccgtcatcttcacggacagagatcgagggcacccanaaactgctcaacaaagacctggcagagctcatcaacaagatgcggctggcgcancagaacgccgtgacctccctgagtgaggagtgcaagaggcanatgctgacggcttcacacaccctggctgtggacgccaagaacctgctcgacgctgtggaccangccaaagntctgggcaatccnggccanccaacttcaaaattgacgaaggtggggggnaantgcntgcntttcggncctgcntgcaatgtactccctgcttgctgttggcaagtgggtctc

SEQ ID NO: 27208 - DNA, 501 bp, Homo sapiens
  misc_feature (1)...(501): n = a,t,c or g
gctggacactgatgaacattgatgctcctggttgttttctcttttgcccctcttctcccctccttttattttctctttctccccttctgtttccctcctcctctatctccttctccccttcatttgtctatcccttcatctctctctctctcatcactccagagaaagccataactatgagcagtcccatgaggtggctcatgtgaagaaagatggaagcctcctgcaagcagccaaatgtgtggacttgcaagacattctacagcaatcaaatctcctatgaccacaacccagctcactccttgattgtagcctcatgaacaagtgagccaaaaccaactagctgagcaattctcaggttactgaccccagagaaaatatgaaataanaaatgtccggtgttggaaancaaatttggaaggtaaccggtaaanngccataataanaaaannntgggganataanggggagccgcgtaataaaaaactgaaaaggangtgc

SEQ ID NO: 27209 - DNA, 503 bp, Homo sapiens
  misc_feature (1)...(503): n = a,t,c or g
ggaatggatatttgtggcttggaaaaacattttcaatgatggtattatgacttctaaaagtattgtttctcanaacaacttaaatggaagtaaagattattcacttcatgatacttacaggtcactcaaaaagaaagtaacgagatgatacttggtgaagatgtaggtaaagtttgaataaagttattttgtaaaatttatgtgctttgtgattttaaaacattcataagactaaattaataaaagtatatattggactgtatgatgtacatggaaaggtttgtatatttcaaattggtaaaaatttaaaaaaagaactttttattggggaaaattgggaaatcctttgtgttgagatttgcctggtactcatttatttatgggaacttgcaagtttccnggcaataagntggtttttaacantntcnagnggacggttaaatatactacngancnaataaaatttggnnnacanttacngantgatgccangaaagattgtc

SEQ ID NO: 27210 - DNA, 511 bp, Homo sapiens
  misc_feature (1)...(511): n = a,t,c or g
nnnnnnnnnnnnnnnnnnnnnnnnnnnnnnnnnnnnnnnnnnnnnnnnnnnnnnnnnnnnnnnnnnnnnnnnnnnnnnnnnnnnnnnnnnnnnnnnnnnnnnnnnnnnnnnnnnnnnnnnnnnnnnnnnnnnnnnnnnnnnnnnnnnnnnnnnnnnnnnnnnnnnnnnnnnnnnnnnnnnnnnnnnnnnnnccaaaacaaaagaaaatgtttttttttttcttttgcctaaaaaatgggctttgcancctttcnccactacctgcttttatcaggccttgggcaaggacggttttacaactcagggagcaaaccacagccaccctgcccactcatgaggctgtntgcatgtgatcatatggcctccctgtggcaaaatttagggacttgtcttgtgggggccaaaaaaacaggctaaaggtccatccaagccgtgggtgtcanttcgtaccannttcaaaggcggtgacaatttttcngcaaaaaaaaaagggcgggaatcttttaccttt

SEQ ID NO: 27211 - DNA, 507 bp, Homo sapiens
  misc_feature (1)...(507): n = a,t,c or g
gagaggtggacgtggtggtcctggaggacccgctgcctgggggcaaggggcatgacagcacagaggagccgcccctcttctcctcccanaagccccgcggggacttccccagccccatccatgtgagcggcccccgcttggtccagccccacggccctcgcttcaggctggagggcaacgctgtgctctacggcggctggagctttgccttccggctgcgctcctcctccgggctgcaggtcctgaacgtgcacttcggcgganagcgcattgcctatgaggtcagcgtgcaagaggcagtggcgctgtatggaggacacacacctgcaggcatgcagaccaagtactcgatgtcngctggggccttgggcaacgtcactcatgattaacccccggnatcgactgcccggagaacgcaacttctggacactttcactacnaangatccgatgaccggtccattatncccgancctctgctccttgaaatgcccanaggggtgcccct

SEQ ID NO: 27212 - DNA, 525 bp, Homo sapiens
  misc_feature (1)...(525): n = a,t,c or g
gnnnnnnnnnnnnnnnnnnnnnnnnnnnnnnnnnnnnnnnnnnnnnnnnnntcgtagcnnnnnnnnnnnnnnnnnnnnnnnnnnnnnnnnnnnnnnnnnnnnnnnnnnnnnnnnnnnnnnnnnnnnnnnnnnnnnnnnnnnnnnnnnnnnnnnnnnnnnnnnnnnnnnnnnnnnnnnnnnnnnnnnnnnnnnnnnnnnnnnnnnnnnnnnnnnnnnnnnnnnnnnnnnnnnnnnnnnnnnnnnnnnnnnnnnnnnnnnacaacaacaaaaagaaattattctattctacaccacacctcagaccaacagcagtgctaaggcccaggcttcagataattttgtttaattttttttaaaaattctctccatgattgggtaaagccagggctgagaaacattgacctgaaggaattanggggcntcatggaggaggaatgtttgtgttggcntgaaagattaantttccccnggccttgaaaggattgaagntttaaatgtttgaatgtggnggaaaaatggctacgt

SEQ ID NO: 27213 - DNA, 511 bp, Homo sapiens
  misc_feature (1)...(511): n = a,t,c or g
gacagcttgctttccaataagccaaatgtaccagcttctttgtttttcaacggattggtgtgtccatttgatacaagaaaatggaaactgaacagccagaggaaaccttccctaacatcgaaatcaacagtgactctggtaaacatcctgcagaagacatgaaagaggaaaaagcatttaaagatctagaaacactgatgagatggttgaattaggcattctgcttcagagcagaatgctggggcagtgactggaaaaggaagcaagaatatgaagtttctccgtacagaccacaatgccaatgctttagtcccagacagcaggggccccgagcagcatgtcccaacagtttatgcctcactgcctgattagaaaaagagaaatgtatttatacctaccttttannataataagtagtatcccccttaatggngggaaaaaattttnagaagatttngaatanggggcaagggtaataccgtaagctttattaaatattttaattcaggca

SEQ ID NO: 27214 - DNA, 527 bp, Homo sapiens
  misc_feature (1)...(527): n = a,t,c or g
gagagtataataagaacataacagtatgtctgagacccctttaaggaatttactctaagtagtaggtaacttatccagggggagattttatcattcctttatgctgccaagaaatccttgggtttcatgcaagattttttatatagtaaaacagtaatattttaacaccacagcttctgctgtcagtaaagtaggatctggtaaataaaggtgaataattatcatatgagccaaagagaatagaagtcacaaactgtagtgtgcatagtaggtaacttataatcatgttgactttgctgatttggtgttaaaatagtagtagtagaatataatgtttgtannnnnnnnnnnnnnnnnnnnnnnnnnnnnnnnnnnnnnnnnnnnnnnnnnnnnnnnnnnnnnnnnnnnnnnnnnnnnnnnnnnnnnnnnnnnnnnnnnnnnnnnnnnnnnnnnnnnnnnnnnnnnnntccaannnncncccannnaggaaaattaccaggcattatggngcaccctgtaatcccacc

SEQ ID NO: 27215 - DNA, 507 bp, Homo sapiens
  misc_feature (1)...(507): n = a,t,c or g
gcggcacgaggagcctacaggaaatgagcctgggggacagactgggccaagagaccagacttagccactcttagaaataggtgtccccggcacagatgaggagcctggccccatgattcaccagctggaggccttgggatgtgccacttccagcctgtgcccctgactcctcattcataaaagaanactgataaggccttcctcagaaggttgagatggacgtggagtaagatgtttaggatgcacctgccactgtgcactgtgcctctcctcaaggcctggagggtccaggggtgaagtttctcctcctcaggttttggcaaccagtttctctaaaccccgggaacataaaacataattttctgacttaaacatggctttcctgctcatccctgtggattatctgatggatatgacnatcctcccatcaaatatanaagccctaaaagagaaanggaaagaancngnatttacgggcctgaagcnaacctntcagtncccaggccc

SEQ ID NO: 27216 - DNA, 524 bp, Homo sapiens
  misc_feature (1)...(524): n = a,t,c or g
gggcctttagaaaatggagtatatannnnnnnnnnnnnnnnnnnnnnnnnnnnnnnnnnnnnnnnnnnnnnnnnnnnnnnnnnnnnnnnnnnnnnnnnnnnnnnnnnnnnnnnnnnnnnnnnnnnnnnnnnnnnnnnnnnnnnnnnnnnnnnnnnnnnnnnnnnnnnnnnnnnnnnnnnnnnnnnnnnnnnnnnnnnnnnnnnnnnnnnnnnnnnnnnnnnnnnnnnnnnnnnnnnnnnnnnnnnnnnnnnnnnnnnnnnnnnnnnnnnnnnnnnnnnnnnnnnnnnnnnnnnnnnnnnnnnnnnnnnnnnnngtactaacaggctgggcncantggctcacgcctgtaatcccancattccgaggccaaggcagacanatcacttgaggccaaggagttaaanacaacctgggaacntagcaaaaacctgtnnccacnaaaaatttcaaaattgccgggcccgtgtnaaacctgtantccaagaatttgggaggtgaggcagcnaatcatggggtcagggagc

SEQ ID NO: 27217 - DNA, 510 bp, Homo sapiens
  misc_feature (1)...(510): n = a,t,c or g
gcctccatctagcaatgaaacacctgcagtctcggatagtaaagagaaaaagaatgctgcaaaaaagaaatgtttatanantttccaagangctttcatggaagcaaataaagttgtcatggccacgtcatcanccacgtcctctgtgtcctgcacagctaccacagtgcagtccagcaacagccagttcagagtgtcatccaagagacctccttcagtaggtgacgtgtttcatggnatcagcanggaggaccacagacactcggccccagccgccccgaggaatagccccacgggcttggcccccctcccagcgctctcgcctgctgcgctgtcacctgctgcgctctcacctgcctccagacctcaccttgcaaatcttgcaggccccatcattcccanagcagnanncacaactcctgggnttgtggncacacncaagagttctgtcctgaaccctaacccggcacagatgntccattacgnccctccantgtctggaantgacct

SEQ ID NO: 27218 - DNA, 504 bp, Homo sapiens
  misc_feature (1)...(504): n = a,t,c or g
gctggagtggtcaaatagtttgtggacctctagttaggagcagcaggactgttttatccattagtcactatacaccacacacttagaactgcaagcttctcatgggcccacaacaatgtttaaaatgtgagaaaaaaataaactggccacacatcaccagaaaactacaaaattacaactaatagatgtgaagctaaatatttacaaaatgtaaactaagtcaacggatccatatcaactcagatatggtatcatatcacattagattaaatgcaggatgtggatgcattttaatgtttgatggggcatggaagggagctcagatcaatagtgcttanagctgccaaggttctaaaaaggccctgggtaccaacctgaagccaaccattctgtggtaantctggtctcacagtgtcacaaanttcttacgcagctcnctccattcanntgactgccacataanttggnncatgggannaaacnnccncntngtgcntgtaacca

SEQ ID NO: 27219 - DNA, 508 bp, Homo sapiens
  misc_feature (1)...(508): n = a,t,c or g
gattatttattaagtttcttcagtcacagtccatctcacagaaagaaatcccccatgagaaacttttaggacatagcttttatgttaattacttaatttctgcactagccatccttgcctgccttctaattttctgcactagctatccttaccttccttctaattttctaacctgccaaggattctgctgcctcaaggtatttgtttctttctgcctggattgctctttcgcagatacttacatgtctcattctttttcacccaggtgaaataaacnnnnnnnnnnnnnnnnnnnnnnnnnnnnnnnnnnnnnnnnnnnnnnnnnnntgtgacatttgggtgctgaaaaacccgggacaggagggctccttcaagganacggggccccngcctttgcccccaacncgtgaggnggtccactnangcctncgggcctcaaaacaaccagccaagggnanatctnangatttnaaatcgggacccactgggaaanggactgtcaaaccgg

SEQ ID NO: 27220 - DNA, 506 bp, Homo sapiens
  misc_feature (1)...(506): n = a,t,c or g
ggagaaggcaaaagaaagaaccactcattgtctttgaggaagaagatgtccgtgagaacatcattacttatgatgatgaagggggtggggaagaagacacagaagcctttgatattgccaccctccanaatcctgatggtatcaatggatttatcccccgcaaagacatcaaacctgagtatcagtacatgcctagacctgggctccggccagcgcccaacagcgtggatgtcgatgacttcatcaacacgagaatacaggaggcagacaatgaccccacgggtcctccttatgactccattcaaatctacggttatgaaggcagggggctcactggccgggtccctgagctccctaaaatcggccaccacagattcaaacttgggcnangattnctacagacnnggggaacccngtttaaaaacnngcnnaattnttgggtccaaaacactttggtggcgattctaacaatacnntacaanttgcctaaaaacgtgtctgggttc

SEQ ID NO: 27221 - DNA, 499 bp, Homo sapiens
  misc_feature (1)...(499): n = a,t,c or g
gccaattgataatatgtctcttggtttatttgacagtgtcccacaagttccttgggctctgttcctttttcttcatcctttttcctttcngcttttcagactagataatttcatttgatccatctttaaattcactgattctgtctgcccaaatttgttgttggaacacttaactgtgcttttcaggtcaagcttcttctagaatttctagagaaattcttctctatttgggagaaactcattctcctggtttcctttggttctttgtccatcatttcctttagctctctgaacatattcatgacagttgatgtaaagtcttttctaggccgggcgtggtggtcacacctggaattccagcactttgagaggcaangncaggagttcgagacaacctgggcaaccnggggaaacccatctncacaaaaaaatccaaaattagccangngtggtaacttgggcctgnatcccangtaaccaggaggtgaggnangaaatc

SEQ ID NO: 27222 - DNA, 507 bp, Homo sapiens
  misc_feature (1)...(507): n = a,t,c or g
gggattgcttgaggtcaggagttgnnnnnnnnnnnnnnnnnnnnnnnnnnnnnnnnnnnnnnnnnnnnnnnnnnnnnnnnnnnnnnnnnnnnnnnnnnnnnnnnnnnnnnnnnnnnnnnnnnnnnnnnnnnnnnnnnnnnnnnnnnnnnnnnnnnnnnnnntgtccaannnnnnnnnnnnnnnnnnnnnnnnnnnnnnnnnnnnnnnnnnnnnnnnnnnnnnnnnnnnnnnnnnnnnnnnnnnnnnnnnntcagtaactaaaaactagaaactacccaaatactatcaggagtagaatatgtaaataaattatgacatgttcacaatgaaacattctgtgataatgtgagcaatctccagccacatacagaagtntagaagaatcnccaagnacaatttgngttaaaaccaaaanccagactaaagattacatacnccggggctccaaatttaaaattgccaaaaaagtcaatanaggttncctgtaaaaagggttggnnccaaaat

SEQ ID NO: 27223 - DNA, 498 bp, Homo sapiens
  misc_feature (1)...(498): n = a,t,c or g
gttgcctatagcagatattganaaagctttataaaattatacatgcantccacaaaatgtggtaagatcagaaatgagtcaggtgccatttgctctagtgctgtagttgtgaaagctgtggcctgcttcatcgagtatgagtagccagtattcctggggttgtcagaaaaagaggacagctgctcccttgacagttccagggtaagagctcgaaagtgctgaccatgctctaggatcctccccagggtcctggctcacagtcagagcatcactgagccgcaggtgtactatcaagtggccttgccatcagtaggtgacttcgcctatcananaanacaaaggtccngtgagcaaaaaggcaggtttcatttgtgctcgtggacaattttcncaattgcantcntggggtttacctcctannaaanncggtggcnaatttccnaaggttttaggggttcaatnnggggaaattaanttaccnaagggaaanccaaagta

SEQ ID NO: 27224 - DNA, 492 bp, Homo sapiens
  misc_feature (1)...(492): n = a,t,c or g
cctggccacacaaaggatctctcagggcccactaaagagagttctaaaggtanccccaaaatgcccaagtcaccaaagagtccccggagccctctggaggccactagaaaaagtatcaagccatcggacagccctcgtagcatctgcagtgacagcagcagcaaaggctcaccgtctgtggctgccagctccccaccagcaattcccaaagtgagaatcaaaaccattaagacatcatcaggggaaatcaaacggactgtcacaaggatcctgccagatcctgatgatccaagtaagtcccctgttgggtcacctctagggagcgccattgcagaggcccccancganatgccaggggatnaggtgcctgtggnagagcatttcctganggangnaaaaattnaaggnngccccangggggncnaggaaaggggacnaanncatnanaaaggncattganctnatcnccaagctgaatttcgggcncggggt

SEQ ID NO: 27225 - DNA, 489 bp, Homo sapiens
  misc_feature (1)...(489): n = a,t,c or g
ggagcttcaataccctgtaaagcaatttgttagctaatccttttctatcttttctaattaaggcaagtaagaccactgttaggtttctaacttgtcatattacagtgggtaaatagtcagctttttcccattaactaacaaaagctatctttttgagaaaatttcttgaaaacctgagattctttttaatancactattgaaataaaattcatgtttcacctacttgaagtgtacaactagtttttaactgaatagcatattcacagagttgtacaaccataaccacagcacttcattccttttctattgccaaataatatcccattgtacagatataccacattnnnnnnnnnnnnnnnnnnnnnnnnnnnnnnnnnnnatttatagngaagagggnaatttgggcacaggcacacagagggnanaanggcatgntaaaagggagggaaaacgggntngaggtacaacttnccanggatgccaagggc

SEQ ID NO: 27226 - DNA, 362 bp, Homo sapiens
  misc_feature (1)...(362): n = a,t,c or g
gtcnnnnnnnnnnnnnnnnnnnnnnnnnnnnnnnnnnnnnnnnnnnnnnnnnnnnnnnnnnnnnnnnnnnnnnnnnnnnnnnnnnnnnnnnnnnnnnnnnnnnnnnnnnnnnnnnnnnnnnnnnnnnnnnnnnnnnnnnnnnnnnnnnnnnnnnnnnnnnnnnnnnnnnnnnnnnnnnnnnnnnnnnnnnnnnnnnnnnnnnnnnnnnnnnnnnnnnnnnnnnnnnnnnnnnnnnnnnnnnnnnnnnnnnnnnnnnnnnnnnnnnnnnnnnnnnnnnnnnnnnnnnnnnnnnnnnnnnnnnnnncaagctgaggttcaaactgaagtttctttttctctaaatatcactttttttttttttt

SEQ ID NO: 27227 - DNA, 514 bp, Homo sapiens
  misc_feature (1)...(514): n = a,t,c or g
gannnnnnnnnnnnnnnnnnnnnnnnnnnnnnnnnnnnnnnnnnnnnnnnnnnnnnnnnnnnnnnnnnnnnnnnnnnnnnnnnnnnnnnnnnnnnnnnnnnnnnnnnnnnnnnnnnnnnnnnnnnnnnnnnnnnnnnnnnnnnnnnnnnnnnnnnnnnnnnnnnnnnnnnnnnnnnnnnnnnnnnnnnnnnnnnnnnnnnnnnnnnnnnnnnnnnnnnnntcggtgtctggatgcccagcctaaccaagtcagcttcccatctttggctgagacaaggagaaccctgctgggctangggacccanatagtgaccaggttctgcatgtgatttccctgtggaattccaaccaaggacagacagagatgggatcctgctctgttgttcaaggggngggttcaaantccnnggcccaaatngaccncccggcttgggnccccaaangcnctgggattanaggttgacccgctgtgccaaggcantcccagngatttngaagatgatttcncnatacg

SEQ ID NO: 27228 - DNA, 509 bp, Homo sapiens
  misc_feature (1)...(509): n = a,t,c or g
gagcttttganatgtgtgctactaaggatcccacatggtggattgagtgttttggttttaaataaaacaggagcggagttttaaataaaacaggagtggtaaggaagcttgttgtgacaaatggtatacctgcgccctgccctctaccttgcctcacaatctaacaaaagcctttggcttacgaatctcaaggaactgctcanaggagccgtttacagcacagaagcaaganaagagagaccatgtccggcccttggccagttgtacttcagtgcagacatgcactgtctgctctttctcagcttcttttctacagagagttaanaaaagatgcaattgatggtggcgaaaagtggacaggaaaccctccgttttcaaagtcttcttttggngcaaaaacnncctaagnctacccaacaataaatccccgggaatcnactttccnggaacccaattgggaancaaaacggttttgaaaacctaaatgcttcaacactttatatgggcag

SEQ ID NO: 27229 - DNA, 509 bp, Homo sapiens
  misc_feature (1)...(509): n = a,t,c or g
nnnnnnnnnnnnnnnnnnnnnnnnnnnnnnnnnnnnnnnnnnnnnnnnnnnnnnnnnnnnnnnnnnnnnnnnnnnnnnnnnnnnnnnnnnnnnnnnnnnnnnnnnnnnnnnnnnnnnnnnnnnnnnnnnnnnnnnnnnnnnnnnnnnnnnnnnnnnnnnnnnnnnnnnnnnnnnnnnnnnnnnnnnnnnnnnnnnnnnnnnnnnnnnnnnnnnnnntanatanatagatagatagatagatnnnnnnnnnnnnnnnnnnnnnnnnnnnnnnnnnnnnnnnnnnnnnnncannnnnnnnnnnnnnnnnnnnnnnnnnnnnnnnnnnnnnnnnnnnnnnnnnnnnnnnnnnnnnnnnnnnnnnnnnnnnnnnnnnnnnnnnnnnnnnnnnnnnnnnnnnnnnnnnnnnnnnnnnnnnnnnnnnnnnnnnncaaggaatgngggtgaaacctgtattccanctactggggaggntagggatganancccttgacctggaaacggnggttgat

SEQ ID NO: 27230 - DNA, 489 bp, Homo sapiens
  misc_feature (1)...(489): n = a,t,c or g
cgaagatatttaaaaagttttcttatgtatacttangattttacttggaaacagcaaatgtaaggtctagaancagaggggctttcancttctctgcaacacacaggaaagtagacaaagtttctagggcaggccccancctccagggtaagataggcatgtgccagcaaccttgcctacccgtcatgaccctgccatatnataggtactgagtcatgcttcaacaaggnttcccacacttcattgactggaccttctgttttgtcatcacaataatttatatttgtanataaaatttcttggtggggggtaanactgtactctancagtgactgaagaggtgccaantaagtttgccacctattgtgggtttantcttnattgttaagtaaatggcannnagaaacnnttaaaagnacnntttaaannaanggccncttaaggnaanangacannntaccgcancgtnngaccaannaagttanccaa

SEQ ID NO: 27231 - DNA, 587 bp, Homo sapiens
  misc_feature (1)...(587): n = a,t,c or g
ttttntngnncttnntaattnaaaaccactcagccnagggaatttggcnntcnaggccaanaattcggcacnaggcttactcttcactgaccatgggaaaattaaatgagggttgagtctggggtgatgagtatgtgaggtcgtaagtgtgggacatgttgaatttgaggtctgtgngaaacatttaatttgagttatgcagtagacagttgagtggagatgtggccttcanaagggagtttttgtctggganaaaataacaggaaacatttattganagaagtggtggtgaanaatgcagattctggagccanacggggtctgtttcctggngccatccacagtgcttctgtgacactggagaatttacttaacagcccttacactcagttttctcatctttanaaatgggaanaaacagtactgcttgtgggagttaacgtnagaattaaataccttcaagtttgttaaaataccaaattntnccaaacttanaantngngccaaaatttaccggttncnancnactaaacatcantttgtgccanggatggttaaancgngagtacccatttggnaagttacat

SEQ ID NO: 27232 - DNA, 490 bp, Homo sapiens
  misc_feature (1)...(490): n = a,t,c or g
gagggggattaaagtacantggtgtaaatgtgatctacaccatggtgggatttgacatanaccccaaanaatggataaaatccacctagaacataaagtatagagctcgacaatttatgcacaataaaatgttagaatatatatgtttgcatgggcatgtgtgtgtatttgggaatgtgcatganatgttcatanaactgggtaatcatgatcttgactagttttttagctgtccagttttggacattaaatttgaggtgcctgtagaanaanagagagnnnnnnnnnnnnnnnnnnnnnnnnnnnnnnnnnnnnnnnnnnnnnnnnnnnnnnnnnnnnnnnnnnnnnnnnnnnnnnnnnnnnnnnnnnnnnnnnnnnnnnnnnnnnnnnnnnnnnnnnnnnnnnnnnnnnnnnnnnnnnggnttggtggnaaaatgctgntcctgggtaatccggaggctaaggcggaanatcgcttgaacctggaggc

SEQ ID NO: 27233 - DNA, 496 bp, Homo sapiens
  misc_feature (1)...(496): n = a,t,c or g
ggaagaanaaaagtattcatgttttatgcagagctgtgctttctctctttagatttgaggaaaatgcaaatttattgactgaattattatctaataaacctgagccaattgaggaccgattttgatttagttttggggaagtgatacattaaaaagaatcttcatttgatttaaggagattcctaactttagaacttgctttagtttactaactgctggtctgcttaagaaatgttctgctactagaggtgggaaggagggggaaaagggcatgggctgnnnnnnnnnnnnnnnnnnnnnnnnnnnnnnnnnnnnnnnnnnnnnnnnnnnnnnnnnnnnnnnnnnnnnnnnnnnnnnnnnnnnnnnnnnnnnnnnnnnnnnnnnnnnnntgaatctaaaataaaagtttanattataaaaaagaccagaaatgttccgtgtgcaacanaangnccgaaccanagttagnaaccaantnnnccttacantggnttac

SEQ ID NO: 27234 - DNA, 500 bp, Homo sapiens
  misc_feature (1)...(500): n = a,t,c or g
ggacactgtataagaacagtttctttggcatttcatctgagggtcatccccggtccatagggagactagaatgcaagcagagagccacagacattgtgtcagaagatggaccctggggctgcccgagtgactgcattttgagggagaaatttcagaaagtagacacagaaaacaagccctaaaatttttgtataactttcactcaaatctttacctgaccctgaaatgtacatgtgcagggaagattccaaaaagcccatgtaagcaatagctggaaagctaaaagggctcaatagatacatttcagccaccaccacagggaatatagaacttggaggttgaatcccaccaacttagatgggctgagaaacatgtaggacttttcactggaacatgcagggccacagcttactgtggaagactatgacccaagggcntanggcttaccttncaaaaaggnaaaatttgaaaaangacctaccacagtgtgtaaacaatgc

SEQ ID NO: 27235 - DNA, 506 bp, Homo sapiens
  misc_feature (1)...(506): n = a,t,c or g
gtctgctgcaggcccttcttggtgagcttgtgaaggcagccctcacggatgaactcctgaaagacagagacagagtcccctttcagcgggctgagggcanctggcggatgcactagccgggctgagggtcaggaatagccttgtggccgcttgtgctcctctggctcctcccaatgagggtcctctagtggagcctcccaatggggctcctctaccctcagcagtgcccttggtcaccaggtcctgtcttggtgccaacaaattcagtcctcaaaccatctactgagcacctgctctgggctaggagccctggagccctgatacaaccaagaggtagagcccggagtattgttcttgctgaggagaagcttctggaaggttcagccacaaagatgtcatctgagatcagctttgaaacattggacaagagcaaggtcaanaatgggaangaggaaaggaggttcncctaantattcaaattagcaccaanacaggttcganaatgg

SEQ ID NO: 27236 - DNA, 497 bp, Homo sapiens
  misc_feature (1)...(497): n = a,t,c or g
ggcaagttcgaaccccgctcccgctccgcttcggttctcgctccttcggcccttgggcctccaaacaccagtccccggcagctcgttgcgcattgcgctctccccgccaccaggatgccggtaaccgagaaggatctagctgaggacgcgccttggaagaagatccagcagaacacgttcacacgctggtgcaacgagcacctcaagtgcgtgaacaaacgcatcggcaacctgcagaccgacctgagcgacgggctgcggctcatcgcgctgctcgaggtgctcagccagaagcgcatgtaccgcaagtaccatcagcggcccacctttcgccagatgcagctcgagaatgtgtccgtggcgctcgagttcctggaccgtgagagcatcaagctcgtgtccatcgatagcaaagccattgtgggttggaaactgnagcccaaccttggnncnggtgtgganctgnnctccactactccatctcatgcccgtgtggg

SEQ ID NO: 27237 - DNA, 508 bp, Homo sapiens
  misc_feature (1)...(508): n = a,t,c or g
nnnnnnnnnnnnnnnnnnnnnnnnnnnnnnnnnnnnnnnnnnnnnnnnnnnnnnnnnnnnnnnnnnnnnnnnnnnnnnnnnnnnnnnnnnnnnnnnnnnnnnnnncattaaaaaatgaagtaaagctcattcaagggtaatcttgaagacagtattaccctgataccaacaccagacaaagacatcacaagaacactgtacacttnnnnnnnnnnnnnnnnnnnnnnnnnnnnnnnnnnnnnnnnnnnnnnnnnnnnnnnnnnnnnnnnnnnnnnnnnnnnnnnnnnnnnnnnnnnnnnnnnnnnnnnnnnnnnnnnnnnnnnnnnnnnnnnnnnnnnnnnnnnnnnnnnnnnnnnnnnnnnnnnnnnnnnnnnnnnnnnnnnnnnnnnnnnnnnnnnnnnnnnnnnnnnnnnnnnnnnnnnnnnnncaattnagntanatcaaaacgctgnattccaaacctggggcaaaagancgggacccatttaaaaaaaattnttatatccgg

SEQ ID NO: 27238 - DNA, 106 bp, Homo sapiens
gcattaatttatttttatatatgttgtaagctcattgtaaattgttattattcttgtttaaattagaggttaataatgttttcttctctctctttttttttttttt

SEQ ID NO: 27239 - DNA, 494 bp, Homo sapiens
  misc_feature (1)...(494): n = a,t,c or g
gataaaaagttgagtgtcaacttttttagggaagccagatgtcagttttcaagtgtcttatggttattttcttatattttcttgccagaaccagttctgagtctgtaaatatacatttatatgtgtgtgtgtggtaggggaggtggaggatgatattacttatccattcatctatttttttccatagtacttgtcaccaattgacataatacatatttatnnnnnnnnnnnnnnnnnnnnnnnnnnnnnnnnnnnnnnnnnnnnnnnnnnnnnnnnnnnnnnnnnnnnnnnnnnnnnnnnnnnnnnnnnnnnnnnnnnnnnnnnnnnnnnnnnnnnnnnnnnnnnnnnnnnnnnnnnnnnnnnnnnnnnnnnnnnnnnnnnnnnnnnnnnnnnnnnnnnnnnnnnnnnnnnnnnnnnnnnnnnnnnnnnnnnnaaaccttgctgcaattgggcaaantcncncaaatgaacccaancctgggcnanaaaccaaa

SEQ ID NO: 27240 - DNA, 550 bp, Homo sapiens
  misc_feature (1)...(550): n = a,t,c or g
gggatgagatgcccaggaaaaatgagcagagtggccagacacagtggctcacgcctctaaccttagcactnnnnnnnnnnnnnnnnnnnnnnnnnnnnnnnnnnnnnnnnnnnnnnnnnnnnnnnnnnagacgacnnnnnnnnnnnnnnnnnnnnnnnnnnnnnnnnnnnnnnnnnnnnnnnnnnnnnnnnnnnnnnnnnnnnnnnnnnnnnnnnnnnnnnnnnnnnnnnnnnnnnnnnnnnnnnnnnnnnnnnnnnnnnnnnnnnnnnnnnnnnnnnnccatctctaaaaagaaaatgagcagagccatgagaggaggtggatgagggctgctgtcatgaagatgagagganaacctgnagagtcatcttgtgggaatcgacgggcgagtttaatanggcangcggctaatggaccaataagtaaatctgaggggatnatanaacaaggaattggtnggttcngngangaaggctttaggtaatnccnacttaactataaaatgggggttcngtcnactcanaangggcgttgggacanganagnttaa

SEQ ID NO: 27241 - DNA, 544 bp, Homo sapiens
  misc_feature (1)...(544): n = a,t,c or g
ggttaaatgctatgttcgttgtaaatgaagcaatttgcaaattatagcatggttagaaggaaataaatttttcttttttataatctanaatgttgtgtctctcaggatcatatttacatatctgggaaatgtggatgttagggaagaaaggtgatgaagtggggaagagggagagagaaagatcaatctaccagtttttcactaatgtccagacaaacaattttgcatgttatcctattagaaagacttaaaaaggtgcaagacctagagccctgttcttantctgaatttctctggggtatggaagtaataaaacatctctatttctgagggcagaatatattctgaagtccatttaatccgcatctccgtatcttangtactaagttttttttaagttgtcaanaaatttcaatantgcaggtttgaaaggaaagcattcatacacatgaanccttgccaatccatngaaatattggnggantgctgcngtcngntttcccgaataatctgaaaggcnatccttcaacccgtgtctgnccaa

SEQ ID NO: 27242 - DNA, 540 bp, Homo sapiens
  misc_feature (1)...(540): n = a,t,c or g
gaagagagcaaagagggaagcgtgggcatctgggacctccagagacttgagctggtggacggaggagaggagacatttgannnnnnnnnnnnnnnnnnnnnnnnnnnnnnnnnnnnnnnnnnnnnnnnnnnnnnnnnnnnnnnnnnnnnnnnnnnnnnnnnnnnnnnnnnnnnnnnnnnnnnnnnnnnnntcctagtcattctctacaacacagttcaaacatcgctgcctcaaggaaaccctgcctcaccacatcatcagccctcagcttccgtcccagccccggccaagtgatcttcctctctgttcccatgactctgggaaatcagctgactacccagaggccagcacactcttctccctttccagagagcttcattttatttgggtgtctaccctgacctcacatgactcaggataaattctgaatcatcaagccntcatcaaattcagttccctgcaactcctgggttaagaaaagacaaatgaccatcccngngaataaagggaaagggattactgaggttncangaagggtcc

SEQ ID NO: 27243 - DNA, 549 bp, Homo sapiens
  misc_feature (1)...(549): n = a,t,c or g
gttctgagacaagaaaaaagccaccaaaggaaaccaacagcttgctcctctcacactgggggaaccatatgagagacttatctatccctgactttaattttgacctgaggagagctcctcttaaggaaaacaaattaattcaatgactatactacttaatcattgacctttatttaataagagatttttccataggatatgctgagctgtctcacttacatcagttgtgtctcctgaggtgggtgacaggagaccacaaatattgcatagcacacaaatcgttaatagcagctgtataccaaaccattacctaaatatgtagagtacaattcattctcactaatgtcagagagcatgctataaaatggtgaatccggacagctgaagatactgaataataacctctattttgaacaatttacagtgttccaatcataattaaattgatacctgatgaataaagtgtgggnagtatcaaagcaganangtttcctganataaaggttttgtatncggtnaggggtgctgggaatgtcctcaaccctgttc

SEQ ID NO: 27244 - DNA, 550 bp, Homo sapiens
  misc_feature (1)...(550): n = a,t,c or g
gcaatactacttcgaaggtgtgccatgaaagatggtacccaggatctctaagtaattacatgacagcaattttgaataataatttcaactattcttatgggccaggacaacacctcacccatatctgaatagcctcactttgttatgtgaggattgagaagttggcatttaaatacatcctagtggacttcttgggtcatcttatcaccttgggaggcatataaatgaacctcaaccaatccagaggatatctcagtctttgtgaaactcctgatcatttttgtaaccttgcatgtgctttccaagagatagttcttgctcccttggactttcagattatgctgtctcacacagtgggttcttatctcatttgctctatccaaaggtatcttttattgaccctccgtttaagcattctcatctacagtgaagagtaaatgaattgaatttaatagtgggaagaancctnagatctccaaagncaagtagccctttagattanaccanatttaaaagggaaanacnngnacttgttaaancangannggaa

SEQ ID NO: 27245 - DNA, 548 bp, Homo sapiens
  misc_feature (1)...(548): n = a,t,c or g
gatgttgaatcaggtaacctccaaggcaccattcagttctacaagtcttactgcttttcctctcttaaataattcaattttcctgatgggtggtttagctagtcactaggccagctactgaagtatcctgattttaaagccataatcaataattgacagttcaacttaggaaagaattaaaggacaggctgaattttcacatgtatgggtataattgttgttttagactattgaacatacactggtggttctctctttatgcagaaaactacaatggcttcaacaggttcagcagcttagctttgtcatttatttgattctggcttccatggactgtggcggtgctccctttaagaaaatcccagnnnnnnnnnnnnnnnnnnnnnnnnnnnnnnnnnnnnnnnnnnnnnnnnnnnnnnnnnnnnnnnnnnnnnnnnnnnnnnnnnnnnnnnnnnnnnnnnnnnnnnnnnnnnngtcctacnaaaatncaacaattntccaggcttgtgggggngccgnttcccaataaccggaggtnanggagagaa

SEQ ID NO: 27246 - DNA, 533 bp, Homo sapiens
  misc_feature (1)...(533): n = a,t,c or g
gtgaatgactaaattattattatcttcctttttttcccttctgatataccaattttattaggtgatatctccgaaaaacccaattttgttaggtgatctcataaaaaaaaaaaagnggttgttcaaagtaaagttattttatttttatttatttannnnnnnnnnnnnnnnnnnnnnnnnnnnnnnnnnnnnnnnnnnnnnnnnnnnnnnnnnnnnnnnnnnnnnnnnnnnnnnnnnnnnnnnnnnnnnnnnnnnnnnnnnnnnnnnnnnnnnnnnnnnnnnnnnnnnnnnnnnnnnnnnnnnnnnnnnnnnnnnnnnnnnnnnnnnnnnnnnnnnnnnnnnnnnnnnnnnnnnnnnnnnnnnnnnnnnnnnnnnnnnnnnnggngatcccntgnnnnnnnnnnnnnnnnnnnnnnnnnnnnnnnnnnnccacnggncngggaaagtaantcattaaaaaggnncccttaaaatnncnnngnggnnatttaaanggtccccctaaaangccncctnaaggncttttaacccct

SEQ ID NO: 27247 - DNA, 422 bp, Homo sapiens
  misc_feature (1)...(422): n = a,t,c or g
ggggggctactcagagtagcagccatctaacccaatggcgccgggccgctcctggctgtaggggcaggaggccccatggggcagggcgccgcagccacccaccgtcttggcggctgcaatgctgcagttcttgagcaggctgaagctgaaaggactgacggcgtccttgggtgggaaaggcttcatggtggaaaggatcaaggccaggcagtctgccacatctttgttgggggcacaggccagtgctggggtgtgaccttcttcatccacagccagcactgtggccccatgactcagcagggcctgtaccacagaagctagaccattccgggcagcaatgtggagtggcatctgcagcgcactgttggtaacattgataangccaagtcttgggtttctgccaggatcatganggcacattt

SEQ ID NO: 27248 - DNA, 428 bp, Homo sapiens
  misc_feature (1)...(428): n = a,t,c or g
gctgggagcacagtggcatgatcatggctcactgggnnnnnnnnnnnnnnnnnnnnnnnnnnnnnnnnnnnnnnnnnnnnnnnnnnnnnnnnnnnnnnnnnnnnnnnnnnnnnnnnnnnnnnnnnnnnnnnnnnnnnnnnnnnnnnnnnnnnnnnnnnnnnnnnnnnnnnnnnnnnnnnnnnnnnnnnnnnnnnnnnnnnnnnnnnnnnnnnnnnnnnnnnnnnnnnnnnnnnnnnnnnnnnnnnnnnnnnnnnnnnnnnnnnnnnnnnnnnnnnnnnnnnnnnnnnnnnnnnnnnnnnnnnnnnnnnnnnnnnnnnnnnnnnnnnnnnnnnnnnnnnnnnnnnnnnnnnnnnnnnnnnnnnnnnnnnggaaanagaannnnggnaacgggggngnggganccngangnaanaangnntttttttttt

SEQ ID NO: 27249 - DNA, 504 bp, Homo sapiens
  misc_feature (1)...(504): n = a,t,c or g
ggtggctacaagttccaccagcattgttcctccaaggtccccacagtctgtgttgacatgantaccangggccaacagttctaccacagngtccaggatttgtccggaggctccagacagcatgaggctccctcgaaccgccccctgaatgagttgctaaccccccagggtcccagcccccgcacccagcactgtgacccggagcacttccccttccctgccccagccaatgcccccctacagcgcatccgctccacgtccactcccaacgtccatatggtcagcaccacggcccccatggactccaacctcatccagctcactggccagagtttcangcactgatgctgccggtatagaggagnagtgatggaaccccccgggggagccccagccagccagcgtgtctcngggaagaatcccaaaattcnagtcccagcagangannccaagcnggatccttggccnatgcnaggnncaaagtggatnngatntattgnggag

SEQ ID NO: 27250 - DNA, 497 bp, Homo sapiens
  misc_feature (1)...(497): n = a,t,c or g
gggcagcccacaagtccctggccggagcagagctgaagacgctcaaggactttgtgactgtcttggccaagctgttccctggacggccgccagtcaagaagctgttgganatgctgcaggagtggctggccagccttcccctggacaggatcccctacaacgccgtgcttgacctggtcaacaacaagatgcggatttctggaatattccttactaatcacataaagtgggttggatgtcaaggaagccgatctgagttgaggggttacccgtgttctctctggaaactgttccacactttgactgttgaagcctcgacccacccagatgcactggttggcacaggctttgaagacnacccccaggctgtgctgcanacaatgangaagtacgttcanaacttcctttggtgntaaggaatnggtgnaccactttggggaaatgnctaaagannccatggnccccgntgaaaacccanaccagncatcctctggtgt

SEQ ID NO: 27251 - DNA, 493 bp, Homo sapiens
  misc_feature (1)...(493): n = a,t,c or g
gagccttgggtctgccgtctcataggagtgtcatttgaggcttgtcagtatctctgagccccccttatctcagctgtaagcgctcancgggcagcagctctctcccgcctcttccttatggccactcgcactgactcnattcctggccgccccgtccctctgaccaccttgggctgtccctggcggcagctcctctcccctgctctgctggcggcggcttccttaggttgctanttcccgtgggcagacacacggctgctgggtgtgtcttgggtggactctggcaggctcanacangcatggtgggaggccctgccaagcttaggcccacggactctgttctttttggccaaaacantgttttgttaaaactccgtaagantgcacnaagngggacgcatcctctgnantctngcaaanggcccngcaancccctttnttcanatcagccnatccangttaccctcgtgttcccggcccctgtggtttgatt

SEQ ID NO: 27252 - DNA, 489 bp, Homo sapiens
  misc_feature (1)...(489): n = a,t,c or g
gcatcataaaggatttatctttaaaggactgacatcccaaaaacattgaaatgggattcaacttacagaaatagaatttgcttacaacattttgggggaacatataatgtctcggacctcccagaacagtgctaatttcaaatattctgccaggtcatatgatcnaagaattagaaaatatgaactgtggcctacccaaagattgcataagggccaccanaacagaatctantgactttctcacagaaaccattctagactgccatagctggaatgaactggtaccgttgagcatgggatcttggcctcttgactcctaagccactgcacttaccctgggtacactgtggattcctatgcctcagtgcctgctctccaaactctccctctccttcccgnatggcaatggntccaactnctgggtnaaaacctngtgggcccagnctacctgctgaancngaaaatnntgggnaanagcccacnccatgt

SEQ ID NO: 27253 - DNA, 492 bp, Homo sapiens
  misc_feature (1)...(492): n = a,t,c or g
gttgggagcgatgctgcccgctganaagctggcggacccagcgggagcaccgggaccggtgcanatggcgcctgggagcccgggactcctggaaaggtggctgggggcagctcggctgcgggccccacctggtcctcctcactttcctgtgtgccctgccctgcctggaggtggggtgaggtgagtcaggggccagccctctcctagcacccctgggtgaggaggatgtggagcccagccctgcaggtctggaggatgaggagaggggctgctgcagggcaggaaggagcttgccagctgggcagcctctggctgtgcttcctgccctgactcacctcgcccanctctgcacatagctgccaatgttgcaatctgggaaatcttaantcccaaanaaatgtnnggtnccaaggnggnanncccttttnaaattgnatncnancaaggccgtgggtcaagcttttannccnacaatttnggnaggccaaaagg

SEQ ID NO: 27254 - DNA, 488 bp, Homo sapiens
  misc_feature (1)...(488): n = a,t,c or g
ggaaatggtttttctcgctatggtaatatctaggtangaatgatttgatttgcatcatgtatcataataaaattacagtcgatgctctgtttacaaaatacctgaaagttatacagaacattcaaaagttaatgcanttagggattctgagtgtctaattaacctttctccattgcttttactcacagattttaattgctaaaaagcacagatttaaacntctgatattttaatttgttatggctctcaaantcagactcttattcttanttanantantgtatttaancattttagttttaaaatagntactgttttgtgtttactgattgttccatttacanttcgngtnnaagaaggcaaataanattttaaannttanaactcntnacanaantcctatttaancangnnttttaaaaaatattnncnggtncgggaggggcctncnaantttannntgaaaattcaancacaaaanncagttc

SEQ ID NO: 27255 - DNA, 490 bp, Homo sapiens
  misc_feature (1)...(490): n = a,t,c or g
gagggaggtcacaaggttggcttgggatttgaactggaagcttaatgtggtttgaggaaagcatcagatttgtccctggaagtgaagagaaatgaacccactatgttttggccttaaaattcttctgtgaaatttcaaaagtgtgaactttttattcttccaaagaattgtaatcctccccacactgaagtctaggggttgcgaatccctcctgagggagacgcttgaaggcatgcctggaagttgtcatgtttgtgccacgtttcagttcagttctgaagtgttattaaatgtgttcctcagcgacagtgtagcgtcatgttagaggagacgatctgacccaccagtttgtacatcacgtcctgcatgtcccacaccattttttcatgaccttgnatanactggnccngtgcnaaatggaaccttggtttgccccanantaaattaaataaccccanaaaaaaaaaaaaaggcctttatttggnggccg

SEQ ID NO: 27256 - DNA, 522 bp, Homo sapiens
  misc_feature (1)...(522): n = a,t,c or g
gtggaagagtagaggaaaaaaaaaagatgaccctgcaaaatganactttgcagtaattggctttctanaaatgttacatctaggaaaagggtcattgaccccnagttancttcataatagaaggtaataatgtgaaaaacctaagacatagatttcncaggagtgacaatcaanagttatagcacttccagggcanagagatcaagtaacaagaaattataaacaccaaatgcnctaagcatcttctcatactcaangcaatctgcatgaattatcnccatcccaaataatgtatgactaataccagtgtcataagatagtttcaataatttgcaattttcttctatacgcanaactttttcaaagtaangttaaactgaactttttcagcagaagccatttcaatgcacattcagccatttgaaaagcttccatggttaatgattatttacacataattcattttcaacaangcacaagttatantcaaaggaccctcgggtaaancccaaaggtccaaaa

SEQ ID NO: 27257 - DNA, 481 bp, Homo sapiens
  misc_feature (1)...(481): n = a,t,c or g
gaaaagcgaccaggcncggtggctcatgcctgtaatcccanagtggcaccaaaccagcatggtacctgggcccacccttgtgattttcatttccttgcccctgagctgtcagctggatgccagagagaatanctcctggatggccgtgtgggctcctgtgggggctccttccatgaagagaaacacctgaaaccgccctgttggcatgctgtgttttcttctatgcttcctgagtanatagatggccgctgattgtggccttggtaantgattagctcanaatgtgtaattagaagtcccacgtgggcactgcagtgcatccaaacaaaatacanaaataaaagtgtttcctggggttgatcnaacttcataactctcacttaaaatcctcnatttctaanattantgggaaanncnaaatttcaatggggnannnanatttnaatggnccttccngtctagnacaanccacctttttaag

SEQ ID NO: 27258 - DNA, 493 bp, Homo sapiens
  misc_feature (1)...(493): n = a,t,c or g
gagtgaaaattaacaatacaattagtnnnnnnnnnnnnnnnnnnnnnnnnnnnnnnnnnnnnnnnnnnnnnnnnnnnnnnnanattttttnnnnnnnnnnnnnnnnnnnnnnnnnnnnnnnnnnnnnnnnnnnnnnnnnnnnnnnnnnnnnnnnnnnnnnnnnnnnnnnnnnnnnnnnnnnnnnnnnnnnnnnnnnnnnnnnnnnnnnnnnnnnnnnnnnnnnnnnnnnnnnnnnnnnnnnnnnnnnnnnnnnnnnnnnnnnnnnnnnnnnnnnnnnnnnnnnnnnnnnnnnnnnnnnnnnnnngcaatacagtataataactatttgcataatttacattgtattagtgcaagtaatctagagatgattttaantatacnaaaggatatgganactttgtgtattaaggacttnngcaaccaggnaattttggnacccaaggggccttgggaaccaattccccaanntnccaagggacaacgtactgctttt

SEQ ID NO: 27259 - DNA, 469 bp, Homo sapiens
  misc_feature (1)...(469): n = a,t,c or g
gatctgtgtatatcatatcctcattctacaaatgtagaaannnnnnnnnnnnnnnnnnnnnnnnnnnnnnnnnnnnnnnnnnnnnnnnnnnnnnnnnnnnnnnnnnnnnnnnnnacaannnnnnnnnnnnnnnnnnnnnnnnnnnnnnnnnnnnnnnnnnnnnnnnnnnnnnnnnnnnnnnnnnnnnnnnnnnnnnnnnnnnnnnnnnnnnnnnnnnnnnnnnnnnnnnnnnnnnnnnnnnnnnnnnnnnnnnnnnnnnnnnnnnnnnnnnnnnnnnnnnnnnnnnnnnnnnnnnnnnnnnnnnnnnnnnnnnnnnnnnnnnnnnnnnnnnnnnnnnnnnnnnnnnnnnnnnnnnnnnnnnnnnnnnnnnnnnnnnnnnnnnnnnnnnnnnnnnnnnnncaatgancngaaantngaccnctggatccaacnngncaaaaaagggaaacncgtccaaaaaaaaaaaaaa

SEQ ID NO: 27260 - DNA, 514 bp, Homo sapiens
  misc_feature (1)...(514): n = a,t,c or g
aggactgaagagaccacagcaattggctcctccatctagagattttcttggcagtattccatgggatgttaagcaaaggaaaccaaaggaatcgtttcaaatggactcatggcttagaaatctttattcttagggcagtcagtagtattctaaagctttctgacaagataaaggaagtcaccaaaatttctttttttaaattgtatctaatcctcaacaacaaaccaaaacagaacaattaaacagccaaataaaacctcagggacaacatttttggtgtatttgagccctcccagcaagtttcaccttgggtttgtattttaaatgttttacaagaattgtccatgtgcttccctaggctgagctggcattggtctgctgacctgtttttgtgtttttcntttttttatacacaacatttattcaaactattgggagggatgaaagtggntaaaactccaaccctactttcanagtgcnntggtctgaaacnnaaanccccncngnccaaaaa

SEQ ID NO: 27261 - DNA, 506 bp, Homo sapiens
  misc_feature (1)...(506): n = a,t,c or g
caagtaaacgggcgtcccggagcctcgatggagcagcagctgtcgattcggcagaccgaagtcctcggcccacttctgcacctgccattactcagggtcaggttgcagaaggtggcgtcctanatgcctctgctaaaaaaacagtggtccctaaagcacagaaggaaacagtgaaggctgaagtgaaaaaggaagacgagccacctgagcaagctgagccagagcccacagaagcatggaaggtatgtcatcagtccaaatacctagctaactcactttctgatttagaggccttaactttttgaccaggaacgttttcaaagcaattgcttattctcatagactcaacanagttattcttcattcttctaaatgangatgtctcccatgaactataaaatatttcatagagttatgtcagtaagactgtagctanccaaagttaaaggggaccacnccttgncccactttantttaantnngtaatnattttttggangggtccc

SEQ ID NO: 27262 - DNA, 503 bp, Homo sapiens
  misc_feature (1)...(503): n = a,t,c or g
ggaagaactcaggacagaatttgaattgtgcctcaaccagttactactgtgtgactctgggctagttgtgaacctctctattcctcatttcccctcatctgtaaactgggggaaacactaataccaacattgctgggtggttgtgagcaaacaataaacaaataatagtgtaagcaaacaataaattttagcaattgtttataaggtatttctcttgtcaagtaagccaagttaatcatctaatggctcctataaaataaagcannnnnnnnnnnnnnnnnnnnnnnnnnnnnnnnnnnnnnnnnnnnnnnnnnnnnnnnnnnnnnnnnnnnnnnnnnnnnnnnnnnnnnnnnnnnnnnnnnnnnnnnnnnnnnnnnnnnnnnnnnnnnnnnnnnnnnnnnnnnnnnnnnnnnnnnnnnnnnnnnnnnnnngcaactattccggaaggtnaaggaagagaatccctgaacctgggaaggggggttcaattncccagancaacc

SEQ ID NO: 27263 - DNA, 518 bp, Homo sapiens
  misc_feature (1)...(518): n = a,t,c or g
ggtccccatctctacnnnnnnnnnnnnnnnnnnnnnnnnnnnnnnnnnnnnnnnnnnnnnnnnnnnnnnnnnnnnnnnnnnnnnnnnnnnnnnnnnnnnnnnnnnnnnnnnnnnnnnnnnnnnnnnnnnnnnnnnnnnnngccaccgcgcccggccgtcaatatatctccttatgaaatattcagtgatggaaaacagttctgagactatattgcaacatgggaaaaagttaaagattttgttgtaaagaaagaaaaaatgctttacccattctaggtactaaccgttcccctcagtaaacttcctatttcctanagtgatgtctttgttctggtccttttatctggaatacactgatctcctccctgcttaagtgtcactgcagttctgtggctctctctgaaagtctcctgtgtgccactgtttcgtacataacatccatcccaagtggtaacaatgcatcngaagacttncgctgctanngtccctgcaaaagggggntnaaaccccccctttgg

SEQ ID NO: 27264 - DNA, 517 bp, Homo sapiens
  misc_feature (1)...(517): n = a,t,c or g
gagacattaccaaatgcccgctgggggccaaaaatcatatccagttgagagccactgttattgaaagatagcttatcttcacagctgcatgtaatttgtctgacaatttactaacctatttctagtttttacatgactctagagcagtacatgaccagaaaatgcgtaaaatcaagaaatatatcatttagtcatccccccttcacaatcccccttcctcacagtgaggacaaaatgtaaatttctaaaaattcaaatatattttacatgttcatagctttaaaaaggtaaaatagggggtnnnnnnnnnnnnnnnnnnnnnnnnnnnnnnnnnnnnnnnnnnnnnnnnnnnnnnnnnnnnnnnnnnnnnnnnnnnnnnnnnnnnnnnnnnnnnnnnnnnnnnnnnnnnnnnnnnnnnnnnnnnnnnnnnnnnnnnnnnnnnnnggtggtgcacgcctgtatccagctactccggaaactgagngggaaaattgctnnaacccagaggggggggttt

SEQ ID NO: 27265 - DNA, 322 bp, Homo sapiens
gaactggaagaatattaagccacaatccagagacccagcaagtagatatagaaattctttcatccttacctgccttgagagaacctgggaaatttgatttagtttatcacaatgaaaatggagccgaggtagtggagtacgctgtgacacaggagagcaagatcactgtattttggaaagagttgattgacccaagactgattattgaatctccaagtaacacatcaagtacagaacctgcctgagtatgacctctccaccttatagtttatgaatgtcttgtttgtgaaagtgactataacccaaactttttttttttttt

SEQ ID NO: 27266 - DNA, 518 bp, Homo sapiens
  misc_feature (1)...(518): n = a,t,c or g
gggcatatagaaaatattcaatacatttcaggtttttttgtttgtttgttttgttattaccattatgactttgtttaatcagcaagcattaagtattctcacgggtcagggatgctggtgggaatgaagagctgaatacaagtcatgctgctctccaagagtatgcagtctggtaggaaagacagacttataaacagatgatcttagtataatgtaacgggtaccacagtggaaacgtgtcaagaatgcagacatgagggtagtaattaactgccttgagaagtcaggcaagcaggcttggagaagagctgccattagagctagatcttaggacgagttggaatcctcagggaaggaatgggcagaggcattctaggctgagagaatagcatttgcaaaggcatggagggcatgagaccaaatggaacctggaaaattgtaagtccttttanatgctggagctttggctgggaactggggaatggaaggaaaaagggcccgnnncccnggaaggaatg

SEQ ID NO: 27267 - DNA, 514 bp, Homo sapiens
  misc_feature (1)...(514): n = a,t,c or g
gctcgaatagtttttaaagttaaaatagccacttaaataggattgttgaggctatccgtatggccacaattatgactgaggctgttctaagagggcagtgaacatgaagtttttatttctcaagaggctagttgtgtgtgtgcatttttttggtaaagaatcctgcctgtgaacattttttaatgaaaggtataggtagaactagaatgagttgtccaaatcctagaatatgtggctactaaggcatcccttgaattatgtcttttcatttgaaacataagagggcagctttgatgtgtgtgcaaggcggtgcttcctgacaacgtcgngactgggananangcacttactacctcnanaggtgatcaggcacaacnataaaaggcccgagaagggcttganatgtccanatgtgacagctccctccccatggntgctgcaagcggctccgggggttngggnccanngcaccctcnaaggccngggnnccangggncanccngnccaaaaaccc

SEQ ID NO: 27268 - DNA, 480 bp, Homo sapiens
  misc_feature (1)...(480): n = a,t,c or g
gactgtggggaagaacagtatgctagtaacaggagtaaaccataaaagaaaccactatagaaagaacttaagaaaatatgaaaggttcaattcactccttttttaaaatcatgactcggaagcgtaacattttatttagttgtatattgtgaccatttaaaaaaaaagtgagagagagagagaagaacaaaggaataaagagaaaaagggaccaaacaggtgaagttttgacatcaggaaacagacaaatgaaaaaaaaaaaagggaaataaancaaaataagatnttttaccaganacaaanggancaggaaaantttcacttattaccacccncaggggaaaccccaggccaattcacctaaacncggncccccnaccnccgtccaaaggttgncaaaaaacccccaaggggcaaacccttaacnaaannaaccggcccnacctttattnaaaacccngaaccatcccttccaattcg

SEQ ID NO: 27269 - DNA, 522 bp, Homo sapiens
  misc_feature (1)...(522): n = a,t,c or g
gacttgaaagaagtcgcagaagaatacagtatgattacatttatanaaggctcaaagcaggcaaaactaactcagaatgtttgttatcactgtcaggaggagaggagagagttgtttccacctgtgcgtaggcttactgggagattctgaggtactgttaannnnnnnnnnnnnnnnnnnnnnnnnnnnnnnnnnnnnnnnnnnnnnnnnnnnnnnnnnnnnnnnnnnnnnnnnnnnnnnnnnnnnnnnnnnnnnnnnnnnnnnnnnnnnnnnnnnnnnnnnnnnnnnnnnnnnnnnnnnnnntataatgcctggctaattgtatttttttttttttccncancctanantccaaaggnacnnnnnnnnnnnnnnnnnnnnnnnnnnnnnnnnnnnnnnnnnnnnnnnnnnnnnnnnnnnnnnnnnnnnnnnnnnnnnnnnnnnnnnnnnnnnnnnnnnnnnnnnnnnnnnngattgnaagtgttanccanngggtctggcaanaaataaagttaatntttt

SEQ ID NO: 27270 - DNA, 519 bp, Homo sapiens
  misc_feature (1)...(519): n = a,t,c or g
ggtcttttcancgctgaggactggcgctgaggaggcggcggtggctcccggggcgtttgagcgggctcacccgagcccgcgggccaacgcggatccaggcccgactggcgggaccgccccggattccccgcgggccttcctanccgccatggaggacggcgtctatgaacccccagacctgactccggaggagcggatggagctgganaacatccggcggcggaagcaggagctgctggngganattcagcgcctgcgggaggagctcagtgaatccatgancnantaagaccttgcaacggaaccggaanatggcaatgggcangaagaanttcaacatggaccccaagaaggggatccagttcttggtgganaatgaactgctgcanaacacacccgacgagatcgcccgcttcctgtacaaaggccaagggcngacaanacancatcggngaataccnggnggaaanggaannctnnnnccggnngtgctccatcctttnntgnacncactnattt

SEQ ID NO: 27271 - DNA, 518 bp, Homo sapiens
  misc_feature (1)...(518): n = a,t,c or g
gtttgaggaacacaaacttgtttttaatattaaccaagcaaataatttaaggtaacacttgtggaaaaaatcacactcctataagccaaaaatggctttgatgattagctactatcctgggtgattcatgcccattttctcctctgttaggttgaataattgcattgattagctctgaattaactgcattcttgatcacttatgcngacaggtgctggtacttaaatttcagattttaacttttgagtcatgctactcgaattacatttgaatcanattatttgaagtatatttaggtgcaattatnaaaactaaggattatggcttcntanaaggcagcatgaaattgacaaatttanaaacnaancagctaanaagacttccactctcactaacccatattttcnttggntgttctagatgnctgagaanactgttagagcaaaaagctccngttccngcctcagatgangccancccgaaannnaaaaaccttcccctaancccccgganntttg

SEQ ID NO: 27272 - DNA, 520 bp, Homo sapiens
  misc_feature (1)...(520): n = a,t,c or g
gatgttaacattcattttcaaaganaagatctcagggaanagttttgatggcttggganaagtaaaggaaccttgggcagagaccatatctgggcctaaggcagttgtagtccgagctgaccctgtgtgactanaaatccaaaacnattatgaagggaanttgaaccnnaaaaaaaaatcctnnanggaaattntnannaccctcccaagccgaacctacaccaaacctaaaccncttgtatttncaaacncnaatacngncatgannatataantganaganttaggnnacttgnatganaaggtggaacctgggnattggaattgnaaccagaatnccnacngggctgaaaatttacaggaaaaccangaccttaagttnggttctnccccaaaattgccaaacggggncacttaacctccaanntcngnccngaantgttaaccccaaaaaaaaggacccttngggttaaanntgttntccgaggggtaanggncnccaannnnggggaatcnccgg

SEQ ID NO: 27273 - DNA, 531 bp, Homo sapiens
  misc_feature (1)...(531): n = a,t,c or g
ggaggctgaaggccagctttgctccaatggaggacaaactcaaccaggcacacctcgaggtccagcagctgaaggcctcagtgaagaactatgaggggatgattgacaactataatgagtcaggtgatgaataccanattggaggctgatgaantatctgcccagctagaacgctgtgacaaagagaacaagatccttaaagatgagatgaacaaanagattgaggcggcacnaaggcagttccagtctcagctggctgacctgcagcagctccctgacatcctgaagatcacggnggcaaanctggctgagtgccaagaccaactgcagggctatgagcggaagaacatcgacctcacaagncatcatatcagacctgcgcanccggatcnaacaccatggggacaaagctggagatggnanaganaaacatcaggcttcccagaaggnaaaaaacagctgagtcnaaagtggatnaactgggnaaagaanctgnaggcgaccaatttccagattncnngttcctacagg

SEQ ID NO: 27274 - DNA, 528 bp, Homo sapiens
  misc_feature (1)...(528): n = a,t,c or g
gnnnnnnnnnnnnnnnnnnnnnnnnnnnnnnnnnnnnnnnnnnnnnnnnnnnnnnnnnnnnnnnnnnnnnnnnnnnnnnnnnnnnnnnnnccagannaaanagangacactaaactaatnacatagctangtccacaggactcnaanntannattaggangaacccaantgcccanaatttgctggtgttacaagtggcaggatgctatacaacaaaccctttcagccntaagaggtgcttataaagtatctctctatcaccatgtttcngtatttggttttaatactaaccttattttcatggaaaccaantatcttntgcaaatccccaaaactnttaancacatacgtagggagnccgctgctctgtnttaggtgatnccaaaggggtcncnacacctctaactgatcancatcccaggtgncnacacnggcanttcgggcccanggcngtcgtcaattcattcnctttaccaancntgnaacccnctanacactaantnccntnaggaggggncatntncttct

SEQ ID NO: 27275 - DNA, 524 bp, Homo sapiens
  misc_feature (1)...(524): n = a,t,c or g
nnnnnnnnnnnnnnnnnnnnnnnnnnnnnnnnnnnnnnnnnnnnnnnnnnnnnnnnnnnnnnnnnnnnnnnnnnnnnnnnnnnnnnnnnnnnnnnnnnnnnnnnnnnnnnnnnnnnnnnnnnnnnnnnnnnnnnnnnnnnnnnnnnnnnnnnnnnnnnnnnnnnnnnnnnnnnnnnnnnnnnnnnnnnnnnnnnnnnnnnnnnnnnnnnnnnnnnnnnnnnnnnnnnnnnnnnnnnnnnnnnnnnnnnnnnnnnnnnnnnnnnnnnnnnnnnnnnnnnnnnnnnnnnnnnnnnnnnnnnnnnnnnnnnnnnnnnnnnnnnnnnnnnnnnnnnnnnnnnnnnnnnnnnnnnnnnnnnnnnnnnnnnnnnnnnnnnnnnnnnnnnnnnnnnnnnnnnnnnnnnnnnnnnnnnnnnnnnnnnnnnnnnnnnnngtgataaagcangacctgtctttaaaaaaaaaacangnaangtctttaattagnggcgcaantttatnccctttngggagggntaattttcctt

SEQ ID NO: 27276 - DNA, 574 bp, Homo sapiens
  misc_feature (1)...(574): n = a,t,c or g
acgagacaggatgtgcatctgtcacttaccttgtcgaccagtgaaaccaaacattattggagaacagataaccantaaaatgggagcccattatcattgtatcatttgttcancaacaatcaccagaagaactgatatgctaggacatgttaggcgccacatgaataaaggagagactaaatctagttatattgcagcttccactgctaaaccacctaaggaaattttgaaagaggcagncacggatgtacaagtttgtcccaactattctatacctcanaaaacagattcctattttaaccccaaaatgaanctaaatcggcagctaatattctgtacattggctgctttggctgaggaacgaaaacctttggaatgtctanatgcttttggagccactgggataangggattacaagtgggcaaaacatcctggaaatgcactcaaagttcatcaatgaccttgaatgaaaatccgtgaactgatcacggaaactncattnacanntnanagngnngggggcantnnnnnanngnnacngcgntgtnnctgganaanggggnaaanctggcg

SEQ ID NO: 27277 - DNA, 570 bp, Homo sapiens
  misc_feature (1)...(570): n = a,t,c or g
acgaggnnnnnnnnnnnnnnnnnnnnnnnnnnnnnnnnnnnnnnnnnnnnnnnnnnnnnnnnnnnnnnnnnnnnnnnnnnnnntaggctaaaataaattttattaagaaatttttttcttcaataatcttagcttattgtaacttttagtttataaactnnnnnnnnnnnnnnnnnnnnnnnnnnnnnnnnnnnnnnnnnnnnnnnngtagttctacgttgtttaaaacnnnnnnnnnnnnnnnnnnnnnnnnnnnnnnnnnnnnnnnnnnnnnnnnnnnnnnnnnnnnnnnnnnnnnnnnnnnnnnnnnnnnnnnnnnnnnnnnnnnnnnnnnnnnnnnnnnnnnnnnnnnnnnnnnnnnnnnnnnnnnnnnnnnnnnnnnnnnnnnnnnnnnnnnnnnnnnnnnnnnnnnnnnnnnnnnnnnnnnnnnnnnnnaanangagtagnacattggaaaaatttggtanggagtaaagnanngggcttgggggnaantcngnaanccaagggttaaggaagctgaggngggaggatgctnnaggctggggtttgaataacccagggaaaata

SEQ ID NO: 27278 - DNA, 576 bp, Homo sapiens
  misc_feature (1)...(576): n = a,t,c or g
gnnnnnnnnnnnnnnnnnnnnnnnnnnnnnnnnnnnnnnnnnnnnnnnnnnnnnnnnnnnnnnnnnnnnnnnnnnnnnnnnnnnnnnnnnnnnnnnnnnnnnnnnnnnnnnnnnnnnnnnnnnnnnnnnnnnnnnnnnnnnnnnnnnnnnnnnnnnnnnnnnnnnnnnnnnnnnnnnnnnnnnnnnnnnnnnnntatcgtctaactctcatcatgatttatcttggctttctaatcttatccagcattcaacaaatattgagcacctgctttttgtctggcttcatgaaacaaagatccctattttcagggactgtatgttttaggagtgaaganaaaaaagcgaatcacctagtaagacantaagtctgtgtgacacaagggccanaatgccctgggaacaagcacngcaggtttagaaaacngatggggggtgttganccagggaacgttagccggtncanaantnntngccaaggngananatnacaagtngctgnaangnngnaaggantccgtngtactggnantncttccggcagagggnncgcccccaaagncgtgtggcagnanaaca

SEQ ID NO: 27279 - DNA, 527 bp, Homo sapiens
  misc_feature (1)...(527): n = a,t,c or g
gtccacatccactttcaaggctacggggaaccaacctcccccactantgggaacttacaatacacttctctccaggactgacagctgctcctcagcccaggcccagtatgataccccgaaagctgggaanccaggtctacctgccccagacgaattggtgtaccaggtgccacanagcacacaagaagtatcaggagcaggaagggatggggaatgtgatgtttttaaagaaatcctttgaagatgatgctgctttttacaaagcatcgttttaaagcacatggccttttttttttnaattannacnggnagnaatatntanaangtattacataactgncacngaantggttggggaaaatgtggtgactgaggtacaggaaaccacnanccttggcatcttgctttaaggngttatggtgggananttactgnncncctgttaaattnaaatggcccgtntgnaaaaancggnnnaaacnntttttannngggaaaaagccccccntatngncctnccnggaatt

SEQ ID NO: 27280 - DNA, 519 bp, Homo sapiens
  misc_feature (1)...(519): n = a,t,c or g
gggtctgtggctgctcacctggagggaacctgtccaatgtcttcantctggccatgaagggggacatgaacctcagcattgtgaggaccacctgctccaccttctgtgcccttggcatgatgcctctcctcctgtacatctactccagggggatctatgatggggacctgaaggacaaggtgccctataaaggcatcgtgatatcactggtcctggttctcattccttgcaccatagggatcgtcctcaaatccaaacggccacaatacatgcgctatgtcatcaagggagggatgatcatcattctcttgtgcagtgtggccgtcacagttctctctgccatcaatgtggggaanagcatcatgtttgccatgacaccactcttgattgccacctcctccctgatgccttttattggctttctgctgggttatgttctctctgntctcttctgcctcaantnggacggngaaaacgcantgtcancatggggaatgggtccaaaagntcaancccgtc

SEQ ID NO: 27281 - DNA, 518 bp, Homo sapiens
  misc_feature (1)...(518): n = a,t,c or g
gcatgaaagcctacccacacgtgtcttcctggaggatatttagtcaaaggctgaggaattaagggtcgatttttataatattgaaacaaaccnggttcngtttcggagtacagtgcactttanagtaatttttaacaaagggcatnanacctgagtgtcttcaggcatgctgttgtagctcanaagtcctcaaataccccagaattccaaattttccctcccctgtttcggaggatacnttggtanaaagtttcagaaccataatgttgcccatttgcagtcattcattttcagggaaatgggaaangtcactgcctcatactcatggaccttgtancacgggaagggngttanaatggaggaanctgtttcagatgctgttctcatnttcatggnttgaggttatatgctttattaantcangcgttgaatacctattttcntaaccnggnggatcntnngnaacaaaagagagggggnnggtgnanaaaggnaagcaaangttaaattgtgggcct

SEQ ID NO: 27282 - DNA, 525 bp, Homo sapiens
  misc_feature (1)...(525): n = a,t,c or g
gtcatttctcacttgaattactgcaataattacttctgctattgctgtccctanaagtcagttctccactcagcagagtgagctttcaaanatacatctcanatcatgttgtatctctgttcaaagccttctaatgctgcttctcatttttccccgagtaaaacctggaggacttgtactggcctgcaaggccgttgggatctggtccccagccagctctctgatgtcttctacccattctgtgcatgcacggtttgccccagccacactggcctccttgaacccatcccagatcctctgcactanctttttctgaggggacccattttcacaagctttttcccccacttcatttagatctctgctcaaatgtaaccttatcanaaactttcccagaccaccttatataaaatagnaatcccacatatacagtaatccctgttctccttaactgctttatttccccanangaactnaccngcaaaataaggtttcccttaaaatttaacnccaacctggnccccg

SEQ ID NO: 27283 - DNA, 484 bp, Homo sapiens
  misc_feature (1)...(484): n = a,t,c or g
ggtcngcgaactcaaagacgatgacttcnaaaggatctcagagctgggcgcgggcaacggcggggtggtcaccaaagtccagcacagaccctcgggcctcatcatggccaggaagctgatccaccttgagatcaagccggccatccggaaccanatcatccgcgagctgcaggtcctgcacgaatgcaactcgccgtacatcntgggcttctacggggccttctacagtgacggggagatcagcatttgcatggaacacatggacggcggctccctggaccaggtgctgaaagaggccaagaggattcccgacgagatcctggggaaagtcagcatcgcggttctccggggcttnggcgtacctccnagagaancaccagatcatgcaccganatgtgaaagccctccaancatcctcngtgaactctananggganaatcaanctgtgtgacttcggggtganccgcaanctcatccactcca

SEQ ID NO: 27284 - DNA, 517 bp, Homo sapiens
  misc_feature (1)...(517): n = a,t,c or g
gggtaagtcacttaatgtcnctgtgtcttgttagagaagctactaatccttagagctaacagaactaactaattagtgtagaacacttggngggatataagaaattcagatgtanagtgtaatgtcccagtcctcccggcattgatgctcgcacagtgtccctggtanagccgcgggcctggctgcatcaggagggatgggtcttggaggcggtggcataattgagacacctgttctgaagccccagggctgccggccacacaccctgccctgcttagccagctgtaggccacgtggggacaacaaaaagggaactatccaggggccatctgccttgctaccccggcaccttgaggcaggggcaaccagggcaggggaccatgggctcagagcccgtcggngccacaaggangtgctgacatngcctgaagggctgggacctccccctgggantgcctgggcntccananaccgggggttgccangtcaggggacccgnttttngaagccccnggtt

SEQ ID NO: 27285 - DNA, 441 bp, Homo sapiens
  misc_feature (1)...(441): n = a,t,c or g
ggtaatctgtgacaataacatataaagagggaaagacagatttataggagcatagtatatactattggatctaagctggtattattcaaactnggttgttacaaatttaannnnnnnnnnnnnnnnnnnnnnnnnnnnnnnnnnnnnnnnnnnnnnnnnnnnnnnnnnnnnnnnnnnnnnnnnnnnnnnnnnnnnnnnnnnnnnnnnnnnnnnnnnnnnnnnnnnnnnnnnnnnnnnnnnnnnnnnnnnnnnnnnnnnnnnnnnnnnnnnnnnnnnnnnaaattaacactcttaaatacaaatgagctaacaaagaattacaagagaaattagataataccttaagannnnnnnnnnnnnnnnnnnnnnnnnnnnnnnnnnnnnnnnnnnnnnnncctgggaatgggcgtccttttaaaantcctganngggngnaaaacg

SEQ ID NO: 27286 - DNA, 515 bp, Homo sapiens
  misc_feature (1)...(515): n = a,t,c or g
gatcccttgagagattctcagtgggaaaggcgtaggaccagtctttcttcctcctttccctctagccttctcttaaaaaggaagaagaganggtcattcttcttgagctacttgctgccaagtgtcattctcccagggaatccaggctgtttcagccagacttcccttttcctggctttaaggttaccaagccaagtggaagtatacaaggcccaaaggtaaagttcctgttccanatggggcagagtagccggcgactgctagagggcagcagagggccaggagcangtctagaactgcttaatggccagatggcaaccagactactgccagagcanaagacgtcagaggtccctcattgttgcggggaaaaagaataggatggccctaaccangagagacaagcacatccangaaatgttaacataacatggnggngacacatcacagagcaagcaactggggttgnanacantgcaacatatcaagggtagnaagggcaacgtttttttaaa

SEQ ID NO: 27287 - DNA, 512 bp, Homo sapiens
  misc_feature (1)...(512): n = a,t,c or g
gtaaatttaataaatgtacaacttctctgaagaaaattacaaatcataaataataaaaatggggaaacagttgatagttaacccagtngtttncgacttcatttataaattgaaagcaattcaaatcaaaattacaggcttttttaaaaaaacttgatacaatgtctaaatcatatctaaaatgctgattataagagcatagcaaagacatttcagcaaaaaataatgaggggttcttacaactgtaaaattaaaatctgtataaagttacaataangaggacaatnaagaggtattggtagatctgtggaatggaattgcaaggtcaggaacataaccaagcacccacaaataagtaaaggtganacttcacattcgtgggttaagaataaaccattcctgggctggaacagttagtaactatttggaanaaattatanctatantcagtacaacanaantagntnacatttattanggngcttntgnnaaaaaancntaaaagantgggg

SEQ ID NO: 27288 - DNA, 509 bp, Homo sapiens
  misc_feature (1)...(509): n = a,t,c or g
ggggtaagggaatggccantcccggggtcaaggagtcagtaggaaggccctcagcggaaccctggataaagaagggtggccctgtgatgaccanagggcgcagcccagggaagagtggggggcaccagggcacaggcctgcaggcaggatgggggccagacagtgggtgagaactggctggcagcaccctccctgaaccaccccaacatacccctccccgagtgcttcattcactccctggctgcattgtctgtctgtcctcaggactgagttctacttggacattggggtctgtgtctagcacagagcagacctcactgagagctagtacagctgttgattgctcctgtgggtggtggggagttcaacaatctctgggccactanatgganatctgganacaaacanggccctggggcctctggangaagaacctgcanggctgttncanaaggaatttctattcactcatgantntcatacaaaatnctgttnnnaaanccactggg

SEQ ID NO: 27289 - DNA, 507 bp, Homo sapiens
  misc_feature (1)...(507): n = a,t,c or g
gggaaggtcnaacaggaaggttatctgcaggagtcttcaaaagccagccagccagcagtggccacaagcttccagaagaacagtcatttgatgggttttgctcaggctccgcctacagctcaactccctgccactggccagcccactgttaacaacgactattcctattaccacatttctgaagcacaaaatgtctccagtcatgttccataccctgtagcgttacatgtaaatatagtcaatgtccctcagccagctgccgcagccattcagagacactataatgatgaagaccctgagaaggaaaagcgaataaaggaattagaattgctcctaatgtcaaccgacaatgagctaaaaggacagcagacacagaaccacacatgcagctaccccgggtggcacaacaccaacattgcgancanaacagnacccantgggaaaattnaactgttcccgntnggggaaanacaatccantcatctctgcnaacggtcctgggtccct

SEQ ID NO: 27290 - DNA, 501 bp, Homo sapiens
  misc_feature (1)...(501): n = a,t,c or g
gaaaaaattagtatttttgtgggaaaaaatgagaatagaaaataaataattgaatcttatatgtattatttcatttctgtaccacaccaatttttgagagtctagctattatattttttaaatgatacccttataaacatgataagattaaagatcaaagcttagaggtggctcaacaattgctgtgaacagggaggaaggcaggacatattcnnnnnnnnnnnnnnnnnnnnnnnnnnnnnnnnnnnnnnnnnnnnnnnnnnnnnnnnnnnnnnnnnnnnnnnnnnnnnnnnnnnnnnnnnnnnnnnnnnnnnnnnnnnnnnnnnnnnnnnnnnnagccagaacatactcttaaggctacatattanggtacaaggaatcttttctangtcantanntactgatcncngggaatccaaagntgcttagtnncaanaaancttccgncaaaatccggggnnccgggttnattccaacccccgnnngttngtggnanaaaac

SEQ ID NO: 27291 - DNA, 532 bp, Homo sapiens
  misc_feature (1)...(532): n = a,t,c or g
gagcaaattctgtgtctttttgtggtcaccanctataatcagcaggatttgcactgaattccacaaactcatgtggtatgaattaagcagggggnctaattgaagaancttactaggtcatcaagagaggtcatgggtcccttgatccccctgctcancaaacacccccacccccacagaaccatcatgacaggattagctcctgcttctggacacagtgagttttcatttagtaatatgacactttccccttgcgtcttgctcttcttatacggtaaagcttgnngcaaaannttgntggttgggtgcagatatactgcttgggcaanangtggnttgggcttggctgttggctgtttgtcaaaactggctgagaaangccaagctgtccagnatcaggggaccatncngcctgtntgaatnttntggncggaaaccactngcccntgggaagtnggntttcaggaagttccncnntntnncaatnnccagggnanccctnancccnncctgnttnagggnctgggtaaaa

SEQ ID NO: 27292 - DNA, 522 bp, Homo sapiens
  misc_feature (1)...(522): n = a,t,c or g
ggtgactttcttttttttttggaaanaaatttttgcncttgttncccaaactggaaattgccccattgnacnccancctgggtgagggnggtgaaaccctgtcncaacaacaacaacaaanccattggantattttaactaaagtacctaaataaggaaatttgaggtgaaagggtggtanaatggtataccaaaggaaaaagtaaaaagatttgggttaaatattaaccagantcagcaagaaaagaggggatttaagangagacatctaaagaggaggcttagcattatgaaaagtgtccgganatagcttgcttgtgtttatcagggaccactgaaaaacntgactgccatcactggctaaaatatattggcaaaggccanancatgaggaacaantnccaatngagatgactacacagggccgaaagtgtttggantcncccccaaaganttntccanagctctcgttacccagaccacaatnaaaatgttnctgacgtcagaagaaaacaattttat

SEQ ID NO: 27293 - DNA, 516 bp, Homo sapiens
  misc_feature (1)...(516): n = a,t,c or g
gataccctgaatacttctgagctgaatcatctcttttggggcttttgtcaaatgagctataggttgtcaatgcctgacctataatctcangnggnacacacacacaatcaaagaactacctgaacctcaaaaattaacttcatctacttcctggataatgtcttacatggctctatccttaaccgaacagtganccacttgctggaatggttacaatatnantcaggctgcanactcgagaggaagcaaggtcctcatanagcggggttantgctgggcaagtaacaagaatccactggtanatacagctccaggaaangtgcagccagccaggagtgcanacaccttctggtcatgccatcatgggcacttcccggggtccctttcagagcattattcccaaagtgaganattaggatatgcatgcacagttggttgcntcatcccttttttcangtccaanggctgggaaaatctaagggtccctcatacatanttanantttaaggtttgaca

SEQ ID NO: 27294 - DNA, 573 bp, Homo sapiens
  misc_feature (1)...(573): n = a,t,c or g
cagcataccagtcacttaggcatgctcacattgaaggagctcantttcattggaatcacanatataaatgacctantaaaatantnggggngnaagtanattangtaaaaantgctgtgggacactgtaaaaaatcatttagancnatgtgagaaantcagtcaaggtttaaganaggagttaccagttacagataacaatgtatttttttccactgacctaagcctttcangcaaaatcanaaaactgtaattttcactaaaataaatcatcaatggaatgacctagtttaanacccttttggaagacacanagagtcctanaaatctctactacatcantacaaatcanagggataggcaaacatgccaatataacngaananagagcccanaangaaacccttcanacatggcatctttatatangacatcaaacgnaaagagtgcattttcangtaattgnactagannannnctacctaganggggaanattnnntnccncccangatntgggaannganccaanntttntangccnnaacttananttgggggtcctagganattca

SEQ ID NO: 27295 - DNA, 578 bp, Homo sapiens
  misc_feature (1)...(578): n = a,t,c or g
gggtattttttgcctctcctctaagaccaccagtattccactggattattaaaatgccagattctanacttgttcttttacnaattggggngnggttagcaacctaaactttatatttttaaaattatactttgttttatactttcaggtatggtttaggaatgatttattacaagcaagaaaaattcagccttgcagaaatgcatttccaaaaagcgcttgatatcaaccctcaaagttcagttttactttgccacattggngtannaagtagctttctaaacattaatactctattaatctcccttttgaaatatgttngttattganttaantgctgngacaaaaatngggccttttttgtgttgaaacagtattctggggcctattanacccataaatactacccanttggnttancanagaggnangncacagaatttgccttatccttgganagncaattcatggnccngngnttnnatttannnanggcatggtccaantgnctacccnaaaggggtgtccggnaaccaantagatacccnggccattngaantgggnangncnnnagggg

SEQ ID NO: 27296 - DNA, 524 bp, Homo sapiens
  misc_feature (1)...(524): n = a,t,c or g
gttggtttttttcatggtcatgacagccagcagcaactggaacaacatgattttttgttcatatgtaacgtaagagcctaagacttgcttcgggntccgannagccccaagcaagcctcttcttgngtctcactggctcaactggcttatacccgcccaaccctgaaccagtctgtggtaaagcaggtagaattactgacttagattaataatctgcagtancaggaatattatagagtctaccataatcttaagatattacanttttgttcaattattgtagtatatcattttaaaagtttatttagcatattganatattgnatccanagaaatttangagaaattttgtttctttaacanngncanacannatattctatggncnaaaanagcagattgncagaaagctaccctagagtccccgttggnggggaaatnnnacctnnntttcnncnccggnnaacaatggnnncnggaatngnnccggnttnggaagnnnccgntncnnngcgtgnccccag

SEQ ID NO: 27297 - DNA, 517 bp, Homo sapiens
  misc_feature (1)...(517): n = a,t,c or g
gggaaaaagttatgttaaatgatcacttttttatggagccatgcttttttgtgcttaatttattgcctattgctcatatgtgttttacattgggcaatgttttctcaagataagcaangagaagtaacagctgtagtcaactttcttccccaagtactaagtaaataaggtggttaggtgtagaatggaattagctatggaatgctgattgtttattttctatgtangatgaaagaaattaggcatgaagaaggaagataattttctacttgctatagatttgaaatagttttcnttcttttgcttttttttttgtttgnccnactgaggagttcanagtggtnaactganacagaccccaaanntaccctttggnaccntggccnccnnantgtttccngntncnccaaaagtngnacantttggcaaantttgncantnnagccccntttncaanncctcnantagggacntncaaccgcgggggnctngtnacttcccganannagttcngcgt

SEQ ID NO: 27298 - DNA, 495 bp, Homo sapiens
  misc_feature (1)...(495): n = a,t,c or g
gggaagctagctaatgtagagaattattcccgcatgagacttaagctggtaccgaattataatttcaaaacccatgaggaagctagtgccttgagagataatctgggtatccaacactcacagccttccagtgatacattgcttttggaagtagtgaaacaagtaaaagttagtgatatggtggaggataaattagaccttcctgaagaggatataacagctagagtaaatgttgatgagaaagaagaacaggatcaaaangaaaaattggtattgatggaagactgtgaactcattacaataattgatgtaattcctggcagattanaaatcactactcaacacatttacttctatgatggcaagcattgaaaaanaagatggagtangctttgatttcaagtggctcattctcaaattcgagagattcatcccggnggttcatttaagaagacanccctgagattttcagttgccaaccaactacttctcatt

SEQ ID NO: 27299 - DNA, 504 bp, Homo sapiens
  misc_feature (1)...(504): n = a,t,c or g
ggcacgagtaccctggaaaaattaccactatttangttatttttttaaatgggtcaaatgaactccacacacaactctacaaatacattttctcnaccanaanaagcccanccatgtatttatgagttgtatgtatgagtattcanaatgaagtgttanaaactcaaaggggctgggnnnnnnnnnnnnnnnnnnnnnnnnnnnnnnnnnnnnnnnnnnnnnnnnnnnnnnnnnnnnnnnnnnnnnnnnnnnnnnnnnnnnnnnnnnnnnnnnnnnnnnnnnnnnnnnnnnnnnnnnnnnnnnnnnnnnggtgcccacctannnnnnnnnnnnnnnnnnnnnnnnnnnnnnnnnnnnnnnnnnnnnnnnnnnnnnnnnnnnnnnnnnnnnnnnnnnnnnnnnnnnnnnnnnnnnnntctgggcaananggagacctgtcncaaaaaaaaangggacngaaaatacccacnctgttcccacantttaaggccangtgggaaacat

SEQ ID NO: 27300 - DNA, 505 bp, Homo sapiens
  misc_feature (1)...(505): n = a,t,c or g
gcggcacgagaaaatgaaactatgaccttttcattttgctccctgacatttctcatggcatcttcccttccagagttaaatgtatgtccttctccacaagttctggaccagagcctgctgtgcttctaggtctagagacagtgcagaccccggcccaggcagcgtgagcctgggcatgagcatcccaggggtccacagcctgggcctggagattttcacccaagtgtttanaanaatgaaacttcttttctggtgttccttttaggacacttaaagtaagataaatgttccctttaagacacaaaatagtaacttacctttaaaccctgccagtgctccccaagcaattgttttaggcctcaggtcctcaagtttcagtgtatcacagactagaaagcttgctgcagtagcttgtgggccacttcagacaangagattcncangtgtggggtanaggatttgcattccagccagttcagctgctggtnagctgcgtttgtgggga

SEQ ID NO: 27301 - DNA, 508 bp, Homo sapiens
  misc_feature (1)...(508): n = a,t,c or g
gattagctttttcatttaaaaacaaaagcattgctggctgcagtaannnnnnnnnnnnnnnnnnnnnnnnnnnnnnnnnnnnnnnnnnnnnnnnnnnnnnnnnnnnnnnnnnnnnnnnnnnnnnnnnnnnnnnnnnnnnnnnnnnnnnnnnnnnnnnnnnnnnnnnnnnnnnnnnnnnnnnnnnnnnnnnnnnnnnnnnnnnnnnnnnnnnnnnnnnnnnnnnnnnnnnnnnnnnnnnnnnnnnnnnnnnnnnnnnnnnnnnnnnnnnnnnnnnnntgcaccaancctgggtgacacggtgagaccatgtctcaaaacattaanccaaaattanataataatattcccaaacaaaaaaagatttaaacttgcatgataaattttcaaactacctctccctccttggagaactactggccatgatctttcaactctanaatcctgtgttcatgtagcttttatctataaaantatgactaantagancccaaggaaaattggatgacag

SEQ ID NO: 27302 - DNA, 519 bp, Homo sapiens
  misc_feature (1)...(519): n = a,t,c or g
attcggcacgagagtggtggaagggagagatgcccaagatgcacaaagaaacttttgtaggtgatggacatgtgatagtggggatgggatggtgtcacagtgtgcacccctctcgaatccatcaagttatctattttaaattgtgtagtgcagtgcacatcaattatacctcaataaaatagtaaaattaaaagtgtacatatacaccatagcatcttgctttgttcacttaattacagatcttgactgattcatatctanacgaataaatctattctttaaaaatactggatattagacattccatagatatgcggtatctttttacaaatcattccccttttaaagaacgtctaagtaagttgaactattttgctactgcatgttatgtttaacanagtacctanganttgtgtgtgtgcgtgtgtatgtttcatctgttancnatcnttgtgcacaagtaaggggttttccatangacananncctaganatagaatcctannncaantgggctag

SEQ ID NO: 27303 - DNA, 503 bp, Homo sapiens
  misc_feature (1)...(503): n = a,t,c or g
gagatcggnaaattccagggtgataataccttcntcctcccaaacngtgtccttatcctatagaanctcccaccaaaacctaagatccccccaagccctctcagcttcctcactccttccaccaggggaggggctaggccctggacttccccctgtttggcttgctcantgctctgaantaggggtatggagggccnaacagatacggaagtggaaggggaggcanctggntgctcacccaggtagttggagctaggcccnanctgggcaatctggnnccgcaaggctcccgctgnaatccacaanatcttctgatancccagggggccccctcggtcagtnaggttcccgaaacntggcgacaggtanaatnatcancccnanntactccacagccatcanggacgccatgcanagnantgatcccatcacagncnnggctctggngaaantgnaggtgnggcaatngccacannccgccanctttnagctcaacccaaccc

SEQ ID NO: 27304 - DNA, 480 bp, Homo sapiens
  misc_feature (1)...(480): n = a,t,c or g
gggacttcctagaacttgatttaagagcccttttgggaaggaatgttacggtcctgagtaagggatgagtgaggctctgtgggttctgccaccatctaccatcctttcctttagtttcacctaaatgtgattgctttctctgctgtactccttcctctgtgcttccttctgtctatccttgctgctgccaccactgcttgctgcgggtacctataaaatggctatgtggtatctcaacagcaagttgagcagtggaccattagtgagancattccattcatcctgggcacagccctagtaggtttattactatagtaggaggtctgtcttgtagcccttgagtatcttatctgaattggaagcnagagangaataagnacgtntatgactgaaacatnagcanaagcangatggttttatttcagttgangctctttagagccagtccanganaagcattttgggacaaatgaggttttt

SEQ ID NO: 27305 - DNA, 485 bp, Homo sapiens
  misc_feature (1)...(485): n = a,t,c or g
gctggaggatgcgggcgtgcgggagctgtgccagggcctgggccagcctggctctgtgctgcgggtgctctggttggccgactgcgatgtgagtgacagcagctgcagcagcctcgccgcaaccctgttggccaaccacagcctgcgtgagctggacctcagcaacaactgcctgggggacgcgggcatcctgcagctggtggagagcgtccggcagccgggctgcctcctggagcagctggtcctgtacgacatttactggtctgaggagatggaggaccggctgcaggccctggagaaggacaagccatccctgagggtcatctcctgaggctcttcctgctgctgctctccctggacgaccggcctcgaggcaaccctggggcccaccagcccctgccatgctctcaacctgcatatcctangtttgaagaaaaacgctcaaatcccgcttatttctgccagtatattttggacactttata

SEQ ID NO: 27306 - DNA, 100 bp, Homo sapiens
gactggaagaaaagggtagctgtatctcagaatagcttctattttatatcctattctgttttgttgcttgtccagacattgaatttaaaaaaaaaaaaaa

SEQ ID NO: 27307 - DNA, 476 bp, Homo sapiens
  misc_feature (1)...(476): n = a,t,c or g
ggagagctccatagcttcaataccctgttccctcgctgggcttctgatgctctcacttgtccctggnatctggtcttgctgttcagtttcgctcattaagctcagatgtacctttgcacacatttggcatgaatgccccagtgactcatagttgggttttacaaataaaacatacctaaaaataaactaagcactctccaactcatcctgccttatctaaattgtgcctaaaagtgctaannnnnnnnnnnnnnnnnnnnnnnnnnnnnnnnnnnnnnnnnnnnnnnnnnnnnnnnnnnnnnnnnnnnnnnnnnnnnnnnnnnnnnnnnnnnnnnnnnnnnnnnnnnnnnnnnnnnnnnnnnnnnnnnnnnnnnnnnnnnnnnnnnnnnnnnnnnnnnnnnnnnnnnnnnnnnnnnnnnnnnnnnnnnnnnnnnnnnnntggcgtnaanccangaggcggancttgcantaagtgg

SEQ ID NO: 27308 - DNA, 483 bp, Homo sapiens
  misc_feature (1)...(483): n = a,t,c or g
nnnnnnnnnnnnnnnnnnnnnnnnnnnnnnnnnnnnnnnnnnnnnnnnnnnnnnnnnnnnnnnnnnnnnnnnnnnnnnnnnnnnnnnnnnnnnnnnnnnnnnnnnnnnnnnnnnnnnaaataaaaattagaaaataaataaaacgtattaaacttgtgaaaatacttgggactttttatgtatctaggtacttcagtttttaaagtttgattttgtgagatgggttctaatatgtccgatttctcttgccctgttttacaactaatctaaacaaaacagtcattctaagtttatattctgtcttccgngaaacattgagaagcaagntgtcaggctggtgcttttanangcagtgaaaattttccttcctttgcatttcctttaaacattgtttcctctanaatcaatccntttnttatcttccnggtttatatgnaacaagactctanaatgcantcaacacattngatccttgacctatat

SEQ ID NO: 27309 - DNA, 492 bp, Homo sapiens
  misc_feature (1)...(492): n = a,t,c or g
gcggcacgagaaaatttagtttttgttcttaattgcactctaaaaggttcagggaaccgttattataattgtatcagaggcctataatgaagctttatacgtgtagctatatctatatataattctgtacatagcctatatttacagtgaaaatgtaagctgtttattttatattaaaataagcactgtgctaataacagtgcatattcctttctatcatttttgtacagtttgctgtactagagatctggttttgctattagactgtaggaagagtagcatttcattcttctctagctggtggtttcacggtgccaggttttctgggtgtccaaaggaagacgtgtggcaatagtgggccctccgacagccccctctgccgcctccccacaaccgctccaggggtgggctgganacnggtgggcngctggncaccatgcacnncgccgtganttctcaagggctcntgccttctggccctggtgtccctac

SEQ ID NO: 27310 - DNA, 478 bp, Homo sapiens
  misc_feature (1)...(478): n = a,t,c or g
gtgattcanaagataagactagggctgcacaggcatggtgtgcctcgtgcgccacggagtgaaactagacagacaagggaaaacccaccaggtctcgagtcggcaggagaaccaacgaccaggtatttgtttctaaagactcatatgatccactgaagagaaccactgagtcagaggcaggggtggaggtcgcantgagggaggacatggcacactacccacaggcaggggtatcagctcccactgtggggttagtcatcanctggggctctgaaggcggtgacgtgctaagtgacagatcaccaccgagatccgtttcccatgaaaacactttggaaagaagcttttatgtgggctcactttatacagataacacttcacaaaataaacgaacactcattaaattatgcaccaaangaaagtaaactgtggaagctagaanagacagcagtgttagntattanttaagcgggcgcaa

SEQ ID NO: 27311 - DNA, 515 bp, Homo sapiens
  misc_feature (1)...(515): n = a,t,c or g
gcacgttcagtccgtagcagtgactgacacttgtccagttcagtggcttactcagagacctcaccttgacctaatgcttgtgccaacctggngagaaatctggaatcccattccacagattagaaatctgaggtttagagaggggaggggactcacctaaggccacggagcaagtcantaaggacccaagctggcagtcgtggtctaactgacctacattcctggagcgtccagcatcctgcccatggtggctgctcagctgatatttgtttggaatgaaaggtgaccacacttgagttggggtagtcaggatcatggcgacagccatgagggcaangaaacagcattttaaaaattatttacttagtgtgagattttcaaagctattccatgccacaacgggggatcggtacttcttcaatccttannggctgaatgatattcccattgttnccacatgttgcttatcatccgccaatggnatttgagttgttttaccttttggcattggggag

SEQ ID NO: 27312 - DNA, 514 bp, Homo sapiens
  misc_feature (1)...(514): n = a,t,c or g
gggaaaaaggagatctatgtttatatcctagaaagataaagacactatttagtgaaaaaagcaaattttggtataataggtataggataaacgtgtttgtatacatgcatgtaaatgcatagaaaagggtcgggtggttggggaggagggagaaatttcactaggtattctgcatgtttccattttgctggatttctagagaagaatatgaagtataagcccagatgcaagatgttttcctttaaaggcaaagaacctaagaacagcctttgactagattaactcttgaagatagaggtgtgacagccaaatttttgttttaccattaatttaatgccatggtatatacatattttaaatcatatttatcacatgtgttttttcattcgcattttttgactcgcatttagatgctcacgtgccttttaatgttggtgcctcatgggaagnacatttgnactaacctaacaattccngngcanncatcngtcncccctctaacctgtttgagaaa

SEQ ID NO: 27313 - DNA, 517 bp, Homo sapiens
  misc_feature (1)...(517): n = a,t,c or g
ggtaggagtcagtaaataaccactggttgctgatagaattaatttgaaactcacgacttacctgtcctttttccacttttattctttctaattcagcttttaggctagaaatagaagctagaaggaaaaaaatgagatgtattagcattcatctattattgtgcatgaacatttttttctttaaaattttagagcaccccccaaaggattcaaatgtatgctgaacatgggttccgggggctgtctcaaaattaccaccaagcaatcagcatatttaggctcagggaaaagcaggatccatgcaaatggacactgtgtcataaactacctctagatcatgtatcacatctctgcagggaaatgccacccattgaatcacgttcccctggttctgggttcaagtactgagaatcctatctatgaataattgccaaagagggcacagaactcctaaaaagacgagtttccggcaagngcgttggnttanactgtaatcccancanttgcaaggcgaggg

SEQ ID NO: 27314 - DNA, 513 bp, Homo sapiens
  misc_feature (1)...(513): n = a,t,c or g
ggnnnnnnnnnnnnnnnnnnnnnnnnnnnnnnnnnnnnnnnnnnnnnnnnnnnnnnnnnnnnnnnnnnnnnnnnnnnnnnnnnnnnnnnnnnnnnnnnnnnnnnnnnnnnnnnnnnnnnnnnnnnnnnnnnnnnnnnnnnnnnnnnnnnnnnnnnnnnnnnnnnnnnnnnnnnnnnnnnnnntacttatgttcttactcttgangtcattaaattaaggttttaagagaaatatatgatgtgacagtcaggtactctttaaaaacaaggaagaatactgtatatttagccccagaaacactagcgacaggaacagccacagtaatggtaggtactgtttcttggttgccggcactgcctgtgctgtatgggaatcgctgtgtcnggatcccangcgcctcacatcagcacaggtggatgcanggctgagcactgggntgaccctcancaaaatttagctcancccanaggccgcttcaaacttttccagccttttanagncaangtgnnatac

SEQ ID NO: 27315 - DNA, 515 bp, Homo sapiens
  misc_feature (1)...(515): n = a,t,c or g
cgagctgttattaaaagcatattgtattatagagctattcagatattttaaatataaagatgtattgtttccgtaatatanacgtatggaatatatttaggtaatagatgtattacttggaaagttctgctttgacaaactgacaaagtctaaatgagcacatgtatcccagtgagcagtaaatcaatggaacatcccaagaagaggataaggatgcttaaaatggaaatcattctccaacgatatacaaattggacttgttcaactgctggatatatgctaccaataaccccagccccaacttaaaattcttacattcaagctcctaagagttcttaatttataactaattttaaaagagaagtttcttttcnggttttagtttgggaataatcattcattaaaaaaaatgtattgtggttatgccaacangaccaacctggattanagttgggctcnccttgagggggggnnanccngggatttgnnnggggggcncgtaancccacnngggg

SEQ ID NO: 27316 - DNA, 512 bp, Homo sapiens
  misc_feature (1)...(512): n = a,t,c or g
gtgagggtcggggtggctgcctgaaggagaccagtggatgcttcctatgcaagtggccctcatggaattggctgtgcatggcaacacctggnatatggcaggcattccatgaatagtggtatggccactattttaggtccttgcaacttctgcctctttggggtgggaggagagtaaagtctgcgcgatcagaaacaagatggcgtggtcttgctgcccccatttctggnccgtgggaagatgatacanatcttgtgcggtttccatgtangnacaggctctttcagaatatatgggaatttggtgactcatggggagcattacaccgcaannagctgatgagggctgaaactganataatgcaagatgctcgtaggtganttgggggttgtcanaccctgctggngattaaganacaccaagagatgctggncttgttcanngaganaggnanggaantnacacncnntntactnnggtgnggngtccgtgnntgnntaaaacaacccggt

SEQ ID NO: 27317 - DNA, 513 bp, Homo sapiens
  misc_feature (1)...(513): n = a,t,c or g
gtcggcgtggcagcagcataggaaatgagccgcctcccgtccgctttggacagagctccggtggggctgatgcactggcttctgcaaaggctcatcctgccatccttgctgccctgtggccaatggtacagccatgtctccatgaccataaaatgcctccaaaaaggagctgagacacagggaagatgtggaagagccaggggcctttgtggctcctggagttccacccagtaaaccacgctgagccctcactcaagaacactgagttacaggtgtgtcccctggggaccaccctggacggagtgacccagacacactgtgggctgtggcagctgtgctggggctagggcaagcacctgcacgtgcaggacagctgacagccacacaccaagcacagcacatctggacaagactgcttgatgctccggtgactggagaccaaacaatgggggttcgctgcctccaaagntgctaacctggggtcaatggcccttgacnttaanantggggaaa

SEQ ID NO: 27318 - DNA, 513 bp, Homo sapiens
  misc_feature (1)...(513): n = a,t,c or g
ggagcaagatggagcaggtgttatcatggcaacaacttcttccaaagaatgtctttcaaaatcctcttttcctccactacatttaccctttcatatttgtgaaatggatgagcaagcttccaacaaagggaatatgagaattataaaaatgattttaagaattttttgnnnnnnnnnnnnnnnnnnnnnnnnnnnnnnnnnnnnnnnnnnnnnnnnnnnnnnnnnnnnnnnnnnnnnnnnnnnnnnnnnnnnnnntttattctctggcataaannnnnnnnnnnnnnnnnnnnnnnnnnnnnnnnnnnnnnnnnnnnnnnnnnnnnnnnnnnnnnnnnnnnnnnnnnnnnnnnnnnnnnnnnnnnnnnnnnnnnnnttgttttggggaaaattcngcatatggaaatcgtcttaaacacacttttccaggtnctgtttaactgaaanacgtttttccaacnacnggttaaccganattgccaatcccggaaaaatgngaanagtccaattttg

SEQ ID NO: 27319 - DNA, 443 bp, Homo sapiens
  misc_feature (1)...(443): n = a,t,c or g
gcgcatggagcctgcagcctttgtttaacttgtgagttaagaaaagttaacctttcttggagagtttccagtcttgcctctgcatcctgttcttccttgctagctctcattttcttcacccattccgtctatcaaaacctgaaattttgggannnnnnnnnnnnnnnnnnnnnnnnnnnnnnnnnnnnnnnnnnnnnnnnnnnnnnnnnnnnnnnnnnnnnnnnnnnnnnnnnnnnnnnnnnnnnnnnnnnnnnnnnnnnnnnnnnnnnnnnnnnnnnnnnnnnnnnnnnnnnnnnnnnnnnnnnnnnnnnnnnnnnnnnnnnnnnnnnnnnnnnnnnnnnnnnnnnnnnnnnnnnnnnnnnnnnnnnnnnnnnnnnnnnnnngnnnnnnnnnnnnnnnnnnnnnnnnnnnnnnnnnnnnctccgtcccaaaaaaaaaaaaaa

SEQ ID NO: 27320 - DNA, 511 bp, Homo sapiens
  misc_feature (1)...(511): n = a,t,c or g
ggaaaattagggcttggggaactgaagcaaatatgttgatgttcatgctgcttgctgtgccgtaagtgacaaagtcttttgtctctgacagaggggtttcctatcttctgccatcacccatgtaattgtggcaggttgagttattagcttgcagaaatggtgagatctcanaccctcttgatacttgacaggaaataaggaggggtttgttttattttgattcgtttaaatatgagacttgattacaggttgaggttgaagatgcagtagtggggaagatgagtttgaaaataattgatatggaaaacaatctctaaagcaagatcaatgaggaactgagggatgagcataattgcaagaaattagccttgcacatgaagaaggatagaagataaaggatgcatgtgggtgtaagcaattttttaggtagaagaatgtgaaaaagatgtttcaagctttcananaantttccaatgagagtagcagattatgttacanatgaattaagggg

SEQ ID NO: 27321 - DNA, 503 bp, Homo sapiens
  misc_feature (1)...(503): n = a,t,c or g
cgatggggtttgccaaaatccacttgactcantggatcaaaggttgganctgacnactctgcanctctaccaacttcccaggngacgccagtactgctggtccatggaccacactttgaataacacaggtgtaaaatantttgctttaattctcgtagcagataatggaaatanttttgaaacagtgtaacanctccttcaccatactgtgagctcnantctccacatcctaaantcnantnnntacacattntgaaantcttgaatattaatacatacaagattcttacctcggtcagtggtttgtantattcantagnngtnaaantttgaactggtatncgtacggctttnttttaaactgagataagcaccagcatgcangtatnactgagatacgcaccacaatgcaagtatanagttttcacnttnncgttaannntntttaccatatggcccattacnacgtcttccacccangaagttgcacttgaatggnttaa

SEQ ID NO: 27322 - DNA, 514 bp, Homo sapiens
  misc_feature (1)...(514): n = a,t,c or g
ggtttaaactcaatttctatctgatgtaatagcccatgttttctaatcagtaccgtaatgtttttcttaattaggactctttcttcaccccanattactgagaagtaaatttaatcattttatttgagcatcttattaagtatttttcctctttgcacacttagttttaatttttggtaaccctgttatattatcactgttctgttctgtgttgatgtgtcatcttttgctattttaataaatactgtgatcttggagtgaggtgggatagggtgggggaacntaaaattgttgttcanataatgcacttaatataatttacattttaattcgntgagtgttcaangatcaatttgcattcctgaatcctgtntgtaccntgtaagaatgttaggttaantgtaccacatgcaggaagatcaaggaggtttggggaacacagtactttccattttagtttgantnanttttggtgnnnnncttgcaccaaggtnaccttttcnggggnaagttg

SEQ ID NO: 27323 - DNA, 505 bp, Homo sapiens
  misc_feature (1)...(505): n = a,t,c or g
gacccttactgcttgtatgtattctggtatcttctgatctaggttctttcattttttataaaagctggtcacagtctcatgacttgcacagcctactgcattgtgacctgcagtgtggaaagcagcggcctacggatcatccacacccttccatgatctgcaaagcccctcatcatctgcctgtccccctcatttatatttaaggactttgccaaatacactctcttaggttcctctaccaggagctctcttctgcctttccccatgtgatttggagaactcttagtcattctttaaaacccagctttaaagtatctcctgttcttccctctcttagnnnnnnnnnnnnnnnnnnnnnnnnnnnnnnnnnnnnnnnnnnnnnnnnnnnnnnnnnnnnnnnnngctgagggttgcaccactgcaatccaacctgggcagcaaagctggagtgcaataaataaattaataattaaacgggcgcaagcntatcccttantgagggtaa

SEQ ID NO: 27324 - DNA, 491 bp, Homo sapiens
  misc_feature (1)...(491): n = a,t,c or g
ggaggagtagaagcctgtgggaggtgggggtggaagcagcagaaggaaaagagtagcaagtatttagtaaaatgtattcatcatagtggataaaaatcaagctttggggaaaaaggtcaaactccttcaatgatgctgtacatctgtacctttactccatcctatagcaaatatttgtataactgcacagaagaaattggacaatattccttgaaaaattcttagaaagttcaactttccaagttagtatcaccccaaggaaaattatatgagtaggaatacctaatttctagccatactctagttccaattagcttcnnnnnnnnnnnnnnnnnnnnnnnnnnnnnnnnnnnnnnnnnnnnnnnnnnnnnnnnnnnnnnnaaaaagggtttgccntgttgccaaggtgcnaanattttaaananagtgtnaaaaaaantngnttnntggnnagcnntngnnttnacnggnnncccnnggntnnnnnggca

SEQ ID NO: 27325 - DNA, 503 bp, Homo sapiens
  misc_feature (1)...(503): n = a,t,c or g
gcggcacgagnnnnnnnnnnnnnnnnnnnnnnnnnnnnnnnnnnnnnnnnnnnnnnnnnnnnnnnnnnagagcttatattcttataggaatgggaagactgcctatgttatgtgttgctacataatacattacccccaaacttagtgacttaaaacaaacgcntattanctccatttctgtgggtcaataatctangcatgacttaactgggccanagtttctccaaagtctgtgatcaaggtgtcagttgggcctgcagtcatctcaangctccactataggagcattcactggcagacttattcaaatggctgttggctgatcctcgatggctattggnccctctattggttcntgcncttgggcccctccataatactgcttgctaatcacaacatggcagcttgctttgccaaancaaggactctganggaagcnnggaaattaagacatagagagncanatcctaatggtanccanttcnggaaatgancccattctt

SEQ ID NO: 27326 - DNA, 518 bp, Homo sapiens
  misc_feature (1)...(518): n = a,t,c or g
ggggctcggcgtggatggagaccctgaagttttaaatgaccnnnnnnnnnnnnnnnnnnnnnnnnnnnnnnnnnnnnnnnnnnnnnnnnnnnnnnnnnnnnnnnnnnnnnnnnnnnnnnnnnnnnnnnnnnnnnnnnnnnnnnnnnnnnnnnnnnnnnnnnnnnnnnnnnnnnnnnnnnnnnnnntacttttatcacattcattagcattcccaagcccaggggcagacggaggaggtactacagagtgagggggcgaagggcatggtaaagggagggatggaggatggggccattcttcagcaggcacttattccttatatcccacccatctatttccttgaacttgtgccctcaaaatcaagagcagtcgctcctgccatcaatgagcantctctgantaaaggaatattttactgaacaaagggaatatgtcacncatggaatnccagaantcnnacngcagggaaantgtcnacttaaatgacacgtgcttcgtggtacagataaaataaatgc

SEQ ID NO: 27327 - DNA, 518 bp, Homo sapiens
  misc_feature (1)...(518): n = a,t,c or g
gggcatatttgggtctcctacagtaatatttttgggtggtgtgtcctgagccccaacacagaaagacaaacgatggggtctgaggacaggtgagccagcctgagggtgagtggctttgggtgggggactggggaaaggtcaactgaatgagctgaggatagggatggggtatcacatattcaggaaatgctgaacaccctgggggagggaaagaaaacctgggggttagaaagcatgtctaccaggtggggcatggtggctcannnnnnnnnnnnnnnnnnnnnnnnnnnnnnnnnnnnnnnnnnnnnnnnnnnnnnnnnnnnnnnnnnnnnnnnnnnnnnnnnnnnnnnnnnnnnnnnnnnnnnnnnnnncaagggtattggtgtgcacctgtatcctaactacnttggaagctgaancagganaacccctnaactccaaaggcaaaggttgcttnacctaaatcanccactgactccagcctgggcgacagacaagaccctctcaaaaaaaaaaaa

SEQ ID NO: 27328 - DNA, 487 bp, Homo sapiens
  misc_feature (1)...(487): n = a,t,c or g
ggccaacagggtcaaaagctacagaaagttccantancataaggactaaaatatccttccagttcanccantggagggccttgtgggaggagctctgtctgcaacctcggggtgccattcatgtanaatacagcagtgggggatggagctccctggagccgggccgcccagcagcatctggagaancgaatctangaagtttacctttnanctccctgacagcccaggcagaaagggtgtncgtcattcaggcctctgctttccctcagaatggggtggggcagctctcaggagcagctacttcagtggctggggaaggangcggaaaaggcangagtgaccagatcccatgcggggagcnctgctgancctgtatcagccanatggatgtgctgtctgtcacaacagctggctcnaaggnngcttttttgncgnncgtnaangcgctcccccgcnggccccggatntnnccccnannannccatgt

SEQ ID NO: 27329 - DNA, 521 bp, Homo sapiens
  misc_feature (1)...(521): n = a,t,c or g
aattcggcacnaggaaaaaaggaggtccctagtttataanagcggtttttancttttgccantcccgctcatggtaaggctaaagcagacttttcatgcagttcaggcacccgtgtaaactttttctgtttgggaaagtacagtgatcnaataggcatgttgggaggtacatgcaaccctacccttgggccttttctagttgcaatataactttattgcctaaagcttttgctcaatggcatgtgcgtctctaatatgaattaatcagttctcttatttgtaatttttttaactctggtgtactttgcgtattttaagactgcttgttatcattacagcaagcagtactangaaagaaatcnttacttagataatttctgttttaaatcangggccaacaaacgttctttaaagggccagatagtanacanttttggggtttaangcaaantggcccggtgaactaagcnanccgcaatgnagcaagaatttncangngantnaanaanganngntnagga

SEQ ID NO: 27330 - DNA, 504 bp, Homo sapiens
  misc_feature (1)...(504): n = a,t,c or g
gaaaatgatttgatgaaagttaattcacagagttcttcttgtgaggatgaaattgtgtcattttattcctgacatccagtaggtacttggtgacttgtagtttcactttcctttcttcattaggttgaggaactactagatgtactccttttcttctaagaaattaaaatttaacccatttgggttgctatcagtcaggttcatanatgggtgtctagtancaagaatagatgccaagacaactaaatcaatattgaaggtcttgctaggagaatgcagctacttctagatgggtcttctttgattttctggtgcctggcacagatgcttgttttcttaagacaggaattggatcttcgctggattgataatagcccagtagtttcttttangttggatatgaagcttttgcaaaggaaatgtttttgggtaaataancgggcgcaagcctatccccttannggangggtaatttanctggaannggcgncntttaaaagtctg

SEQ ID NO: 27331 - DNA, 507 bp, Homo sapiens
  misc_feature (1)...(507): n = a,t,c or g
gcttaattctancattgtagtatgaaaacagccacagaaatacgtacaggactgggaatgattgtgtccnaataaancttttttcaanataggcaggagactaggtttggcctatgggccaaagtttgccaacccgtaatgatataatggttcttgcagaaattattttggctttctgacagcatgactctaagtgtggtctgtggacagtacacagactttttattancagtctgcaatgagacaaggagcttcaccagaagaaaccaactacattattcaagcanattgtttacttcagctgacattttgttgtgtttgttttcgaagcaagacttcgccaatgaaagaagtaattganttatattcnggtacaagcaccttatctatcacagaccagtgcanacagcacangagcactttgagtggactgttcaatcatcacagggannaaaacnggntccttntggcccnaaaacnanganttgnngccaaannccattttcc

SEQ ID NO: 27332 - DNA, 466 bp, Homo sapiens
  misc_feature (1)...(466): n = a,t,c or g
ggtgtacnnnnnnnnnnnnnnnnnnnnnnnnnnnnnnnnnnnnnnnnnnnnnnnnnnnnnnnnnnnnnnnnnnnnnncagtcctgcnttgggcaggtgaaagaagganagganaaggtcaganagagagattctgtttcctgaggtctaaagtgccccaacattataaaaggactatgggagttagganccaggaactatggatgaaaaccaacatctgtatcataatatcataacaagacactgggagatgaaatgactgtggctgtttttgttcatcttttgctgtcgtaacagaacaccacagactaggtaatttaaaaagaatacaancggncgggcgcaatggtcacncntgtggtccccgcactttgggaagcccaagttggaggtcanaangtcagngnnantgnacancctggntnnngccnntgancnnnnnntnnnnggntgnnnnnnntnnccgg

SEQ ID NO: 27333 - DNA, 517 bp, Homo sapiens
  misc_feature (1)...(517): n = a,t,c or g
gcaaagacagaagacaagtacacggcctcccatgtactcatcaatcagcatcaacaattatgaccatcttgccagtcaaactcattcattccanggtgggaggggcagcattttgaatctgaggctctggcaggctgctcgggtggagatgatgttanatagttggaaatgtcggtaggaactcagttagaacattggtatctgggatcatcattactttttaccctcagaactatttccaagcctgtttgtgttactgtgatattangatttgtttgcattctttgtgatatgagtttatgagtttcctcagtggtgggggagangcattccaaattggcaataagtttacagataactgaaggttgacactgtttcttaagtcacagctagccaaaatgaatggccntttccttgaaanccaagtncangtngctatttccggtngnaatttangnccaaaanggtnacnannaaacttctnccggannnattggggtnaatgtnaaccaaccgg

SEQ ID NO: 27334 - DNA, 506 bp, Homo sapiens
  misc_feature (1)...(506): n = a,t,c or g
gcttgaatactgataggaatgggtttttccttttgctaggagtatggagatatttgataggcattggtttacaaganacctttgggaaanaggtggaggaaagcatagctgactggctttctccttaacttgatgctaaatattantaaataagaggacctatggtaagtagttacctcacctttctangtgtnatttccttacctttaaaatcagtgtaagaacagtaccnatctgatgtagagttacnantaagagtttgcatccttagtacaatgaaagtgtantaaatactaacattattttattgacagctcaaanaaatgtccacacttgaagggattttcttcataagcaatcaagccagatacagatttttccctcatgcatcttttaaagctgaatgccaagcangcaaattanaggaagtttcctnancagtggaatgatttcaattcccaaaaaancaatgggcaatntgtngggnacttaangngaaaataaaa

SEQ ID NO: 27335 - DNA, 521 bp, Homo sapiens
  misc_feature (1)...(521): n = a,t,c or g
gcatgtctatcaatacggaactgattgaataaaatatagtatatctgcataatattcagttgtgaaaaggaatgaanaaattctctacatactgatggggagtgatatactgatacttttaaaaagtannnnnnnnnnnnnnnnnnnnnnnnnnnnnnnnnnnnnnnnnnnnnnnnnnnnnnnnnnnnnnnnnnnnnnnnnnnnnnnnnnnnnnnnnnnnnnnnnnnnnnnnnnnnnnnnnnnnnnnnnnnnnnnnnnnnnnnnnnnnnnnnnnnnnnnnnnnnnnnnnnnnnnnnnnnnnnnnnnnnnnnnnnnnnnnnnnnnnnnnnnnnnnnnnnnnnnnnnnnnnnnnnnnnnnnnnnnnnnnnnnnnnnnnnnnnnnnnnnnnnnnnnnnnnnnnnnnnnnnnnnnnnnnnnnnnnnnnnnnnnncnnnnnggngaaaaggaannntctttttnntgggggggaaanttttcccctttgggggggnnnttttgcngggngggngccctnttaaaaa

SEQ ID NO: 27336 - DNA, 513 bp, Homo sapiens
  misc_feature (1)...(513): n = a,t,c or g
gaggccaagttcacagtgactttcaagatgagccaggacttgaaanatgtttcgggtaatggagggccgcctgggtgtttaccttgggtcncagagctgagtgtcnaccatgctgtgganaggaccctggagaattcccagcagcccatgcccaggtgttatcatgccgtgtggcaaggacagtgttcnacaaccttctctacctacaggacgctcagggactcctaccaaattcttgtcccagaacctcttattgacttttctcccagggaccccgtgttctanaagattttggccatcagtttaagcctgnctcagttattantcacatctcgggancactgattcccttcgggtctctgcatcctcggacantgattctgatgacatgatctggcagncaatcactttcacaaatcctgatgatgtcatcaaggacaatcaananttctgccanattccaangggcaattctnggcnaaaacaaaactccgggttnctttggagggaccc

SEQ ID NO: 27337 - DNA, 510 bp, Homo sapiens
  misc_feature (1)...(510): n = a,t,c or g
gnnnnnnnnnnnnnnnnnnnnnnnnnnnnnnnnnnnnnnnnnnnnnnnnnnnnnnnnnnnnnnnnnnnnnnnnnnnnnnnnnnnnnnnnnnnnnnnnnnnnnnnnnnnnnnnnnnnnnnnnnnnnnnnnnnnnnnnnnnnnnnnnnnnnnnnnnnnnnnnnnnnnnnnnnnnnnnnnnnnnnnnnnnnnnnnnnnnnnnnnnnnnnnnnnnnnnnnnnnnnnnnnnnnnnnnnnnnnnnnnnnnnnnnnnnnnnnnnnnnnnnnnnnntggccaagccatcccaatnacggggnanataccaaagggtnntaatcannccgncnttaanncacattnacaantttgnttttnnngnnntattccaattcnaaactcttncaanccaatntcaaaaatntaaacgnggtaaaaaaattggnnnantttacanngggtactttngcccctaaaanggngngtcangccctnnagggnaatggttaanccgggaaaanattccagnaancccc

SEQ ID NO: 27338 - DNA, 515 bp, Homo sapiens
  misc_feature (1)...(515): n = a,t,c or g
ggctgaactaaaaaatatgctgccagtagtactttttcattttcccccttataattttaatggcccaaatgaaagagccttttttctnnaacaatagtatccttgttgaaagtcctttaaagaactgttctacgacactgaaacagtctaattaaaccattaatataacaatgatgtcaagagctgctaaattcaaagaaggcatttccatttcatggtaaatattgaaggtaatttttttctggcatgtagcatgagtcccagtttgggaactcttgtccattacacgtttccttgcaganaaatatcattaatctgtgatacttactacaatagngtantatttggctcaacagangtagcaatggaactgaatatatcaagggacnggccaattagtttntaaaaaggttaaagggtnanttgngtncccaananntgcacanncnagntaaaacaaaggtcccaaatcctanngcctanttagtnnatnggatngaanggnaaatcctttg

SEQ ID NO: 27339 - DNA, 502 bp, Homo sapiens
  misc_feature (1)...(502): n = a,t,c or g
gattagtatgttctgcatgtgtgcactttgaatgtacatacctgtctatgaagtgtaggctatataggtaaatatgcacacagggagagctagagagtgccctgtgctaaggactgcaggataaatatgtctacagggatttccatagcctacggttttctcctgttcctggttcagttagtgctagactgttgcaggggagtccgcgtggtgtttggaaagagcctaggctttagattcaggcagatgtgggttaaaatagtggcnnnnnnnnnnnnnnnnnnnnnnnnnnnnnnnnnnnnnnnnnnnnnnnnnnnnnnnnnnnnnnnnnnnnnnnnnnnnnnnnnnnnnnnnnnnnnnnnnnnnnnnnnnnnnnnnnnnnnnnnnnnnntataataatgatgatgatgataaatttgccaagtgtggtggncctgctgtggcccaannacttggaaggctangtggaaaatcactgaccaagaggcgnggtnnattaccg

SEQ ID NO: 27340 - DNA, 500 bp, Homo sapiens
  misc_feature (1)...(500): n = a,t,c or g
ggttcctcaactttcttgggtttctttcaggatttttcttctcacagctccaagcacgtgtcccgtgcctccccactcctcttaccacccctctctctgacactttttgtgttgggtcctcagccaacactcaaggggaaacctgtagtgacagtgtgccctggtcatccttaaaataacctgcatctcccctgtcctggtgtgggagtaagctgacagtttctctgcaggtcctgtcaactttagcatgctatgtctttaccatttttgctctcttgcagttttttgctttgtcttatgcttctatggataatgctatataatcattatctttttatctttctgttattantgttttaaaggagagcatcctaanttaataggaaccaannnataatgatgggcaatangggggggaatatcacaggggacaaagcttnnggaattntantgaccntaattccggctttncgnncaaacaaggggcnanggaaanttga

SEQ ID NO: 27341 - DNA, 495 bp, Homo sapiens
  misc_feature (1)...(495): n = a,t,c or g
gcatttctatgtataattataagcttattgatattaaagtgtgggtttttatgaaatgcttcctcaatactgaaccttagttgacccaaagcacatacttgtttttgaaagaggggggtagatgttgaatttgtgtttgagtttatcctaaacctaatcatcattttgtttttgtcctagaattagaatgtttctaaacacttccctccacactgtattaatgtcaactaagaacggaaattttcannnnnnnnnnnnnnnnnnnnnnnnnnnnnnnnnnnnnnnnnnnnnnnnnnnnnnnnnnnnnnnnnnnnnnnnnnnnnnnnnnnnnnnnnnnnnnnnnnnnnnnnnnnnnnnnnnnnnnnnnnnnnnnnnnnnnnnnnnnnnnnnnnnnnnnnnnnnnnnnnnnnnnnnnnactgangtgnggattgctttacccaagaatcnaaggngcntnaccggtggnaanancccgaanccaacctggtgaaagt

SEQ ID NO: 27342 - DNA, 506 bp, Homo sapiens
  misc_feature (1)...(506): n = a,t,c or g
gataataatggaatcagagagtatgttttcttcatgtcagcttgtctcactcaacattatgtctctgaaattcctccatgtgttgccacggttgtaccagtggctcatttttttctgtgtanaattactttgtatgaatatgccagaatttatcaattcaactactgatgaatttttttcattcctttggtaaatatgaatagttacnatggatattcntanaggtgtttttggcanacatatgcantcatgtctcttgactatagtccaagcaatggaattgttgggtcataggataggtgtttgtttagctgcagtaaattctgccagntttccacagtnattgggcgtatttaagactcctaccatnaatgatganncgttcnggtnctccanaccttngtatggccaaanntttaattggnntcnagccgnggntntggagtanctnggcactngtttttcaacgcnntcctnggtgtanncnntngnnntanaggangcgg

SEQ ID NO: 27343 - DNA, 472 bp, Homo sapiens
  misc_feature (1)...(472): n = a,t,c or g
gtattagacttgataatgtgtttttgggaggaagacccagagaggtaaagtatcattctcattacttcctacncaagggtacatcngatcngnatcacttatcactactgangttnaccttggncttaaggtantttancaggtttctctgctgtaaagatactttccccccttttccaaactgtactcnttanatgaaagtcactatgcatagcccacacctaaggagtggagagttgtnctcgacctccttgagggcaanntatctacacaaattatttgtaattctgcatcagagnctttatttttcctcanctgttcatncatttanatcagtgtggagtcattntgnctatggagnttatttncactttgggttttaagccaatattnccnnnnttaatttgttgctcaaantgttcnncttttggcaanacggtcnccntnnggtggcccnnggncnttnaaaatt

SEQ ID NO: 27344 - DNA, 495 bp, Homo sapiens
  misc_feature (1)...(495): n = a,t,c or g
gggctcggcgtnnnnnnnnnnnnnnnnnnnnnnnnnnnnnnnnnnnnnnnnnnnnnnnnnnnnnnnnnnnnnnnnnnnnnnnnnnnnnnnnnnnnnnnnnnnnnnnnnnnnnnnnnnnnnnnnnnnnnnnnnnnnnnnnnnnnnnnnnnnnnnnnnnnnnnnnnnnnnnnnnnnnnnnnnnnnnnnnnnnnnnnnnnnnnnnnnnnnnnnnnnnnnnnnnnnnnnnnnnnnnnnnnnnnnnnnnnnnnnnnnnnnnnnnnnnnnnnnnnnnnnnnnnnnnnnnnnnnnnnnnnnnnntgnaaaantgannttcaaggncaaatttaacgttgtaanatnnnatnttaccagntttngtgncnagncntgnntggnggnacacttcngtatcccaagtgttttggaccccaaggtggnaggatgggtttaanccngggnnnctnaaaanccnnggnttaaanggggtccccccacccnacacanatttanntttcg

SEQ ID NO: 27345 - DNA, 505 bp, Homo sapiens
  misc_feature (1)...(505): n = a,t,c or g
gtattgatttccacttcaaaaagtagtttaatactgtgaaagtactgttcctaagcaaattacagtacagatggtcagagtagaagtgtgtactcttgatacttccctcttccccctcaacagtggaatcttgctgggattttgtcagtgctgtttagatgggacgtttatccttatttgatcaatcccaaaaggcagcccctttgtggtaagttttatactgtgaaaattagttttggaacattaagccaagaagtttgcaataaaatcaaatttgtttatgtattcannnnnnnnnnnnnnnnnnnnnnnnnnnnnnnnnnnnnnnnnnnnnnnnnnnnnnnnncactgcaaccttgacctcctggcccaagtggatcctcccgcctcagcctctggaataatctggatgggncacaagcangcaccacatgctnggnanttgtaattttgnngacagagcttaacaagttgcccangntgggcntaaanccagggngcaagg

SEQ ID NO: 27346 - DNA, 495 bp, Homo sapiens
  misc_feature (1)...(495): n = a,t,c or g
ggccgagtgaggccnaggccgcgttgggggctccctggaagcggccccctaacctttctcacatcggtggtggcagtcgttcctgcctgggggcgggaggtccaggatccttgttccggttaccgttggcgggtggagganatttttcctccagatgtctgcttcccccacccctgaaccgttccttggcttccccatgccggaaatcctacttttacccctttggatgtctgggctactcgcctctttcggtaacttcaccctaggccttaagctcccggtagctgntcgccatgcggngccctgaagcgtgaaccttcgtgggtcgcctctcggctgcttgggcgctccggttctgttgctttgtggcccggggccaaggcctgaatcgagtcacctgtgtggtgccgccangtgccnggngaantccngganagcccangccgnactcccgtnngctgaaggtanngcaaggaantanaaggaaccaatgcc

SEQ ID NO: 27347 - DNA, 502 bp, Homo sapiens
  misc_feature (1)...(502): n = a,t,c or g
gcataaagcagttagagtggagttatccccctcttctgttaaatgaaagtttcttttcacagtctttccattgaaggaattagaaaaagtcatgggataactctggtcttagagcagaaatgaagttccccaaaagggggtcctggacagaatggtctcttgggcagggactaggtgctgttacttaccatcagatgtgtctactgtaagatgcttgggaggcatcaaagtggtgacagtggggggctgttggattttaccattctggaatataagagaaggggtgtggctggtgttttagtccagatagcagctgtgaccactgggagcctcattttccacacctgcaaaaggagaaatagtgatccccttcctagtgttggcgtaaagagtanatgaacctctgnctgagtctcaaatgcctgntgccacntgggtgctaatgggtcgctggctgcacnagttnagnttnnaagccaaatactnanttggcctnnctttt

SEQ ID NO: 27348 - DNA, 500 bp, Homo sapiens
  misc_feature (1)...(500): n = a,t,c or g
nnnnnnnnnnnnnnnnnnnnnnnnnnnnnnnnnnnnnnnnnnnnnnnnnnnnnnnnnnnnnnnnnnnnnnnnnnnnnnnnnnnnnnnnnnnnnnnnnnnnnnnnnnnnnnnnnnnnnnnnnnnnnnnnnnnnnnnnnnnnnnnnnnnnnnnnnnnnnnnnnnnnnnnnnnnnnnnnnnnnnnnnnnnnnnnnnnnnnnnnnnnnnnnnnnnnnnnnnnnnnnnnnnnnnnnnnnnnnnnnnnnnnnnnnnnnnnnnnnnnnnnnnnnnnnnnnnnnnnnnnnnnnnncctccagaagattctaatgttcagtttgagaaccactggcaaagagaatgcaccatgcttcttttcaccttggggcccttaaagctctttcctctaactgaactgatgctcaccccaagtatggtgggccctactcatgcttaactccagtaaccctcctgttnaaagnaaactgnccaaccctgtcaccagattatgaaacntaccaatcct

SEQ ID NO: 27349 - DNA, 505 bp, Homo sapiens
  misc_feature (1)...(505): n = a,t,c or g
gcttcaatatggctaaagtgagaagcatttctgaaaaaaaatgcaatttaatatcctttgaagtgtcagtaaattttgagccaaaatagaagcagagagtaagagaacacaaaaatagatcatttagaatctggagaagtacatgaccgtgtactcagtgccaggacttggccataggatccctgtgactattttaagttgagtaagcagccctgatgcaagaattttagagattgtctcagttttaagcttaaagacaaaatgatgaactgtatagcatgataggagcttggtaaatgtccacctttgcttccatgtgcaaagtgttcatacaggncatacatacatacaggacccattcatacaggaggaatgtttatccttaaatatcttctttttaanatatttataagttaattaattttggnaaanatggggggtccngttttgttggccaagccggccntaaannccgggnccaagtgncttccacncggnngccaag

SEQ ID NO: 27350 - DNA, 515 bp, Homo sapiens
  misc_feature (1)...(515): n = a,t,c or g
gaactggaagactcacaggaagctgaaatgcatattgctagatagaagaaccaatccgaaaaggctactttctctatgattccaactaggtgactttctggaannggcaaaactatggagatggtaaaaagagaaaaggatttctgctttcaaatccgctgtttcctgaggctgggtgctgagttcagctgcccctggaggagcagcagctctgggccgctggcagggccgcatcctcttcagtctggacaaattccctgcagccaggggaagtggcccatgcctgctgtcctggtatgcaacatcggacctgcatgctggaatttgacccttttcctgcctgacacccagcaaaataaaccccagggaanggatcaatgcctgcaaccggaatccanaanaaagaggagtgcagataancctgggtcaaaaggcaattangtcaggcctcccanggacgggcacaancccaaggtttgggtgtgaaattncnagcccaggtataaaattaaagg

SEQ ID NO: 27351 - DNA, 506 bp, Homo sapiens
  misc_feature (1)...(506): n = a,t,c or g
gcaggccggggccctctaagctcaggcttaatgccaacgagttttcacctccagccactcctatagaggctgcagtgcgagccggctggnggncctaaccacagacagacacttcctgtgtgggggagggggctgggcaaccattagacagacagcccagcccaaggccaggggccagatggcggggtctcagggaggagcaaggtccaggggcagccgggtgaatcacaaggcccctcatccctaaggcctcaatgcgtgggagtggtgagggccanaaggaggccaagaccttaagaggtggtggggctgcagcgtcccctatgcagcactganccggggtggagcgggangcgtcaccatggggcctcaagccccagggtatcagngntcttgcaananaanggagccccaangggnccctcagngacancntaagtnnnacangntnnggtatcnngnnagttnttttttnacgggncntagtnttngccctttnntggggt

SEQ ID NO: 27352 - DNA, 508 bp, Homo sapiens
  misc_feature (1)...(508): n = a,t,c or g
gagttcaaagaggatgtgaacangtgtgaagacagaccaaacgagaaaccttgctttgtaataacccactttcttaggaactaatctgttcccacagggctaatccagtcnctanagagcaagaactcactaccgtgagaatagcaccaagcannagggatccaccccgttgacctgaacaccttccattaggcaccacctcccaactgncacatttgggatgaaatttcagcccgagttttngtggggacaaanaanccanatccaaacagtagcatnnatggaatangtacgatttgcatttaccttnnaaaantatntattgnccagttacatgcttcccctnaacntcccanantacttttnctgggactttcncaaaatttagcnacntttcctncttgtntttctctgtnttatncnttgncccnaaccctnactntgnctgnnntncnccncnttcagagccnttttcgantntcttnngccnnggggaannncgnncggg

SEQ ID NO: 27353 - DNA, 528 bp, Homo sapiens
  misc_feature (1)...(528): n = a,t,c or g
gccactttgaagtagtcttgccaaaataatcaaacctcaatctgatgatgcttctagatccaattcccaatttataggaaatgcaancagnngaataangngttaaactatactacagtgatataatcagcangacccagactttagtacaactctggcataaatgatccantgtcttcaatgaatatatattaagggcatggaaaagaaggtaggaacctanaagctaaaagacttgaaaaagcaaaagcctaantgtantctttaaagttgccattanttgattatagaanagtaaagaagngattactataantatccanntaggccannnnnnnnnnnnnnnnnnnnnnnnnnnnnnnnncgngaggctannnnnnnnnnnnnnnnnnnnnnnnnnnnnnnnnnnnnnnnnnnnnnnnnnnnnnnnnnnnccanttnnngagatatnancnanattgnnccaggcatggntggaanctnccnaggggcnacctaatccggagggcnagggcaggcggttncttg

SEQ ID NO: 27354 - DNA, 531 bp, Homo sapiens
  misc_feature (1)...(531): n = a,t,c or g
gattttatacttctacctgagtttgtanagatatggattctttggtaggtttattcactcagncaaatatttatttaacaactgttgtgtggngagtttggngtatttttttcttctgatttatnactgtgcactttagtttcagatgtaaacattaacatggtatgcctgaaggnntaatgacngaattggntattgaggngaatttttaaagcacggcttttgttcatttgaaaataaagacaanctggtgctagaaatattataagcagtaagaatagcaacagtatctcttananggttatganaagnactgacaggttccttattaaggatangantgggccatgtgattaaananagctacaaanacttttgcangttaaactgggangcttccaaaattatcngagtctanatccagngaantcaagcattttggggtttcncccagccctttaagtgctttggtncagccnaactcagcgannccctnntggggggaatcccnncntggganaanncccccaa

SEQ ID NO: 27355 - DNA, 534 bp, Homo sapiens
  misc_feature (1)...(534): n = a,t,c or g
gctcttggagattttttgaagtgtatgttttaacaggattttcctgttgctctttggcaaactttgtccttttattgtttaaggagtataaataacaacagaacagaattactttctggtgcattttcctcttctcctgagtcttttatgttcaataactctgaagttcctgttattcctgcctttgaacgtagaaaatgagactctctctcaaatacctgaaactaaggcacataaaaaatttaggagnnnnnnnnnnnnnnnnnnnnnnnnnnnnnnnnnnnnnnnnnnnnnnnnnnnnnnnnnnnnnnnnnnnnnnnnnnnnnnnnnnnnnnnnnnnnnnnnnnnnnnnnnnnnnnnnnnnnnnnnnnnnnnnnnnnnnnnnnnnnnnnnnnnnnnnnnnnnnnnnnnnnnnnnnnnnnnnnnnnnnnnnnnnnnnnnnnnnnnnnnnnnnnnnnnnnnnnnnnnnnnnnnnantgacacanacgcgccactgcactgcancctgggtgncaaaagtgaaagaaaactgtc

SEQ ID NO: 27356 - DNA, 517 bp, Homo sapiens
  misc_feature (1)...(517): n = a,t,c or g
ggcatgagcaaaggttacaaagccatggcagtgtgtgacattttcagatgctcgtgtgtggccaaggcatatgttgtgtgagacagaacaggaggaagtaagactaaaagggcattttaggtaaagttgtgaagttcatcaaagattctcaggcaggggatcgagacgattagagctggttttcagagaactagggaaaaagcagggatttgctattcacagtgcagttgtggaccagcagccttggcatcctgggagcttcttagcaagcagactcccccaggcccttctgggccttgactgaaaatgatccactccttggggattcangatgcacacgancatttgagaancactggagtggngggtgggtcanntggnnangcacgcagtcagcnacatnngatggggctccggnaagnnntcaggggaaggangnaagggccnnnctcaggcctcancnggnnncnggnncncngngngccnnntgannnngnngnnggngaataacgnagcc

SEQ ID NO: 27357 - DNA, 526 bp, Homo sapiens
  misc_feature (1)...(526): n = a,t,c or g
gagagctagcaccatgagcttcaatagcagtggcaccaactgagcctcaattctctgatctgtaaaatggaactaatttcatttccccacctgattcataagacttgggtaagtgagtgtaaagactgaaagctaagtcatacaattatattgactactaaaatctaaatcacacaacaggcataaaagagcatcattactttattcaataaagtgctttttaattggcagggcaagaagttaatttgtaacaacacattatccagcaactgccactctcagtgtcacctctcagagccatgcttttcaagattcatgcagtgatatgacagcacctgctttcgattacaatctaacttggcttgttaagtaaatacactacaagagagtgcagataaacaagcttgtacaaatgcataggttctggattcaggcaattgaggggttgggtctcgccatgcggtaactgcatgactttgcccgggtaccanccttgacatgttctgaaanggattgagagcnaatc

SEQ ID NO: 27358 - DNA, 539 bp, Homo sapiens
  misc_feature (1)...(539): n = a,t,c or g
gactggagatgatgaaattgggaaactataaagccagagtcctgggccctctgttcacataaactctaaattcaccacgaatggtggcaaagccttatggggaaagattgtgagccacatgcctgtgtcttcaatgagaaagagaacatggccaagaaagaggcagagggnnnnnnnnnnnnnnnnnnnnnnnnnnnnnnnnnnnnnnnnnnnnnnnnnnnnnnnnnnnnnnnnnnnnnnnnnnnnnnnnnnnnnnnnnnnnnnnnnnnnnnnnnnnnnnnnnnnnnnnnnnnnnnnnnnnnnnnnnnnnnnnnnnnnnnnnnnnnnnnnnnnnnnnnnnnnnnnnnnnnnnnnnnnnnnnnnnnnnnnnnnnnnnnnnnnnnnnnnnnnnnnnnnnnnnnnnnnnnnnnnnnnnnnnnnnnnnnnnnnnnnnnnnnancccggcaactgtccgtttttaaggggntatgttactttgtaattaaaaaatgaatttggtttaattggtttggtttgggaanacnggcnaaaaaanaaag

SEQ ID NO: 27359 - DNA, 533 bp, Homo sapiens
  misc_feature (1)...(533): n = a,t,c or g
gcaaacattcagtccataataccttacttatcaggaattcctgcttcccacaagagttcccacaactcttggaacacagtcagtgggaatatcttttttgttggtcgcatcaatttatcaagcacctatatagcccttagtctgttcccagcactattcaaagcactatgtaaatattaacttatttaatcttcataactttattaggttgatgctatactaatactatttgtattagtccattttatgatgttataaaagcatacctgagacnnnnnnnnnnnnnnnnnnnnnnnnnnnnngcttatggttctgcagacagtacaagaagcattagtgctggcatctacttctagtgaggnnnnnnnnnnnnnnnnnnnnnnnnnnnnnnnnnnnnnnnnnnnnnnnnnnnnnnnnnnnnnnnnnnnnnnnnnnnnnnnnnnnggaggaaatgccaatctttttaacanctanctctcntganaanaanngagnaangaccacncaatnaccgggnnnggnnccagncattt

SEQ ID NO: 27360 - DNA, 542 bp, Homo sapiens
  misc_feature (1)...(542): n = a,t,c or g
gattcaaccctaatctcatgttttggcacttctgaactatagcaagcataagggctcaactcttatctagttgaagcttacttgggtctttgagaatagtacatctcaaaattaaacactttcttagtccttattgttaagttgtttttggaattattgtcttatttgtctgaattaagtgtgctgcaggacttataggatctgatggatgatttgcctaaaagttggtccaggtcaacctcagggcatttaaatgcttggtccagccactttctgaaagttgactgaaatatgttgcacagcagggtagaggaggacaagtttactangatgtcatttttaacctgcttgtcttcatctctgactgtanaaatgtatattcattataagtttgccacaannagagaatagangttattcnttgancaaccaaattccaagngcaatggaaattcactgcaaccgncttntaattagcgcccancannnttnttaaaaggngtttangggnanggnnaattttttcatncgnaaggggggtt

SEQ ID NO: 27361 - DNA, 527 bp, Homo sapiens
  misc_feature (1)...(527): n = a,t,c or g
gggtgaccaacatgcttatgataattaagagaacaggggtcgaaggtctttctacccagaccagtgctggtggaaggaggacctgtgcgtgtggccagttctgccaaggaagcagttgatttgggttccctctgggcccgggccaccgggcccacagatatgggtcagtgtgctggtccttgcggtgctgagactgttcctgacactttaagttttanaggttggttgaatcacaagaggtgattcttgattattaggacatgaaagataaaagctctttaataagagtttttctgccattgttttttgtatgagaaccagcaggcaatttaaaatttctaatttggtcctttgattttgtttgggaggggtgagttacacgtattattttattcatgctgctctgtcgtantttgtcagacattcctgtttttcntnccccacacaccaaagaaaatgaaagccttttccttangnccacatncannaatgggaaaanccctggngnaaaaatccnaaagnntttt

SEQ ID NO: 27362 - DNA, 386 bp, Homo sapiens
  misc_feature (1)...(386): n = a,t,c or g
gaccatgagctaccctggtgctgtgttggctggttttaatttacagtaaataatagctttaaatttatttctatttatttggnaattatgcataaataaaggtagcacatcctagtatctaatactggtgctacaatattctcaactcctgaattcccatctaatctcttgagaaagctgttcccacttanacgagagcaggatgatgacgtggaggactgtctttanaccacatataggacaagaatagcaaagtggaatgtcttatactgtgttttaaagtctacaaaggcttaataaagactggctagactacagactatgcctgatgtaaagaatcagattattatcantgtggaatatcaggcacttgccactgtgggccg

SEQ ID NO: 27363 - DNA, 383 bp, Homo sapiens
  misc_feature (1)...(383): n = a,t,c or g
gcttatatctacagctatgccctatacaaaagtcatatacatggcaagaaacaagtggaagtttgtaaatttattcaacaaatatttgttggccatatgttatattctaggcacttcatgaaattacgttaaactgctcccatgtatggtacccagtgcttcagctatgacttagcctataatgtcacattggagttgaaattaaagttataaggtagtgtttttatcagttgtttatttagactaaaatgcctttaaaaagaaagtcgtctcttattcacttctgatttccttcaaaggaaggttggggggaatgaagtactaggaagtgtagnacgttaaatgttanatgtcattgnttccagtcntgagtcntcnttgga

SEQ ID NO: 27364 - DNA, 385 bp, Homo sapiens
  misc_feature (1)...(385): n = a,t,c or g
gcggcacgagcggcacgaggaaaatgagacaggatgtgctaagggacaggcagagtgcctatcagagctgaggccttcattcaacttcctgggcccttcacatacctgcaacttactgtctcccaagtgtcccatccctactcttgtttatctcttctctcatgctctttgccatgcccagtaactgaagatccatcaatgattgctgcatattgaactcttttctanaatggtatcactgtttagtttatgagcactgatactttctgatttaatttagcctctctgtgattacacttacatagtatatgttcagtgagcagcaagttatgacaagtatcctgctttcttttatttgtgtataaggnacagttgtattataagc

SEQ ID NO: 27365 - DNA, 510 bp, Homo sapiens
  misc_feature (1)...(510): n = a,t,c or g
aattcggcacgagnnnnnnnnnnnnnnnnnnnnnnnnnnnnnnnnnnnnnnncggccggtgctgccccggccgggccgcggccccttccccggcagtggcggagattccggctctcgctcgggcaccgacgtctggcgccgcgggaaggagggcggtgggaatgggagggtgagcgtgtggcgaccgagtggggctctgaacttcctcagcgaggcccgaggcgtctccacttaaaggcattttttctggtcttcccgactcccgctttacccctgcctccccccaatatccaaactacaggacaacttctccgttgaaaaaaacacccccggcgtgagaggccatcctggtgatcctaacagtgccttccagcggcctgtgttttactctggatatagctgattcaagatgtggctcacggtgtgccctcttccagcaaaggatacccttattcaacttgtccanaaatctctttacccctcctganangagacacaactgcatcttaa

SEQ ID NO: 27366 - DNA, 496 bp, Homo sapiens
  misc_feature (1)...(496): n = a,t,c or g
gggggggtggggtggggagaaatcacataaccttaaaaaggactatattaatcaccttctttgtaatcccttcacagtcccaggnttagtgaaaaactgctgtaaacacaggggacacagcttaacaatgcaacttttaattactgttttcttttttcttaacctactaatagtttgttgatctgataagcaagagtgggcgggtgagaaaaaccgaattgggtttagtcaatcactgcactgcatgcaaacaagaaacgtgtcacacttgtgacgtcgggcattcatataggaagaacgcggtgtgtaacactgtgtacacctcaaataccaccccaacccactccctgtantgaatcctctgtttagaacaccaaagataaggactagatactactttcnctttttcggataatcttgtagacacntacttgatgatttaacttttatttccaaatgagacaaancngatgtaccttcatcagtaacaaactag

SEQ ID NO: 27367 - DNA, 501 bp, Homo sapiens
  misc_feature (1)...(501): n = a,t,c or g
gcattttggaagaacacttagaaactgagaagacacagtaaacacactagnnnnnnnnnnnnnnnnnnnnnnnnnnnnnnnnnnnnnnnnnnnnnnnnnnnnnnnnnnnnnnnnnnnnnnnnnnnnnnnnnnnnnnnnnnnnnnnnnnnnnnnnnnnnnnnnnnnnnnnnnnnnnnnnnnnnnnnnnntgctaataaaacatgctagaatgattgattagggtaaggaggagggctttggggtataaaagggagtaaataaaaaaggaagcagaagaagctcactatgtcatggagtgaaagggctggatggcagggtggacaagagcaccatcagggagacttanccagaaactgctgagagaacagtgaccagaccttgcagcacaaaatggagaagatggccaagcctgcaggagactgaggaangggantttcagagcctantggttacanaatggaggaaggaaganggaaaaggaggactnatttggcacccaaa

SEQ ID NO: 27368 - DNA, 507 bp, Homo sapiens
  misc_feature (1)...(507): n = a,t,c or g
aggaaagaaaagctaaaatcaatgccttgcaggaatcaaggttatattttggatggattcccaaagacctatgatcaagcaaaagacctgttcaatcaggaagatgaggaggaggaagatgatgtcagaggcagaatgtttccctttgataaattaattatacctgaattcgtttgtgcactggatgcttcggatgagtttctgaaggagcgtgtgataaaccttcctgagagcatcgtggcggggacccactacagccaagaccgattcctccgggctctgagcaactaccgggacatcaatatcgacgatgagactgtcttcaactattttgatgaacttgaaattcacccgatacatattgatgtaggaaaacttgaagatgctcagaatagacttgctatcaaacagctcatcaaagagattggggagcctcnaaattatggttaacagacgaagaaaaggcagaagangaccggaaggtgccgangaccgctggccaaggag

SEQ ID NO: 27369 - DNA, 491 bp, Homo sapiens
  misc_feature (1)...(491): n = a,t,c or g
gcttcagtgggagaaggaagatcaaacatccttggcttatgagtagaagaggccacagcctgtcacagaagtcgggggaacacgggcctgcttaatgtcttaccaaatgcctatgttttctggctctacaaagcccattcacacacatcctcttaatcttcacaggaaccctatgaagtctagttcctactgccactttaagaataagaaaatcaagccaagtggcccagctaggacgatgcagaggcagcagaattccaccagggggcaaaaaagagtaagcagcgtggtggaaatgtacaaagccccgcatcaatggtgttttccccacaatctctccctaaggctgtcctactaaataaaggagaatttcaaggcagaaaatatcantaaagaaacaatataatgtcatggaaacaacacaggcccaactcgntcctgcatcttactancttacctancttgagcaatttctaaagtcncngaacctt

SEQ ID NO: 27370 - DNA, 526 bp, Homo sapiens
  misc_feature (1)...(526): n = a,t,c or g
ggaattatttggaacgagtgcggnggtnnatcctngtatnccnacnactttggnaggctgaantgagaatatcatannnnnnnnnnnnnnnnnnnnnnnnnnnnnnnnnnnnnnnnnnnnnnnnnnnnnnnnnnnnnnnnnnnnnnnnnnnnnnnnnacatnnnnnnnnnnnnnnnnnnnnnnnnnnnnnnnnnnnnnnnnnnnnnnnnnnnnnnnnnnnnnnnnnnnnnnnnnnnnnnnnnnnnnnnnnnnnnnnnnnnnnnnnnnnnnnnnnnnnnnnnnnnnnnnnnnnnnnnnnnnnnnnnnnngtaatannnnnnnnnnnnnnnnnnnnnnnnnnnnnnnnnnnnnnnnnnnnnnnaaggcgggcaaatcacnaggtcaagaaatggggaccatctgggccaaatnnnnnnnnnnnnnnnnnnnnnnnnnnnnnnnnnnnnnnnnnnnnnnnnnnnnnnnnnnnntcccagctactttgganaatnaggcagggnaatcacttnaaccnggaagcgggggt

SEQ ID NO: 27371 - DNA, 519 bp, Homo sapiens
  misc_feature (1)...(519): n = a,t,c or g
ggcttactactaaatgtaagatttttaaaaattatggtatcaataangaagctatgtttattaactggttatttagtctgggtccattaatgtctatatattgcattattgatagagcatgatcacttcttttaaaaaagtcagtttagttagcattgaaccttatagaccaacttcaaattataaccaaggtggaacatccctggggggtcgtgtgattgcntgaggnaaccgggatttanaagatctggcctccaatcccaantcnagcagataggaatgtactanctangcttataacttaacttctttgagcttaacagtcaattaanatccaaatgtggnctcccattgatcctgagnagaacaccagaatggngaccgttattccgtgntaaacaagannttaaganttcttaaggttanntgagaatttggggaagagnnntctgctcnggnntcnacnagntcagcaacccctnaggtgggnaccgttncctacactccnttnccgcccta

SEQ ID NO: 27372 - DNA, 495 bp, Homo sapiens
  misc_feature (1)...(495): n = a,t,c or g
gtggggctggagagatcacaggttgcttctgaagttcacgacatgtgctaaggaggatgtgggtggttcctggatgacggtagtgcatcaagtgtgtaaggagatgtggaggtggggacgccacttggatgtcatgcagggctcactgtaggtctcactcagtgaaacctggctgggcgtcagtcacctgagggttatagaaacctcgtctccagcccacacgccctgaatcagaatcatgaggcgagagttgggcatccatgaaagctgcagtggtgatgccgggggtcccaacaggcaggcaaggtgatgacccactggcccagtgcaagttgacattccagcctcttgatgtggctgccaactaaagtctcctcgacccaaacacaagcangtgctgcgttaatctcctatcctaagactaagactgtcttccacaaacccttgtttgacaacctaaatgttgttcctgaaagactttgtgatctaaaatac

SEQ ID NO: 27373 - DNA, 491 bp, Homo sapiens
  misc_feature (1)...(491): n = a,t,c or g
nnnnnnnnnnnnnnnnnnnnnnnnnnnnnnnnnnnnnnnnnnnnnnnnnnnnnnnnnnnnnnnnnnnnnnnnnnnnnnnnnnnnnnnnnnnnnnnnnnnnnnnnnnnnnnnnnnnnnnnnnnnnnnnnnnnnnnnnnnnnnnnnnnnnnnnnnnnnnnnnnnnnnnnnnnnnnnnnnnnnnnnnnnnnnnnnnnnnnnnnnnnnnnnnnnnnnnnnnnnnnnnnnnnnnnnnnnnnnnnnnnnnnnnnnnnnnnnnnnnnnnnnnnnnnnnnnnnnnnnnnnggcttccgtttatctgtaattcccacatgtacaatgtagtgaggaaaacaaataattagttatgctgtaaggctgaatgagatgagttttagtgatagaaggacaaagaggaaaaaacagcagtgtgaaaagatccctgattaattttgattcctgataccaaggaaagcttacagaagangtacctttgaggtgggcattgaaggaca

SEQ ID NO: 27374 - DNA, 494 bp, Homo sapiens
  misc_feature (1)...(494): n = a,t,c or g
aaaaccaaaaagatgggaggaactaagacacaaaatcaagacccacccataaaagaaaaaaattgaaaaattccactccatcaaaattaagaacttctgtattttgagagatactgttaagagaatgaaaatnnnnnnnnnnnnnnnnnnnnnnnnnnnnnnnnnnnnnnnntcagatacgttcttcttcacccgtaacttttccatttatattttatatttgttgaagggagcaggtcttttttcccatagatttttctgctttctgctctgatggtcgcttcccgtggcagggtcagcccagggcttctcagcccctgcactgcttgacatttggggcaggaggttctgtgttgcctgcantgtgctgagcagcatccctggctcccccgagccanatggtggggactgtccccgccctcagtggtgaggacagaaatggtccanacattgcctcgtgccctggggaagatcaccaccacacttctgtaaag

SEQ ID NO: 27375 - DNA, 581 bp, Homo sapiens
  misc_feature (1)...(581): n = a,t,c or g
atgtaaatatgggtgccatgagcacatggatggtatttaaactactgggctgtatgggagtgccatcagagtagagggctgggtctgagccctggggctctctgtgtaggttagggggcagataagaagcagaaacagaccgaggagtgtctggtgatgcaggagaaaaatcaaagtcgcatcacanaagccaaaagaaggtctttcaaggaggaagtggttagctgtgctaaagcctgctgagatcaagcaggatgggggacattcttatctatgttcctctgatatgaatgcagggacacaaggttgaatatgtggctccctaccagaaacttcccaccggcatctgtggaggtgtggggctggagagatgcccancacctgccatcattttgttcacatggtgatcggcaacttcactcctatgagctttgtancaaaataccaaatattcanggcgtggtggtttctggttcatggctacaattttttggattggtaatgtcattttgccantaggtaatnggaggacaagnatcagncngaatcttangatgnttctaagaacnggncaccctaac

SEQ ID NO: 27376 - DNA, 603 bp, Homo sapiens
  misc_feature (1)...(603): n = a,t,c or g
tcggcacgagcatagggctcggcgtgcattgttattgctattttcttatgcacaaaagccatacacacnnnnnnnnnnnnnnnnnnnnnnnnnnnnnnnnnnnnnnnnnnnnnnnnnnnnnnnnnnnnnnnnnnnnnnnnnnnnnnnnnnnnnnnnnnnnnnnnnnnnnnnnnnnnnnnnnnnnnnnnggcatctccatgacaactctgcgacataggtactattggagttccccttctacaaatgaagaaactgaggctggagagaatgcatacactggtatctgttganagctactgtgagcctggcgttctacacacactgtctcatcggctgaacattcacggcagcactatgaggtcttgctactgtgaggcaggcatccctcttcccatttacagatgagcacactgaggctctgccccagtcatgcagtcccacagcttctactgaatgcccggctgaaatgcagctacagtagaactgggcgcgggcaaggganacgggtgggggggttgttttggcaagggtgttattantantattanttaattancggccaagctatccttatgaggtaatttacttggaaggctcnttaaa

SEQ ID NO: 27377 - DNA, 604 bp, Homo sapiens
  misc_feature (1)...(604): n = a,t,c or g
aggggcttggaagaaaataatcaagaagagcaaagcatggattcaaacttaggtgaagcagcatctgggtgtgagagtgaaacaagcgtctctgaagactgctcagggctatcctctcagagtgacattttaaccactcagcagagggataccatgcaacataacctgataaagctccagcaggaaatggctgaactagaagctgtgttagaacagcatgggagccagccttctaacagctacccttccatcataagtgactcctctgcccttgaggacctgcgaaatccagaacaaagcacatcagaaaaagcagtattaacttcacagaaaagtagtgaataccctataagccagaatccagaaggcctttctgctgacaagtttgaggtgtctgcagatagttctaccagtaaaataaagaaccaggagtggaaagagtcttgctcgtcactcaggctggagtgcatggcgtgatctcggtcatgcaactcgtccccaggtcaagcatttcctgctcagctcccgagtgcnngattcaggngccagcacaaccaactactacctgatttnaacagtgggaatatgtgcccaaacaaccatg

SEQ ID NO: 27378 - DNA, 612 bp, Homo sapiens
  misc_feature (1)...(612): n = a,t,c or g
gcagagtgtcactttcgaatcctctttcaccctctgggtaatcttttggatattcaactgtagtaggctctgcagagggcataggcagagtacctagcccactggagttagtggttgggctggagaccctgccttgaaggatgctaaagcatgagctgatttgggagggattgtctgagcagtgacctgtcaccacctaatcctactcagtcttatccgttccaatgggagtcgagggaggctaggtgggaggatggctacaaacagccatttgcttatctgtggatgttggaaggtgctctggtggattatggaattcaaggttcttggtttttacccatgaggacactgaggcccaaactggggaantgacttggcgatggtcacaaaacacctctgggcagatgcanggaaataantcagcccctgactcccaggcatgggccaagctgcaaganctggatgccttgaagtgtcctgtttgcatcatgacnttgcacaaatacagtgaatctggctgtgggcccaagccttaatgcccaagtattggtgaaggcattaactatctgaacaacaccaaagtgccggaaaccntctgctanggggatttcc

SEQ ID NO: 27379 - DNA, 611 bp, Homo sapiens
  misc_feature (1)...(611): n = a,t,c or g
agggttcctggaggtcttactctgagaannnnnnnnnnnnnnnnnnnnnnnnnnnnnnnnnnnnnnnnnnnnnnnnnnnnnnnnnntggagactctccnnnnnnnnnnnnnnnnnnnnnnnnnnnnnnnnnnctactaccatgcccaggactcatgtgattatactgaactgacccagataacccaggataattcacatctcaagacccttaaacttgatgacgtctgcaaagtcccttttgccataaggttatattggcatatggtccaggaattagtgcanagccacaatctcagaaanaaaatganagtggataatgaagacngatcatctgggtgtaaacctgaggatattccagaatatacaggttanagagataagaaagacactancaaggaaactaanggcagcctctaagtanaaggaaaaaatggtganttgtaattggcggtgaacacatttcaagggacggtatgttaattgctgctgacacatcaagggnnataagactgngcattggcantggttagcacatgggnttttgctgactggccctgacatttaatgattgggggggcatgctngagacngattcaggacgaggactttc

SEQ ID NO: 27380 - DNA, 558 bp, Homo sapiens
  misc_feature (1)...(558): n = a,t,c or g
gctgccattttattgtgtgaacgagagctggaaaccantgaagaaatgaaatctcacccacctgccagccattgacaatcttctggttaaaaatcccaaattcatancggattccatagccgtatgctgccaggcccaaggtagccattgagtcaaggaaacacgctgaaaaaatcaatcacagatcagtcagaatcaaaggcacggnaccaaggtcccatgcggaggcagcccacagggcgcaaggcataaattcagaggggatcacactgacttcaggcttcactgagaggaaaactggagccctcagcctctccatgagancctgtggccacaggcanaagacatcaacgtggtggctactcgaaaggcgtgggangatgggggagatnaagaatctatagaactcggcangcctggaactctcangcacgaagcccccactgcccatctcagacatccattaggtganggctcgcatcccttgcagtcactgaaaccangtgtntgaagaggacacttanaatagnctacnncctgntgaancggacacatgga

SEQ ID NO: 27381 - DNA, 616 bp, Homo sapiens
  misc_feature (1)...(616): n = a,t,c or g
aaacctgtgcttacagaaagaaacacgtgctagcaacccacctatgcggaaagccacacagagccattgttttctgcactctcaggtgacggctcacatttgccccagggaaggtcacagctgcctgaacttttaaaactcccagacacgcactgcctgtgcaggatccggagcccagcagcactgccagggccttgaagtgcttcttcagagacctttcttcatanactacttttttttctttaagcagcaaaaggagaaaattgtcatcaaaggatattccacattcttgacagcattctcatcatctctgaggacatcaccatcatctcaggatgaggggcatgaagctgctgggggcgctgctggcactggcggccctactgcanggggccgtgtccctgaagatcgcagccttcaacatccagacatttggggagaccaagatgtccaatgncaccctcgtcagctacattgtgcagggatgcaccagacacctatcactacgtggtcantagccactgggacggacagcttanggagcctactgttctgtaaagccnacagtgtctgcngtganantannctacnanatggtncaacctgcggancaaac

SEQ ID NO: 27382 - DNA, 581 bp, Homo sapiens
  misc_feature (1)...(581): n = a,t,c or g
cacaataaaaagctaatttctctcacagcagtgccctggaatgatacagctgctccacaatcaacaggggcctcaattattttctctgtctatctcttgctctaccatcctcaatacatagcttctacctcctgatccaaggtggctgctcctgatctaaccatcactggtgccaggaatagggaggaaagaaaaagggaaaagcatacccaaatctttaagaactcttccccaaagttgcatataccaaatatgcttccatcccattggctagaacttagttccttgtgcagaccttactgtaaagcaggctggaaaatataagtctttattttgggcaaccatatttttgtgttagccatttnnnnnnnnnnnnnnnnnnnnnnnnnnnnnnnnnnnnnnnnnnnnnnnnnnnnnnnnnnnnnatcacagttccacatggctgggaagcctggggaaactncaatcatggtggangcaaanggaacaattccttctcaaaagggggacgacaagnatgattgangggaaactgcactntaccaccaattctgagatcctcacagacacacaggggaaca

SEQ ID NO: 27383 - DNA, 486 bp, Homo sapiens
  misc_feature (1)...(486): n = a,t,c or g
gggggtcagacccattttgttggtaaaagatttcatttacagccactctcttcttggcatggtgttctggggaacacaacatggtggagtaccacggctaaaacattttagcaaaactaaccgaattgatgagtgtaagtgatcactaagaagtctatgttcgtagcaggtacattaacccctctcttatagaaaagtcacttcttcagcatcctcaccttctcagaacccttcccaggaacgaagatgtttacaagaagaccttgtaaactttagagacagggctagtaggcatggttttctggtttcctgatttctggcacattagaggagggtggggctgctggttccccaactgaagcagaaatgacagctgacaaactgataaaanggtgtggtattgaaaancatacaatcagagcnagaactcaaaagcttgcgggctggggaacaancagcccacagaanttcagagcccctgaggga

SEQ ID NO: 27384 - DNA, 482 bp, Homo sapiens
  misc_feature (1)...(482): n = a,t,c or g
nnnnnnnnnnnnnnnnnnnnnnnnnnnnnnnnnnnnnnnnnnnnnnnnnnnnnnnnnnnnnnnnnnnnnnnnnnnnnnnnnnnnnnnnnnnnnnnnnnnnnnnnnnnnnnnnnnnnnnnnnnnnnnnnnnnnnnnnnnnnnnnnnnnnnnnnnnnnnnnnnnnnnnnnnnnnnnnnnnnnnnnnnnnnnnnnnnnnnnnnnnnnnnnnnnnnnnnnnnnnnnnnnnnnnnnnnnnnnnnnnnnnnnnnnnnnnnnnnnnnnnnnnnnnnnnnnnnnnnnnnnnnnnnnnnnnnnnnnnnnnnnnnnnnnnnnnnnngaatctaaagggatcttgaggccaaaaantttgaaaatgcgtttnaaaanattcnaaagttgcttcaaaataancaactttccccangngcggggggncatgccngtaatccancnactttggaaaaccaaggnggnaaannacntnaggnnaggatttaagacaa

SEQ ID NO: 27385 - DNA, 485 bp, Homo sapiens
  misc_feature (1)...(485): n = a,t,c or g
gcctggacatgatgggcctcatggaggtccttccggagcgctgcgtgcanatcgccaagcgggagctgctcttcctggggcccgtgggcctcatcatgtacctcgggggcgtcttcttcatcaaccggcagcgctctagcactgccatgacagtgatggccgacctgggcgagcgcatggtcagggagaacctcaaagtgtggatctatcccgagggtactcgcaacgacaatggggacctgctgccttttaagaagggcgccttctacctggcagtccaggcacaggtgcccatcgtccccgtggtgtactcttccttctcctccttctacaacaccaagaagaagttcttcacttcaggaacagtcacantgcaagtgctggaagccatccccaacaacgggctcactgcgggggacgtcctgcgctcgtggacactgccaccgggccatgaggacaacttctccanatctccaagaccccca

SEQ ID NO: 27386 - DNA, 491 bp, Homo sapiens
  misc_feature (1)...(491): n = a,t,c or g
ggtgtgtggttgtttttgttttgttttgtttttttgttttcttaccacacacacacacatacaaaacagctgccctggcccctagagtagtgaattttcaccagcagccacctagggggtgaattttctgatcattttgggctcagttctgaagttctgactttgagccccacctcactctgaatctacaatcattctctctcctgtcatcctgttgcagtctgctcagctgcccnnnnnnnnnnnnnnnnnnnnnnnnnnnnnnnnnnnnnnnnnnnnnnnnnnnnnnnnnnnnnnnnnnnnnnnnnnnnnnnnnnggtgctggcatggccgggttctggtganggctctcttcctggcttgtggacgggcgccttctcactgtgggctcacctggcaaggantggggccgggagcaacgntctggtcncttaaaaagctactaatcccatcgtaagggngatancctcatgactgcatccaaacctaat

SEQ ID NO: 27387 - DNA, 485 bp, Homo sapiens
  misc_feature (1)...(485): n = a,t,c or g
gnnnnnnnnnnnnnnnnnnnnnnnnnnnnnnnnnnnnnnnnnnnnnnnnnnnnnnnnnnnnnnnnnnnnnnnnnnnnnnnnnnnnnnnnnnnnnnnnnntgaaacagccagtgaggaggaaggctccccgccttccccccgccggaacatagctgctgctgggacaccctcttggtggggaanaaggctggttagcttcatcagagccagcagcagcagaccagggacgggcacctaggcagtggcctcagagtgancaggagttcctcanaaacacacacagggacggcgtggcgcatgctctgccagctccatgcctccttcccattgtggggctggggtacgtagggcagantcatgcctccgggangncatcggggtgcgctctggatggncnttggcnttnccncctnntggcnnagttncaggtncggngcccggncnncccnnttnggggnntctnncgnnngtttctggncnccgtt

SEQ ID NO: 27388 - DNA, 482 bp, Homo sapiens
  misc_feature (1)...(482): n = a,t,c or g
gggatggttgggctgagggtctcacaaggcaatagtcaggaggtcggcaggattgcagccatccaggggtttgactggtggtggggaatccgttcccaaggtggcgagtctgtggctgttggccacaagacctctccacagggctggttgactgtctaacatggcaactggcattcctcagattgagggacccaatagagagagcaaagaggaagccccaggcctctcnnnnnnnnnnnnnnnnnnnnnnnnnnnnnnnnnnnnnnnnnnnnnnnnnnnnnnnnnnnnnnnnnnnnnnnnnnnnnnnnnnnnnnnnnnnnnncaagcgatcctcccatctcancttcccnantacctggantacaaggacgtagccaaatgccancacacctggctganttcttaaaaaatatttttgtaggccggncttgntnntcancctgtnatcccancactttnggangtggggcaagtggtcacct

SEQ ID NO: 27389 - DNA, 655 bp, Homo sapiens
  misc_feature (1)...(655): n = a,t,c or g
ggggnnnnnnncncntnnacgnnnnnnnngtnnntgnnntnctgntgnncannnanntnnnntnntntttnnnagacccnnngnnnntntaaannntntgtnnnccnnnnnttancnncaannngnangtcngngncttctnnncnnnngcggnngnctattntgagncctgccccagagttacactttagggcactgtggggggcggggagcagacaggggccccccancacgcgggctcccctgacctgccttttcccgcaggagtccctgtttctgctgctccagtacctgccccctggggtcatcgccctggtcaacttcctgggtcccctgctgttcacatttctggtccagctggagaactaccctcccaacacggaagtcaacctcactctgatctggtgagtgccacccttggtggggacaagtgggcatgtaacaagtctgcatcctgctgctctcttttggttgtcacctggcacctggggtccccancttgagaggcttcccccnttnataagtggcccaaagggaaangcaaggtacacacctnaacagcacaacgacctcaagggccccaaggtctaaaggctttccaaatcccccacntccaaaggaagccgcattctggacaaagctccgggcattcaat

SEQ ID NO: 27390 - DNA, 486 bp, Homo sapiens
  misc_feature (1)...(486): n = a,t,c or g
attcggcacgagcccacttcatctgacccaaggaggngtcaattctaaaantattttatcaagcgaggttggcatttttctggaaatgctgtancctgagtgccancagggcatttgggaancttattttggaaaccctttcattatcatggcactcaggcccttataagtggttccaggacctcataccctgatgggctgcantgataggaggaccaaaaaagggantgttgaagtgnaaggggacggtgaagtcctcttctcccaagccggcaggaggcacgataacttatctttcttccacgtctcctgtctccagcctctcctccaggaccagagggcttccngttgcttctgnaggctggttngctggaggcaacctgaacgaatgctgccanataggtcccaggagcngatgcatncgatggggctggggnngcanaattngctgntaanantggttcctgggcancttggnctcacctt

SEQ ID NO: 27391 - DNA, 485 bp, Homo sapiens
  misc_feature (1)...(485): n = a,t,c or g
gaccctgtggtgtttaatctacacttaactgcatctttttagctactatatcttaataaattatgctgaaacttatttctaagcaaagctttttgcctcttcaggaagggaaagacgttgacatttagttgatatagtattttctcaatatagtattttgtgatacacttatgacatagttattatctcttttatacataattatgttgagttttagaaaagctcagtgattcttaatgccacatggctggtaaatggagtggtttacatttgaacccaggtatgtctcaacccaaagcctcttcctacatcacactgaatgccacagcaagtcaccatccacttgccctcctctcanttggcacttgctctggagacacaacagagcctatatcattcaatctgtccccccttctcagtangttcctttagacttgtcctaggacttctgtcacaaagtcaaactggngcccacaatgttgtta

SEQ ID NO: 27392 - DNA, 484 bp, Homo sapiens
  misc_feature (1)...(484): n = a,t,c or g
gctataaaataactaggttgtagctcanacttctacttgcttaattgtgtattacatgataaattacccgattctagagatatgcactaaccactctcattagctttctttgggaaaagtctgcaccaaagataaatagtgatttcaaaataagttttaagcatgaacttgattattttgggtggancccntgnaanantttaccaaatancccaagnnnaanaantnaacnaaagggcnatanaagnnttnagnaaaaccnaaanttnaggcngtaanacctgccattttattanatncttatttttatttttcatgcagcagtattttcgtttattgggttttgtgcttttcttttattcncnangtaatttgngtgcctttagancccaaacttgctgttgaaaatatcccccccattgttatgataacagaatgttcaaantcccnngtgatgtangctagaataaatgggccattgaac

SEQ ID NO: 27393 - DNA, 483 bp, Homo sapiens
  misc_feature (1)...(483): n = a,t,c or g
gaaaatagttctgcaggttgaagccatgtctacatgaaagtcctcagtaantgttanagggaacanggcggacatatccttatgccacccccgctggaggatgtgggcagcttagggccctggaggcggtgcggcanggaaaangggtgcataggctgtggctggtganccggtcaggcacacaaggggcccttggatcgtggactggttggttttgccattttgttgtgtgtatgctgcttttcttttctaaccaanaggctggttttggcatctctgtcccattccctgggatctggtggtcagcccnangatanaaanccagggntggaaaacaatgaaagggncaggagatggnattccntcangccggcaccacaccctaagacattaagcctcatgtcaagggacctcanncgatattaggaatcaggtctggaaatttanaatnaaangnatgagactaangntatctgctccctt

SEQ ID NO: 27394 - DNA, 491 bp, Homo sapiens
  misc_feature (1)...(491): n = a,t,c or g
gagacactattttgataggcaataatcatataacaggaagtggaagtaatggnaacgtgccttacctgcancgaaacgcactcactctacctcataaccgcacaaacctgaccatcatcgcagtaggagccgtggaaaaaccaactatctaactccactcaggggcttcacaacggtcagagttcacattcggcaggtcctaatggtgaacgacctctctcttccactgggccttcccagcatctccaggcanctggctctggtattcananncataacggacatcccaccctgcctancaattcagtaacacanggggctgctctcaatcacctcncctctcanactgctacctcangtggacaacaaggcattaccttaaccatcagagaagccttaggaaacatattngacngtgcctgaaacaatcaggnacactggagagacactaacanactgccagtgtccagggacttcctaatcatgtccat

SEQ ID NO: 27395 - DNA, 488 bp, Homo sapiens
  misc_feature (1)...(488): n = a,t,c or g
nnnnnnnnnnnnnnnnnnnnnnnnnnnnnnnnnnnnnnnnnnnnnnnnnnnnnnnnnnnnnnnnnnnnnnnnnnnnnnnnnnnnnnnnnnnnnnnnnnnnnnnnnnnnnnnnnnnnnnnnnnnnnnnnnnnnnnnnnnnnnnnnnnnnnnnnnngcatggtgtagctgctcctggaactctgagcaaacagttgtctccctcttccctcaggaagacgcgaatgagggagggtctctgacttagtgggctcagccagcaggggccttttccaaggacaggctttggagagtaaggactcttcagtctggaaagatagaaacaagagagttgggagtcangcccctcaaataatcganggagaagttanggccaaccattgccttggtctccggagtctcagaacacagaacttagagcctgctgcacagcctcacggggagtttggggaaaataatccancanagaggaaaggaaacngaggaattgt

SEQ ID NO: 27396 - DNA, 494 bp, Homo sapiens
  misc_feature (1)...(494): n = a,t,c or g
gatantacatatggttgttcctgatctganagttgaacctgaganctgggaattctaancatggntggataacgaaaatctgttgtaggaagttaaaattgaaatggcatttggagtcccctaagctgggctatccttgngtacacaccatttcaaggagccaacgtggantctacgatggnaatttgccccanaggaatatgaanntgccgtggcanagagtattttatagaagttaaatgtctaaccttaatggattgctaacgttggcttanattantgctaatgactacaggattttacanaatgtgnnaagctttgncntaatgactatngttantaanannnncccatgagtagcanntgacanaattnccactnaggaaccctgttacaggcattcaataacgattgacttctatctaancatcaccatttagccttgnnacatttacncntggggatgattcctanaggcattcatcanaaccaca

SEQ ID NO: 27397 - DNA, 487 bp, Homo sapiens
  misc_feature (1)...(487): n = a,t,c or g
ggtcatatagcagggaaatacagagctggaactcaagctcagatttgtgtgatgctggattccatgcactgctggcaatgttggttaggcatcagagggtgtaagcgtttttaagatgcaaaattactaaactgccggccagaaaaattttattatacctgtatagtatatacacataatagtgtgtttatatcttcacatcatgcccgtgccaaccctgaggttagctgctgctgattcttaaaaataaaannnnnnnnnnnnnnnnnnnnnnnnnnnnnnnnnnnnnnnnnnnnnnnnnnnnnnnnnnnnnnnnnnnnnnnnnnnnnnnnnnnnnnnnnnnnnnnnnnnnnnnnnnnnnnnnnnnnnnnnnnnnnnnnnnnnnnnnnnnnnnnnnnnnnnnnnnnnnnnnnnnnnnnnnnaatactcangaggctgaggcaagagaatcatcgcttgagcttgggangnaaaggttgcattgaga

SEQ ID NO: 27398 - DNA, 487 bp, Homo sapiens
  misc_feature (1)...(487): n = a,t,c or g
gtcctctctggtcacactgttcaccacttcggattgaacctgcttgttctgttccaaataccatttgcaaatttccactaggaatgaatcaagacaggtacatcctctgagcaagcttataattttgtgctctttcaaacatattcattcnnnnnnnnnnnnnnnnnnnnnnnnnnnnnnnnntattcattgtgtcaaaaagtgttgtagcttcttgggatataataattgtgaacaaaatagacaaaggtgcttgtttacatactagtgaggtanacaaacagcaaagaaaaaaaggtaaataaattgcacagcatgttagaaggtgagaaatacaccacaanagaaagaaaaagtanagcagagtgaggaacctcaaangttagggagtgcantggccgtaatgtcaatcagggggctatcacttanaagatgagatttgagcaaagacttggagggattggagggagttannaacggaggagga

SEQ ID NO: 27399 - DNA, 488 bp, Homo sapiens
  misc_feature (1)...(488): n = a,t,c or g
ggaattatttccagagaagtatctgatggtataattgccccaggatatgaagaagaagccttgacaatactttccaaaaagaaaaatggaaactattgtgtccttcagatggaccaatcttacaaaccagatgaaaatgaagttcgaactctctttggtcttcatttaagccagaagagaaataatggtgtcgtcgacaagtcattatttagcaatgttgttaccaaaaataaagatttgccagagtctgccctccgagacctcatcgtagccaccattgctgtcaagtacactcagtctaactctgtgtgctacgccaagancgggcaggtatcggcattggagcaggacagcagtctcgtatacactgcactcgccttgcaggagatnaggnaaaactattgggtggcttagacaccatccacaatgctttcgatgaagtttaaaacaggngtgaagagagcagaaatccccaatgcatcgatcat

SEQ ID NO: 27400 - DNA, 487 bp, Homo sapiens
  misc_feature (1)...(487): n = a,t,c or g
gtcaacatcttctcagaatgacccanaagttatcatcgtgggagctggcgtgcttggctctgctttggcanctgtgctttccagagatggaanaaaggtgacagtcattgaaagagacttaaaagagcctgacagaatagttggagaattcctgcagccgggtggttatcatgttctcaaanaccttggtcttggagatacagtggaaggtcttgatgcccaggttgtaaatggttacatgattcatgatcaggaaagcaaatcanaggttcagattccttancctctgtcanaaaacaatcaagtgcaaactggaagagctttccatcacggaagattcatcatcagtctccggaaagcagntatggcagagnccanngcaaagttnattgaacgngtngtgttacagttattagaggagtatgntgtgnnnangggagttcantncnnngntgaaganactngagatntcnnngaactccngccc

SEQ ID NO: 27401 - DNA, 491 bp, Homo sapiens
  misc_feature (1)...(491): n = a,t,c or g
gataggataatggctggtggaaagttcctcacctctgtgctgccagtggtacaaagaccaagattgatttttgccattgatagtgcnngtaccatatatagaagacaataatatttagtagtttaagaaagtaaggtggagttttgagtttaattggccaatgattttaggaatgttaaaaagcttatttttttaaattatattaagcctgaacatagaatctgagagctgtagacattaaggtagagaaggtctgatttatccaggtgggattgttggtgtgaatatgattttgtgtgacttttggtttcatctcagttttataagagcaggaacatctcctcagccttggtgtagaccangtttggtgcagggaaaaataatgacagacattttcaagtgtgtgttataaactccgaaatttgcatcggcattattcaagggcctttttttttggganaaatcccaccnggcncccaggggggggggag

SEQ ID NO: 27402 - DNA, 503 bp, Homo sapiens
  misc_feature (1)...(503): n = a,t,c or g
gttttttttctcagcaagcaaggcagttatgtatcttgttggggaaagtagtgggtattctttaggattcagctcancttcagtattggnaaaccctagtaatacgggctcaggtagatgtttatttctcttgtgtgaagtccaggctggaatggaactccacagtgtcagatccctccatcgggtggctccactgagcatggcctccgtggctaagttcaactcctggtccaagatggcagctccagccatatcacgtctgcattccagccaacaggaaggaaaaaagagtaaganaaggacatgctttttccctttatgaagcacttcactgaagctgtgcacaccacttctgcttatatcccatanccaaaacttactcatgtgggcacaccggttcaangnaagctngganantggnccttatccgggancaatttgccagttaaaagttcnctancaactttactaagggggaacaaggggaaactggnattgttctg

SEQ ID NO: 27403 - DNA, 394 bp, Homo sapiens
  misc_feature (1)...(394): n = a,t,c or g
gtgtaggtaaaataataatactggcatttccttgtttggcacttgattataattgaaattgcacatttttcgtgtttattggccaacngtaacttaagtgaatcctcttcatatgccttttccctaaaggtaaaggatgcttgtttgcttcaccttcagaaccatatttttcttattttcagaaaaacttcattagtgctttcaatgnnnnnnnnnnnnnnnnnnnnnnnnnnnnnnnnnnnnnnnnnnnnnnnnnnnnnnnnnnnnnnnnnnnnnnnnnnnnnnnnnnnnnnnnnnnnnnnnnnnnnnnnnnnnnnnnnnnnnnnnnnnnacttgggaggctgagggtgnggnnnnagntnnccccaagaggcgnggntncnnngnngcatgg

SEQ ID NO: 27404 - DNA, 501 bp, Homo sapiens
  misc_feature (1)...(501): n = a,t,c or g
gctttctgtggtggtagaaatgttttatatcnnnnnnnnnnnnnnnnnnnnnnnnnnnnnnnnnnnnnnnnnnnnnnnnnnnnnnnnnnnnnnnnnnnnnnnnnnnnnnnnnnnnnnnnnnnnnnnnnnnnnnnnnnnnnnnnnnnnnnnnnnnnnnnnnnnnnnnnnnnnnnnnntaatgatttagacaacagagatctcgaacagtgcttctcaaccagaggcaatatttgccctccacgnnnnnnnnnnnnnnnnnnnnnnnnnnnnnnnnnnnnnnnnnnnnnnnncttggtgagttctactggtatcagatgggaagaggccaaggatgctgtttcagcatcctccaaaacacgatgtcccccgcccccataacaagacttagcccaaaangncacaatgctgaggntaanaaactccattccaaacggtncctccttggtccgtnaaacttcctaaaattaaggatccgccttagataccaccccnccggaaaac

SEQ ID NO: 27405 - DNA, 504 bp, Homo sapiens
  misc_feature (1)...(504): n = a,t,c or g
gccagctcaggctgctagagggctcagggcacttgtgtatcaggcctttgccatngaactacacactcaggaagctttannccttaggtttgtggccctncacattngcncaggcntggttcccatcantttgtgaggctccacgaggnaggatcatntgancccaggagcctcntcacaatccgnngcacaaganntncanccnantctcnncaanaantttnanatttacnagggngnagtnctaantgcnngtttccncaactacncagtgnaccccagtnaanacaccatctgcatnactcgttaacgcngnaggtnaacgatgnntacgnnacnacncncnaancanngngagtccagcntgaacntcntgcaaacanaaaggnanttgggntttngcnggcnatttctgncntttncctgngnnccttccttnntttncacaancngnntttcgngggcnngtgannnnnnttctgngcngcnagganttttgaaggc

SEQ ID NO: 27406 - DNA, 513 bp, Homo sapiens
  misc_feature (1)...(513): n = a,t,c or g
gggaagctactgtgctcatgaaattttctgcataaattctggtcctaagttcnaaattgaaatctctgctctttagccatccccctcggnaatcagaggctttaatcattgggttttatcaaatctgatttataaaattgcatgcttcacaataaaatancttcagggtgcaagcacaaaatttaaaacattcaattaaaaatataaaacancaacagtagttaanaaaaaaaacagcatatattanaatcgtcagctgcctcctaggtggagagtttttaaatgactttaaacattctatctgaaggncaaaaagcaatttcagattgtccagttaggtanaaaccttcaaggngcataaagcatgcctggcttggcaangattgntctgtaatcccaagncantggtccaagatttgtccccaaatggggttgtttncnggggtaaaacantggccaaattcagccctgnagnanngcccctgcaacngaatcatggncccaccaantcct

SEQ ID NO: 27407 - DNA, 491 bp, Homo sapiens
  misc_feature (1)...(491): n = a,t,c or g
ggtagaaataaagttctgtgggagcagccaggaaaactggaaaggagactgaaaggagatgacaaaggacctggtgtgttggtgcagcccaaaggaagttgtgacctgttgtggaatgaaatggtcagatttgtgcttttgaaagcatgctggacaggaagataatgggaggaaaagtctcaagggactatctagaagtggcaatagattctgagggtctgattatatgtcattgtcagcaaaggtggagaaaatgggtggcaaaatttgagagctatttctaaagtcgagtagacatggtggagagtgaaaatggaaatggaacaagctccttgcttctggcatnggaanctgggtgcttggatatacctttagctgcagattggtatgtggatgtcatataaagatgggatgttcanaaagttcacctcccaaatnnttcctacaataggngggcncnctggctccgtcnaatttggggatcaatcagt

SEQ ID NO: 27408 - DNA, 555 bp, Homo sapiens
  misc_feature (1)...(555): n = a,t,c or g
nnnnnnnnnnnnnnnnnnnnnnnnnnnnnnnnnnnnnnnnnnnnnnggcaccagaatcttaaaagcttctgcccaacaaaggaaaacaattaccatantgaatacacaacctntaaaatgatagaaaacatttacaangggttcngctgacaagggactaatattcagaatanncaaggaacttaacanancaaggccccaaataatcccattaaaaagtaggcaaagagactgantagacatttctcaaaaggagacnnnnnnnnnnnnnnnnnnnnnnnnnnnnnnnnnnnnnnnnnnnnnnnnnnnnnnnnnnnnnnnnnnnnnnnnnnnnnnnnnnnnnnnnnnnnnnnnnnnnnnnnnnnnnnnnnnnnnnnnnnnnnnnnncaaatgctgggnaggattcanagnaaagggaattcttatncactgttgatgggatcntnaattagtncagctggtatngaaacatttggngattctcaaaancngcaatncanccnncatnnatccancagccnccccctgggattanccanggcaagnaatcatttt

SEQ ID NO: 27409 - DNA, 470 bp, Homo sapiens
  misc_feature (1)...(470): n = a,t,c or g
gcagctttgtcggtgaggaaaaggaaaagccaaatttcctgggttctgggatttttaaaattgtgttttaagaagctactcttggcctggtgcggtggctcacgccnnnnnnnnnnnnnnnnnnnnnnnnnnnnnnnnnnnnnnnnnnnnnnnnnnnnnnnnnnnnnnnnnnnnngttctttctttgggaaacagtgtcttgctctccaccctgggagacanagaaagaccctgtgtcaacataaataaatatnnaaatacgtcatcangtctcatannaaagactcngntnatatgnnntantgttgacangngaancacntatangtggtgcgcntnnngaccacnngcnnggannaacnganaannngnnntnngaannnatcnnctaagacnngacccaagnnnncnnntngncanncnancccgnnnaagccgagagggcncncnccnggcaaagcggngcgaac

SEQ ID NO: 27410 - DNA, 500 bp, Homo sapiens
  misc_feature (1)...(500): n = a,t,c or g
ggagctaatctttttcttggctcccagcttcctacttcctccttcctttcttctttaatttaaggtctcaccagccccagatactgganagggctttggcaacaataggtcagaagctgtaggtatataagatttggtgggcaaggatggaggtgggaggctgggatgtcatacaaattacagatcacagatgctatgtcttacaggtaggaccctgtctggagactccttacctgcacttttgtgtcttccatttaagagatacgggaaagttattgatttcattacagaaatgcttagaggaaactgtaagccttgctgagctccttcagccctggngtgagccccattcatctgtacttagtccacagctctgactcacagatgccatgtttgcacaaccctatttatgggccttgtccttccaaanaaatncgtttgggatgcatttggcatccttgtcaaanagccaagggaatctttctaccaagtttgnttgg

SEQ ID NO: 27411 - DNA, 495 bp, Homo sapiens
  misc_feature (1)...(495): n = a,t,c or g
ggatgaagggaaaatatgcaccatcctagaaaataaggcggccccttccttacaattcaccgcttccaaaggcttgctctttgcattatgtagctggtaggtgatgggagaataggcatgagagatggaggtaataaatggctccaatatttttctaaacactggtttatctgctaaaaatctgtgacttcaatgttgaattcatttatcaaaatatacctatgtcagctgtttttaagacatgccttatatgtatctgaaaaatcactccgttagacgaagatgtggcaaggcaaaggaaatacctacataatagaatttatgcaagatggagggttccttanagaaatctaaaggntacttcagatttttcttaactaaanggcttccagtctcaaaatttttgaacagctttatcaagatatagaaagtcncatacntncatncnattcaccanttaagngtncanttcacggnatttgtatttcaccggtg

SEQ ID NO: 27412 - DNA, 601 bp, Homo sapiens
  misc_feature (1)...(601): n = a,t,c or g
gagcttcaataccctgtcctcactgtaaaacaaagaaatgagaaggattgcaatgcatgattatctgaggtacaggcacagtttccacattatcaggtggctgtcaggaaacttgagagagaaagccttcaccaacttgtttggtagataaagcttggcttttgtttctgtaggagatggattcctgaacttcagacatttgactgcctccattatcatctttaacttatgttttatgtagcatatttatataatatatatattactacctttaaaacttaaagtgcacnnnnnnnnnnnnnnnnnnnnnnnnnnnnnnnnnnnnnnnnnnnnnnnnnnnnnnnnnnnnnnnnnnnnnnnnnnnnnnnnnnnnnnnnnnnnnnnnnnnnnnnnnnnnnnnnnnnnnnnnnnnnnnnnnnnnnnnnnnnnnnnnnnnnnnnnnnnnnnnnnnnnnnnnnnnnnnnnnnnnnnnnnnnnnnnnnnnnnnnnnnnnnnnnnnggatacantgagccagattgancattggacncaatctaggggcaagatgaaatccancccaaagaaaaaaaaangtnttttttacgggccangttttncctt

SEQ ID NO: 27413 - DNA, 588 bp, Homo sapiens
  misc_feature (1)...(588): n = a,t,c or g
gaatcaatagaggaaggtaatcatgaatagatactacaagtcatgaacttttcaacccacagagcaatcaggtgaaagggttgatgtttctgaggtgggttcctttttcttcctcctttaaagtttttttgttannnnnnnnnnnnnnnnnnnnnnnnnnnnnnnnnnnnnnnnnnnnnnnnnnnnnnnnnnnnnnnnnnnnnnnnnnnnnnnnnnnnnnnnnnnnnnnnnnnnnnnnnnnnnnnnnnnnnnnnnnnnnnnnnnnnnnnnnnnnnnnnnnnnnnnnnnnnnnnnnnnnnnnnnnnnnnnnnnnnnnnnnnnnnnnnnnnnnnnnnnnnnnnnnnnnnnnnnnnnnnnnnnnnnnnnnnnnnnnnnnnnnnnnnnnnnnnnnnnnnnnnnnnnnnnnnnnnnnnnnnnnnnnnnnnnnnnnnntcctttctttgttaattttaattacataagaatacaagatatattttagcgagttaattcaaagggtgtgaaaaanagaaagacaaacccgtccaaaaaaaaaatcanccanngnananagnnannnnngttttnnngggggcgntttccnntttg

SEQ ID NO: 27414 - DNA, 593 bp, Homo sapiens
  misc_feature (1)...(593): n = a,t,c or g
gaatgttgattgtgcaaattgaattgtgttttaagactactgggaaaaccatttaaaggaatcctattgtaagtcattttgaaaaatggagaattacaccacctccccaaggattttctgttttggtaaatttcatgtggcaagattacttgaanaagggttccagtgttttgctagcttataanggttactgcataaggaaggtttactcgccagaggtccgcacacattggagaactgggggaatatgtnatacttgtgcagaaatgttttgattcatgtactcagaagatgggatctggatgacacctccagcctattgattcccaagtaaggtgtgatgacaccaccaccagcgaggtgtgctatgaggaatttttgttgatgatgaaaagtgaatgctaactgattgcacaccacgtgccccataccttacatagattatcttatttaattgttgctaataatantactacagtctgtgaatgatttacttancaattaatcaaaagcatatccactcacaatggatattttggncaagaaatgaatactngccgggcgcattggctgcgctgtatccacacttggga

SEQ ID NO: 27415 - DNA, 580 bp, Homo sapiens
  misc_feature (1)...(580): n = a,t,c or g
gcatttctgaataatgaagtgatgtattcaaattttgcactcagaggacactggcatgtgattttgggactgcatgcttaatcagaacttgaaagagtttttgttttgtttgctttgcttttaaaaccagggttctgcccttcttagtaaagcatattttggggcagggaggcatactgattgggattttttccaaatggttttcctcacatcttgccatcggaacctcttaaataagggctttcaaggcccccatgcaattctggtagtttcagtatacctaagagaagacaggttattaatgattttcagatgtgaaattcattaaactatatagtaaattaaagtgcttttggggaaggataatantagggagtattgaaacagaacatctaaaacaactgtcttccttgcagtgttaacatgtgatanaaatgtgggttttttgcccttactgcttgccttantacctcctttgctctggaacattgtttcagactcantggcataggaatcactgagaaattggtggagttgttgattgcacctttaccgggggatatcatccaggggtcaaatg

SEQ ID NO: 27416 - DNA, 576 bp, Homo sapiens
  misc_feature (1)...(576): n = a,t,c or g
gcagaatagttttaaattttgagtaagtccaatttatattttatattatatgtcatattatatattttcttttacaggtagtgttcttatgtcgtgtttaagacatctttgtctacctcatggtcatgaagacattttgctgtgttttcttccacacattttacaggtttagctttacatttacatctatggtccatatacagttaatttttgagcagctagtcaagtagatgtcaaggtttatttgttttgtcttatgagtattcagttgacccaataccctagatttaaaatatgatcgtctttccagtgaattacactggaacctttgtcanaaatcaggtgattgcatatgtgtgggnnnnnnnnnnnnnnnnnnnnnnnnnnnnnnnnnnnnnnnnntgaattgtaatctgcagtgttgggggangggcctaatggattggntatgggggccgantttcacntgcngtctgtganatgggtgagtcccatgagaaccnggtgttaaaagtgtgnncanttcccccttggcctcccgggtcaancagtaaatgtgcgntccctaactncgca

SEQ ID NO: 27417 - DNA, 586 bp, Homo sapiens
  misc_feature (1)...(586): n = a,t,c or g
ggtccaaacagatagcagtgggtatataaagcaggaaaggattaattttgagtgatgagatacagaaattaattcatagacaaggctatgtttgaactaggccttggaaagattgacnnnnnnnnnnnnnnnnnnnnnnnnnnnnnnnnnnggaagtggttttaaggaagacattaagaatggtaggtgactttatatcatcctgttaataaagagggactatggacgaagtggatttggctttanaatgtttgtaaacattagtatgatgtgatgattgtccnnnnnnnnnnnnnnnnnnnnnnnnnnnnnnnnnnnnnnnnnnnnnnnnnnnnnnnnnnnnnnnnnnnnnnnnnnnnnnnnnnnnnnnnnnnnnnnnnnnnnnnnnnnnnnnnnnnnnnnnnnnnnnnnnnnnnnnnnnnnnnnnnnnnnnnnnnnnnnnnnnnnnnnnnnnnnnnnnnnnnnnnnnnnnnnnnnnnnnnnnnnnnnnnnacgctggtcttgaactcctggcctcaacattgccaacttggcccccaaatgntggaatcagcnagancatgnaccancatttataaatcctaag

SEQ ID NO: 27418 - DNA, 579 bp, Homo sapiens
  misc_feature (1)...(579): n = a,t,c or g
gcggcacgagctcaggatggaaccagcttggtggcttgagggaaaggggttctgagttgcaaatcagaaacttgaagatgaaatggctactacgctgggtattgcctttatcttgaatgccagcctgatggtccaaggtgaacaagccttcctgtgttttctgaatgttcccccgcactnnnnnnnnnnnnnnnnnnnnnnnnnnnnnnnnnnnnnnnnnnnnnnnnnnnnnnnnnnnnnnnnnnnnnnnnnnnnnnnnnnnnnntctggggtctgtcaggatcaacaggccttgagagagactgacccagaggactactaaaagggacacctgcccaggccagcctattctaccatcctcgttctcctgcaaaaccaaggccacgtcatttcagcagaggacctgcgtgtggaaggaccctgcagctggcccatcacaggagagnccagactcacctcccaaggggaccctggacatgaagatgctggtctcctgggantgctgccctggccaaagataaagccangatggcaccatgtctgtctatgaatgttctaaaancggaaaaaaaaaaaaaa

SEQ ID NO: 27419 - DNA, 585 bp, Homo sapiens
  misc_feature (1)...(585): n = a,t,c or g
gnnnnnnnnnnnnnnnnnnnnnnnnnnnnnnnnnnnnnnnnnnnnnnnnnnnnnnnnnnnnnnnnnnnnnnnnnnnnnnnnnnnnnnnnnnnnnnnnnnnnnnnnnnnnnnnnnnnnnnnnnnnnnnnnnnnnnnnnnnnnnnnnnnnnnnnnnnnnnnnnnnnnnnnnnnnnnnnnnnnnnnnnnnnnnnnnnnnnnnnnnnnnnnnnnnnnnnnnnnnnnnnnnnnnnnnnnnnnnnnnnnnnnnnnnnnnnnnnnnnnnnnnnnnnnnnnnnnnnnnnnnnnnnnnnnnnnnnnnnnnnnnnnnnnnggagtagtattaantggcccaggcaagaggaacatattcagactcggaggaatgaaggatgaaatgtggggaggggcantgtctatgctgagggttatttccanagaatgagaggctgggctgaacattgggcaggaattacaaaaantaangagggtangaatcaagttanagggaaganannatganatgattacgagctgacaaagcaggcaggggcattggctaanttctccanaaaggttctatttaccccgngggctancttcagcaaa

SEQ ID NO: 27420 - DNA, 573 bp, Homo sapiens
  misc_feature (1)...(573): n = a,t,c or g
gccgattgttccctttagtcgctgtgacattgttacctttagtggcatgcacttggaaatgtcagccttcanagaagggggagttacatggagtaaggcctcatggatgtcatggtggtcctccatgttcaccaaccaccaagaaaattcttcttcagtccacaattccagcttgcgctctttggtgcacttggagccagaaagtgtctttttggccctgttttgtanaaaccgtgcatgtaccaaanagaaactttagagtttggatggagctgaancattgatgggaattcccnagtgcacccaggagcaggaggcaagcccaagcctcgggtggtagccaattatattttgtgatcgtgtatgtacttaaaacatcagagatgacacancacatgaatataactattgatatgtangtgcatactgagtatctaagtagcagatagatacaaaatacngttaatcccagaattgccaaactgcagtttgctantcccgttatacagaccagttggntccttccananattggtttccctccanaanagaaatcngcggctgnaggaaagg

SEQ ID NO: 27421 - DNA, 584 bp, Homo sapiens
  misc_feature (1)...(584): n = a,t,c or g
gctccgtcgccgccaagatgatgtgcggggcgccctccgccacgcanccggccaccgccgagacccagcacatcgccgaccaggtgaggtcccagcttgaagagaaagaaaacaagaagttccctgtgtttaaggccgtgtcattcaagagccaggtggtcgcggggacaaactacttcatcaaggtgcacgtcggcgacnaggacttcgtacacctgcnagtgttccaatctctccctcatgaaaacaagcccttgaccttatctaactaccagaccaacaaagccaagcatgatgagctgacctatttctgatcctgactttggacaaggcccttcagccanaanactgacaaagtcatcctccgtctaccacagcgtgcacttgtgatcctaaaataagcttcatctccgggctgtgccccttggggtggaaggggcangattctgcagctgcttttgatttctcttcctaaatttcattgtgttgatttcttcctccantangtgacttaattacttcagaanatttcaaaatagatanatttntnaatccttacaannnanaaaaaaangncntnttta

SEQ ID NO: 27422 - DNA, 576 bp, Homo sapiens
  misc_feature (1)...(576): n = a,t,c or g
nnnnnnnnnnnnnnnnnnnnnnnnnnnnnnnnnnnnnnnnnnnnnnnnnnnnnnnnnnnnnnnnnnnnnnnnnnnnnnnnnnnnnnnnnnnnnnnnnnnnnnnnnnnnnnnnnnnnnnnnnnnnnnnnnnnnnnnnncttctttcaagttatatacaatggagcatgggggtggcagtggctanggacatttcctggggacactctcccctaaccccccagaaggacttcacaaaaacctgtggataatggaagggatgttacggtacaaacgtatatttatgtgtgtgtgtgtgtatgtgtgtgcgcgcgcgcgtgtgcacataggcgtgatgtctgtgaccctcctctcctcgtcacatttcccccanaatgaatgctgtcctgtctgctcatgtttgtgttgaagctgccaaagtcggggagctctggtcctgcccagacccctttggattgctggcccatctccactgnanactggggtgagctcacttggggaangaaactcatcctcagagtaattcctgtnatgaaanctggggagcggtcttngggggaangagcatcangggttttc

SEQ ID NO: 27423 - DNA, 445 bp, Homo sapiens
  misc_feature (1)...(445): n = a,t,c or g
gaaatacatatatctgagaaaggatttttgcatggagtacatgaagaacttcctacagatcaacaataaaaagataataaaaagaatagacaaaagaacggacaatttacagaagaaaatacccagccaatagacaaatggaaagatgctcagtgtgattattcactagggaaatgcatacagtgggtaatgttttactctaattgaaatggctgaaataaaaaaagaatgacaacaccaagtgttgacaaagatgtggagccactaaactctcataagtagctagtaggagtgtaaaatggtataactactttggagaaatgtgtggcaatttcttataaaagttnnnnnnnnnnnnnnnnnnnnnnnnnnnnnnnnnnnnnnnnnnnnnnnnnnnnnnnnnnnnnnnnnnnnnnnnnnnnnnnnnnnnnnnnnnnnnnnnnnn

SEQ ID NO: 27424 - DNA, 511 bp, Homo sapiens
  misc_feature (1)...(511): n = a,t,c or g
ggcacgagggtatatagactgacagaaaagagactagacgtacaaagataagtgagaaatgactgctgtatccctgccttgagcaacagcttctgngctcaggggaaacagatatttcactcatgaaacgtncatgtcctaaaactctgtaaatgacatttagagctattgtacctgaaatatggtatgcttccttgctagatgttcaagaggtaaataagagttggtaaacttttcagatctggaacatgtgacttatgggtttgatatggcttggttctgtgtccccannnnnnnnnnnnnnnnnnnnnnnnnnnnnnnnnnnnnnnnnnnnntgttaggagtgattggnttancggggtgatgttctcatgaattgtttaacaccatcccctctcagtattgaatagtgagtgagttctcatgagatcnggcaattanaagtggtggnacacctccncccttgcncttctcctcctgctcnggctgtgtatggtgtgccggttccctt

SEQ ID NO: 27425 - DNA, 672 bp, Homo sapiens
  misc_feature (1)...(672): n = a,t,c or g
ggcanagctacgacatggacnnnnnnnnnnnnnnnnnnnnnnnnnnnnnnnnnnnnnnnnnnnnnnnnnnnnnnggcacnagaactttttcacgaacactgcctgccaaggccaancaanacaaancaaagactgatccttctgccagtgcaagtcctgctanatattaacatattgtaattcccaaaacttatctttttanagcacagtttanaataatatcggtctgatancatcacaggaggtttttcatgaacaaacacaatttaaaacctttcgaaggtgttattttgggcactttggagggcatatctgtgaacaacactttcccctaccctcagtaatatggcaaaattttanaggggataataganaaataaaatgaagcagagtttggaggaaaaagaaaggaattgtgcccagggaanggttcatggaaggtggtatttgaaccagcttggaaggtgggaagggtctcaaccagtancaatgggtattccacatacacaaaccagcatgtggagctcggtctggcgtggggaacgacantgctngcanangcaaggtggnnccggaagctggctgttaaattaaagccgttaaanctccngattaacanggangttacaaagnnaanaggaaaccggggttacgagngnngangaggtaaga

SEQ ID NO: 27426 - DNA, 586 bp, Homo sapiens
  misc_feature (1)...(586): n = a,t,c or g
gnnnnnnnnnnnnnnnnnnnnnnnnnnnnnnnnnnnnnnnnnnnnnnnnnnnnnnnnnnnnnnnnnnnnnnnnnnnnnnnnnnnnnnnnnnnnnnnnnnnnnnnnnnnnnnnnnnnnnnnnnnnnggtgtgtaccnnnnnnnnnnnnnnnnnnnnnnnnnnnnnnnnnnnnnnnnnnnnnnnnnnnnnnnnnnnnnnnnnnnnnnnnnnnnnnnnnnnnnnnnnnnnnnnnnnnnnnnnnnnnnnnnnnnnnnnnnnnnnnnnnnnnnnnnnnnnnnnnnnnnnnnnnnnnnnnnnnnnnnnnnnnnnnnnnnnnnnnnnnnnnnnnnnnnnnnnnnnnnnnnnnnnnnnnnnnnnnnnnnnnnnnnnnnnnnnnnnnnnnnnnnnnnnnnnnnnnnnnnnnnnnnnnnnnnnnnnnnnnngattcttaagagtaaagatattaatgacagtaaagttactaaatttaaaacntgananaatgctattatctactgcgcatcaaatttgncacttgcccaacatatcttctcanttgagttccagtcaaggnccgatccggccnggancatattnatcccctgcaa

SEQ ID NO: 27427 - DNA, 590 bp, Homo sapiens
  misc_feature (1)...(590): n = a,t,c or g
gcaactccttaagaggaaacctgtttgtaggattttttttgtaaactaaccaatctataaatgttgtatgggatcctgaattaaatcttgaacaacaacaacaaaaaggacattagtgaaaacaccgaagtctaaataaagtctgttgtctagtaactagtatgatgataatgttaatgtgatagttttgatcagtgtaccagaagatgagatgctaccgttaggggaagctaggtgaagggtatacatgaactttctgaactacagttacaactcttgagtaaatctaaaattatttcaaaatgcaaagttaaaagaaactaactatagtctttggaaaactaaatatactgattgaaagctaattctanaaaaaccaggtctggaaaggtgttaaggccacatctcgaggganagaattttactcactcanatacccagatatgtactacatgtttgactgactgtaagtaccaaccctgacaaggtgacaanangggtaatgtgaacaattctttacagatatggaacttatagaagcctancaaaaaaaaaccnantccttccttcaaataagcaagggnnttcaa

SEQ ID NO: 27428 - DNA, 579 bp, Homo sapiens
  misc_feature (1)...(579): n = a,t,c or g
ggagagagctgttttcttgagatggtggaggcagaagccanattttggtgtggtggagagcaactaagcgatgaaaaagtggttacagattctgtaaccactttttcaggatgcttaccagtgagtgggaagacaaggatttaggaaatgaattgtgacacagggtatggggagagtttctttatttttaatatggaaganacttaagcttgtttaatgctaacaggaaaaagaanggttttacatgaaaattttactcaatttatttgtgtacatatttttctgaaagtctttgcagtttttttattgaagttgcttctgtgttaggaaagcttccnaaacataactaaatttaacatctgtcnatanatagtagtgaagtgacaaatttgcttggagatggaggttggcttantttccttgaatttgtcatttanattacaattatcttcaataatgtnatgtagganatttttaagattacacttttaagatcaacattacttacattgttgtcacaacaaagcatcattaaaantaccanaacgatccanagggantcaantangctacatccaa

SEQ ID NO: 27429 - DNA, 580 bp, Homo sapiens
  misc_feature (1)...(580): n = a,t,c or g
gaaaatatgattttaaaatgtaancacacaaagctgttggaaccacagtcagggttgttacataaattaatctgagaaatttcagatacttttttctcttcttacaaattagcattctgggtcttggggaaagggaggtcggggaaataaagtaaattttgctgatttgtcnatctttatggactantccagtaacaaagtggctagctattgtgtgtgcgtgcgtgtgtgtgtgtgcatgcgtgagatttgacaaatcactgcnagaaatanataggcancanagtcctgtgcancactaaacanagtgttagcaaactgtaattagtggaanaaatgtttanaangtaaanttaactganaaaggcagctcanaatganattanctgtgaaaaatgttatgtgtgcatacacacaacanaactggaaggaaatanatgaaattattaatggggcatctctatatggtangattggattacttaatttgtgcatacangtgtgtaccttctctgtatttcccaaggttttaaaanggaattataattttacanaagaaaatttaaaggtacaatacccc

SEQ ID NO: 27430 - DNA, 578 bp, Homo sapiens
  misc_feature (1)...(578): n = a,t,c or g
ggagtttgattgtgtcatgaggacccaagttgtcttcattcaggtaataaggaccttatcattcattcatggtaaggtcgaagagctcctgctgcattttttaatctattttcagagatccctggatgaagctaatattttaatctccatttggccctaattannnnnnnnnnnnnnnnnnnnnnnnnnnnnnnnnnnnnnnnnnnnnnnnnnnnnnnnnnnnnnnnnnnnnnnnnnnnnnnnnnnnnnnnnnnnnnnnnnnnnnnnnnnnnnnnnnnnnnnnnnnnnnnnnnnnnnnnnnnnnnnnnnnnnnnnnnnnnnnnnnnnnnnnnnnnnnnnnnnnnnnnnnnnnnnnnnnnnnnnnnnnnnnnnnnnnnnnnnnnnnnnnnnnnnnnnnnnnnnnnnnnnnnnnnnnnnnnnnnnnnnnnnnnnnnnnnnnnnnnnnnnnnnnnntttcagctgtgggcctaattcgtatggnaagcagcagtaagataaggacccanaccttagttgagtacacctacaanaaatacttttggacntggtcaaaaacaccatgtgctcaaagggaacgg

SEQ ID NO: 27431 - DNA, 586 bp, Homo sapiens
  misc_feature (1)...(586): n = a,t,c or g
gggccatggcaaagggttgggcttttattgtaagaggtanagaanctgtaggagcattaggccaggcagtgacagtgaatgacttaccttttaaaagaacccctctggctacctggctaccgtgaagaaagtagatggtttggcgggggtggggatggggtgtgtgcanggtgtcttagtttgttttctgctgcttataacagaacgnnnnnnnnnnnnnnnnnnnnnnnnnnnnnnnnnnnnnnnnnnnnnnnnnnnnnnnnnnnnnnnnnnnnnnnnnnnnnnncatggtgtctgatgaagaccttcctgctgcatcatggcatggcananaaggtcagananaaagcanacatgagtgaanagacaaaacccaaggggcgtcttggctttataacaacccactcttggggaactaatccagactccccanagtgagagctcactactgtgaggatggcaccancccactcatgangggtcccctccatgactcaaacacctcccatgcgacctgctccaacatcnctcactggggacaaatttcacatnantttggtggggacaaataaccatagctnaacaa

SEQ ID NO: 27432 - DNA, 582 bp, Homo sapiens
  misc_feature (1)...(582): n = a,t,c or g
cccatctctgcagtttttctccattgatttgcaatgaagctttatcctangttaacttcctgtatatatctggacgtactctgttcacttgaaatgtttctttgtgtccaatgtcacactatcttacatgttttantatctgttaaaattaattttgcctcagcattttttcaattatttggaattttcttggctantcttatttctatanaattttcaaaattagcttgcccagtaaaaaatgaaaaataaagatttttttttanacnnnnnnnnnnnnnnnnnnnnnnnnnnnnnnnnnnnnnnnnnnnnnnnnnnnnnnnnnnnncacctcaggagactgnnnnnnnnnnnnnnnnnnnnnnnnnnnnnnnnnnnnnnnnnnnnnnnnnnnnnnnnnnnnnnnnnnnnnnnnnnnnnnnnnnnnnnnnnnnnnnnnnnnnnnnnnnnnnnnnnnnnnnnnnnnnnnnnnnnnnnnnnnnnnnnnnnnnnnnnnnnnnnnnnnnnnnnnnnnnnnnnnnnnnnnnnaatgtaccnggctaatttctaattttggaaaaacgggtccaataagttgccaag

SEQ ID NO: 27433 - DNA, 591 bp, Homo sapiens
  misc_feature (1)...(591): n = a,t,c or g
gcactgacactgccatgttccctgttccttttaactaggaaggcggagcgtgaagtaaaagcattggcaaaacttgatcatgtaaatattgttcactacaatggctgttgggatggatttgattatgatcctgagaccagtgatgattctcttganagcagtgattatgatcctganaacagcaaaaatagttcaaggtaactaaaaataaattctcatagccataataggatggaaggaaattgttatttactatgtatgggccactggataaggctattaatcatcacgattaattatcacaattccctctgagagacactgttatctctccattccgaaggtaagganaaagtgaaaatctcttccttgctcctcctcttgctgcagacttgctctcacaaccctctgttacatcctcagctgtctgcaaaatctcaggttcagctttcctgactccattgtttcatgganagccttgttcacgtgccggttcagcgcangctgttaagtgtatcctgtnaanagagttttaacatataatgcngcactgggggcccctcctcagctacaacaatttcngtccncctg

SEQ ID NO: 27434 - DNA, 594 bp, Homo sapiens
  misc_feature (1)...(594): n = a,t,c or g
gcaaaactattagaattatgagaacaaagtgataaaaacatgtttgacaattcaagaatataaaaatggacacaaattttaaataataggaataaaaaattantagggactttaatcgctatcaatcagactttagtctataaaatcacaaattagtacccctttccaagtgttcatgcaacatttacaaaaattggccatacactactttaaaaagaatgccaataaattccaaaggacttatgccaaatgttctttcagcatttattttctcttgtcagcctctgtaacccatatccaagtaaaatcacacccactgatggtcttctgaaactcaaaggacataccttgcctcatttctatacatgccatgattcccaacatttatggcttganaagctttgagtatggacacaattttgttaagaagaataaatcagaatatccactaagaatgtanaaagtttaaagaaagttgcttcccacctaacaagangaaaaagtggaaaatcnacaaaacgcaacttttcttganccatcananagttgacatggnaggaaacnattagccgaagccnangaaaaaaggacctt

SEQ ID NO: 27435 - DNA, 585 bp, Homo sapiens
  misc_feature (1)...(585): n = a,t,c or g
gctgagtancaaagagtgaggtcctanccaggaacaggattccccancgaggaatggggaatcacccttgctttaaggaagctgaggtgcttggngtcagggtggggcccaggctgatggaagcacgtcaccatctggtcattancaggagggaactcnatggacactcaatccagaaaaggcanaancctaggtcctaggtgacaggtggaacagtgtgaggttgatgttcagtccttggatcgctaagctactctgtcttaggtattttctgactatggtctggcttgactccaaacatgcagaggttgaacctcatggtgagggcancagggacccanagtaggccctggttacccttttctcatgtttatatgccaagcagcaaaacganccaaaacaattagaaataataatgcccacaccattttacaggtaatcttccccatcanattgaancctgctgaaatgtcnactccctgtcacagaacattttctaagtcacagtttcatatcatccntaaatgttacaacntgnaacacagngaaactnaaanggncatttataagccacatatacccttt

SEQ ID NO: 27436 - DNA, 576 bp, Homo sapiens
  misc_feature (1)...(576): n = a,t,c or g
ggcacaatgatattttgaagtgtgtccctggtattatagaggacaatttgctccctggtgtccaagagananaagancaattgagcaccctgggtcngacccagcaaaactggagtcccctggtggntgaatgtgcccggtaatgtaccaagganaaaatcattttaggacatttcctgtatgtgtgtttgggagganananacaggcaggggctgggaanctttggaacanggtgggcacnatgagatgtcagctaatgaaggaggccctgccttctccatggacaaatccccagctttcaggacagtgtctgggacgtggtaagtactcaanaaatatttattaaataaacaaatgaaggaaacaggtacttctccctgtagtctcaactctttgattgtttcctcagtgtttcatccaatctccanaaccccagcttcctttcctccatactactcattgaatttaccttactgaagtcactgangactccaatcatggcanatttatggcatttagtctctttattgcagtgtattggaatccnccttgggaaanccacnctnacttaatgg

SEQ ID NO: 27437 - DNA, 581 bp, Homo sapiens
  misc_feature (1)...(581): n = a,t,c or g
gcggcacgagcggcacgaggctancaccatgacttcaataccctgcacacttaaaactcttggatactttatgggttagcttttgttacagaataaatcaccccaaaatttagtggtttgtgaaaacaaccatttatttagctcaccctgtactcagcagggtagttctgttgatttcagccaggctcagctgatcttggntggatctcaatcttggctttgtgagtggttgccaggtaaactgggactanctgagagttanctgcaggagggtgctgaatattactgcttctgccttcttacttcccagcanaatanccacatcttgtttaccaggtaaagcaaacagtaaanagacatctcttttcgtatgtatgcttatatcactcttgctgctctcccactggccaaagaaagttacttatgaantccanagtccctgtgggaagattctccctaaagatatagctanagggcagcangataaattgggggcattactacaacaatctatcacagaaattgngcccttttatccttttaatgcancaataacataacattgaaaattagatggccca

SEQ ID NO: 27438 - DNA, 476 bp, Homo sapiens
  misc_feature (1)...(476): n = a,t,c or g
gctgtttgcaggtagggtgggacagctggcagtagattagtgcttttagctaaaacaactaaatagcccgatcaaatagtcatctctttgaatgcaccagagaatcagagagaaccaactgcgggtatgtctctggagaggtaagaatctcataaggcaggtagctttgtagttgtgttttgcccctagggaatctgctaattctggatgcagtgtaaaatctagttcagagcagctaggagtaggatggaaaaagtcagcagagtttttggcagatatttgggatgcctcaagcatatggcctgctttcacctttgggctttggttgaatactggacttctgctggacaagaggctggaaatgtantaaaaagtggcattttcagcagtcttanaaggcatacactgggattttaagggtaactggtgtaatggcccacanaatatgtaggtctttagtttgaaaagtggatggg

SEQ ID NO: 27439 - DNA, 467 bp, Homo sapiens
  misc_feature (1)...(467): n = a,t,c or g
gctggttcactcatcctttctttccatgcaattactgtattattttaaaacatctgagtaaaaagaaatctataatatatccatttaattcaacctaaactctaaatatacaaatgnnnnnnnnnnnnnnnnnnnnnnnnnnnnnnnnnnnnnnnnnnnnnnnnnnnnnnnnnnnnnnnnnnnnnnnnnnnnnnnnnnnnnnnnnnnnnnnnnnnnnnnnnnnnnnnnnnnnnnnnnnnnnnnnnnnnnnnnnnnnnnnnnnnnnnnnnnnnnnnnnnnnnnnnnnnnnnnnnnnnnnnnnnnnnnnnnnnnnnnnnnnnnnnnnnnnnnnnnnnnnnnnnnnnnnnnnnnnnnnnnnnnnnnnnnnnnnnnnnnnnnnnnnnnnnnnnnnnnnnnnnnnnnnnnnnnnnnnnncnacnattnccatcncannnacnnanggnnacananncacannnacaangaca

SEQ ID NO: 27440 - DNA, 471 bp, Homo sapiens
  misc_feature (1)...(471): n = a,t,c or g
gcatagggactatagagacctggatagaggtaagtgatattttanaggcggaattgacagcacactaaagtaagtacttcaactgtagctcantggaatgattttgaatgcctccttttgctanaggaactctttttgagaaaatganaacctcaaatcaaatttcctggaacaacttttttggacagtttancgctatctaagtcattctcctaggagcncttataaaacattatgaaggcaaaaaaaatgttaaataaagttattanatcancaggtaatttacagcacagttcacnanttanacacngnanatatanttttatagttcttttggaccctttgtatattctgtgttanacatactcacatacaancacacacataccaggaaaggagagaggaaatacacaantagccacgtgttagttaattatttgatgctgcatcttcgattactaatgagcccag

SEQ ID NO: 27441 - DNA, 482 bp, Homo sapiens
  misc_feature (1)...(482): n = a,t,c or g
gattgtggaaaaattcaaacacatgcaaaagtaaagagaataggatgatgaacccaaggtaccagttggccaccttcaatattatcaacattatgctcaagctcttatcccccatatttaaaaaatataaccacaataccttatcagagccaaaacaaatatggtcgnnnnnnnnnnnnnnnnnnnnnnnnnnnnnnnnnnnnnnnnnnnnnnnnnnnnnnnnnnnnnnnnnnnnnnnnnnnnnnnnnnnnnnnnnnnnnnnnnnnnnnnnnnnnnnnnnnnnnnnnnnnnnnnnnnnnnnnnnnnnnnnnnnnnnnnnnnnnnnnnnnnnnnnnnnnnnnnnnnnnnnnnnnnnnnnnnnnnnnnnnnnnnnnnnnnnnnnnnnnnnnnnnnnnnnnnnnnnnnnnnnnnnnnnnnnnnnnnnnnnnnnnnnnnnnnnnnnnnnnnnnnnnnnnnnnnnnnnnnnnnnnnnnnnnnnnnnn

SEQ ID NO: 27442 - DNA, 478 bp, Homo sapiens
  misc_feature (1)...(478): n = a,t,c or g
gaactggaagtatcaggggaaataaattatgctgacaacatggtttcttcaatgaaatcttcctatcttggcagtggaggctagggggtcataaactctgatgcctacaggggccaggcaaataacataagaggactaaggacagccaagcatacaatgatgcatggcagtgacagctgacctcaacgtggggaagacacaggggttgttgagggctcaagtaagctggagagcatgtgtcctatcaaaaggaggaaactactattcagctacagtgctgctgactgaatgggaatgcaagnccaacttcgtgaatttcccggaaaaagaatgcttagtaaaatttcccctttctacantgttctgttgaattcaaatttaaagccctgggagcaanntaaancacacatgtgtactatacccagttcatgcaaagcatcattcacaacatcctctgctgtgttgtaaacaaaggtac

SEQ ID NO: 27443 - DNA, 519 bp, Homo sapiens
  misc_feature (1)...(519): n = a,t,c or g
gaaagaatgaaatagtatttcattgtggatgttggtacatctacacaatgaaatactactcatnnnnnnnnnnnnnnnnnnnnnnnnnnnnnnnnnnnnnnnnnnnnnnnnnnnnnnnnnnnnnagtgaaataagccaggaacagaaaagttaaacatgnnnnnnnnnnnnnnnnnnnnnnnnnnnnnnnnnaagnnnnnnnnnnnnnnnnnnnnnnnnnnnnnnnnnnnnnnnnnnnnnnnnnnnnnnnnnnnnnnnggangagagnnnnnnnnnnnnnnnnnnnnnnnnnnnnnnnnnnnnnnnnnnnnnnnnnnnnnnnnnnnnnnccgtgtcactgttggcttaatgtanttaacaataggccaggcggtggccacgcctttaatcccaacactttgggaggccaggtgggcggatccctnaggcaggagtttnagaacagccggcaaaatggtgaancttgcccnagtaaaattnaaattggcaggccngggggntttcccgtaaccatttgcc

SEQ ID NO: 27444 - DNA, 520 bp, Homo sapiens
  misc_feature (1)...(520): n = a,t,c or g
gccctgaggcagaggacgacctgcgagnnnnnnnnnnnnnnnnnnnnnnnnnnnnnnnnnnnnnnnnnnnnnnnnnnnnnnnnnnnnnnnnnnnnnnnnnnnnnnnattgttactcggcaacaggtaacaaatacaaatagtcaaagtacaaattagtaatattagcantaaaaagatagaactacagatatggtgagaaatgacaagaaagttttangtattacatttgcaaacttagagaaaatatctacaaattagaaagattaacttatcaaaactggctcaatcaagaaatagagaacctaaacagtcctaanactactaaaanaangagtcaaaatgtaaacttttcccagnaaaaaaactctaggcctaggaattttatnaatgaatgcaactaaattatcagncacactcatccaanctcacacaacncttcagagaacagaangngggacactctctactcatcctaggaaccagngaattaagcttggnaaagtgnaattcaggccaccc

SEQ ID NO: 27445 - DNA, 524 bp, Homo sapiens
  misc_feature (1)...(524): n = a,t,c or g
ggtttttagcttagatgtttccatgaagaaatttgtgcagactgagatttcctctgagataaaaagaaagaagggcagacaacaaaggaggttaggtatttgtgacacctttgataataaaaagcaaagcttcttttaaaataaatctgannnnnnnnnnnnnnnnnnnnnnnnnnnnnnnnnnnnnnnnnnnnnnnnnnnnnnnnnnnnnnnnnnnnnnnnnnnnnnnnnnnnnnnnnnnnnnnnnnnnnnnnnnnnnnnnnnnnnnnnnnnnnnnnnnnnnnnnnnnnnnnnnnnnnnnnnnnnnnnnnnnnnnnnnnnnnnnnnnnnnnnnnnnnnnnnnnnnnnnnnnnnnnnnnnnnnnnnnnnnnnnnnnnnnnnnnnnnnnnnnnnnnnnnnnnnnnnnnnnnnnnnnnnnnnnnnnnnnnnnnnnnnnnnnnnnnnnattaactaacatctcttaaaaggacattctatcatacaaaatgctttgttgcnanccaaactgggattaaantggattt

SEQ ID NO: 27446 - DNA, 523 bp, Homo sapiens
  misc_feature (1)...(523): n = a,t,c or g
gctggaagaatgacacagtggaggtgttccctcaggggaattgtgggtgatttctcttaaaaaaaaaatgcctcttattgtgatacccaatcaantaaaatcatganagganaaagtggtttgatataaaggaagcacttgggattcantgaaaccagaagagaaactagccccttcccttgctccctggacaacagtcaantggaacaaagcaaactctagattatcacaacgataaggcctanaagtacattgggtgtatgcattttcatcctgaatcagaactaccatgctttttttaaaaaaagatcattatnnnnnnnnnnnnnnnnnnnnnnnnnnnnnnnnnnnnnnnnnnnnnnnnnnnnnnnnnnnnnnnnnnnnnnnnnnnnnnnnnnnnnnnnnnnnnnnnnnnnnnnnnnnnnnnnnnnnnnnnnnnnnnnnnnnnnnnnnnnctgggcatggtggtggnactgtatcccaactacncaggaggctangcangaaatcacttaacctggaa

SEQ ID NO: 27447 - DNA, 513 bp, Homo sapiens
  misc_feature (1)...(513): n = a,t,c or g
ggtcacataacaggattaactgttcanatgtgattttggagttgcattgaggatgggcaagcctttctctcttgatcaacaatgtttttccaactcagttacatgggataagttagggaggccagcaagggaactgtgcggaaaggtgacttgcagatttggcgacgggtcagcccctctgtctgcaggtcacctctcctttccctggtgcagctgcatgcctctctgcctcctctgtctgcccaccagcctcctgcagtgtgctactctgctctgtgactgctcctcatgcagctcgcagccatgtttcctctctgcttcttgatttgcttcagctccttctagtgccttgaaactgaagctggcctgtanttgggatcaaagatggagggagaggggagattgtactatggatantgtacggcaagaagtgaattcttacactggaatgataaaaggaacctgctccctgagttcctaaaantgtgtctggaaccanatttgcactgccta

SEQ ID NO: 27448 - DNA, 516 bp, Homo sapiens
  misc_feature (1)...(516): n = a,t,c or g
ggtacaatcnaaaanagcanagagaacctnancccnctnnctnatantgnaagnngctgnncnannnntcncgggtctnntgnaagaangggtngnaccatnnnnnnnnnnnnnnnnnnnnnnnnnnnnnnnnnnnnnnnnnnnnnnnnnnnnnnnnnnnnnnnnnnnnnnnnnnnnnnnnnnnnnnnnnnnnnnnnnnnnnnnnnnnnnnnnnnnnnnnnnnnnnnnnnnnnnnnnnnnnnnnnnnnnnnnnnnnnnnnnnnnnnnnnnnnnnnnnnnnnnnnnnnnnnnnnnnnnnnnnnnnnnnnnnnnnnnnnnnnnnnnnnnnnnnnnnnnnnnnnnnnnnnnnnnnnnnnnnnnnnnnnnnnnnnnnnnnnnnnnnnnnnnnnnnnnnnnnnnnnnnnnnntctgtggaanataggattgtctgatgaaagagggctgggganancttcaagtctcaaccttcctggaaangcccccgagccggcttccagnncaanctcaattgggatt

SEQ ID NO: 27449 - DNA, 500 bp, Homo sapiens
  misc_feature (1)...(500): n = a,t,c or g
nnnnnnnnnnnnnnnnnnnnnnnnnnnnnnnnnnnnnnnnnnnnnnnnnnnnnnnnnnnnnnnnnnnnnnnnnnnnnnnntaagattaaaatagtcaaggtgtcagctaggaaacaatttattcacaaattttgatgatttctcaggtaaacaaatgaacttgaggagaatagtattctgaactagtaagactctttgagcaaggaagctgcaactttggagaataaccagctgatagctttcttaaacttttgaagcacttgtaatagctattttaataaaagaacacttgctctctctggaatgagagaaaaactgaattatttgtttaaaatatttgatttcttaaacataaataatggactnnnnnnnnnnnnnnnnnnnnnnnnnnnnnnnnnnnnnnnnnnnnnnnnnnnnnnnnnnnnnnnnnnnnnnnnnnnnnnnnnnnnnnnnnnnnnnnnnnnnnnnnnnnnnnnnnnnnnnnnnnnnnnnnnnnnnnn

SEQ ID NO: 27450 - DNA, 495 bp, Homo sapiens
  misc_feature (1)...(495): n = a,t,c or g
gtgccgagacaataactattattaaaaatactgttcttaanatttttgtttttgttttttggatacatacatcgtatacatgtatctgngtgtaaacatgtatctgtgttaccatatcctggggttcctttcccagcttgtagccaatagccaaaagttcagaattctgccttctgcggaccctattatcaatttagaagctacttacctaagtaaatccatttacattacagcatctatttttaaaatgtagtaaaattgctgtgtaacacaaaggcttcttggagaatgaaacttcaaaaccagatttgaatcataaaaaatacttcttnnnnnnnnnnnnnnnnnnnnnnnnnnnnnnnnnnnnnnnnnnnnnnnnnnnnnnnnnnnnnnnnnnnnnnnnnnnnnnnnnnnnnnnnnnnnnnnnnnnnnnnnnnnnnnnnnnnnnnnnntcagccaagtgcggtgatnggcactgtaacccactgctccgga

SEQ ID NO: 27451 - DNA, 498 bp, Homo sapiens
  misc_feature (1)...(498): n = a,t,c or g
gaactggagttgctatggtggtgaattgacacacagagccctgtctttcaactccaccctgtcaatcagcctactgtcgacangctcttcccaaactcctgcccagcccaagagtccataatagaaagaaaataaacatggaagtgagagagatatgggttcaagtcccancttctccattcctagtcttaaggagctagttttaaggacttcccttattcctattatgattttttaatctttgaaatggaaatgacattgattataaaatgggggagagagtgcatgttatatgcagcactttgcaaatgataggaccttgtataaaatgtaactgtcttttccattaattgtggggcaaaagctaacctaaatggatgcaagcgactttagaganatggcgtctgtacttacagttccaagatcangatgtaggatntgggggacncataagtgcatgganantgattactgggggtctgtagtgctgaaccaagg

SEQ ID NO: 27452 - DNA, 500 bp, Homo sapiens
  misc_feature (1)...(500): n = a,t,c or g
ggcagagtgagagagaagccttttatttgtcagcgacatttgtgatganacctgaaantgcaggaggaaactaatgggttccgcccaaggtggaaggatgctctagggagtatgctgggagtgtctccacgagaccaacttgccattccatcccaagagtgcccctcacacaggaaacacttaaatatttactgaattggcttgatttgaaagatacaccatctaagtcttaaaaactgtaggacctaggctgactgagttaaatcttatcagtctanagttcatcttattcctgcctctgaaaactgcctgcctgtcatganggctatcttangaaccangataaaccaacacactggtcttaaattttgaaggntttcctctaaagattgtngagacntgggatagtttaaaangnattcnccatttaatggaatngaaagcttanctctttaatgggccttgatgtcaaantcgnnataaattagggtatcanacta

SEQ ID NO: 27453 - DNA, 600 bp, Homo sapiens
  misc_feature (1)...(600): n = a,t,c or g
gatgacagcagttatacagagactggcatggagtaggtgtttgtgcgcttaacgggtcataagactcttgctttgtcccctggtataagtgtccccgccaactcnctcctggaaacagtacctctagacctgcagagacagaaagaaactccagagtnnnnnnnnnnnnnnnnnnnnnnnnnnnnnnnnnnnnnnnnnnnnnnnnnnnnnnnnnnnnnnnnnnnnnnnnnnnnnnnnnnnnnnnnnnnnnnnnnnnnnnnnnnnnnnnnnnnnnnnnnnnnnnnnnnnnnnnnnnnnnnnnnnnnnnnnnnnnnnnnnnnnnnnnnnnnnnnnnnnnnnnnnnnnnnnnnnnnnnnnnnnnnnnnnnnnnnnnnnnnnnnnnnnnnnnnnnnnnnnnnnnnnnnnnnnnnnnnnnnnnnnnnnnnnnnnnnnnnnnnnnnnnnnnnnnnnnnnnnnnnnnnnnnnnnnnnnnnnnnnnnnnnnntccttgacccgggaggaaaggttcatnancaaaggcgtgcactgcacccagctggtgaanattagaccttccaaaanataatcctantancaaaaaaaaaaaggcttattagcgcc

SEQ ID NO: 27454 - DNA, 499 bp, Homo sapiens
  misc_feature (1)...(499): n = a,t,c or g
gtgcagactccctctcttgggtgagctctggaaagagccactcctcttctcaaattatgctgccttactggcttctcacctgagagcatacagtttgtttcagctctaaaactcagctcacaaaacctcagagtgtcaaggctaaacgggccctgataaacgatctgtgcccaaagcactcaaactagctagcagctgacagaagtgctcaggaggttttaaatctgaagatgccaagagcccacccgcaacgttctcatttatgggtcctgagtgcggtctgaggaacatgcatttttttaaatagctccaaacagctgtggtacagccttggctgcacctgaggaggtcttgggaagttttaaaaatgttgatgcccaggcctccttcctggagaagctgatgaggatttttaaacaattctggtgatcccancatgcaacaaggggggacccctatgcaangtgtcnggctcaactgaccttgttaaanattgagg

SEQ ID NO: 27455 - DNA, 506 bp, Homo sapiens
  misc_feature (1)...(506): n = a,t,c or g
gcactaataaaactatgtatgcatatagttactcattaacctagcagttctacttctagaatttatcctgaagatacgcccctaataacacaaaaatacatatgtaaaattttattcattgtagcattgtttatatttccaaaacattggaaactatgtaaatgcccacacataggagatagattaaactacagtgtatttatacatggagatactatgtagctgtaaaaaagaatgaagaaaatctctaccaattgatgtataatgattaccaggagattttggtctctgactacannnnnnnnnnnnnnnnnnnnnnnnnnnnnnnnnnnnnnnnnnnnnnnnnnnnnnnnnnnnnnnnnnnnnnnnnnnnnnnnnnnnnnnnnnnnnnnnnnnnnnnnnnnnnnnnnnnnnnnnnnnnnnnnnnnnnnnnnnnnnnnnnnnnnnnnnnnnnnnnnnnnnnnnnnnnnnnnnnnnnnnnnnnnnnnnnnnnnnnnnnnnnnnnt

SEQ ID NO: 27456 - DNA, 501 bp, Homo sapiens
  misc_feature (1)...(501): n = a,t,c or g
gaccctggggtctccatgctgacatcacatgatgaaaccactaagaaaggctctgagactatatggagacacttgccccatccagtctcatctcacctgacaactagctgttccagcccccagccacttgagtcatctcagctgaggccccacacaccaagaagcagaggtgagtctaatccacagagccctgtccaaattgcagatttataaacaaaataaatggctgttgttttaagtcacaaaattttgaggtaatgtatcagataatcagaattacacaatgcttccaaatccttgactaaagataaaaggaaatcattcaatctctctttgggggtgttaatacagattcagttagagtggaacaatcatccaattgctacaattaacagacttgaattgaagagctgaccaagctacctttaatgattttggtataanaaagnaacnctataaccnaantttctgaaagnnggaaggggaaatattgntcaaatt

SEQ ID NO: 27457 - DNA, 523 bp, Homo sapiens
  misc_feature (1)...(523): n = a,t,c or g
ggcatgtcaaagggacacaggagacatctaaaaaggagtttacaatagtcatggctggaacaatttgaggagcaaaatgaatgatnnnnnnnnnnnnnnnnnnnnnnnnnnnnnnnnnnnnnnnnnnnnnnnnnnnnnnnnnnnnnnnnnnnnnnnnnnnnnngtgtaaatggatgaagagagatgaatattccatacagaataattccaataatatatttaggtgttctttgctatgggaggtanagaataattcctcctctttttccctgagggtgggccagacatagtcacctcnaaagaatagattatgaacaggaaaaaaacagtaacgttatantggagaggctggcatatagtaccttaaccaggtaatgaaggctatcatcactggtgatgtcctgttgataccatgttccccttgccatgatctgttganaatggcagttgacctcagtgatattctttccaaaatccataccctagtcnaatcataagcagaaacattngncgaacccaattg

SEQ ID NO: 27458 - DNA, 607 bp, Homo sapiens
  misc_feature (1)...(607): n = a,t,c or g
gnnnnnnnnnnnnnnnnnnnnnnnnnnnnnnnnnnnnnnnnnnnnnnnnnnnnnnnnnnnnnnnnnnnnnnnnnnnnnnnnnnnnnnnnnnnnnnnnnnnnnnnnnnnnnnnnnnnnnnnnnnnnnnnnnnnnnnnnnnnnnnnnnnnnnnnnnnnnnnnnnnnnnnnnnnnnnnnnnnnnagctggggtcctttgtaaatatggagaacatgtaatgttggggtttcatttgtgttctccattanctctatgcagaacagaattaacaaaatgcttatttaaacaggataacatttattacccaaaaagttctaaaaaataattactcagagnnnnnnnnnnnnnnnnnnnnnnnnnnnnnnnnnnnnnnnnnnnnnnnnnnnnnnnnnnnnnnnnnnnnnnnnnnnnnnnnnnnnnnnnnnnnnnnnnnnnnnnnnnnnnnnnnnnnnnnnnnnnnnnnnnnnnatanctgggtgtggggnanangcttgtatccaantacnagggaaatgagcaagaaatcctnancctaaaggaaagtntattgacnaagatgcatcanngtctcaacctgggnaaagaaaaaatattaggngaacncncctc

SEQ ID NO: 27459 - DNA, 628 bp, Homo sapiens
  misc_feature (1)...(628): n = a,t,c or g
ggtgtgagccaccatgcccagctactttccataatttgattctaacttctcatagcaacctnnnnnnnnnnnnnnnnnnnnnnnnnnnnnnnnnnnggaaaaantntttncngncgnctttcccttngnaaattaggaattaanttaancggctttagggtnnangattaanaaatnangggnanggnancngcannggnaatttaccaaanggccananaggggnatnattnatttcgggggnanccnaggganccnaanggtgaggtaaanggaatttcantgaancttgcggatnttaaaanttanaacccccaanggntttattttaannatanaaaggccggntatgggggccnaccccngtaaccccannantttgggaggctgaggcatgaggancccttgaccccanaantttganaccaacccgggtaaaaaannnganacccgncnccaaaaatttaaaaaaanaggnggggaacgnggccaagccnanaacccanaatttngggngggccaagngggnaaaaccacttggggnaggggtnnaaacnncctnggcaaaattnnaaacccnccncggcaaaaanaaaaattacgggaaaggnggggtcnccttacccca

SEQ ID NO: 27460 - DNA, 620 bp, Homo sapiens
  misc_feature (1)...(620): n = a,t,c or g
ggaacgaataatagagatggagacaaccatacacatgtatttcccaactctgtgaattgagagggactagaaataatgacatgtagtcacagtaagcaaatatagtgtacaaattttgannnnnnnnnnnnnnnnnnnnnnnnnnnnnnnnnnnnnnnnnnnnnnnnnnnnnnnnnnnnnnnnnnnnnnnnnnnnnnnnnnnnnnnnnnnnnnnnnnnnnnnnnnnnnnnnnnnnnnnnnnnnnnnnnnnnnnnnnnnnnnnnnnnnnnnnnnnnnnnnnnnnnnnnnnnnnnnnnnnnnnnnnnnnnnnnnnnnnnnnnnnnnnnnnnnnnnnnnnnnnnnnnnnnnnnnnnnnnnnnnnnnnnnnnnnnnnnnnnnnnnnnnnnnnnnnnnnnnnnnnnnnnnnnnnnnnnnnnnnnnnnnnnnnnnnnnnnnnnaattttttaaacagggantggntctgtcaaccaaaacnanantngaatggggnaaannncggtcaangnaacccaagncaacctccnaataanccnccnanntacctggacccccagatgtgcgcacaangctgnaattttgaatttcggtanaanngggnttcncaagttgccaagnnggcc

SEQ ID NO: 27461 - DNA, 616 bp, Homo sapiens
  misc_feature (1)...(616): n = a,t,c or g
ggcaaaaagaagccctcagacatcagcttgtacaaactggcttgatgcaggtgagtagacaggatcagagagggtgtgtggccctcccaaggacacacagcaggacccaggcccactgattccattctgacggctttctcgcagcgactgggtggccaccaatttcccatgacacttagaaccactccaagctcctccctatgagccattagcagctctagccctgccatcccatccccaaccttgtctcccagcacccctgccttcacccaccctctccagccacacccgtcttcttgctgttcctctaacacaccagggatgaaccttcaactcccaggccttttcttcctgctgttaacctcacttcctcctaagtcacctcctcagagaggctttctggatgcagtangaaagttccctcantgncaaccaacatgctccaacctcctanntcaccctaaacttancaaccttgacggtaaaatgaggtataacaatgctccccganggggttntggcaatataagtgagttaaanttataaattctgtgcanantggnnatgccnaaatcccancnttttggaagtcaaacagganatgtttgncccagga

SEQ ID NO: 27462 - DNA, 625 bp, Homo sapiens
  misc_feature (1)...(625): n = a,t,c or g
gaaccataatgtgtggaagggtgtgcatgaatgttataaatgctgctanggtggaggagtatgcanagaaaatctgccaaggattgtgtgggtttggggttttaagctgtttttttgttttgatgagcgctttgtgccaaaaagttattcctctgttctcctcaacttantggcatgaagagttganagttgactcttctcaaggtggcctcctcatagggcgtcncgctgtgggtgtggaaagaggcaanggctgccagttgcantctgtttggtgcatgtggtaagtactgttcatctcgtttanggaagccctcagcaagtgccttttgagacagctgttatgtttcaaataaaaaagtctttctccctaagttgcttgacaataagtcctttatttggcaaactgtaaattcacnttaagactcaaggaccaagncaagcaacgtgggcntaanctgnannccaaanngncgggattaaaacctganaactggacatggccgtaangccaattcttttcngnggcaacttacctggggcananntagaanccnnnggnaaacnccaatccatagnnantnntggctntngaangggncgttaatngnaccccanantggga

SEQ ID NO: 27463 - DNA, 600 bp, Homo sapiens
  misc_feature (1)...(600): n = a,t,c or g
nnnnnnnnnnnnnnnnnnnnnnnnnnnnnnnnnnnnnnnnnnnnnnnnnnnnnnnnnnnnnnnnnnnnnnnnnnnnnnnnnnnnnnnnnnnnnnnnnnnnnnnnnnnnnnnnnnnnnnnnnnnnnnnnnnnnnnnnnnnnnnnnnnnnnnnnnnnnnnnnnnnnnnnnnnnnnnnnnnnnnnnnnnnnnnnnnnnnnnnnnnnnnnnnnnnnnnnnnnnnnnnnnnnnnnnnnnnnnnnnnnnnnnnnnnnnnnnnnnnnnnnnnnnnnnnnnnnnnnnnncatccccagccaagagagaagttttataggcatagagtatctcgggaaaaacacattanaaactggcaattagtggttacctctggaggacagaactatgtggctngcaataaggggtggaaaggttactcngggttggttttcnggnatgttaaaattttaanaaggggaaantttttnnntttaggtaaatgggaaanttnnatggncantganaaanttattaancnggcngaannttatcctttatgagggtaattttactgggactggccgcctttnanaantcntnncnggnaaaanagnnnngagnnngagg

SEQ ID NO: 27464 - DNA, 609 bp, Homo sapiens
  misc_feature (1)...(609): n = a,t,c or g
ggaatgtgaggtgttgggggatttggaccagggtggcttctctgggaatgagcagaacagaacaagcttggcacctgagcatctatagtggtgcgggtagtgggccacagcggtgttgaaggggcccctctccttctgtaccagtgacctgggactgatgatcccattgataaaaataaggaattcagacacaggctagcttggccatgagctgaagcatttgattttagacgtgtggagtcacagtgtgagtggaccaacctcctctgtgggagaaaggcttgcccaggagcccctcagatatgaatagagtgctgttatctgtggggttcctgccctcactctcttctctttctctgagtaaggagcgggctcaacantttctgtttcacagctcactaatgtcnggtcancaantnaagtactttttcccnaactttggtgttttgccnncnatttgggtcccaaacnctttgnttcaaggaactnnggggcnnganctnagnaactaaacgtnntctncccaacctnnctcccaantttccccgggggggacnctaaaaaattgaaaacgcngggtnggggtncnantggtannagaannaaagg

SEQ ID NO: 27465 - DNA, 601 bp, Homo sapiens
  misc_feature (1)...(601): n = a,t,c or g
gtgttattattagataagtgaaaanactttctaattaatacagcggagtcagggaggcaagagatatttagaacaaaacatttttggaacaaatgaggtaagcttgacttaaagacatagtgtttttanagaaggaagggatacatcaaaangtaattaaaagaaaggtnnnnnnnnnnnnnnnnnnnnnnnnnnnnnnnnnnnnnnnnnnnnnnnnnnnnnnnnnnnnnnnnnnnnnnnnnnnnnnnnnnnnnnnnnnnnnnnnnnnnnnnnnnnnnnnnnnnnnnnnnnnnnnnnnnnnnnnnnnnnnnnnnnnnnnnnnnnnnnnnnnnnnnnnnnnnnnnnnnnnnnnnnnnnnnnnnnnnnnnnnnnnnnnnnnnnnnnnnnnnnnnnnnnnnnnnnnnnnnnnnnnnnnnnnnnnaccctggngaacaaaccngaccccctcccatantncccaccgnanaaaagnncnnnntttttcaaggggcncaangntcccctnangaggggaanttancttggacaggccncggtttaaacncctnangggaannnanggggntcnaggnaaaccnanngnnnangggncaactctggg

SEQ ID NO: 27466 - DNA, 521 bp, Homo sapiens
  misc_feature (1)...(521): n = a,t,c or g
gcacaggttccaatgttgggaattccggtatcaggaaaagtgtgttcatcgtatttgtatgccatgctcagcaatcacctccacctattgcccccatccccagtgtcattcattgtcagatccatcccccactaggcccttgttgatctccatgatgtcgggccctggggttacccgtcacaggagctgctcatttactgtccctctttgagaggcagtgagagatgagctggtttcagttcttggttttagttggttttacttcctgttcccagttggtacttactttggggctgtgggggaggggaggaggtgagagtctagggttgtataaatgctggtatgaattcacatccctgttggagcctgtggggtcagatcaggagaagggggctcaagccctcagctagaaagaggaattgaagtcacatggggaacagctgggggaacaaccaacaacctccccttcggtactccaatcaacancatcaaaccttaaaagngnttntcancaattaggg

SEQ ID NO: 27467 - DNA, 527 bp, Homo sapiens
  misc_feature (1)...(527): n = a,t,c or g
gctttcatttatcatttgagcatctgttctaggaattatgctatgtcaggaatttgctctcagggattatgtcttagagagtttaaaaaattgtagagaatgcctctttgataactacttggtcttgaaatattatgtgatggaatctaccactctgcttgttacatacatatttattaaatttctcaccatttttggtccacctaacagtaagactaattctttggaaaagtagttttactaaaagataagatacatgttatttattttgccttttcagcaagctatagtcagcagactggacctcaacaacctcagcagttccagggatatggccagcaaccaacttcccaggcaccagctcctgccttttctggtcagcctcaacaactgcctgctcagccgccacagcagtaccaggcgagcaattatcctgcacaaacttacactgcccaaacttctcagcctactaattanactgtggntcctgctccaacctggnatggcccaagccaanctgggggcta

SEQ ID NO: 27468 - DNA, 518 bp, Homo sapiens
  misc_feature (1)...(518): n = a,t,c or g
gccactgcactccanccnattgacannncaanattctgtctcaaanaaaaaaaacaccatattcatgaacttcccctcananactcattcacnaagtctggagtcagactcaggtanttttttaattccacaggtgattcttatgtgacctctctggtgananaanatgaatttccantttttccngcttctgaagtggtaataacaaactaaggtatctgtaaaactagaggatgcagaaatcagcaactataaangagttcaccaacagaaaggcaaagtaangctccatatagaaattatatnnnnnnnnnnnnnnnnnnnnnnnnnnnnnnnnnccnnnnnnnnnnnnnnnnnnnnnnnnnnnnnnnnnnnnnnnnnnnnnnnnnnnnnnnnnnnnnnnnnnnnnnnnnnnnnnnnnnnnnnnnnnnnnnnnnnnnnnnnnnnnnnnnnnnnnnnnnnnnnnnnnnnnnnnnnnnnnnnnnagtcacatgatcactttngcccggnggaaaggg

SEQ ID NO: 27469 - DNA, 526 bp, Homo sapiens
  misc_feature (1)...(526): n = a,t,c or g
ggtctccccanaagggccgcggcggcctgggcaagaggaggaaggcgcccaccaagaagagccccctgagcggggtcagccaggaggggaagcaggtccagcgcaacgccgccaacgcgcganagcgggcccgcatgcgagtgctgagcaaggccttctccagactcaagaccaccctgccctgggtgccccccgacaccaagctctccaagctggacacgctcaggctggcgtccagctacatcgcccacttgaggcagatcctggctaacgacaaatacgagaacgggtacattcacccggtcaacctgacgtggccctttatggtggccgggaaacccgagagtgacctgaaagaagtggtgaccgcganccgcttatgtggaaccaccgcgtcctgaccttggaggtgcgaatctgggaaaggcgcgctcccggggggaacgggcccgggaaaggnaccctgcctcantgtctcgtctctgntnccccncgcaatgnncntctcncnggnncnaaccgggaa

SEQ ID NO: 27470 - DNA, 533 bp, Homo sapiens
  misc_feature (1)...(533): n = a,t,c or g
ggcactgggaagggcagtaggaatatagaaatgagaagccgtggattanagactcacagtctactgggtaaaagaatacgaaagccaatgtattatactgtggtagctgctttagtanatgtatggatagaaaagtaacaagagaagagaatgactatctctgcctaacagaaagatattttaaaagaagggttttggggctggattttgaaggctcaataggctcctaccatatacagaactaggaagcgggtggaggacaggtgctccaaggagaggtancagttccactctgttcagcagctattaacagagcacagctatctgtcagatgctgttgtggatgctgaggtancaagctaaacaaggngctagcaatctagcangcagaacgattagcagataatgtccaatgagtatantaagtccaaggntgaagatgtcataagtgtgcaaggtctgaactaatgtccaaggggcaanngganaanaaggtgaattaaagntttcaaaaaactgatccnngnnttaat

SEQ ID NO: 27471 - DNA, 531 bp, Homo sapiens
  misc_feature (1)...(531): n = a,t,c or g
ggaagtgtaacacatgggaaatatgacacaacaganagaaggaacctgagctgtggagtcagacagacttgggtttgaacttataacttagggngcttggtaaagttatcattcttctcttgtaaaaagggataactccagcttctttatgaggttttagtaattattgaggttgtgacatttcantgttaggcacttagcacantggtggatacttgaggtctccctaaaatactagtctcacattattaagtgttatcctgcattttttgactggcaaactcaaatgtctaaaagttgtatnnacnaatgactcattgtttccagttttaanagctcgccatttttattaaaactacagattaattgcctttttgtcntatagtgccaanganagcaaactggntattaacggnctaccanncattctaaaatggnccaantccaaaancggcttcatttcaagcantccnananataggacaaagatgggcaaggctccngttgttttccnnantnnnacaaaaaaaa

SEQ ID NO: 27472 - DNA, 434 bp, Homo sapiens
  misc_feature (1)...(434): n = a,t,c or g
gcagcaccatccatgccagggtccctgtgtcacggatgagctcatggaggcaggattggagcacanatctgcttctcaggccagcacacctatatctgccaacttcacggcccatgggttaaagaacagagccgtnnnnnnnnnnnnnnnnnnnnnnnnnnnnnnnnnnnnnnnnnnnnnnnnnnnnnnnnnnnnnnnnnnnnnnnnnnnnnnnnnnnnnnnnnnnnnnnnnnnnnnnnnnnnnnnnnnnnnnnnnnnnnnnnnnnnnnnnnnnnnnnnnnnnnnnnnnnnnnnnnnnnnnnnnnnnnnnnnnnnnnnnnnnnnnnnnnnnnnnnnnnnnnnnnnnnnnnnnnnnnnnnnnnnnnnnnnnnnnnnnnnnnnnnnnnnnnnnnnnnnnnnnnnnnnnnnnnnnnnnnnnnnnnnnnnnnnnnnnn

SEQ ID NO: 27473 - DNA, 525 bp, Homo sapiens
  misc_feature (1)...(525): n = a,t,c or g
gataaaatggaatactactcancancaaaagggaacaaatttacagatacatagaacagcatgcatgaattccanaaaaattgtgcantcaaaggaataaaactcagaagaccacatacaatgttcattcatatgaagttctggaacaggcaaaactagtctgtaggtacagaaagcaaatcagtggttttctggagtttgacatgggggtactaacannnnnnnnnnnnnnnnnnnnnnnnnnnnnnnnnnnnnnnnnnnnnnnnnnnnnnnnnnnnnnnnnnnnnnnnnnnnnnnnacacttaatggtaatgcaaaatgaatatattttattttangtaaattatncctcaaagttgantttttttaaaaagnttcttttaaaaagtaaagacatttgtggggcttccttgaaattttacnggcgnttatgancttgntncctaagatttnctttccaagtttgngaagccnagtttaaaaatggctttngcngncaagggtgngatgtnncntgncctacca

SEQ ID NO: 27474 - DNA, 540 bp, Homo sapiens
  misc_feature (1)...(540): n = a,t,c or g
ggagaagggtgggctgggaatggtcccgtctgtgggtccaaggccatgggcacgtgtgtacctcgtatattgtttttgtatttttctgcatgtttgaaatcattcataaaaatgatactccggctgggtgcaatggctcaancctgtcatcccaacactgtgggaagnccaaggnggtggatcaactgagggcanggnttcaaagacaagcctggggcaaaaatgggtnaaaacccccgttctcctaaaaaaatnncaaaanattagccaanntgtnggtggcggggcncctgtatcccaagccactgangaggntgantcaaggaggatcantttngcccaagaggttaannnnnnnnnnnnnnnnnnnnnnnnnnnnnnnnnnnnnnnnnnnnnnnnnnnnnnnnnnnnnnnnnnnngnngatcaatgctcccctgacnaatgggccggnggaatcccgntttttgggttacccctggactntttaaccctggggggngccaacaaanaancaanttcccccagggtccaaacaggga

SEQ ID NO: 27475 - DNA, 535 bp, Homo sapiens
  misc_feature (1)...(535): n = a,t,c or g
gnnnnnnnnnnnnnnnnnnnnnnnnnnnnnnnnnnnnnnnnnnnnnnnnnnnnnnnnnnnnnnnnnnnnnnnnnnnnnnnnnnnnnnnnnnnnnnnnnnnnnnnnnnnnnnnnnnnnnnnnnnnnnnnnnnnnnnnnnnnnnnnnnnnnnnnnnnnnnnnnnnnnnnnnnnnnnnnnnnnnnnnnnnnnnnnnnnnnnnnnnnnnnnnnnnnnnnnnnnnnnnnnnnnnnnnnnnnnnnnnnnnnnnnnnnnnnnnnnnnnnnnnnnnnnnnnnnnnnnnnnnnnnnnnnnnnnnnnnnnnnnnnnnnnnnnnnnnnnnnnncttaaccgtccaaggcttaaattgagtcccccaaccttagnccccggngtngctnnactacaacatgntgcaacaangcctggntcggtnngtngtacggttttaaanaaaaggncctngggaaatttcccggnagggcctngaaccccngggntaaacaatcnacccaccttggncccccaagggngttgaaattaaagggnnnngnccccc

SEQ ID NO: 27476 - DNA, 528 bp, Homo sapiens
  misc_feature (1)...(528): n = a,t,c or g
gttgccacactctgcatgttaataaatcctttccaaatggtgctgagtcgagacaaaaagagggtcgtgtctccctctggaggggaacgtgattctgaagtgctgtaaaacaaaaccataaaaaaaaagtcaatgtctctctgtgcaatganaatttcaaaagtanaaagcctttttttttttgaaanagganccnattcngtnannnaggcnggantncgggggngaaanaaancnggntgnanncccngccnccnaggccnaggnganccnccnaccnnagcctttcaantancngggacnanacncgngaattaccanaccgggcaaattttngccttttttgnaaaaanggaattttgccaaatggcccangggggtttcaaaacccggggntcaaanaaatgctggganaaaanggtgtgagccaccggggccggggntcaanagtanaaagncttttntttaaancaaangtgnacccttgaaattttangtttttggganccannttngccaaanattctt

SEQ ID NO: 27477 - DNA, 530 bp, Homo sapiens
  misc_feature (1)...(530): n = a,t,c or g
ggattctgtgatcaatacaaaataaaattaatatggacatggggcctatgcttgtatatcctccctacccctatcttcttggagagagatatgtttatgaagtgttggtcatttcttctctatttctagccattatgggctttatttcagtgaaagaatgttcagaatgtaaagactgacatcatattcttcttgtgaattttatcctttagcaatgtaaaatgacatcctttctcctgcttaatactttttggcatgaattccactgtgtctgacatttaaaaaataataaggcagcattagtgttactttttttcactttaaggnctatcttgggggttggatttattttanttttatttaattatttttgagacagtctcgtctgtcgctgaggctggagtgcantgggaataatctcagctggactgnaacctccggccccctgggtttaaatgatccncctggcctancctcccgagtagctaaaccaaaagggtgggcaacaaaaccaagctaattttgttttt

SEQ ID NO: 27478 - DNA, 433 bp, Homo sapiens
  misc_feature (1)...(433): n = a,t,c or g
gctaacagggaaactgttaatttagtgtgatccacatgcaacgtcatgccaggaaaaatgtaaaacagaatgcataatcaaacatngagtttgggtaaattaaaattattttaatttcaaattttagaggtaattgcaacataacttgatgcttgttccaactttaactaaacaaattatttttggaactggtccactcagccttgcatatgttaagaaagacaattcttaggagatgtgcttgggcgtaatctgctaggcttaccctatatattcatacacagttcctgttattcctctgttttataagaagagttggtatctttttctgacttcccacaattcagtgaccgctaggcacatgtggctatttacatttgaatccgtantttaaattaaactgaaacattcctcagttggtacaagatgtgaa

SEQ ID NO: 27479 - DNA, 441 bp, Homo sapiens
  misc_feature (1)...(441): n = a,t,c or g
ggaaaagggaggaaaaacgtttcccattttctgtagctcagaaccctgttctctaaaaatgatcctttttcaatggaaaaactctatcttgacaaatatatcatcaaatacactgttgggcatgaanagcaaaacaaaatacagtgtatggtatgctatcattggtgaaaaatanaaataaggggaaagtgaatgtgtgtgtgtgtatgtgtaagtacttgcgaatgtatgacatatctctggaaggcacatagaaaaccaggttgcctatgggaanaagtaggcgatgggggacagtattggaaaggagatttttgactgtatagttttgtgaactatgtgaatatcatctctgaaacagaacaactcctcctactcagatagcctctgctccctcctcctccttcttaaaagtctctgcctgggtgcagtggttcacac

SEQ ID NO: 27480 - DNA, 525 bp, Homo sapiens
  misc_feature (1)...(525): n = a,t,c or g
gcgancggccanacaggaaggagagtgtggcgtggccccgagaccggaggaagcggaggtcccggtccccaagctcggagcacagggcacgggagcacangcggcctcggtcccgtgagaagtggccgcagacccggtcccattccccagagaggaanggggctgtnagggaggcttccccagcgccccttgcacagggggagccagggcgggaacacctccccaccaggttgccanccttgggggaancacatgtctcgctggaggtggctacggncgacaaggcccccctgcaggctccccctgtcctggaagtggcagctgantgtgagccggacgacctggacctggattatggcgactccntggangccggacacgtctttgatgatttctcaaancgangccgttttcatccaactcgatnaacatgagctcncncccttctcccnaaagcacanactcgtccccggngcgnnacttccaactnanccngcttgccccanccagcctnggcnnntgccc

SEQ ID NO: 27481 - DNA, 518 bp, Homo sapiens
  misc_feature (1)...(518): n = a,t,c or g
ggccagcaataccttggcagcctttaaatgtgaaacgtctgttacttgcgctggaggcagaggctgtgcagggagcctgcttctaatcgngggctcccttatctgttacggttccctcccctcctgttctanatgctgattcgttttctcactggctggttaattgctgtctacttaggcctccaaggccataactgtgcaacattttatctgagaaggaaggaaggtcagaaagtgatcactggcaccaccactgtggcattcctgtcacaccaacacagaaattcacagctcatactgttctcacctgggaaacttgggaagggctgatgagtttggggcaaatcctgaattgcaagccacacttggccttctagaagctgaagttgtgccctcaagtggtcctaagtagaantccacttgaggtatttgctggcacacaccctcaagggtggtcagaagtcctgaaacctaaggcaaaagntgctggggatgaacagacanaccgtccangggca

SEQ ID NO: 27482 - DNA, 523 bp, Homo sapiens
  misc_feature (1)...(523): n = a,t,c or g
ggcgtgggggaggcagaagggaggagagagtagaagctggacctgaaggaggcagagaaataagagacagcgatggagacaggaagccctgcccggggacccaggagagtcaggccaggccacagccaccacagggacacagtgcttatcaggcctcaccctgagccagctatgtggagtttaatttcactctcataaccgcgcgaggccggcattacctccttttcctaaaggtgtggatgagtctgagctaaaggaaccgactcagcatctcatgcttagagaggagcagacacaagatcccagcagcggccagggccacctccaaggctggcagccaggtctccaaaggcaagagacctttccagacaggcccaagacaacactcccagccttcccgaactcccatcctgtccccaacctgcccactggccgttcccaaggctgatggacaagtccgtnctcaaagccaagcctggcacatagcacatgctcagctaatgatcactacgggtantacata

SEQ ID NO: 27483 - DNA, 520 bp, Homo sapiens
  misc_feature (1)...(520): n = a,t,c or g
gctggcagtgcttttcatctgaattcgcagcaatccctaatccttattcccagcttctgtttttgcaatgtacctagcaccttatcttctctacgcagaacaaatttgtcattattattaattcaccaatgactgaaattccagctctaatatctgaacctattctcccatgcctttttgaatgccaacagcttacctgtctgaacttaacttactgccatgagctcctgttactaagttctgatctgtttttaggaacaccgccttaagtaatctgcaagccccacatcgcggagggtttgccaaaatggaggcaaaccaccctaaacctccatttttgatggcagcaaccgggccaagtcttcctagggcttangtggacctgggngcttcaccatccccaactgcctttgatgtgactgctatattacaangnttaattantantctgctcaagggcaataaactttggaanctggnctccttcaaaactaatcctantanaattaataanagcctt

SEQ ID NO: 27484 - DNA, 505 bp, Homo sapiens
  misc_feature (1)...(505): n = a,t,c or g
ggcggcagacgatggcagaggccctaaaggtatggagcgatgtgacgccactcacctttactgaggtgcacgagggccgtgctgacatcatgatcgacttcgccaggtactggcatggggacnacctgccgtttgatgggcctgggggcatcctggcccatgccttcttccccaagactcaccgagaaggggatgtccacttcgactatgatgagacctggactatcggggatgaccagggcacanacctgctgcaggtggcagcccatgaatttggccacgtgctggggctgcagcacacaacagcagccaaggccctgatgtccgccttctacacctttcgctacccactgagtctcagcccagatgactgcaggggcgttcaacacctatatggccagccctggccactgtcactccaggancccagccctgggccccangctggatancaccantgagattgcaccgctgggaccagangcccgccanaatcctgtgaagg

SEQ ID NO: 27485 - DNA, 512 bp, Homo sapiens
  misc_feature (1)...(512): n = a,t,c or g
ggggaggtcttgggggtgtccgggagggggctggggggataaggaggcctcttacagcttcccttcagggcagggccctgggggaggggtctcacgtccccnggggaagcgccggaggccggagccagagcccctgaggaggaggcagaaggggaaagtggaggagctggggccaccctcagcagtgcgcaatcagcccgagccccaggagcanagggagcgggctcatctgcanagggcactgcagcagccccatccggatgtttgcttccttccacccttctgccagcaccgcagggacctctggggacagtggacccccagacaggtcacccctggaacttcacattggtttccccacagacatccctaaaagtgccccccactcgatgactgcctcatcttcctcagtttatccccatccccaagtcttcctaaacgctcancaacccttctcccctgtgccgtaatttgtctcctgggactgggggaagatccaagttgggttgttg

SEQ ID NO: 27486 - DNA, 514 bp, Homo sapiens
  misc_feature (1)...(514): n = a,t,c or g
gagcccctctggccctcacagagcctcgggatcgggcatcaaaccccattctacagatttggaaactgagggcagagaatccctcaccagagtccaactgtcaccggatctcctggcgaccctgcctgagccagcctccccggggcgccaggcctgcggcaggaggcacaagaagaggacgttcctgcggccacgtatcatcggcggctcctcctcgctgcccggctcgcacccctggctggccgccatctacatcggggacagcttctgcgccgggagcctggtccacacctgctgggtggtgtcggccgcccactgcttctcccacagcccccccagggacagcgtctccgtggtgctgggccagcacttcttcaaccgcacgacggacgtgacgcaaaccttcggcatcgagaagtacatcccgtacacctgtactcggtgttcaaccccagcgaccacgacctcgtcctgatccggntgaaaaaaaaangggaccgctgtgcacacctcc

SEQ ID NO: 27487 - DNA, 511 bp, Homo sapiens
  misc_feature (1)...(511): n = a,t,c or g
gcggcacgaggttaagtgaccttcccaaggtctcatggcaaaaggcagaacagaacgagagatctgacccaagtcccacactcccgccttctcatgtttcagcaacccaggaggagagagcatgtgtcctgcatctttttaaaaaggacctgccattacttagagcttcacatttatagtgggtgtgtcctgagtaagctcacacctatggctgtggaatcccttttcagaaaggcaatctcgatgacctagtgatctggcctagtccggccaaggtgctgggggaaggatgaggtcatctgggggcctttccaacacagtgacacttgtggggacagttgtctacactgggaagaagcattggtggtgcctgtggaagtaccacagaacattgacgcaaggtctgtttgtctgtgcaggtgctacctttttacccacacttaagtgacgcaaaatgcccttcaatggcgaaaagcaatgtnntggaaaagaccaaccaagcgattctgat

SEQ ID NO: 27488 - DNA, 532 bp, Homo sapiens
  misc_feature (1)...(532): n = a,t,c or g
gggaatttgtcctactggcaagtaggagtacggtatttctgcaagaggggatggccagcaagagcagagactagaaatgagaaaggagtttaaggtatttcacaaacaagtacttcagatgactgaattgaaatctgttggaaaaagccactactcttctcattgttaaattcatgacatgctttggtcactattgcctgataattttattcattttatcaaaaatattcattagtcgnnnnnnnnnnnnnnnnnnnnnnnnnnnnnnnnnnnnnnnnnnnnnnnnnnnnnnnnnnnnnnnnnnnnnnnnnnnnnnnnnnnnnnnnnnnnnnnnnnnnnnnnnnnnnnnnnnnnnnnnnnnnnnnnnnnnnnnnnnnnnnnnnnnnnnnnnnnnnnnnnnnnnnnnnnnnnnnnnnnnnnnnnnnnnnnnnnnnnnnnnnnnnnnnnnnnnacgggggntgaattaactnaggtgtgcantggactccaanccctgantgacanaanaactcgntctcaaaaaaaaaaaaaa

SEQ ID NO: 27489 - DNA, 539 bp, Homo sapiens
  misc_feature (1)...(539): n = a,t,c or g
gtttaatcataccttcttattttgaaaagacaccttactgccccatcaagtttaaattgtaggggaagggaagaaaaggtgggaataggaaaagaaaacagctgtctatcaaacggtgtacaaaggagcttatgtccactatcttatttaatcctctgaacactcttttggagggtctatcagtcaaggtgcagtcacaaggaaaataaattgtagtaggtgttataaacagagaacattcaatagcgagaattgcataattgggtgttagaagaataaaagaacaacaacaaaaaaggcatgctgaggtaccccagagttaataactagaggaagtagctatcacctctaagtctgggagaacaaaaggggaggtagtgttaccagaactaggagcttggtggagatctcctggagggctggtgcctggacctctgggcataagcnttgggtactggtactcanatccctggnctgacaaggtgantnntaaggcccaaggcantgaggtccaaaggatnattgagcatggaanggtt

SEQ ID NO: 27490 - DNA, 542 bp, Homo sapiens
  misc_feature (1)...(542): n = a,t,c or g
gaatnnnnnnnnnnnnnnnnnnnnnnnnnnnnnnnnnnnnnnnnnnnnnnnnnnnnnnnnnnnnnnnnnnnnnnnnnnnnnnnnnnnnnnnnnnnnnnnnnnnnnnnnnnnnnnnnnnnnnnnnnnnnnnnnnnnnnnnnnnnnnnnnnnnnnnnnnnnnnnnnnnnnnnnnnnnnnnnnnnnnnnnnnnnnnntattacatttacannancattataaanttaaaaataancttanccaaangggcaaaanntttgancacagaaaactacaaancacngttgaaagaanttaaccacaantaantgaaaanaaaacctgtntttgcanattaaangctttcacctnggaatganntcaacactacttgnggngnccnaaattcaatacaacccttataaagattccaatgacatttttganaaacagaaaanctancccaaaattccatntggatccccagggccanggatgggcaancaaccttganccagaacaaanttaagggcccaaaccantnnaaactggcanaagccanaaaa

SEQ ID NO: 27491 - DNA, 537 bp, Homo sapiens
  misc_feature (1)...(537): n = a,t,c or g
gatttatttgacattattttgtgaatttaacatttattttgtgaatttcgatgtcagcaataacaattttagattttatgaattggattttgaaatgtggaatagagagtcttctaaaagggacaggaacaattcaaatgttatttttataaacatacagatggttcatcattatgttctcagtatcgagtggcactttataaatatttgcttaataaatgaataagcggaacaatacacacatagtctcacacccacagggtctgatcataaaataagtgagttttaaaatttgtcttatataaattagtaatagaattttatagttaatcatttgtatgccatatgtaatatactcagcatatatttaaatgaattttttattttaggacagttgcttatgattagttttagtatattgaaatgaacatatggaagtactaaaagagaatactgtngaaaaactgttaaaaaacntaaggctgggcacggtggtcngcccggnatcccacactttgggaggccaagggggngggc

SEQ ID NO: 27492 - DNA, 537 bp, Homo sapiens
  misc_feature (1)...(537): n = a,t,c or g
gggaagaggcacacatcccaagcaaactacaattgatgcacccctgcagagtctacagaaatgaaaagagaagatcgaaatatcatcatttttcattctcccgagttttaatttttatttatttattattatttatttatttattattaaagtagcagagattgaaaactaagataaaaaatgccaacataaccaatgatacgtttagcaggattggggaaagttcatagcgctagccatggactctgagttctccactagactgtaagaccttgaggccaagaactgtgtccatcttggtcaccattgtacctgtagcacctagcccagcatgggggagcagagagaagctgagtgaattgattaaattcattggttgtggctgacctctaaagatgttctattaactctgagactgtgcacaganaagactttgtgtgctgctgtccatggaaagaagctcatctgngttgcngcggggagccaaacaacactngnaatggntggcncggnccgggaaancaccnccnctntctt

SEQ ID NO: 27493 - DNA, 533 bp, Homo sapiens
  misc_feature (1)...(533): n = a,t,c or g
ggtctgctcacacttgctggcttgcgcatcaggactggctttatctcctgactcacggtgcaaaggtgcactctgcgaacgttaagtccgtccccagcgcttggaatcctacggcccccacagccggatcccctcagccttccaggtcctcaactcccgcggacgctgaacaatggcctccatggggctacaggtaatgggcatcgcgctggccgtcctgggctggctggccgtcatgctgtgctgcgcgctgcccatgtggcgcgtgacggccttcatcggcagcaacattgtcacctcgcagaccatctgggagggcctatggatgaactgcgtggtgcagagcaccggccagatgcagtgcaaggtgtacgactcgctgctggcactgccgcaggacctgcaagcggnccgcgccctcgtcatcatcaagcatcatcgtgggtgctctgggcntnctgctgtccctggtnggggggcaatttnccacttgcttggnggttaaaaccccaaggcnaaacccatgatctggg

SEQ ID NO: 27494 - DNA, 526 bp, Homo sapiens
  misc_feature (1)...(526): n = a,t,c or g
gnnnnnnnnnnnnnnnnnnnnnnnnnnnnnnnnnnnnnnnnnnnnnnaagcnnnnnnnnnnnnnnnnnnnnnnnnnnnnnnaattaaaaattcatgaagtaaaaaaagttatagtaatcgaaggttaatttattactgatgaaaaatttttaaattaatnnnnnnnnnnnnnnnnnnnnnnnnnnnnnnnnnnnnnnnnnnnnnnnnnnnnnnnnnnnnnnnnnnnnnnnnnnnnnnnnnnnnnnnnnnnnnnnnnnnnnnnnnnnnnnnnnnnnnnnnnnnnnnnnnnnnnnnnnnnnnnnnnnnnnnnnnnnnnnnnnnnnnnnnnnnnnnnnnnnnnnnnnnnnnnnnnnnnnnnnnnnnnnnnnnnnnnnnnnnnnnnnnnnnnnnnnnnnnnnnnnnnnnnnnnnnnnnnnnnnnnnnnnnnnnnnnnnnnnnncctatgagtgataagntatataccatattaccatataaccncagtggggnccaaccaaggttggggtagntcatccaggatgttcaa

SEQ ID NO: 27495 - DNA, 523 bp, Homo sapiens
  misc_feature (1)...(523): n = a,t,c or g
ggtggggggtggggcggggcggggaaggtgtgtgtgtgtttgggatgttccttggtatgtttatttcaaacaaattaatggatctacattaggaactaaccccaaaattattgtataggaagctactggaaaatagaccactcttttttacattgttggaatcagccttttataaattcctttgtagtaagagaggttgttaaatgccccagaggtcttctgaacatccataggaaataaagttaagtttaattctcatattctatgtaagaatagagttccaatgtcaaatgggatattagaaatgtaagtgcctcagtgtttactgttcataaatttgagaacagggtttgataagggataagtggaattctggcagatttacttgtaggttattgtgagtttatcataattttgacaacaaaaaaaaactccacagtatgttgaaatgcanttctcatttatcaataaatttcangattttnngaaaantttaaaaanccaaataanaattantttggga

SEQ ID NO: 27496 - DNA, 528 bp, Homo sapiens
  misc_feature (1)...(528): n = a,t,c or g
gaaaagcaaaggcaagaagagcaagtccccaaagcccgtgaagccagtggaggacgaggatgaggccgggctgcagaagtccctcaagttcaacctgatgagcgatgcccctggggacagtccccgcatccacctgcccctcaactacccaccaggcagccctgacctgggccgccactatcgctctaactccccactgccttccatccagctgcagccccagtcaccctcagcctccaagaagcaccaggtggtacaggacctgccacctgcaaacacattcgtgggcaccggggacaccacgtccacgggctctgagcagtactccgactacagctaccgcaccaacccccccaaataccccagcaagcaggtaggccagccctttcagctcagcacaccccagcccctaccccacccctaccacggagccatctggaccgangtgttggaattgatngagcaggtttacggtgcccngcccttnttgggggcaaacctgagccancattggnagtggggccttaa

SEQ ID NO: 27497 - DNA, 521 bp, Homo sapiens
  misc_feature (1)...(521): n = a,t,c or g
ggtagatgggttcaggagacatttcagaggcagaattgcttggactcgggggtggatcgaatgcatggagtgagggaaagggaacacttggaggactcctggtttcctggtttgagaaactaggtggatagttagtaccatttagggggttaggaggcctgcgggggagcaggttctatgggatggtgtcaaaggatgctganaaggtgcctgtgggacccctttgggaggctgggaaggtgctcaaggcaaaagggccgggctggagaacaggcttggggaatgtcagtagaggcagaggtggaagccacatatgacttggtcatcccttggaagcagttgagccttgaagggcagaggcagctggaggcagccatggggtagaggcaggcttgggagcctgttcagtgctggtgtgtagggtcctgggaaacaagagtgatggcaaggaagctgctaagccgcaagctgggctggantttacaagctggnggancacntttgggatnctaattantcac

SEQ ID NO: 27498 - DNA, 521 bp, Homo sapiens
  misc_feature (1)...(521): n = a,t,c or g
gggagaaaagtgtttatgaatgtttatttttggttgttggtctgtttcctttgacagttcatatttgctttttttccataaaggtctttattgttttattttcataagccttacactgagaaagaaaagtgtaaaatttgtatctgtttttgggtcagtgttgactgtgttttaggatttancagggatacaagaattctcttgtggttggagaggagctttaggcgtgcctgcttgatcttcctcttgcatatgaagaaacgatggagaggtggtcagcccagggcacacacctaggtgatagcagggtgagggcggagtgaaggcctgagacccacgaccagcgcacacttactccacctcaccatgaacactgacaagccagcttcccatggaggtgcggtcactgcatgcctcccctctgacttcttgttttgtgtcctaacttaattctgacgcaaggtacaaggggagaccccaatgnntcacagcannccaacanctaaaatngtncncnaaag

SEQ ID NO: 27499 - DNA, 527 bp, Homo sapiens
  misc_feature (1)...(527): n = a,t,c or g
gcagttgttttaaataattaggaaagaatacagctaacattttgacagttgcacagcagataagaattaagagccttatcactattaagtgtttcaactttatttagacagattagaaattatttgggcctaaatgatccttaaaaaaaaaaaccctgcatcgttttanccnggacattggccttcttttaaattcatagtaagcttatncctanaaancttaaaggtagttataaaaattttggatatattttanatcccttgtcttatttacagagatganaagagctttgcagcataaacngcttcatcttcggtcattaccttgttttggttaaggagagatttaaaaancacttaaaacacacngtatttccatcngattttgaaatcattccatgttcaaagttaccangattttgtcaattattcaggagatttactgngcataaagtttaggtaagtgnggtaaacgattttanccaaagtaaanccnaacnttctttccnataagccaaacccccatt

SEQ ID NO: 27500 - DNA, 508 bp, Homo sapiens
  misc_feature (1)...(508): n = a,t,c or g
gnnnnnnnnnnnnnnnnnnnnnnnnnnnnnnnnnnnnnnnnnnnnnnnnnnnnnnnnnnnnnnnnnnnnnnnnnnnnnnnnnnnnnnnnnnnnnnnnnnnnnnnnnnnntggccttcctggttttttgattgagagtctgaagttccttttcccttctttcccgtatattccacccttcagtgttttctactttagctttgtatctcatttagattcaaaatatggcaactatcttgagtaagaagcttgtagttgttgtcagtcattgctctagtgtgactttgtctcctaggcatcactagattacaggagattttactctgtctttccagtccagacctctatcctttggcctgcttcagtattcaataaatacttcatagtaaagaatcagtgatgctgagttcaggctcctctgagttcaggctgaggttcaagttcanaantcaagntggcttctcccannccttaatcctccatagncatgctgtacaagngactttcaaa

SEQ ID NO: 27501 - DNA, 513 bp, Homo sapiens
  misc_feature (1)...(513): n = a,t,c or g
gaactggtgtgttaccttcaaaagtatcgaggtcatagaggccaaggaaattccgagaaactgttccagacctgaaagagactaacaactgacacgtgattctaaatggttccttctgtcattgggacaattagggcatatttgaatgaggtctgaggattagacagtagtgtggtataaagttaatttcacaatactgatggatgtattgtgatacacgactgttcttgtttgtaggaaatacacattcaagtgtccagaggggacagggtgccaggctggcaatgaatccaagtagttcagcgaggaaaagttcttttatgttgttacaattttttccatctttttaaaactataacgggtggagcgcatggtgtgtttggaagcggtangttctttcagaagctgggtgggaaatcactctgaaagaagacactagagctgagatgtncaagagaangagctgccacatacaaaatcccaanggnaaacatataatgatgatgctaattt

SEQ ID NO: 27502 - DNA, 509 bp, Homo sapiens
  misc_feature (1)...(509): n = a,t,c or g
ggttttatttcattttaaagttgtaccttaaggacatttgtgaataataagtttcctggtaagatttctagtttcatgaattttgccattgtggacttatagtatgttacttgtcttaatgatttaagtccaggtgttatgtacagtcaagaaagcaattttcaaagggtccatgtttcgtcctatggcccaaactgtgtgctgttatttgatagttggcaggctatcatgtttaaaaaaaaccccaaattgccatatattctctctcaaaatgcagtagtaagtattccattatgaaaactggagnnnnnnnnnnnnnnnnnnnnnnnnnnnnnnnnnnnnnnnnnnnnnnnnnnnnnnnnnnnnnnnnnnnnnnnnnnnnnnnnnnnnnnnnnnnnnnnnnnnnnnnnnnnnnnnnnnnnnnnnnnnnnnnnnnnnnnnnnnnnnnnnnnnnnnnnnnnnnnnnnnnnnnnnnnnnnnnnnnnnnnnnnnnnnnnnnnnnnnnnnng

SEQ ID NO: 27503 - DNA, 499 bp, Homo sapiens
  misc_feature (1)...(499): n = a,t,c or g
gcttggcgtttgatccaaagaaaggattttggtgccaactgcttgaaggaggaaaaaccaagtgtctgggcaaaagcaagggccggaaatatcccgagatggacttggatgtaagtggtggacacactacctgtagcacctgcataaggtccccaancctcctgaaagggccatttacgggaacaanacaancaactctccaagctgctgtataagatgggccanacacttcccacttggctacgagaggacctccannacaccangtanccgtggccancacaaccagactgaacgtttgtgaaancnggganatccaacaaangcngnaccaaacctnnaaaatnggaanctngnccaaggnaactnngcacttatgagcnatacctgtggaagtctggtggngctgggganaccaaggcggattgnancacctcnggncaaccaacgttggtctgcngcnaaggaacncctcnccaananangncaatccttccaa

SEQ ID NO: 27504 - DNA, 513 bp, Homo sapiens
  misc_feature (1)...(513): n = a,t,c or g
gactggattgtctaccttccctctcatcattcagtcaaaccctaatatttaagacctaatttaacgacaactcctccacataattcccaccccaacttttttctgttagagtctttcaatctctccgtgttccaactgcatttacatttcctcttttttactgtagttatttatgttaagagaccaaaataaacaatagacatgagatcacttcataaacactaaagttattttataagatacttaatacacaccaagtcaaaagtatcgttaaccaaagaaagaaaatagaaaacaatggactcaatatccctaagcagagtacttcaaaagcaagcacaacctggctctaacttgctgccaatttgaatagaagtacaaagggaaaattatacccaaatcataccacatcaagttttgttttaactaaacaaagaagtcatttaatcaaactacatgaaacaaaaaaaaatttgaaggtgaatatgatatcatnaaatattacgggccaag

SEQ ID NO: 27505 - DNA, 509 bp, Homo sapiens
  misc_feature (1)...(509): n = a,t,c or g
ggctgattggatgacacctactcttataaaaggtaacgctttactcaaattattctgatttaaacgttaatctcatccattaaaaaaaataataaaattaaaaacatctactcagaaactccagaatgatgttttaccaagtatctgagcactgtggctcagacaagttcacacatgaaattaactgtcttactaccttatacaacaatgacaatttacagttcagactgcaaaggtccttgaatgccattttgttggatttatgaaaattaaccagtggctctctaanagatttgaccttcatcatctgatactggcagcaggaatgaggtggggtgggtgtcctatagaatagtttaatttctttagggaacgtgtgttggaatatttgccatcatgcttgattttcanccttatttttgccacatgacnaattggatgtttttccttncaatactttccctttgggnccacaatattttaataattaancatttttaggcnattta

SEQ ID NO: 27506 - DNA, 511 bp, Homo sapiens
  misc_feature (1)...(511): n = a,t,c or g
gtgttttacaaattcttcactctttacaacattgccaaccttctactgtttcttttggctatttancattgttcgtgtganagttacctgggcatttttttcccctttaattgaaacaattttataactanctctgagcattaangatacttagcatctgatatttaaaaattatgtttttgnnnnnnnnnnnnnnnnnnnnnnnnnnnnnnnnnnnnnnnnnnnnnnnnnnnnnnnnnnnnnnnnnnnnnnnnnnnnnnnnnnnnnnnnnnnnnnnnnnnnnnnnnnnnnnnnnnnnnnnnnnnnnnnnnnnnnnnnnnnnnnnnnnnnnnnnnnnnnnnnnnnnnnnnnnnnnnnnnnnnnnnnnnnnnnnnnnnnnnnnnnnnnnnnnnnnnnnnnnnnnnnnnnnnnnnnnnnnnnnnnnnnnnnnnnnctgtcncaannncncnacnagncattncagancatncanacangntattaacatncnaagcnccttatntaangtggg

SEQ ID NO: 27507 - DNA, 509 bp, Homo sapiens
  misc_feature (1)...(509): n = a,t,c or g
ggtaatttttatttaatggagacagttcctaaaaggagaaatactaaattattgaacactattttcttttcttgctgcataattgtgacaggaaattaatataaaaataaaacctcaagttcctaagactgagaaattttaatttcttctttatcaccttggctctaagagcaattaaattaataggaatgggccaaaaaaggaagagaggagacagtaagaaacctatgtaatcctcagattatctaattctcatcttatttgagccaaatgacttaaagtaccgaagtcccaaaatgaagaaaattagatctgcgtgtatttacataactaatttttgtctgtatctttttgaatgtatggtatttaaccagcactttttaaagttctttataacctggctagctgatggttttatacttatctgaaatgttcagtgatatctaatcntttccctacatatttanctaatttagatccaaggaggtccaagacagttggagggttca

SEQ ID NO: 27508 - DNA, 507 bp, Homo sapiens
  misc_feature (1)...(507): n = a,t,c or g
gggttcggggagctccgccaggctgctggtacctgcgtccgcccggcgagcaggacaggctgctttggtttgtgacctccaggcaggacggccatcctctccagaatgaagatcttcttgccagtgctgctggctgcccttctgggtgtggagcgagccagctcgctgatgtgcttctcctgcttgaaccagaagagcaatctgtactgcctgaagccgaccatctgctccgaccaggacaactactgcgtgactgtgtctgctagtgccggcattgggaatctcgtgacatttggccacagcctgagcaagacctgttccccggcctgccccatcccagaaggcgtcaatgttggtgtggcttccatgggcatcagctgctgccagagctttctgtgcaatttcagtgcngccgatggcgggctgccggcaagcgtcaccctgctgggttgcgggctgctgctgancctgctgccggccctgctgccggtttggccctnaccgcca

SEQ ID NO: 27509 - DNA, 531 bp, Homo sapiens
  misc_feature (1)...(531): n = a,t,c or g
gttgtatttgtcactgtttcttataagtccagataagtaagtgctgatatacaattaccacattttaaaaaattctttgtttattggtctgtggagggtatgaaagtgaagctacaatggaacaaagtcatcatcgtcagtaaaggagagataccctgagaatcctaaaaacactttacggaatagcaaagtagagttctgtaatggaaatactgtatatgctgggctggaggagacaaaaaacccagagttccaaccccatatctaccactggctaccgtgtgaccttgcagcagtcaggtcccatcacagagctccatgcttgtgtctgtagattcaaggagcagaaccagaactttcagatttccctcaagaattttgtgatgcagtgtttgaattgagcccaagtccaaatgacacaanttttcangncaatttgnaatgggtcttgnccncatcccnataggggggcaaatcaanccgtataacttctacatgtgnggtanccctcagaagacttganaatgagac

SEQ ID NO: 27510 - DNA, 528 bp, Homo sapiens
  misc_feature (1)...(528): n = a,t,c or g
gctgggcttgaaaatcacaataatcaaagacatgattgttctgtgcacatctgcctcctgtacacttagagaccctgctctgctgacatttttttctgtgattttgtttttctcctagataaccttcatattctgggcatcagcacaatcctccaaatcccttttgaaaacaaatgcatccttattgctacggcagccacttaatctagacacaaatacagctatattaggtgcactgtaatgaaaagtgaggtgtgtattggggagaatttccgaggttgttttaaaagctgtttaacattacacagtggttattagtttttaaataatactccataggaaatgccatgctagcttaaaaagggggtagagcaataaaaatgggccacagtaacaaaagcaactgggtggctttagatcccaagggtggataanagaaaaggttcgagcgaataatgtttatacctacaanaagcanggntggnccggangaangtatatataggatacccccttcatactccaaaa

SEQ ID NO: 27511 - DNA, 533 bp, Homo sapiens
  misc_feature (1)...(533): n = a,t,c or g
gggtgtatctcttcatctggtgatgggcatttggattaattctctctttgggttattaggagtgatgctactgtaattattcatgtgcaaaattttgtgtggacctgtgctttcatttttgaatatgaaaatactgcgcannnnnnnnnnnnnnnnnnnnnnnnnnnnnnnnnnnnnnnnnnnnnnnnnnnnnnnnnnnnnnnnnnnnnnnnnnnnnnnnnnnnnnnnnnnnnnnnnnnnnnnnnnnnnnnnnnnnnnnnnnnnnnncgaagatagagaaannnnnnnnnnnnnnnnnnnnnnnnnnnnnnnnnnnnnnnnnnnnnnnnnnnnnnnnnnnnnnnnnnnnnnnnnnnnnnnnnnnnnnnnnnnnnnnnnnnnnnnnnnnnnnnnnnnnnnnnnnnnnnnnnnnnnnnnnntggcaagcatggtggcaggtcctgtatcccanctactcgggaaggcttaggcaggnagtaccttgaatccggnggaaangttcantgagctganattgtgccctgcaccccacc

SEQ ID NO: 27512 - DNA, 530 bp, Homo sapiens
  misc_feature (1)...(530): n = a,t,c or g
gacattcacaaaatttgcatctaacgaagaactaatatccagaatctacaagaaactcaaatcagcaagnnnnnnnnnnnnnnnnnnnnnnnnnnnnnnnnnnnnnnnnnnnnnnnnnnnnnnnnnnnnnnnnnnnnnnnnnnnnnnnnnnnnnnnnnnnnnnnnnnnnnnnnnnnnnnnnnnnnnnnnnnnnnnnnnnnnnnnnnnnnnnnnnnnnnnnnnnnnnnnnnnnnnnnnnnnnnnnnnnnnnnnnnnnnnnnnnnnnnnnnnnnnnnnnnnnnnnnnnnnnnnnnnnnnnnnnnnnnnnnnnnnnnnnnnnnnnnnnnnnnnnnnnnnnnnnnnnnnnnnnnnnnnnnnnnnnnnnnnnnnnnnnnnnnnnnnnnnnnnnnnnnnnnnnnnnnnnnnnnnnnnnnnnnnnnnnnnnnnnnnntcattatttanaaagatcctnacacaccaggttcnccatgattggnaattgtaangtgtnanccaccctaagngccacaacccatgagcgggtanagaaa

SEQ ID NO: 27513 - DNA, 523 bp, Homo sapiens
  misc_feature (1)...(523): n = a,t,c or g
gccacttctgatggggtagctcatatccaagaatgagtcacaaaaccagacttgttgaacctggtatatgatgagtcacaaagcaacattctgcctttgttttttcaggacaagaaacttgaattgtatcccactgagttaaaagataaaatatatggcattggcatttctgtacttcagagaggaatatatctgtttgtggtaggaataaaaaataagtgagagaggcaaagcttaggttcatcatattatgttactgatataacacaattaacttggtaaaagtgaaggtgnnnnnnnnnnnnnnnnnnnnnnnnnnnnnnnnnnnnnnnnnnnnnnnnnnnnnnnnnnnnnnnnnnnnnnnnnnnnnnnnnnnnnnnnnnnnnnnnnnnnnnnnnnnnnnnnnnnnnnnnnnnnnnnnnnnnnnnnnnnnnnatggtggganacnctctaatcccagctacccgggagntaagnangagaacgcttaaacctggaagtgganttgcatgagctaaattga

SEQ ID NO: 27514 - DNA, 523 bp, Homo sapiens
  misc_feature (1)...(523): n = a,t,c or g
gaacagctttgttataaatgtgcctatatagtattttagctgttaaaaataaatgttaaataatatttttaattcttaaaattagcaggattatttttattattttcannnnnnnnnnnnnnnnnnnnnnnnnnnnnnnnnnnnnnnnnnnnnnnnnnnnnnnnnnnnnnnnnnnnnnnnnnnnnnnnnnnnnnnnnnnnnnnnnnnnnnnnnnnnnnnnnnnnnnnnnnnnnnnnnnnnnnnnnnnnnnnnnnnnnnnnnnnnnnnnnnnnnnnnnnnnnnnnnnnnnnnnnnnnnnnnnnnnnnnnnnnnnnnnnnnnnnnnnnnnnnnnnnnnnnnnnnnnnnnnnnnnnnnnnnnnnnnnnnnnnnnnnnnnnnnnnnnnnnnnnnnnnnnnnnnnnncacttggncagaacttttttggttactgggatancctaaaccttaattccccttcccatcagtgatactgaagaaancagggatttgttttgccttgacttttgagctcatttcaaaatgg

SEQ ID NO: 27515 - DNA, 524 bp, Homo sapiens
  misc_feature (1)...(524): n = a,t,c or g
ggatgattcttacttcaaactttattggaggattcagtggaaaaatgaatgtctatgagtacctggcacttagtaggctctctctgcttcattcctgccctagtttccctctaagcccaaggacggaagataggaaagcttttcaactaagatttacacaaaacaggtgcccacaatcattccacgcaaccaggctccatccctgcaaaagtgctgcagaagtggaccttttcagtttgtggtgcccagcccaacatgcaatctggcacccattanatactangtaaatgtcgttgactgatgagtggtggcaggcactgaacaatgcancaccaaccaaaatgtcaggttgttctgtagggggaagtagcanaacctccangggaaanggttaccaggtgggaaaccttggcanagctcatgtcacaantgnaacctggccccatggaancgcactcaatacnagnccntgtcaccctgtatcacnggatctaggaggcngggacntgtgcanctgtgggtat

SEQ ID NO: 27516 - DNA, 525 bp, Homo sapiens
ggggctagtgggaccatgtgagacatcttgaggccattcacgttcctgcttaaagagcccgggaccagcgcagagggcctgatgcctgatctgtcaagtctgtccgaccgtgcctgtctgctgtccccccagctgttccagtggtggattggcaggaccgggtgcctacccggtactccttaccaaaggagcccctggtagtgcccacctagcccaggacaaggagtggaacgggagctgcagctgcagtggtcacgaaggcagcctggaggaggtggccatggaggatagccttcgttatcgtcagcctctggtgagaagcagcagcatccttccagagagtcacttctgatccccaagtttccaaggaaacaagactctaggtccactttgccgtccagactgaagcggaccttcatacacaggcctgtgatacttggagcctgcttgcctcaaaaactgcttgcttaacttcacctaactcaaccttccttcaattcttaataactttccctttgttcagca

SEQ ID NO: 27517 - DNA, 524 bp, Homo sapiens
  misc_feature (1)...(524): n = a,t,c or g
ggagactccaaatctcaatgaagccagctcacagtgctgtgtgccccggtcacctagcaagctgccgaaccaaaagaatttgcaccccgctgcgggcccacgtggttggggccctgccctggcagggtcatcctgtgctcggaggccatctcgggcacaggcccaccccgccccacccctccagaacacggctcacgcttacctcaaccatcctggctgcggcgtctgtctgaaccacgcgggggccttgagggacgctttgtctgtcgtgatggggcaagggcacaagtcctggatgttgtgtgtatcgagaggccaaaggctggtggcaagtgcacggggcacagcggagtctgtcctgtgacgcgcaagtctgagggtctgggcggcgggcggctgggtctgtgcatttctggttgcaccgcggngcttcccaacaacaacatgtaaccgnatgtttccagcagaagacaaaanacaacatgaaatcaaaaataaaactggtaaaacccaaaaaaaaaaaa

SEQ ID NO: 27518 - DNA, 532 bp, Homo sapiens
  misc_feature (1)...(532): n = a,t,c or g
ggacnaaaggtggactgtttcatacaaaaagcacgaaaacaccanaaacaccaggantgtgtnagcaactcctgaaggtgtacgtgtgtgtgtctgtctgtctgtctgtctacttgggaagataaagggtgaanaacananaatgttanatatcnggaatctgaacttttaantcanaagtattttcagtatggtccaangccaggacagttctctaggataaactgaaatactacaatgtgncgtctcccttcagtgttccaagtttanaaaggtgtgtttgtttaaacaacccagagccatgggattaactcngctcggtacctgatcactcanccattctaatgaatgctcatcagactgtcttcaagcactcancatactcccctcatccctaaaganatgctgtganctgacaacagggtcanactcngngcccaacattggaaccanggtgcaaggcttattaganacatgcnnnggcanttggccaatgtgaaaacaccanntaatgcngccccagctaangcat

SEQ ID NO: 27519 - DNA, 475 bp, Homo sapiens
  misc_feature (1)...(475): n = a,t,c or g
gacattgtgtatgaaggcccaaaggagacagcaagtgtggtttgttctancaactgaaacacatttgatgtggctggatctcanagtgacgggagagccagcatgagataccgaggccaggtcatgcagggctgtaattgtgcaaggcatctggactttaatctgangacagtaaggagcctcanaaaacgtttaaagccaaggacatgggaancacaagatttggattttagaatgagacnattggtgctgaatccccaacaacanncaaanaaggntgggntnggnggaaaccatgggggnattggggaaaaggggnnatngnattnaccccaaccctnntccnggaattncaannctgtnccccaattccaagatnccccttnnanccccttgccttggcggtggcccacnagaaatcccggggggnggnggnnccaatnngttcnaagccnaanntnnncaattncctggg

SEQ ID NO: 27520 - DNA, 486 bp, Homo sapiens
  misc_feature (1)...(486): n = a,t,c or g
gctgtctgagacctgaagatgctcantaaaagttacccttaccacttggggtcctcatgtnaggcaagggtggctcccctccacccacgcctgctggtttgaagcaagccagctgccatggatgaataggcagataacagctggcgccatgttggacttctcaggcaggagccccaaccatctcttctgtccattttggtaggtggcacctctgagcatganaagctgtgccgggcccgggaccagtgccgggagattctcaagtatgtgaatgaagcggtaaaacaaacagagaaccgccaccgtttanagggctaccagaaacgcctggatgccaccgccctgganagggccagcaaccccctggcagcanagttcaagagcctggatcttacaaccagaaaaatgatccatgagggaccctgacctggaggatcagcaagggtaagacttggactncaacgtgctgctgctggangacnccta

SEQ ID NO: 27521 - DNA, 484 bp, Homo sapiens
  misc_feature (1)...(484): n = a,t,c or g
ggagatccggtgtaatctgcttacacaatattcctggagaagttcttctttcagtaaatacttgtacatctctgcagantgacagcaggttctccagcaaacaccttggggagcccaaccctttcctgggaatgcccctgtgttaatgggaatcaaagctganagcaggtggggagagtacattcttggcttatcagcttccaacagaaaggggaaataaaaacagatgcaatcttttattgcaaagggatgggtgcctctaagatcagataaagcccatataggattatgcagaaactggtgtaaatttgcaggtcatcaatgactcaatgtctcctccctccccacactgtccacctctggaccattttgcactttatattttctganaaaggaggcanaggggaanaangggtcaaaggtgtcagcctggctcctggtgaccanctctgtttagcaagaatntanctggnacantgattga

SEQ ID NO: 27522 - DNA, 480 bp, Homo sapiens
  misc_feature (1)...(480): n = a,t,c or g
ggctgcatattaaataatgaatgggttttaatttgtgatttaaaggaacttaaatagtctagtgaggtaaactaaccacaatacagtggtatgtgtgctttgaggttacagaagagggaacaattgatttttgtgcaggaaagacgaaaaaaggcagtcagggacaggttgactgaggagatatgtgtaaaagagagaaagcggcatggtactggaggcagcaccatgagcagaggccaggcgtggaggggtctgatgtcaatggggaatgattctcagggggtcaggctgcatgggaggagtgctgggaggtgaaggtaaaggtggaagatgagcaggagacagtgaaggaagggtgccctgggcccctgttctttaaaagccccttcacatgtttccatgtgattgccccaacagtgctgtnagaaaaaactncaagtgtccctttttcccttgcatttgccccaatcngtcctctcc

SEQ ID NO: 27523 - DNA, 482 bp, Homo sapiens
  misc_feature (1)...(482): n = a,t,c or g
gggaagaagaagagacagagctgcccactgtgcccccagtgcccacagaacccagtcccatgccagacccttgcagtagtgaactggatgccatgatgctggggccccgtgggaagacctatgctttcaagggggactatgtgtggactgtatcagattcaggaccgggccccttgttccgagtgtctgccctttgggaggggctccccggaaacctggatgctgctgtctactcgcctcgaacacaatggattcacttctttaagggagacaaggtgtggcgctacattaatttcaagatgtctcctggcttccccaagaagctgaatagggtagaacctaacctggatgcagctctctattggcctctcaaccaaaaggtgttcctctttaagggctccgggtactggcagtgggacgagctaacccgaactgacttnagcaactacccaaaccaatcaagggttgnttacggggagtgg

SEQ ID NO: 27524 - DNA, 476 bp, Homo sapiens
  misc_feature (1)...(476): n = a,t,c or g
gggttatatttatatagcattcttttcatgtgaaacagtgtattgacattaaataatttgtaacaactactattatgatgatgtgataaagacagcgatttcanacactaggagaaagaaaacaaaccaaaagtcatacaaacctggaaatttacaatccaanagatgcaaaattgctactatgctgaatgtgaatatttcacattcatttttctctaactgacatgtaatggattaaaactttttgactctatagccatgccaccacattccctttattaagagaaggtaaaacttcaatgttggactggcttaaatancagcctctcncctttacattaaatttttgggtcaaatttatgnatacacagtgtgacatttttcctgcatggangaaaggtttaacaagtgacacgangtcactgcangtnccaaggattaanttngcaagtttactcantcaattttaaccccga

SEQ ID NO: 27525 - DNA, 477 bp, Homo sapiens
  misc_feature (1)...(477): n = a,t,c or g
ggagatctgtctctgccgggatgatgagtggacagttctcccgggactggcagagcaagcctcagactgagggcagccagggaacagcaggtcatactcccatggcagaatgatgctaaggttcccagggtgtcccaaacacccttcccaccccctgccccagtctcatgagagggccatggacgctgacactgtaactatcctctgctantcaggcagatgctantcacagcancatggaatctcagaaacagccctcacagtgggcagtattagtatcccctttccacagaaagagaaatggaagctcagagaggctacggaacttacccgtaatcacaaancaagcacgtgtcccangtctatgttgatctcaaagctttgtactctgactcccacggtgctgtgttaattttcaatttcctgaangggaaaagaaaacatttgntccaaggaaagcctcaangggcaaactca

SEQ ID NO: 27526 - DNA, 483 bp, Homo sapiens
  misc_feature (1)...(483): n = a,t,c or g
gcgcagccacctcgggatactgcacacggagaggagggaaaataagcgaggcaccgccgcaccacgcgggagacctacggagacccacagcgcccgagccctggaagagcactactggatgtcagcggagaaatggctttgagctcagcctggcgctcggttctgcctctgtggctcctctggagcgctgcctgctcccgcgccgcgtccggggacgacaacgcttttccttttgacattgaagggagctcancggttggcaggcaagacccgcctgagacgagcgaaccccgcgtggctctgggacgcctgccgcctgcggccgagaaatgcaatgctggattctttcacaccctgtcgggaaaatgtgtgccctgcgactgtaatggnaattccaacnantgtttggacngntcangatactgtgtnnactgccaacgggacacaacangggacatgttaaaaattgtctggatggttaaa

SEQ ID NO: 27527 - DNA, 485 bp, Homo sapiens
  misc_feature (1)...(485): n = a,t,c or g
gnnnnnnnnnnnnnnnnnnnnnnnnnnnnnnnnnnnnnnnnnnnnnnnnnnnnnnnnnnnnnnnnnnnnnnnnnnnnnnnnnnnnnnnnnnnnnnnnnnnnnnnnnnnnnnnnnnnnnnnnnnnnnnnnnnnnnnagtggagaatttctgttgaatgaaccaaaagcaactgccaacctctccatgcaccatgtgtttcanaggagaaagcacagtgaagaatgcantgtgttctgaggtcctgtcacccctgaggctgtgtgtgtcctttgccaaattaaagagtcttactgaatgcggtgcatccaggagacaggcccaggtttggactggtcctctagcctcagaagcatctttttcncccgactgattccgtgttcangnaatgtctgcctgcctgcctangggatctccanaccttaggcanccantccggctcgcccgcngggaactaacggccatcananttctnacccaattnttgg

SEQ ID NO: 27528 - DNA, 484 bp, Homo sapiens
  misc_feature (1)...(484): n = a,t,c or g
ggcctggaataactgcaagggctctgctgacatcttcctgaggtgccaaggaaatgaggatggaggaaggaatgaatgttctccatgactttgggatccagtcaacacattacctccaggtgaattaccaagactcccaggactggttcatcttggtgtccgtgatcgcagacctcaggaatgccttctacgtcctcttccccatctggttccatcttcaggaagctgtgggcattaaactcctttgggtagctgtgattggagactggctcaacctcgtctttaagtggtaagaaccatatagagaggagatcagcangaaaagangctggcattcgctctcgcaatgtctgtccatcanaagttgctttccccangctattcangaanccacgggctatcatgcntccaaaccctctctctgactttggntcatccacataaagggggaaaaccgaaaaaatcctancanttaattnaaaat

SEQ ID NO: 27529 - DNA, 480 bp, Homo sapiens
  misc_feature (1)...(480): n = a,t,c or g
gactgnaatgatntctacctagtttatcatggtggcaanctcngaanaaagatnacatanaatagattgggagacaaagaagacttcanccttttctgtaatgttcnaacangggtgaatgagcttanatgttatnctgtnnttgntnaaanccantacgaatcacgatnaacatcaagatgantaagacaggaccccngccttcaganaattcagattatgcagggagcaggaangaagagaaatagggggaaagcggcnaancaaaaggcatgtgctanctcctttcaagttgatttcagcangcttcacattttgggggcaggcatgggaacanttctagaagacaaacagggtattctagtgagacaangccaatgccgantgtttaagagatttangttgaaatctgctttgaactcncattccnggngncctccttggnngtctcaccaanggcaanaaggntccaatnctcaa

SEQ ID NO: 27530 - DNA, 498 bp, Homo sapiens
  misc_feature (1)...(498): n = a,t,c or g
gattccaactcacttctttattgtgctaacaagctgtaaagatacatctcagacgcctttgcactgtgaaaacctagacaccttagctttcattttgcctcacaggactgataacagcgagagctgtgtgcatgggaagcatgactcctcatgggttgaagaattgttaatgttacacagagcacggatcacagatgttgagcacatcactggantcagcttctatcaacaaagaaaagagccagtttcagacattttaaagttgaaaacacatttgccaacctttagccaagaagactgatatgttttttatccccaaacaccatgaatctttttgagagaaccttatattttatatagtcctctagctacactattgcattgttcaaaaactgtcgaccaaagttagaacggngccctccgngatgccggcatccaagggaanntggnnaccnagcanannattggaaagtgtnccngttganctgcaanatttaa

SEQ ID NO: 27531 - DNA, 502 bp, Homo sapiens
  misc_feature (1)...(502): n = a,t,c or g
gaacccaacgcggcagggcttccctgctctgtgtgcagtttcgctccaaggaggaggtcanagggtcttgcgttccanagtggggaaaaagaactgggaccgttgaaacggccgtcctggtcccctgcgccctcaagttccgagggagggcccgggtctcagggggctctggagggcagggggtcagttgggaaangcctgttgtcagggggctggtactcatgtaggggagccagactgttgaatgggagtcacccgtggagccaagcaggatgagtgtctgggcttggattgtgaccaactcagcacaagggcctcctaacaaggcagacgttgcctggccgattctcttgttccccactcttttcttttctcccctcccgtttttttcctccttaaaagttgtaatccgaaacaacttttccgtttgtatangtgntttnnaaacgggtttggcggttttaatccccacaattgnaagntttgaccaaaaacggggggg

SEQ ID NO: 27532 - DNA, 494 bp, Homo sapiens
  misc_feature (1)...(494): n = a,t,c or g
gacttcagagagaacaaattcaatgaaatgggcagctgttggaaggcggaggtccattccactgataggtttctaatgataagagttacacatgtagcaaattttgttttgttaatactacattcatattagtcataacacctaggctgttgagctgttccagcttaggcacactatcttctttttcttcagatttacttgctagaagcagatgggaaactgcagctaaatacagctgctagatagagatgtcatagcaatccataaatagttctagtaaatagcaagatgctggtgtagaaagagcgtgacgtgatcgctcacaatggcagtcaagtcagcaaaatactggctgagactcagttgaggagactggcctttgtatgagggcaacttcagctctttgtaccaagtgctcggtgaatantggcaaccaactctctcgcaacactgnttctcaactcctgggacctgaggtcatgcancagacacga

SEQ ID NO: 27533 - DNA, 491 bp, Homo sapiens
  misc_feature (1)...(491): n = a,t,c or g
gtgtgcagtgtnnnnnnnnnnnnnnnnnnnnnnnnnnnnnnnnnnnnnnnnnnnnnnnnnnnnnnnnnnnnnnnnnnnnnnnnnnnnnnnnnnnnnctgnnnnnnnnnnnnnnnnnnnnnnnnnnnnnnnnnnnnnnnnnnnnnnnnnnnnnnnnnnnnnnnnnnnnnnnnnnnnnnnnnnnnnnnnnnnnnnnnnnnnnnnnnnnnnnnnnnnnnnnnnnnnnnnnnnnnnnnaccccatctcttaatacaataatgaaaaagtctgtattctggcccggcgtggtggcnnnnnnnnnnnnnnnnnnnnnnnnnnnnnnnnnccggnggcngngggggggggnggnnaannggaggccatngttttnaacnnagccnggccangtntaaanccnatctctacaaaattntnnanacttggaaggccgggggtnaccnggtatcccnaactttggaggctangncannnggccgggggccggnntnggaac

SEQ ID NO: 27534 - DNA, 495 bp, Homo sapiens
  misc_feature (1)...(495): n = a,t,c or g
ggtagcacagtcacagcttactgcagtctcagctgagttatggattctaaaatatntaagatcttcncagcttanncatcntnnngncaccangcttgggatcttgtacaggtcttatttcagngganctttganagtttcagtcacnanatacnagtactgtctttattttgtaaacaagctttangcctttganaatttaccatgggtggtgctctttcttgttaaaatggaccnctggtttggggaccttcaganccnctgccaactacngtgcttatttctccctgtannatggagtaagacttttttttttannncatcaagttnaantacngncttgtggcaaggcgaatggntcangccnataaccccatnantttangagggcancggaannngggcccttgagncncgnnntgaganncanctgggcaacagggngataccccgatcnnatgaaantcacccngncttcccntgcnngnngggagc

SEQ ID NO: 27535 - DNA, 530 bp, Homo sapiens
  misc_feature (1)...(530): n = a,t,c or g
gggaacacagcgtaagttgaatgtgttaccatgactgtcagcgtacaattttccttttcgcttgttgtgtgtgtcctttaattgtgctgttatccaaggagtacaatctgcctaagtaaaaatccctgaggtccagctttgccagcagagcctctccagcgactgagaatcagctgagtgccccaaattgagaccaccaccagaaacggagctggacgaggcagagtccccgagcactggggacttctccacatgggttatatatggccttaaagggctcagccctgtgacccgtgtcagaacacatcttctcccctttgtactctgatgttgtctacctcaacagaaggtcaccgccacatcatctggggcagtacagcgccgtggctaanagctatggactcttcattccccaactgggttcgagccagcctccataatcagaggctgcaagcttttgggcaaattacttgaccctgcagtcctactgcaatccctgtgcnaaancnaangctcctaacgggggaagg

SEQ ID NO: 27536 - DNA, 530 bp, Homo sapiens
  misc_feature (1)...(530): n = a,t,c or g
ggacccaagagagttttgctgaacaccgaagtgggctggttccgcaacaaatcaaagttgccactctaaattcanaanaggagagcgaccctccaacctacaaggatgccttccctccacttcctgagaaagctgcttgcctggaaagtgcccaggaacccgctggagcctgggggaacaagatccgacccatcaaggcttctgtcatcactcaggtgttccatgtncccctggaggagagaaaatacaaggatatgaaccagtttgganaaggtgaacaagcaaaaatctgccttganatcatgcagagaactggtgctcacttggagctgtctttggccaaagaccaaggcctctccatcatggtgtcaggaaagctggatgctgtcatnaaagctcggaaggacattgttgctaaactgcagactcaggctcaacaactgttgccattcccaaagaacaacatcgccttgttattggcaaaaatgggnaaaaacgcaaaaacttgggccaaaaacgcaacaantcca

SEQ ID NO: 27537 - DNA, 531 bp, Homo sapiens
  misc_feature (1)...(531): n = a,t,c or g
gaaccagtctcttggtagcacatggacttttcgtacgctgaaggggcagtgtttattttgacagatatccacacttaatccaagaatgagtttgccttatctgccttcagggcttcagctagcacattttcttgagatttctttgatatgtttgaagcagcataaggctgagcaggggcaagaaccatggagaatatctactttttaacttgcatatggatgtcaaggatttgttactccctcaggagaacacaagtatctgtttaaatttctatcatgggctgagataattggataaaatgtcatgggccactagttatatttaagttagcaatcacactctgcaacacaccacaaacattggtggtagcgatcgttactaactaaagttggaaanaaaggaggaanaacaggtttcaaagaaaaagttcttcaaaatttgaaggnttctccatgtcaaanctgtaggagcaaaagggaaatgtgggaaaaacagantgcaccggggaattggncggnaaaaaggaaaat

SEQ ID NO: 27538 - DNA, 531 bp, Homo sapiens
  misc_feature (1)...(531): n = a,t,c or g
gcatggtctctccttgaaggtattcnaagtggtcctcctaggctgagccaggttgccaggtgcccagagccaatccgtgtggctcttgacagaactcctgttctctgtgtgaagctccgggcggggaatcccggtctgacccaggcactgatgatcagtgtttcggtgcaccagatcctttgctaagtgccccctctgcttgtcacatttcattgtcgaaagagccctgggtcagtccagtactggccccaaagatgtccccgtcctaagactggatggagcctgtgaatacgttacgttgcgtggctggggaattacgattgcaggtagaattaaagttgccagtcagctgactttggatagganatggcctagattatcgtggtggcccancgtgatctcagggtccttanaggtgaaaaacanaggccggagtgtcaaggtcanantggtgccactnatcaagacttnacanccaatgctggctttaaattgangaaaggctanaacaaagggcncctaaaatttgga

SEQ ID NO: 27539 - DNA, 530 bp, Homo sapiens
  misc_feature (1)...(530): n = a,t,c or g
gggaatccacagccaagcaggcttctttcttcatgggtgaatctgtctcctccagttgtgtttgagtgcctcctaagtgcanagccatgtattggatactgtgtgtggtgttgtgtgtataatggtaagcaccgcagggttggaaagtaattctctgcccttgtggggtctgtacacagagagagggtatctcgttccctcttggaatcactctgatcatctaattaattatatgtcgtcactgatgttcttggttantgtgtgtgtgtgngtgtgtgcgtttgtcctgtttccccctgangactataaatatattatnagttttactctgtttatgttgttcgatgccagtgatctgaatgggcacatggtaagcactcaacgcatgcttgatttgacaagtggtgttttatttanttatctagttatntagntaatttttttgagatggantcctgctcctcgcccaggtggatgcanatggcncatctcagntcantggaaanccacccccgagtcaaccattcccc

SEQ ID NO: 27540 - DNA, 532 bp, Homo sapiens
  misc_feature (1)...(532): n = a,t,c or g
gaactggaagaatcaaccctgnnnnnnnnnnnnnnnnnnnnnnnnnnnnnnnnnnnnnnnnnnnnnnnnnnnnnnnnnnnnnnnnnnnnnnnnnnnnnnnnnnnnnnnnnnnnnnnnnnnnnnnnnnnnnnnnnnnnnnnnnnnnnnnnnnnnnnnnnnnnactacagctgcctcagnnnnnnnnnnnnnnnnnnnnnnnnnnnnnnnnnnnnnnnnnnnnnnnnnnnnnnnnnnnnnnnnnnnnnnnnnnnnnnnnnnnnnnnnnnnnnnnnnnnnnnnnnnnnnnnnnnnnnnnnnnttcaaccctgagctgcctttgnccccagctccacacccactatatcagttgaccagaaggaggggctcanagcanaaaaatattcttggcacttccagtaacaaagcgttatgcagtcagtgctgttcaaggttgaatgggcangggtgtcntcaaccccataaaanaaaaggagccttctatacttgangccanncaanatccttccnanaaaaccctgggaccttggggga

SEQ ID NO: 27541 - DNA, 524 bp, Homo sapiens
  misc_feature (1)...(524): n = a,t,c or g
gctagnnnnnnnnnnnnnnnnnnnnnnnnnnnnnnnnnnnnnnnnnnnnnnnnnnnnnnnnnnnnnnnnnnnnnnnnnnnnnnnnnnnnnnnnnnnnnnnnnnnnnnnnnnnnnnnnnnnnnnnnnnnnnnnnnnnnnnnnnnnnnnnnnnnnnnnnnnnnnnnnnnnnnnnnnnnnnnnnnnnnnnnnnnnnnnnnnnnnnnnnnnnnnnnnnnnnnnnnnnnnnnnnnnnnnnnnnnnnnnnnnnnnnnnnnnnnnnnnnnaagtcttccttttctatgttgtgtgaatattccccactggtttgcataattgagtatgatggaagttaaacagtacaaaattangttacntgaaagaatataagcctttacaaagagaatttganaattnagatattttcaaatcatgtcngatttttcnctcatgaaagantgctttgtgtttaaanggaatcagatttacggnaaccttgagttgcaaaatttagttcaanaattcaattnagggganggnantttaaa

SEQ ID NO: 27542 - DNA, 543 bp, Homo sapiens
  misc_feature (1)...(543): n = a,t,c or g
ggtctgggaaaccccacatctccggggcctggacccaagctgggtggggagagccaggcccacaagtcccgactttgaacggccaaagttcccaaaaatttatcctctaccccaggtcatcaaaacacacggtagtaaactgtaaagcaaacatcaaggaaacctgcaaagtcccgattctccctgcggtgaacagtttggtgcttaacaagaaaatccaactgaaatttctgagtgtttttgtctgcgtgcttgttgggtgacccagccaggcacgtcctcccttggagcctcagcttccttatcataaagcagggaccggctcagtaatctgggaggcttgcaaagacaggagagggtgagacccagaaagactcgctcagggctgccggagctgggcggcttccttccctcctgcaggctcagatctcaccaanccccaattcacanataggaaaactggggtcaaagaggagatgggacagtttgcacaaactaactgatggcaggcaacatgntccanccaacacaaacacccttttt

SEQ ID NO: 27543 - DNA, 545 bp, Homo sapiens
  misc_feature (1)...(545): n = a,t,c or g
ggccccacagtggaccggatttgggaatatcctttgaccagttcggaagccctcggtgttcctatggtctgtttccagagtggccaagttacttaggatatgaaaagctagggccctactactagtgactgcaggtgacagggcgtggcggagctgccacagacacacctagctctgctcactgtgcagtggagatggaaggccagggaggagcaacgtggaacttccatgaggccccgtttgggaaaataaaaggatcctcttcacttctttcttaaacagcaaatccagccaggttcagattacacaaccagtgtctcactcaaaggagcagtggtggctggcgcgctttcgcactgtggcagccacgagagtctgtgcacgtctgtgctggaaagggtatggatgggaatcaagcctatgccagtgctgatgaanctggaggagtctctcctctgctctccactcanatgtgggacatcagtcgccaaaagcaatcagcccaaccactcgcgtgagacctcactgtcatgtgtcatctttaa

SEQ ID NO: 27544 - DNA, 527 bp, Homo sapiens
gggctctgtcagtcagtctgggtcagtataaaatcccacacagacatttatgaaggtttccctctacgtggagctatggtccccagaactctttgtataactaaacgttcactctgcttcacagtgagagcctctgccctagggctgctgcatcctgatcaccccagtcgttttgccgttgtctaggttgtctgtagccctcggcacggctggttacgcagcgatccctgcttgttgggaggtccgcctggggctctggggctccctgccatttgtaggcttcaggcagtaagaaggatgaacctccctcccgtttttcaaccatcttcctgtcattttagaggtaaaactgtggtctttgggtgtgtcattcagtttcggacagctaggaagtgcccttcagtctcctgtcccctctggctggagctgtacccttagcgacccttccagcacagcacaatcttcctcatcttcctcatctcgtctgtgcatcctgcaacctcccctgtttgtgtatacgtgtcatc

SEQ ID NO: 27545 - DNA, 532 bp, Homo sapiens
  misc_feature (1)...(532): n = a,t,c or g
gccggacctcgggggcgatgcggctgctgcccctgctgcggactgtcctctgggccgcgttcctcggctcccctctgcgcgggggctccagcctccgccacgtagtctactggaactccagtaaccccaggttgcttcgaggagacgccgtggtggagctgggcctcaacgattacctagacattgtctgcccccactacgaaggcccagggccccctgagggccccgagacgtttgctttgtacatggtggactggccaggctatgagtcctgccaggcagagggcccccgggcctacaagcgctgggtgtgctccctgccctttggccatgttcaattctcagagaagattcagcgcttcacacccttctccctcggctttgagttcttacctggagagacttactactacatctcggtgcccactccagagagttctggcagtgcttgaggctccangtgtctgtctgctgcaaggagangagagccagatctcccaagatccctggaggangaaggatccctgctgct

SEQ ID NO: 27546 - DNA, 541 bp, Homo sapiens
  misc_feature (1)...(541): n = a,t,c or g
gctgaggataaactttaacaagaaacgcccccagaagaagaggaaaaagtctatctacccaaagacgcatccgtggatgttcacagcagaactgaccacaacagccacaaactagcagcatcctgagtgtccttccgtagaccgaaggaccaacacgcacgggacgcgacccagccatggaaaggagccaggctcagacccaggcctcagcacaggtgcaccgtgaggatgtcccacccagtgagagacgccagacacgaaaggacacacaannnnnnnnnnnnnnnnnnnnnnnnnnnnnnnnnnnnnnnnnnnnnnnnnnnnnnnnnnnnnnnnnnnnnnnnnnnnnnnnnnnnnnnnnnnnnnnnnnnnnnnnnnnnnnnnnnnnnnnnnnnnnnnnnnnnnnnnnnnnnnnnnnnnnnnnnnnnnnnnnnnnnnnnnnnnnnnnnnnnnnnnnnnnnnnnnnnnnnnnnnnnnnnnnnnnnnnnnnnnnnnnnnnnnnnnnnnnngtctctactaaaatncaannnaaaaaaaaaaa

SEQ ID NO: 27547 - DNA, 543 bp, Homo sapiens
  misc_feature (1)...(543): n = a,t,c or g
gcgtgatgcaccagctctgctcccaggcggagttcgccatgttcagcgggacccacgtggagcgggactttgtggaggcgccgtcgcagatgctggagaactgggtgtgggagcaggagccgctgctgcggatgtcgcggcactaccgcacaggcagcgccgtgccccgggagctcctggagaagctcattgagtcccggcaggccaacacaggcctcttcaacctgcgccagatcgtcctcgccaaggtggaccaggccctgcacacgcagacggacgcagaccccgccgaggagtatgcgcggctctgccaggagatcctcggggtcccggccacgccaggaaccaacatgcctgcaaccttcggccatctggcaggtggctacgacgcccagtactacgggtacctgtggagcgaggtgtattccatggacatgttccacacgcgcttcaancangagggtgtcctgaacagcaaggttgnatggttacagaagctgatcctgagacccggcggttccgangatgcagcgcatgtgaggg

SEQ ID NO: 27548 - DNA, 538 bp, Homo sapiens
  misc_feature (1)...(538): n = a,t,c or g
gcctgtgggacttgaggactcgggatcttcaggacgcctggagaagggtggtttcctgccaccctgctggccaaggaggctcctggggtggggatcaccagggggattttgacacagccttcggctgccccccactaagctaattccacacccctgtacccccccagggggccctctgcctcatggcaaaggcttgccccaaatctcaacttctcagacgttccatacccccacatgccaatttcagcacccaactgagatccgaggagctcctgggaagccctgggtgcaggacactggtcgagagccaaaggtccctccccagacatctggacactgggcatagatttctcaagaaggaagactcccctgcctccccagggcctctgctctcctgggagacaaagcaataataaaaggaagtgtttgtaatcccaacactttgggaagccgangtgggcggtcacnagtcaggagatgngacatctggtaacacggtgaaacccttatctatgcgcctgtatccaactaccaagag

SEQ ID NO: 27549 - DNA, 530 bp, Homo sapiens
  misc_feature (1)...(530): n = a,t,c or g
gagagaagggacatttctagatttacctttttaaaaagttactctggctgcaggttagaggataatgataaaaagctagttatcatgcctgaggagggttgaggcttagtaaactgggtgtcttctgctctgcatatccttagaaatacaaatttactctctgtctataaaagacaaggggcaaataacatttctgctttgattgcatcatcaggtctaactggttacatctctagggaatttgctggccattttagaagaaaaggccttccttcatcagaaatgtggtnnnnnnnnnnnnnnnnnnnnnnnnnnnnnnnnnnnnnnnnnnnnnnnnnnnnnnnnnnnnnnnnnnnnnnnnnnnnnnnnnnnnnnnnnnnnnnnnnnnnnnnnnnnnnnnnnnnnnnnnnnnnnnnnnnnnnnnnnnnnnnnnnnnnnnnnnnnnnnnnnnnnnnnnnnnnnnnnnnnnnnnnnnnnnnnnnnnnnnnnnngacccgggangcggatgttgtggtgagcaantcatccat

SEQ ID NO: 27550 - DNA, 525 bp, Homo sapiens
  misc_feature (1)...(525): n = a,t,c or g
gagttgtcataattattacannnnnnnnnnnnnnnnnnnnnnnnnnnnnnnnnnnnnnnnnnnnnnnnnnnnnnnnnnnnnnnnnnnnnnnnnnnnnnnnnnnnnnnnnnnnnnnnnnnnnnnnnnnnnnnnnnnnnnnnnnnnnnnnnnnnnnnnnnnnnnnnnnnnnnnnnnnnnnnnnnnnnnnnnnnnnnnnnnnnnnnnnnnnnnnnnnnnnnnnnnnnnnnnnnnnnnnnnnnnnnnnnnnnnnnnnnnnnnnnnnnnnnnnnnnnnnnnnnnnnnnnnnnnnnnnnnnnnnnnnnnnnnnnnnnnntattactatttttttaaagacaganacncttgttgcccatgttgcattgcaatggtgcaatcataccttgctgcagccttgaagccctgggctcaagcgatccttcnanctcggnttttcaagtaactggaaataagggacacgctacangcccagctaatttttaaaanttcttgtanangcaaggtcttgcaaantngcacaggctggtc

SEQ ID NO: 27551 - DNA, 525 bp, Homo sapiens
  misc_feature (1)...(525): n = a,t,c or g
gggaaaaagagagagagagaganagagacaagggctggggccagcctgcctgaattctaacactcatgagctgtattcccatantagagtttttcaactctctgaacctcagcttccttatctgtaaggaaggataataataactccttctcgatcacactgtgaagatagcatgtgatcgtgcacggcaggaagcatttgattcagaccttgacatactgtgattattacttgtggttactgttgtcataacctantgaggggatgggacagagcctatggttatcccacattgatacatgattaagactctgaagttcaaaggttagttgatattcgaagtcacacattatcactgagatggttctaataacccatggcctggctctctgcagggggccagctccctcaaggggtccctgccaacttctanaggtctcccatgggtttctgagcatttgcagcaactctccctcatagcacgnanagcggnaggactganctgctgtaaanttangnggtttg

SEQ ID NO: 27552 - DNA, 542 bp, Homo sapiens
  misc_feature (1)...(542): n = a,t,c or g
nnnnnnnnnnnnnnnnnnnnnnnnnnnnnnnnnnnnnnnnnnnnnnnnnngtgagggaacagcctctctaccaacttttctcctcaggctcaagggtgggtgggacagtgcccctanagagagcaggggctgcaagctganagtgtcnacgtgaagaccatggtctcccantcactgtttggtgccggtgtggtggtctcagttcagccaggtctgggctctcttcccatgaccaggaanaataagacatacagacaccagagagtgagtaaagcanagtaggatttattaancaaaaggaaacctctcagcantaagaggggacatgaaancgggttgccagaagtggggctgagttctgggtcttttatgtggcaagaataaggaagtcttctgtgggttctgcccaaatgggaggggtcaatttctcccctaanggtgttngtctnatcatgcctggggttnaacacagtgactccatcctgggtaatacctatgagtgccaaaggaaaaccacgggggttggaacggtnaanctaaaa

SEQ ID NO: 27553 - DNA, 482 bp, Homo sapiens
  misc_feature (1)...(482): n = a,t,c or g
ggttaacttgaagaaaccgatttttaaagttggtgcatctagaaagctttgaatgcagaagcaaacaagcttgatttttctagcatcctcttaatgtgcagcaaaagcaggcgacaaaatctcctggctttacagacaaaaatatttcagcaaacgttgggcatcatggtttttgaaggctttagttctgctttctgcctctcctccacagccccaacctcccacccctgatacatgagccagtgattattcttgttcagggagaagatcatttagatttgttttgctttccttagaatggagggcaacattccacagctgccctggctgtgatnagtgtccttgcaggggccggagtangagcactggggtgggggcggaattggggttactcgatgtaagggatccttgatgtgtgttgagatccagtgcaattgtgattctgggggatcccaacttggttccaagaaatttgtgtgatg

SEQ ID NO: 27554 - DNA, 534 bp, Homo sapiens
  misc_feature (1)...(534): n = a,t,c or g
gatacatacctggccctcaggatantgggtctcctaaaggaatggaagagcagtttattgccttggagtgtctacaatctagttggtaggacaggcagatctttgtgtaggagacctgggggtagtcagtgaggaagaccaactccatgtggaagagatgcctggccaatcaaagctgggttgcagtgtttcagggaattggctgagaatgacttcctgaggaagcttcttgggcaggtgacgaccaggatgctcctgcatgtttggggcttgagtctgccatttgttccggtcacatctccaagactctgatgttgtggaagtgactcttctgtaggtgagcaagaacatatgaaggctcaaattcctaggcttatctgtcagcaaacctttattggattactccagtgagttgggaanaaatcaaagccagtcctggattcttccttcantctctgtgtgggttcctgggatagtgtgtgtgtgtgggttcncttctantgtgtccaagcctanaatggacaaatggtgatc

SEQ ID NO: 27555 - DNA, 517 bp, Homo sapiens
  misc_feature (1)...(517): n = a,t,c or g
nnnnnnnnnnnnnnnnnnnnnnnnnnnnnnnnnnnnnnnnnnnnnnnnnnnnnnnnnnnnnnnnnnnnnnnnnnnnnnnnnnnnnnnnnnnnnnnnnnnnnnnnnnnnnnnnnnnnnnnnnnnnnnnnnnnnnnnnnnnnnnnnnnnnnnnnnnnnnnnnnnnnnnnnnnnnnnnnnnnnnnnnnnnnnnnnnnnnnnnnnnnnnnnnnnnnnnnnnnnnnnnnnnnnnnnnnnnnnnnnnnnnnnnnnnncggtnnnnnnnnnnnnnnnnnnnnnnnnnnnnnnnnnnnnnnnnnnnnnnnnnnnnnnnnnnnnnnnnnnnnnnnnnnnnnnnnnnnnnnnnnnnnnnnnnnnnnnnnnnnnnnnnnnnnnnnnnnnnnnnnnnnnnnnnnnnnnnnnnnnnnnnnnnnnnnnnnnnnnnnnnnnnnnnnnnnnnnngatcctgtntgnanntcggnacaagtcccgggtgggaagtggtaattgnccnggtggnaaattanttacggggnaggtt

SEQ ID NO: 27556 - DNA, 533 bp, Homo sapiens
  misc_feature (1)...(533): n = a,t,c or g
gctcattgaagatatatatgagaacagctctctgtacttctaagaggtttcataatcatattaacttttatgttctgaaataagaacttctaagtacttttatgttttgaattaagaacttccagacttcttgtcttcacagtaatgccaagtttttctggaccttctttgcactattattttgaccagcaaatcctaccatagacaaaattctgctcattcctcatgtgaaatactgagttccaagtgagtaggatcagaatgacagaggtcttcagccacagttttcatggtgctgcantgcgtgtggtggtttgtattgggtccgattggttttaatcaatctgtgtaatatttggcattgcaccccagtctcctagcacttgagcccttggaccgtgtttctctctggaggaactgtctccactctcttgatgatgtggggctaaaattganacgtctttcctccttctctgggtcccaaagtaanaactcgtcatctccttcccaagngcagtantggttaaccacga

SEQ ID NO: 27557 - DNA, 528 bp, Homo sapiens
  misc_feature (1)...(528): n = a,t,c or g
gcnnnnnnnnnnnnnnnnnnnnnnnnnnnnnnnnnnnnnnnnnnnnnnnnnnnnnnnnncagttgcaccactacattcagccngtgcgacagagngagaccccatctctgaaaaaaataataacaataataaaaaatannnnnnnnnnnnnnnnnnnnnnnnnnnnnnnnnnnnnnnnnnnnnnnnnnnnnnnnnnnnnnnnnnnnnnnnnnnnnnnnnnnnnnnnnnnnnnnnnnnnnnnnnnnnnnnnnnnnnnnnnnnnnnnnnnnnnnnnnnnnnnnnnnnnnnnnnnnnnnnnnnnnnnnnnnnnnnnnnnnnnnnnnnnnnnnnnnnnnnnnnnnnnnnnnnnnnnnnnnnnnnnnnnnnnnnnnnnnnnnnnnnnnnnnnnnnnnnnnnnnnnnnnnnnnnnnnnnnnnnnnnnnnnnnnnnnnnnnnntacattaaagganaaananaanaangntctttatttaannggccgcaagctntccctttacnggngggtnaattttccttgaaaggncctcc

SEQ ID NO: 27558 - DNA, 515 bp, Homo sapiens
  misc_feature (1)...(515): n = a,t,c or g
gatcaggccagcatggacgctggcaaagcggggcagaccctgaagactcactgctcagcccaggtgagagccttctgagctgtgcctggggctggggggacagggccctggaaccccagcagccggcgggtctgggagctgctgtccttgagttggttgggccctgggaagctgggttctggcagcctggtccctgaatgggtccagcctgtacagctggggtcccaggtgggggtgggacaggagccatgagatctgagtcccaagaatgggggctgggctgggtttcggctcagtagctccccactccccaaagcgcccanatgtctgcaggtggctgagccccttcatcctctcctgctgcgtgtacttctgcctctggattcccgaggaccaactgtcctggttcgctgccctggtcaagtgcctgcccgtcctctgcctggctgggttcctgtgggtcatgtncccaaaccgggggtacancangtcctcaaggaacccttgttnctcgg

SEQ ID NO: 27559 - DNA, 514 bp, Homo sapiens
  misc_feature (1)...(514): n = a,t,c or g
gaggactctgagctccgactgaggtgctctgtccccaccatcaggctctaacatctgtctcaggaatggcttggactagaacgagctctcaaatgagagggtgggaaggagagctgcctagtagctaantccccacctccttgcccctccgtgcatgcattaatttgttcagcaaacatttattgaacctccagggtaccagaatggtgctcgatactagggatacagagttcaataagacagggtcttgatgtcttatgggagaaaccagcgtgtaaatcaattagaattcagtgggggcagaagtgttctcgggtgtctggaaaaccccgggaggggcaaagaagccagcctgggatgcagcaggaagcacccactggcttgggaggtcaacgaatttggngagacaagtaggtgaagaaatangggaaagtcagcctcagcttantcacaaagcctgaaacagcatgactcaagtgtttctgaatggnaaaagaaattgcaacnanaggga

SEQ ID NO: 27560 - DNA, 349 bp, Homo sapiens
  misc_feature (1)...(349): n = a,t,c or g
ggaaataccaanaggtaggtgctgttcttgtttannnnnnnnnnnnnnnnnnnnnnnnnnnnnnnnnnnnnnnnnnnnnnnnnnnnnnnnnnnnnnnnnnnnnnnnnnnnnnnnnnnnnnnnnnnnnnnnnnnnnnnnnnnnnnnnnnnnnnnnnnnnnnnnnnnnnnnnnnnnnnnnnnttnngccncaatacngggaaannnnnnnnnnnnnnnnnnnnnnnnnnnnnnnnnnnnnnnnnnnnnnnnnnnnnnnnnnnnnnnnnnnnangtgacccgccngnnttggccncanaaattgcagggattaanggcgtganccanngtgcccggcctttttttttttttt

SEQ ID NO: 27561 - DNA, 503 bp, Homo sapiens
  misc_feature (1)...(503): n = a,t,c or g
gaactggaggaatgaggcacatgttctaaatggtataaatgacagaggaggacaaaaagagaaacagaaatttaactctgaaaaatcagagattgacaatgaattattccagttttacaaagaaattgaagagcttgaaaaggaaaaagatggttttgagaacagttgtaaagaatctgaaccttctcaggaacaatttgttccattttatgagggtcataataatggtctcttaaaacctgatgaagaaaagaaagatcttagtaataaagctatgccatcacattgtgattatcagcagaacttggggaatgagccagacaaatatccctgtaatggacaagtaatacctacattttgtgacacttcatttacttctttcaggcctgaatggcagtcagtatatccttttatagtgccctaaggtccccctcttcccagtttggacnatcattaaacattcaaagattcagtggggcacaaatccancatcaaanatttcc

SEQ ID NO: 27562 - DNA, 507 bp, Homo sapiens
  misc_feature (1)...(507): n = a,t,c or g
gcacgcccagggagaaagccatgtgaagatgaaagtagtgatgcttttgcaagccaagaacaccaaagattgcctgtgaaccactggaagctaggagnnnnnnnnnnnnnnnnnnnnnnnnnnnnnnnnnnnnnnnnnnnnnnnnnnnnnnnnnnnnnnnnnnnnnnnnnnnnnnnnnnnnnnnnnnnnnnnnnnnnnnnnnnnnnnnnnnnnnnnnnnnnnnnnnnnnnnnnnnnatgccagtcctaggatacccagtatgtggtactttgtacgccagtcctaggatactaatacacacatcaatgaactttttgtggtctgtacatttgtgaagaatgagagtgacaaagtcatcctagtattattatgaaaatagttttgacctcacagacctccagaaccaccctgcattgagacaacgtggggtgtggttgatttttttgacaaacacatctgaaattgtaggtggngcaaaaataaatgcgggttttgaattngancttt

SEQ ID NO: 27563 - DNA, 504 bp, Homo sapiens
  misc_feature (1)...(504): n = a,t,c or g
ggggaggggctgctcggcctgctccttgggtaggagaggaggagggagctgcctccctggctgaggggtctgggatttattcaggaggcctgtcactccccagcctcttctgggacttgaaaaactggagcctgttcttggcaagaagattctaatgcccaggtcggagtcggggccctggccaagggctcttgtgtgggatgggggtggggcangggggaccaaaggatcctccagaagggttggccccaagatgggggtgggctggaggtagctganacctgctctgacttatcctcctgagaccaacacctgcccttcccagagccagcctggagcagaggcctgtgatgctcctaagtgcanaggtggctctggccagagtcattcactgggctctgctgctgggtcaaaagganctctctggctgccttgccacccatggtganactcanggctcacaagtntgtcaancctttngggaaaaactnacaaccngaaaaa

SEQ ID NO: 27564 - DNA, 509 bp, Homo sapiens
  misc_feature (1)...(509): n = a,t,c or g
gatttgaacggtgctcaacattgtatttaggaagcagcatagttgaagatgatgggattttcataatgcttcttataatgacccctcacttagtatgtgccttgccctggggctcagtgagagggttgtgtttccacaaacatgcttcttcgtggtcttttccattatggtaagccatagaggctttcccgggctcagtgtgccaacttctgactgcaaatgatctcattttctaaaatctttctcccattctcctttaagaaaaaatcttagttattaaaaatctgcctcacaaacttagaaatgcttcagagtaagtatctgagaagcaagcccaccccacatccaccatatatcatcgtttctgttaagggccatcccatttcttcagacaaattctatcttcttcctcccatcccacttacttttgactttgaaggngggttanctcaactcaaatttccttccagataagaaccacatttcagcaanaatattggggngggggg

SEQ ID NO: 27565 - DNA, 506 bp, Homo sapiens
  misc_feature (1)...(506): n = a,t,c or g
ggaattacaggtcagagctgtgtcatcaaatgccaaggaaggagaggagctcaagtatgagacagttgaagaaactgagaaatagaggacttaggagaaaatgtacacaaactttatgtaaagtcatatacatacatatgtaaggaaacagtgtaaagatgaaagatccagattgttgtggctttcttgatcaccattgtatatcttcactgtcaagtgcatagatgtttaataaatatttttaaattaataaatgaaacttgttaaannnnnnnnnnnnnnnnnnnnnnnnnnnnnnnnnnnnnnnnnnnnnnnnnnnnnnnnnnnnnnnnnnnnnnnnnnnnnnnnnnnnnnnnnnnnnnnnnnnnnnnnnnnnnnnnnnnnnnnnnnnnnnnnnnnnnnnnnnnnnnnnnnnnnnnnnnnnnnnnnnnnnnnnnnnnnnnnnnnnnnnnnnnnnnnnnnnncaccacgttgaccaagncggtctcaaaccccgaccccagggg

SEQ ID NO: 27566 - DNA, 328 bp, Homo sapiens
  misc_feature (1)...(328): n = a,t,c or g
gggactacaggacaatgtctatatacacaaagccataagtctgtgttccttgggcttctgctaccaaagttcagccaggtgacgtgtcaggattaggtacctgcagtttgccctgtatttgtgtttgcagttcctactccttggtatctgtagcttgcctaacttggtgtgggggcctggccatgttgcggctgagtgagtcttaatancctgatagaatgtgggggtaacagctgtagtcctttaccaagcttcaggattggtctttggaacctctctatgccagaaaaaaagaattaagttatttctttccctttttttttttttt

SEQ ID NO: 27567 - DNA, 503 bp, Homo sapiens
  misc_feature (1)...(503): n = a,t,c or g
gcaccatctgcccatacgtggggagacaatacttaaatgggatgaaataattgaaggaaacattccgagaagtaatggaatgggagacccacagaggaagggctcccttgtatgggctggccctcttagaaacagcatatctagaccacgtggcgattcaggagttaatcccatgagtgatgtggggatggagggactgacttttccagcaagattaaaacacaaagacagcctgatatagtcagatggcagaaataattccacgtttccactganagatgccgcaggagggggcaccaagttcttgttctgaaagacccgggatggggtgggatgtagggcatgcctgccanatggttcatagttgccatccactgggagcaggaggctgcaggctgcanaccagccctgcaccngtgacgggggaagcctgtgtgtctccttcacactgancgagaaaactgggcatttcggccaagcgcggtggtcatgtctgtaatccc

SEQ ID NO: 27568 - DNA, 501 bp, Homo sapiens
  misc_feature (1)...(501): n = a,t,c or g
gcagactcttgttattaatagctttagaaacgaaaatctaacttctgataaattatttcagaggagtggttcaaacgtgtagtanatagctctgcctggtcatcaattatagtgacgtccttgcatcagctccagaaactcagaatattcatgagctttccagtctgactcagaccttcaggagccatgaaattttcctgttgggatgagaggaagcgctggcggtcgtttcggcagcttaatgaaaccagaaatagataagcacgagtgaggggtgatgtccgcttgtttgctcccatcatgttgtttttaatgtgtgaaagtgaaagttttaaaagtcatactaaatgtgtgatcctttttagaattcactgggtacgggtacgtggaggaagtgtttttgtttttgtgaatttgtttaaacaaatgactgaggctttgttttccactccgtctgggcaagcaccaatgctacactttttaaattcatgacatcctgag

SEQ ID NO: 27569 - DNA, 501 bp, Homo sapiens
  misc_feature (1)...(501): n = a,t,c or g
gagaaataccgtgacctggatgaagatgaaatccttggagccctaacagaggaagagctgaggaccctggaaaatgagctggatgagctggaccctgataatgcactgctgcctgcaggcctgaggcagaaggatcagaccaccaaggcgcccacgggcccctttaaaagagaggagctcttggatcacttggaaaagcaagcaaaggnntttaagggccnaaaaaanncgggcccccnaaanngggnaaaancaaggaaaggtctgggttccnaagcagaanccactggatcctgtgctggaaagtgtgacgctggaaccggagctggaggaagccttggcaaatgcttcagatgcagaactctgtgacattgcagcgatcctgggcatgcacacgctcatgagtaaccagcagtactaccaagccctgagcacanctccatcatgaacaaggaggggctcaacancngattaaaccacacaatacaagcctgtgccgac

SEQ ID NO: 27570 - DNA, 477 bp, Homo sapiens
  misc_feature (1)...(477): n = a,t,c or g
ggagctacatgagcaactcctggcgcgcacctctcgtgtggaagatttagaacagctgaagcancgagaaaaaacccagcatgagtccgaactggagcaactgaggatttattttgaaaagaagttaagggatgctgagaaaacttaccagcaagacctaaccctgttacagcagaggctgcanggggcgagggaagatgctcttctggactctgtggaaattgggttgtcctgtgtgggtttagaagataaacctgagaaaggaacaaaagatcacgttgatgaactcgagcctgancgacataaggagancctgccacgcttccaggcggngttagaanaaagcacaggcaccagctggaagcgctggagtctccctctgcatccaacacgaggggcatgtctcagacagatgctgcgtagagacttcancantgggacacnaatggcgtctggaaacctctaagggcacagcaa

SEQ ID NO: 27571 - DNA, 484 bp, Homo sapiens
  misc_feature (1)...(484): n = a,t,c or g
gtcaacccacaacaaaagctaaagaagaaaaatcacatgattgtatcaatcaatatagaaaatttgacaaaattaaacaccttttcatgataaacagtgttcaaaaacagaaaaagaagggttcttccttgatttgataaagttgttctgcccttggaaaggctcccccagctgtcttatgctttgttctttccttcaaaccagcctgcacatagtctaggctatatcttcantanttcanaaatctccaccaattccctttgccacagcctccactgttatggggagcacctttaggtttgaacttcttcacactcttgcaaatggacncanttccttcaggaanaaattanaaggtatctgttttacagcccacttcttccggcaaaatgtttgaaccanggccttananatgggggaagccctggcttgacactggcaagcttccctctgaatgacanccctgctttaggaggtgtacact

SEQ ID NO: 27572 - DNA, 475 bp, Homo sapiens
  misc_feature (1)...(475): n = a,t,c or g
tactgcaagaaggagcgtcgcttcacctcgggacaatgtcaggtgcgggtgctgcccccacatgcccacggaagggctgacaccagatgacgtcccanctctggctganagagtccggcactccatgctcactgttttccgggaaatctccactgatggccggggtggtggtgactatctgaagaagcctgggggcggtgggtgaaccctggctctgagctctcctcccatctgtccccatcttcctcnccananctacccacccantgggccctgaagcagggccaaaccctcttccttgtctcccctctccccacttattctcctctttggaatcttcaacttctgaagtgaatgtggatacancgccactcctgccccctcttggccccatccatggactcttgcctcnntgnagtctccactcntgnaccccacctccnaaatgtcttgtctgtgggacagttgctcccct

SEQ ID NO: 27573 - DNA, 529 bp, Homo sapiens
  misc_feature (1)...(529): n = a,t,c or g
gnnnnnnnnnnnnnnnnnnnnnnnnnnnnnnnnnnnnnnnnnnnnnnnnnnnnnnnnnnnnnnnnnnnnnnnnnnnnnnnnnnnnnnnnnnnnnnnnnnnnnnnnnnnnnnnnnnnnnnnnnnnnnnnnnnnnnnnnnnnnnnnnnnnnnnnnnnnnnnnnnnnnnnnnnnnnnnnnnnnnnnnnnnnnnnnnnnnnnnnnnnnnnnnnnnnnnnnnnnnnnnnnnnnnnnnnnnnnnnnnnnnnnnnnnnnnnnnnnnnnnnnnnnnnnnnnnnnnnnnnnnnnnnnnnnnnnnnnnnnnnnnnnnnnnnnnnnnnnnnnnnnnnnnnnnnnnnnnnnnnnnnnnnnnnnnnnnnnnnnnnnnnnnnnnnnnnnnnnnnnnnnnnnnnacntgcctgtggtccagctattcangaggctgaagcaagagaataatgtgacctgggaagcggangttcaattagccaanatgccccactgnantccancctgggcaatgaattanannctgtcccaaaaaaaaaaaaaa

SEQ ID NO: 27574 - DNA, 525 bp, Homo sapiens
  misc_feature (1)...(525): n = a,t,c or g
gcctgctctaaaacctacctacaagtgataaccattaaaaactaaaaaaaaagcacaacacannnnnnnnnnnnnnnnnnnnnnnnnnnnnnnnnnnnnnnnnnnnnnnnnnnnnnnnnnnnnnnnnnnnnnnnnnnnnnnnnnnnnnnnnnnnnnnnnnnnnnnnnnnnnnnnnnnnnnnnnnnnnnnnnnnnnnnnnnnnnnnnnnnnnnnnnnnnnnnnnnnnnnnnnnnnnnnnnnnnnnnnnnnnnnnnnnnnnnnnnnnnnnnnnnnnnnnnnnnnnnnnnnnnnnnnnnnnnnnnnnnnnnnnnnnnnnnnnnnnnnnnnnnnnnnnnnnatcctgggaaaaaaanaaancaanacatgngcacaacacatagggaataaattangtcctaaactgaaagactcnccaatcctagcttaattttcctcaaagtattatccccnactgggggtttaatacacntttgttgctattgggcactaaactgngaccttatgggtaaacctccncaaccaaaa

SEQ ID NO: 27575 - DNA, 522 bp, Homo sapiens
  misc_feature (1)...(522): n = a,t,c or g
gctggcaagggataaacatggacagtttgtaaacttctagaaagaagtactatatttctgcgggtaacttacactgtattctctgagctgtttattctgtacttttcacagaagtgttttgggcagggaatgtcatcttagggaagacacgggctgctgctacctgccaactcatgaggctgtacctaactggcctggtctgttttgcgaagttgttccaacactggttcaataaacccacagtagaattcaaataggtctgtatagggtatgtcttgtaaaattctgagcaaatcactgcctgaacaagatgaatctcccttcctttccccaaccatctttggtaaagacaccaagcctggatgaaattaagctgtgataacccagtgtttccagttatttcactctccatcctctcaaaggtatnnatnaanactcccattcgtttgtgaactggcctgataaatcaaanggtaatccctnatcaaggacggnacctggcttgagtcaanaatggcttat

SEQ ID NO: 27576 - DNA, 522 bp, Homo sapiens
  misc_feature (1)...(522): n = a,t,c or g
ggtctgatacagagcacgtactcactaaatgttaaagcagtaatgacaatgaatgtggctaccctcaccatccagtttcctcantatgtttcccatacgtgccatgtccactgctgctctcaaacaatagccaatactgttgccattgcctattgtatacctgtcaactcctttatctacataaagttgaactttgttttttcttttttgaggtggagtcnccgttgtctgnnnnnnnnnnnnnnnnnnnnnnnnnnnnnnnnnnnnnnnnnnnnnnnnnnnnnnnnnnnnnnnnnnnnnnnnnnnnnnnnnnnnnnnnnnnnnnnnnnnnnnnnnnnnnnnnnnnnnnnnnnnnnnnnnnnnnnnnnnnnnnnnnnnnnnnnnnnnnnnnnnnnnnnnnnnnnnnnnnnnnnctgactcgngaatcacctcctcancntcccgagttggnggaataaaggngntnnccacaaanccnggcnagntngaccttnnttnaangccggttcnaccccncaaggg

SEQ ID NO: 27577 - DNA, 535 bp, Homo sapiens
  misc_feature (1)...(535): n = a,t,c or g
gggtgacatttgaaatttatgacccaaacctggcatttctgcgctttgtggtttatgaagaagatatgttcagcgatcccaactttcttgntcatgccacttaccccattaaagcagtcaaatcaggattcaggtccgttcctctgaagaatgggtacagcgaggacatagagctggcttccctcctggttttctgtganatgcggccagtcctggagagcgaagaggaactttactcctcctgtcgccagctgaggaggcggcaagaagaactgaacaaccagctctttctgtatgacacacaccagaacttgcgcaatgccaaccgggatgccctggttaaagagttcagtgttaatgagaaccagctccaactgtaccaggagaaatgcaacaagaggttaagagagaagagatcagcaacagcaagtttactcanaaaaactggggaagtnttaanggaatgttttttcccaagttgttttcnantntgggaaaggnccaattcaaacccnggaaaacncaancgngaaac

SEQ ID NO: 27578 - DNA, 520 bp, Homo sapiens
  misc_feature (1)...(520): n = a,t,c or g
gccatgatatgttaacttgtctttctcttatctaagtccttttctgcccacagcttctctgtacatcaaaatagngcctaccanaggccccattcaacctttagatttagttataatttttcccatggacagaggataagatgtagagaagcatccctctggggcctgaaaattgtcagtcaagagaggatgcatggggttaggtggtgctgcaccaacgccaggcaccagatccagactagcagaggcatcctgtgggccttaatgnnnnnnnnnnnnnnnnnnnnnnnnnnnnnnnnnnnnnnnnnnnnnnnnnnnnnnnnnnnnnnnnnnnnnnnnnnnnnnnnnnnnnnnnnnnnnnnnnnnnnnnnnnnnnnnnnnnnnnnnnnnnnnnnnnnnnnnnnnnnnnnnnnnnnnnnnnnnnnnnnnntttcaacgcgcccngntaantttcgaattttacaaaaaacggggtttgcaagtttccaaggatggcnccaaanccggggccaagggaaag

SEQ ID NO: 27579 - DNA, 518 bp, Homo sapiens
  misc_feature (1)...(518): n = a,t,c or g
ggtgtttaaaaatgcacatctagaaatgttcgtgtcgaataacacgattattgtccgtttgaaaatcacctattggtatcactttctaaacggtgtgcagcgggttatgaataacgttgagatttgagtatccaccaccattcacttgaaaagacacgtgagccatcttctcctaaagtgatgcatttttattcttcgnnnnnnnnnnnnnnnnnnnnnnnnnnnnnnnnnnnnnnnnnnnnnnnnnnnnnnnnnnnnnnnnnnnnnnnnnnnnnnnnnnnnnnnnnnnnnnnnnnnnnnnnnnnnnnnnnnnnnnnnnnnnnnnnnnnnnnnnnnnnnnnnnnnnnnnnnnnnnnnnnnnnnnnnnnnnnnnnnnnnnnnnnnnnnnnnnnnnnnnnnnnnnnnnnnnnnnnnnnnnnnnnnnnnnnantgagacaggaggtcgctgnaccaagnggnggnggttcattanccnaattggcccattnccncagnangggggaannntggnnnccccc

SEQ ID NO: 27580 - DNA, 534 bp, Homo sapiens
  misc_feature (1)...(534): n = a,t,c or g
gcttgtacaacaagctgccccggcgccgggcanacctgtttggggaggagctagagcggcttttgaaaaagaaatatgaaggccactggtaccctgagaagccactgaaaggctctggcttccgctgtgttcacattgggganatggtggaccccgtggtggagctggccgccaagcggagtggcctggcagtggaagatgtgcgggccaatgtgcctgaggagctgagtgtctggattgatccctttgaggtgtcctaccagattggtgagaagggagctgtgaaagtgctgtacctggatgacagtgagggttgcggtgccccagagctggacaaggagatcaagagcagcttcaaccctgacgcccaagtgttcgtgcccattggnancangacactccctgtccaantcccatcgccatcctttggcnatcaccaanccctaacttaattccccgttcggtaaaccanaantttaaaaaaggnccctttcggggcaaaaatttggcccacaaaantnaaaaggggggggg

SEQ ID NO: 27581 - DNA, 529 bp, Homo sapiens
  misc_feature (1)...(529): n = a,t,c or g
ggacggatatggagctggaggttctgcgctataccaataaaatctccagcgaggcccaccgtgaggtaatgaaggctgtaaaagtgggaatgaaagaatatgagttggaaagcctcttcgagcactactgctactcccggggcggcatgcgccacagctcctacacctgcatctgcggcagtggtgagaactcagccgtgctacactacggacacgccggagctcccaacgaccgaacgatccagaatggggatatgtgcctgttcgacatgggcggtgagtattactgcttcgcttccgacatcacctgctcctttcccgccaacggnaagttcactgcagaccacaaggccgtctatgangcagtgctgcggagctcccgtgccgtcatgggtgcatgaagcaagttctggtggctgaatgcaccgnctggtngacccatccactggagggatggccanatgggatcttnagcnggaaacnngnccactgggcaangcccactnggggcntnttaacncccnngggg

SEQ ID NO: 27582 - DNA, 512 bp, Homo sapiens
  misc_feature (1)...(512): n = a,t,c or g
ggttaatctatattggggaagtgaagagacacatgagcatttctcatctttagtatagttactaatactaagggccttacatatttacngngttatctcattatcctctaaacagactgatcagtactattatttttctttattctgcanatgagtaaactgagtaagtgggacacttgggaatcaaggtcaggcccctatggntccaaagcaaaacattcatataatacataaagtgttagtctaaaggtataaaatacttggaatcttttaggnatctgaaaatcttactggnattttgatcatgccagaataattgtccagattgaactatgtcttanatatagtctcttcttttgctgtaaatgacagcaaatatcttaggttttgttttagtgtagcattcaaatgtcngtggntataaaaaantcattgagattcaagctcaatttgggaaaagacccagtttntngaananngnggaggccaanttaatnnggntnnntttaaat

SEQ ID NO: 27583 - DNA, 534 bp, Homo sapiens
  misc_feature (1)...(534): n = a,t,c or g
ggaactctttggcacagtgcccagcacaaattcagcagtcactcagtgttggctatcatctttggtgatgttggtcccaaacccagacctcngctctggtcctcggntcatacacccacctgggtagcccatatgcactttaaacgtgagtccaaaatggaatccaaagtatcagatcccctcgttgccaccaccaggtttgctttcttctcaagctgctgagggatcctcagaagcagagaccatgatgagaacccatctttaactctgggtcactagcacaggggcagagtaggcagtcactacatcttcagagcctgtgagttttattttgctttgttttgcaatctgtcatccccacactcttactatataagacagtgcctagccagacaagcataggtttaaatctcaacttgtcactcctaactgtgtgaccccgaatgangaccttgngttcctggngcccaanaaccnttaaccgttttgggggaantgnaaancccctaaagggggggntnaannantaaaagg

SEQ ID NO: 27584 - DNA, 523 bp, Homo sapiens
  misc_feature (1)...(523): n = a,t,c or g
ggggagtcggtgctcggcctcctgcggggagcagcccgaggaatctgcaggganaggtcgggaggtgacaacgncagcatgccagtgctatcggaggactctggtttgcatgaaaccctggccctgctgacctcccagctcagacctgactccaaccacaaggagganatgggcttcctgagggatgttttcagtgaaaaaagcctcagttacttaatgaagattcatgagaagcttcgctattatgaaaggcaaagtccaaccccagttctgcacagcgctgtggccctcgctgaggacgtgatggaggagttgcangccgcctccgtgcacagtgattagagggagctgctccanctgctgtccaacccgcacctgagggtaatcacacagaacccctgcccanccatgcctctgggtcncctggaatgggggcggaggantcnccaataagntgaggantggnaactgaggggacnattcccagannaaggtncggggaattntcccccgggaaggggtt

SEQ ID NO: 27585 - DNA, 501 bp, Homo sapiens
  misc_feature (1)...(501): n = a,t,c or g
ggccatgtgtggccagtgggagcctgtgttcttttgacagatcctggtctgtcaaactttatggcacaacaagaagttcccagagactcagccatctcctgcctgtgccccanaatccgccatttctctcaggagctctggttttttatgcaggatggtttttagaagtaaagatctggggactgggtgtgtctgttgtcctgcagtgtcattgcgtcttggctacaatggacagagctaggaaatacatacatgtgtgtgtaaatacacactggaatgttttgtatttctatttctgtattgtctttagctgaaggtatgtagtcaaaataccgtgttcggtttttcgtgtgtgaattgangtgggaatcaggtgggaagcggcggcatgtcacacgtagcacatggnaagcantcaattacacccgctgtcanntgcctgnaccaagggctnaaaggncggnnncnctttaaaaccagggcctntgtaccgggggcccc

SEQ ID NO: 27586 - DNA, 509 bp, Homo sapiens
  misc_feature (1)...(509): n = a,t,c or g
ggaccattgacatcagtatcaccaggaaatctcaggcccacccccagacaatactgaacgaggatctgcgttttgacaggatagatagatccctgatgatcccttgtatgttcaagtatganaagcactgatttttatggtactcantccccctccaacttactggttaggcttatagaatggaggctttattctttacaaagtgtgtcaagctcttttaaagctaggctttagagaacaaaagtccaagtgtacctgtttagcatcagggctgttttgcatttctagcaaagtctgacttattaaacctcctaatcgctccatctcagttttttctgtttacgttgtatttcatttgcaatgtgaagctattaggatgttccttttgtgagggaaaaggagggatanattccatcttagttctcaaaaaagntnaaaatcaanccaaataagcatatataangtcnacngtatgcctggtgcgtggtcataccanaatccagcacttt

SEQ ID NO: 27587 - DNA, 511 bp, Homo sapiens
  misc_feature (1)...(511): n = a,t,c or g
gcttctcacagctantgggaacagtaatcaaggctaggaaacctgagtcatcttgttggctgtgtgccccanatagaaagaacgctnnnnnnnnnnnnnnnnnnnnnnnnnnnnnnnnnnnnnnnnnnnnnnnnnnnnnnnnnnnnnnnnnnnnnnnnnnnnnnnnnnnnnnnnnnnnnnnnnnnnnnnnnnnnnnnnnnnnnnnnnnnnnnnnnnnnnnnnnnnnnnnnnnnnnnnnnnnnnnnnnnnnnnnnnnnnnnnnnnnnnnnnnnnnnnnnnnnnnnnnnnnnnnnnnnnnnnnnnnnnnnnnnnnnnnnnnnnnnnnnnnnnnnnnnnnnnnnnnnnnnnnnnnnnnnnnnnnnnnnnnnnnnnnnnnnagagagaatactttctaatacctcanntgtcacaagtgatgcctcctgtactgtgagccaangggnaanccnaagggaacggangncttnccgaaacngnaaattcctaagccccccgttgnttcccttggggg

SEQ ID NO: 27588 - DNA, 524 bp, Homo sapiens
  misc_feature (1)...(524): n = a,t,c or g
ggtgggagctatggtctctgagcatgtctgcagccttctgagttcctaggagttacatacttaaggttttcagagccctctacagacatgtcatttcccagctagcttttccattgaagggtttgggttagtctgtctgccgcagctgttacccagtgtctcaggtagctaaggtgnttggnancttctccgantgtttttgananatgccctggggaannangtggttcatngtncaccaggcttccagncagggtnnggtaangnacnacctgcaanctgggtccntccaggggnttctttnntnncggntggtcccctgncnttcctcccgggantgggacntggcanngnccctagccctggtctnnctccggtggntgccangntggtcgnnttttngnnccccaattncccgcnnggggggnaagggntgggannttnngatnngnncgttngctacgntncngggcnancagtcntngcatcgncnccnggtttccngcgnangtggncncggggtt

SEQ ID NO: 27589 - DNA, 625 bp, Homo sapiens
  misc_feature (1)...(625): n = a,t,c or g
gcgtttaatgctggtgtcttgtttaatactagtttaatgctgcttttatgcccaggtcttcacacattgtactgactgcttccattgangnagaaatcagagatagtatgataggcttttgagaacttgttttagaagggaaaaaaaattagagactaataacacactgacatttttacaacttattttttgtaatgtcttaaagataggtttgtatgtgaaaatactaagtacaagttatcttctcattctccactggtcccaccgccagggagtcatgcaatgagaaatatatttgagtaacattggagatgaggtgtatatgtgttcatgtcatgtgtgtatttgtggtacatggntatacatacagacaaatgaatttaattanagtccttaatgtaatggcatagttccctgagaaaactaccttcaccctactgtccagagtaagtctacacaatgtacaaggncanacttggncgttttaagcattaagcaccangcagacaccgtgggtcanacctgtaacccagcacttggantcngaggngggtggancactgaggttggagtcnaactagccgacaaatgggaacccgtcncactaaataaaaataccgtttgg

SEQ ID NO: 27590 - DNA, 504 bp, Homo sapiens
  misc_feature (1)...(504): n = a,t,c or g
gctcggcgtgggtcgttggagacttgtctttgtccttgtttttgcttttcaaaaagggactctttttgcgcggaggtgctaaattgttatcaatcggataacccaaaggaggaaggaaaaagaaaacacaaataaatgaaatgaacaataatgacaaatgaatcgaaattagctaaatgtacttaagaaatcagaatcccgtcttgcccaggaaanatgaaaacagtacacagtactcaagaacagaatcagggctcagtaatcatctgtgctctgactcaattanttaaaggcacctgaacgccaacaatttatttcctcagcgtgtgaggagaantacatactgcccaangagccaatggtctggatgatttttcggttcatgtgccaaattttaancacaatgcttantaatttanggccaacttctcctatcancattttatgtgggtcctacagctcagtcaaacaatctcccgttccaccaagacctggganatcaat

SEQ ID NO: 27591 - DNA, 519 bp, Homo sapiens
  misc_feature (1)...(519): n = a,t,c or g
ggcagtctgagggtcttctgattcaatcctcctttcttctctctttccttttgtgggtgtcagatcttcatcatgatttgaaaggctctcattancttctgtttcctctctttattttccatggccatttccttcaataaatctcttgtacatctaattctatcttggtatctgcttcttagaggacatgagctgacacagttaaaggtttcacaggctactttgtgtcagatcagtatttaaactgaggtttggctgattctaatgctaacgattgtcacgctacactttcatatgcctactggcccatcaaccaacctttgattccttaactcagactttaagtcatggtcatctattctcatgatctattctcagtcacttgccagcatttgatgatatttcccactccttccctgactccagagcatttttctaaatttctcattcactggcgccttcccaatgtnccacactgtcccaactggcccttnggcnatnattgggaaaaaacccggc

SEQ ID NO: 27592 - DNA, 504 bp, Homo sapiens
  misc_feature (1)...(504): n = a,t,c or g
gattggggtgattttaaatgttctggaattaggtagtggggatggttgcataacattgtgaatacaaatgaccgaactgtacactttgaaatgctgatgtttatgttatgggtattatatctcaataatagtttttaaaaggctaataccaatgacaaaaaaaagtatgaagaaatctnnnnnnnnnnnnnnnnnnnnnnnnnnnnnnnnnnnnnnnnnnnnnnnnnnnnnnnnnnnnnnnnnnnnnnnnnnnnnnnnnnnnnnnnnnnnnnnnnnnnnnnnnnnnnnnnnnnnnnnnnnnnnnnnnnnnnnnnnnnnnnnnnnnnnnnnnnnnnnnnnnnnnnnnnnnnnnnnnnnnnnnnnnnnnnnnnnnnnnnnnnnnnnnnnnnnnnnnnnnnnnnnnnnnnnnnnnnnnnnnnnnnnnnnnnnnnnnnnnnnnnnnnnnnnnnnnnnnnnnnnnnnntatanacagggggcagggcaacactcangcctatatnccaa

SEQ ID NO: 27593 - DNA, 503 bp, Homo sapiens
  misc_feature (1)...(503): n = a,t,c or g
gnnnnnnnnnnnnnnnnnnnnnnnnnnnnnnnnnnnnnnnnnnnnnnnnnnnnnnnnctctctcnnnnnnnnnnnnnnnnnnnnnnnnnnnnnnnnnnnnnnnnnnnnnnnnnnnnnnnnnnnnnnnnnnnnnnnnnnnnnnnnnnnnnnnnnnnnnnnnnnnnnnnnnnnnnnnnnnnnnnnnnnnnnnnnnnnnnnnnnnnnnnnnnnnnnnnnnnnnnnnnnnnnnnnnnnnnnnnnnnnnnnnnnnnnnnnnnnnnnnnnnnnnnnnnnnnnnnnnnnnnnnnnnnnnnnnnnnnnnnnnnnnnnnnnnnnnnnnnnnnnnnnnnnnnnnnnnnnnnnnnnntgccctgttttgttttgttttttttttaaaanagggtctnactctnacccaggctggattgcaanattggnancatggntcactgnagccttgaancctgngctnaaggnancccctccctctgcctcttgnttactnnaaaaagggtnttagccac

SEQ ID NO: 27594 - DNA, 505 bp, Homo sapiens
  misc_feature (1)...(505): n = a,t,c or g
gggagaggggtacaattttacttggaaatctcttttttgagaaatcggaagtgtagtcttgagagaagcagaaagcatggacacgaatgcaaatttttcactcggggagtgaaaatactgagttcttaggaggaaggataaagagtttgggggcttgaggtttttccttttgctaggaagagagaccagaataaactctgttcttctttattaacacatgtcatgacattagaagtctgtctagatcatccaggcctgtgtgtgtgtcattatgcaaactaaacctctgtgtccctacacctctgaggcctcgcctcaccctgagatgctgattcactcgttttcctgatggtgatcacggtgtgtgggagcaggtgtgcctggcaagccccatgcccaggtagcagcttgctttgcactacagtcgtgggaaggttgtccttttgatctccgggcanatgggtctctcancgggtggttgntcccggttgcctgaaatncgcca

SEQ ID NO: 27595 - DNA, 506 bp, Homo sapiens
  misc_feature (1)...(506): n = a,t,c or g
ggaaaaataaagtaaggtatcatgatagagaggggagggggttggtatattagagaaattggtctgggaaggcctcttaggatgagctgtggacagngacttgtggtactagaatatatgagccaaacaaatatttgggaacagagtgaatacatataattttttctanaagttttttctgtgaagggaaagagagaaatagggtggtagctggcccttgtcctgggtgttgagtatacagtggtgaataagacaggaatnnnnnnnnnnnnnnnnnnnnnnnnnnnnnnnnnnnnnnnnnnnnnnnnnnnnnnnnnnnnnnnnnnnnnnnnnnnnnnnnnnnnnnnnnnnnnnnnnnnnnnnnnnnnnnnnnnnnnnnnnnnnnnnnnnnnnnnnnnnnnnnnnnnnnnnnnnnnnnnnnnnnnnnnnnnnnnnnnnnnnnnnnnnnnnnnnnnnnnnnnnnnnnnnnnnnncnagnggaggttcaatnaaccnnannncccacc

SEQ ID NO: 27596 - DNA, 502 bp, Homo sapiens
  misc_feature (1)...(502): n = a,t,c or g
gtggaagttttacttacacagggactttgcctgggggtggtgaagggattggtttaaatcattgttgactggccaggatttcctgaaggtgaatgtggacctcattgactggggccaaacagacctgagtacactttcttggacttgctgctgacctccttactgtccagagtctacctggtgcgttcatgttccctacacactgcaggttgtgcatgaggatgtctttcagggtgacactggcttgaaaagttaagggaggcnnnnnnnnnnnnnnnnnnnnnnnnnnnnnnnnnnnnnnnnnnnnnnnnnnnnnnnnnnnnnnnnnnnnnnnnnnnnnnnnnnnnnnnnnnnnnnnnnnnnnnnnnnnnnnnnnnnnnnnnnnnnnnnnnnnnnnnnnnnnnnnnnnnnnnnnnnnnnnnnnnnnnnnnnnnnnnnnnnnnnnnnntcaagaantggaanttcaatgggctgaaattcnttactggccccaacccgggtg

SEQ ID NO: 27597 - DNA, 508 bp, Homo sapiens
  misc_feature (1)...(508): n = a,t,c or g
gtccagacagccttgtatgggaagatgggaagggtgaggtcgccacatccttatgggcaccggaagttcatcactatgtctgatggagccacttctacattcgacctcttcgagcccttggctgnncactgtgttggagatgatatcaccatggncatctgccctggaattgccaatcacagcgagaagcaatacatccgcactttcgttgactacgcccagaaaaatggctatcggtgcgccgtgctgaaccacctgggtgccctgcccaacattgaattgacctcgccacgcatgttcacctatggctgcacntgggaatttggncccatggngaactacatcaagaagacatatcccctgacccaactggtcgtcctgggcttcancctgggtggtaacattgtgtgcaaatacntgggggagactcanggcanaccangngaaggnctntgctgcgtcaaccgttgccaggggnncatntccctgaagggcccccgaaacttca

SEQ ID NO: 27598 - DNA, 513 bp, Homo sapiens
  misc_feature (1)...(513): n = a,t,c or g
gaaaataggtatataaaatgtgtcacagaaaaacacgcatttgcaacgttaacctaacgaaatttccatgaagaaccaagtcagggcancanctccgnagtcccagctcaggctctctgccttccagaggccgcttctccagtgactaacctcctcctctggctcctccttgcanacagttatcccttgtttagaacacgaatttccatttacctggtgggaacacgaaacaggagtctcttctgttctgcaagtttgatgggtaanaggtagccttttttcaaagtaggatttcctttttcaactgttccaggaaagaatctctaagactgggtagctcacagccagccaaaggcagctacatttccacagaagcccgtccgctgcctccgtggttctccagncattgaactggtcccacacgcaccccaaggcccaatcctcgggnannttcagggtaactgtgggggccngttccaaggncgtgcncctttnnggagggtcccggntagg

SEQ ID NO: 27599 - DNA, 552 bp, Homo sapiens
  misc_feature (1)...(552): n = a,t,c or g
gccccatcctttctattacttaaagatgcttttagagtanacctgaacttttaagctgcttcctgctaggagagttctcaaggatgaggacagcctgaagattttgttaaactggatctggactacctgagagtccacacatcccttgtgagcccgaggagactatgaacccactgaaattgagtgtaaaatantgtgtagtacatgtgtatgtgaatgcccccatcaattttttgcacagggtgtccttagcttttattggattccttcanatgttgtaacctctcacagggtgatttgtagagaagctgggtctgtgtggtctgagccctggggatttcacatatacngagatctcaggggcanaggctggggtcttatctccattgcgttaattaatttccgtgattttacccagttttttttaaattcccgnntccaattatccctanaggaacncaaangggaatnattgcccaaagtttaacccngtttcccattcngctacnacaacnccaccaacaaaggttncggcnaangaaaaattttctc

SEQ ID NO: 27600 - DNA, 524 bp, Homo sapiens
  misc_feature (1)...(524): n = a,t,c or g
gtganaattaaaagaataggtggatatgaaataatagtgccttacacatgataaatgctatataaatgatagctgctgctctttctattgttgacctgaagtaagccctgagtccccctggagcgggggtaaggccacaagcagatggcatctggcatanccccatgtaataagattcagtaatccggtctgactgaggcggggggaaaagtancatagtggctanaagtgattctttactggggcccancgaaaagtcaccctccactactggggagcccctgcttatcccangcccaaggctctttggccagtgacactactgaggtgtcacacctgangggaanaaatggaatcatgcatgaaatggaaccaanaggaagtggaagcatactcttagcccanagctanatgcaaagcagctgtttgaatataacancccaccagtgcagacacagatctagacatgttctgttncaancaatgaagggttgaataaggaaaaggcctgggatcaggaccct

SEQ ID NO: 27601 - DNA, 532 bp, Homo sapiens
  misc_feature (1)...(532): n = a,t,c or g
ggcacaattattcatctccgttgatctgacacactctcttgaaatcactagattatgaaacagatcttcacctcctgattccaatactgcctggtttcaacacaggggttgttttatttttttacttctcctagtaaatagagatgtgtataatttttgcccattttatttcttgagttgtctgcaccacttcttttcttactctgaaataatgtgaaaacgtgaagttggngcangaccttgaaagagcctccctcctttgcgtgacctgaatcggtagcggcactctctgtttcccctgcctccgtgtcacttgttagtgatgggcattaggagcttcatatgttgcacaccttgtatcactcttcngaccctgagtcaggtngagctgtctgctcnaggtcgaatccagtgatggtgaccaagctctgcccgttaagtagcaancnaatggtgattcctgcacgtggacggngtttcnacaggntgnnctanggccantggcctcnatattggcnnacnatnctaattt

SEQ ID NO: 27602 - DNA, 526 bp, Homo sapiens
  misc_feature (1)...(526): n = a,t,c or g
ggggaaattagaggaagggatctgcaacttgttgaatgccagcttcattccagtcagtctgctaggcacttacatgcatttgctcatctgtcccgtcaaccccaccccaataaccctaggagatgggcttcactatctccattttacagatgaaaattaccagcttggaaacattacattctgcatagttgcaagactgtggatgactgagttgggagccacaggggagtcagggatctaagtctgtactctttccactagactgtgtggtttctgagaaacacatttanaagtactanaagtacctttggccccaaataggtgggatgctgaacccagaagtaggtanaatgctaagcttattaaaggtgaaannnnnnnnnnnnnnnnnnnnnnnnnnnnnnnnnnnnnnnnnnnnnnnnnnnnnnnnnnnnnnnnnnnnnnaagncangagtcaanacagtccgggcaacatgnnaaaccccatcnccantaaaattaaanaanttgcnncangggggatgtg

SEQ ID NO: 27603 - DNA, 521 bp, Homo sapiens
  misc_feature (1)...(521): n = a,t,c or g
gcggcacgagcactgttgtgcctaatgagctctgccagcttcagagcatctgaggaacatctcantctanttgacaccacagagaaaaaaacaaaagagatggaggagttcctgtcatatggagaacaaattgttgggagcctccttttggggcttcttagtacctcctgatattttccatcatgctttacattcagccagcactcaacaggtgactanatanantgagacacaggacacggagacgtgatcacaggtcatgctgattcaganaacaaacctgcacaggcttctacctgggcaatcctgtccatggcactggggcanttgctgccttctccttctttgaggtgtgtactantcaaagatctccaananagaaagnaccagtgagatatatntanacaganaaagananagaggnaatctganaggggacnnataagggaattggcttaacagtttcaangcnganagnnccacatnnnntgcctnaanccggnnanccgaaanncatgggg

SEQ ID NO: 27604 - DNA, 533 bp, Homo sapiens
  misc_feature (1)...(533): n = a,t,c or g
ggtttatacaataatttgtttatctattcatccacacgtgggcannnnnnnnnnnnnnnnnnnnnnnnnnnnnnnnnnnnnnnnnnttaagantttgtgngcacnnnnnnnnnnnnnnnnnnnnnnnnnnnnnnnnnnnnnnnnnnnnnnnnnnnnnnnnnnnnngaaaaaagaatatgtgtgtacatgtacctgtttgagtaccnnnnnnnnnnnnnnnnnnnnnnnnnnnnnnnnnnnnnnnnnnnnnnnnnnnnnnnnnnnnnnnnnagtttttgaggaaccaacaaactctttttcacagcaagntgaaccactttttacttanaccagcaatggactaaagttctaagtttctctacatcttcaccaaagtttgntantttttttatnataaccantcttgtgganatganatantgcctcactgtngttatgaaatagtacctcattgngggtttgacacgcattctccaatcccnaatganattgancanctttcaagtccttgtggtagctgnaanccncnttgg

SEQ ID NO: 27605 - DNA, 531 bp, Homo sapiens
  misc_feature (1)...(531): n = a,t,c or g
gttttttttagttttataggcatttaatagtttaccagttggtacaataagattttttaatatgcagaaaacatgaataaattttgttttacacagtcggagagcaacaaatcttactgtaaaacacgagagcaatattatatacattcctttactgattttttaaaattgtgtcaatatcttcagtgaactcttaacaatctggggaactgttttcctcaattaccacttcagcaacgttcatacgaaatcaaggcttgccttcatgtcagtgtcaggatcaactttaactcgaagagtttgtgtttgtctctaacatcttcagagtgagctttagggatgcctgaaggatggacagtacaagcaagcagctacttccatgatacagtgggaagataaaaaggccattcagtccagccgtgacctgtaaatccagcttgcctccccccaacccactgggaaaaaaaccaaaaccttttcctccagtttttacagtcgcttctctacaagngatccttgngtcatcaaata

SEQ ID NO: 27606 - DNA, 548 bp, Homo sapiens
  misc_feature (1)...(548): n = a,t,c or g
nnnnnnnnnnnnnnnnnnnnnnnnnnnnnnnnnnnnnnnnnnnnnnnnnnnnnnnngaaagaaanntgtgnanctnatttccncccnggccccngttncnatttacccnacntcaaancttttngcnacctgnagggncngccttcananaatgtnttataaatgaatncaantnccngcggtnaggaggaggccattgcaattcttcnaaacccgatttaaaanggaaaagtaaatatttattgnggtctnaatgtggccaaactggatttggganatttcttacctttaanccttggctccacctgcngaattannggtattaccnccattttcccaatcagtaaaccanggnncaattttcnaantttcgtttcaaattgnangaccggtaatnctncggngaanaatttccacttcanggccnaatttgtacctttaatnnggggtcnaaaanggngnttaanggctaaagggcccttnnggnnnaanttnncgggaaaaaantgngngtaacccnaagttggccaatttaggggtttttgggg

SEQ ID NO: 27607 - DNA, 640 bp, Homo sapiens
  misc_feature (1)...(640): n = a,t,c or g
ttatgacggcctttacgaaggccaaannnnnnnnnnnnnnnnnnnnnnnnnnnnnnnnnnnnnnnnnnnnnnnnnnnnnnnnnnnnnnnnnnnnnnnnnnnnnnnnnnnnnnnnnnnnnnnnnnnnnnnnnnnnnnnnnnnnnnnnnnnnnnnnnnnnnnnnnnnnnnnnnnnnnnnnnnnnnnnnnnnnnnnnnnnnnnnnnnnnnnnnnnnnnnnnnnnnnnnnnnnnnnnnnnnnnnnnnnnnnnnnnnnnnnnnnnnnnnnnnnnnnnnnnnnnnnnnnnnnnnnnnnnnnnnnnnnnnnnnnnnnnnnnnnnnnnnnnnnnnnnnnnnnnnnnnnnnnnnnnnnnnnnnnnnnnnnnnnnnnnnnnnnnnnnnnnnnnnnnnnnnnnnnnnnnnnnnnnnnnnnnnnnnnnnnnnnnnnnnnnnnnnnnnnnnnnnnnnnnnnnnnnnnnnnnnnnnnnnnnnnnnnnnancgcccccacaacagtggcgannnnnnnnnnnnnnnnnnnnnnnnnnnnnnnnnnnnnnnnnnnnnnnnnnnnnnnnnnnnnnnnnnnnnnnnnnnnnttttcancccgcancgncnacgatgggtcacngtangttncgaactcctgaanngggtttaaccgtt

SEQ ID NO: 27608 - DNA, 559 bp, Homo sapiens
  misc_feature (1)...(559): n = a,t,c or g
gggctgcaggccagaccaggagccagaaaagatggtctctggcaccctttcctttattcacggaaatggnccctcttcacntcttcgngctccatcaaagctcctttttagtgctgggagcacaccacggngtttagagaaaacantctaataatgttatttgcttgcttagaaaacntccaccantcccanttgcttgcaggnnaaattgggactangaaatacctctgtctgngagcagntgtcctgtcgannaccatttctcatcnttgcatcccttatacncagtcnnaccncacaggcttcncnccatcccngagcacagtgggccactttcatnantgagcctttgcacngctattctctgttgggcatgncctgcactggcgtgnngaagcctcgnncaganttcngncccatgntaaacttnacntttnccnnncttcctggcttctccnatccantggcacatccnncngggcctagccttnaacggntanangnagttnnacccannngntnanngccttncnaagaccnancagtngntnggnccttt

SEQ ID NO: 27609 - DNA, 554 bp, Homo sapiens
  misc_feature (1)...(554): n = a,t,c or g
gtagggctcggcgtgggtagcttggggctgtgctactgcaactggctctgcaggagcaacctgagagactccctgagtactctccaaaactgcttgctgggaggatgtattgggggcttgtgctaaactccctcctggctgggacacttgaacctgtcctcctacaccacccataggaactaaaagatttgattccacataaggctgcaccactgtgggaaagtacccaggtgtanccagtacttctgtcggcatgggaggggataggactgtagaatggatgcaaacagaagccacgttggaagagggagcactatttgaatctcctgggtactgtggtggcantcgaggtgggaagccctgttttccanctgatacttgaggcaaggactgtggagcttgagctgactcactggctgtcantantggcctcactggangttgatgtctgtgaaacnaataagcctgtcgtttaagaagggctgtctgncgtatcccctgcncngctnaagagtngcnnggttggnanntgannccctgtcancnnntgggat

SEQ ID NO: 27610 - DNA, 555 bp, Homo sapiens
  misc_feature (1)...(555): n = a,t,c or g
ggcctgaaagtgagattacccatagagtttttaatcctgatttgctgctatttctgttgaaatatgaatgttaaatgtttacatttttgtgtgatagctttataatttcctaaagagtgtagtttacaagtttatatgattacctgaacattaagctatcagcactcacatctctgcatgatgatgctttcagaatacattgatgtattaatatttatggcagacgttttatctgtattaaggtgcctctgatagctgatgattttaaaacacatttacatattaatatttattaaaaatagctcttatgataccatggtagagccttggcctaatatgtttaaaagctcctctactctgtgtgcatgtaatttttgactctttctttaatccagttcacttcagtatttacctacttattttaggaatacaantatattttanatattttttacccttgggtggtagtgctaagttgngttcctcangaatcnctggccggcttggatttttgngtggtttatcntaancctaaggncnnancaaacacaacag

SEQ ID NO: 27611 - DNA, 555 bp, Homo sapiens
  misc_feature (1)...(555): n = a,t,c or g
gatagtttccaactcagttgggtaaattccaaggagggcagttgctggatcgtattgtaaggctgttgagcttggagagaaactgccaaactgtcttccaaagtgtcctcaaatggtttttagtcacgtgcatttgtgaagctgctcccccgcaccgccaacgacagcttctggctgtgaaagaaactttattcaggtttgatctcagaagttgtttattttactctgtttttcagttagctagggtagaaagtctcaatgtctattactagtttttcatgactgaggtcaacatattcatcgttcaagatcttacaatattttttgttttgatttgttttganatgcagtatttaatttgaaatttctagtaatattcaagaagagagtttgattagcttgagatagtagtagtancccatttacaaatgaggaaactgangcatagagcggtnngtaaaagacnctgtgcctaaangcgcanantagtaagtggcacagagaacatttgagacaatccagctgcaaattgnctgtgtcanatgcccncnacct

SEQ ID NO: 27612 - DNA, 556 bp, Homo sapiens
  misc_feature (1)...(556): n = a,t,c or g
gggcatctccctggggagcaggcagagacaggccgttggacagcatggatcccaaaagttttcatgcactggggagctccatcagagagcagccatagagctgctctgtggggagggctcttcatccctttctgggaggtgtggnccccagctgaccttcaagctaggagagagtgaaaccancttccctgtgggactagagcacatctattctgcaaggcttcctgcctgctggccccacccanggtcacgcttagccaccctgtagcgagtgagtgcacagcacagcccctgcagcacagcctgagtangttgctcnacctgagtactttcctantganttggaagcacattggntcctcccagtacagctggnatgccaacctaatccacaggctgtcncantgcccccaaggctgcttcatgcagcattttgggagtangtagccaagatctgtggccagcactcaagtcangtncaanggggcaagatcttcangttactgggctgggtgggaanggnnnangctantctactcangcnttttcagaattg

SEQ ID NO: 27613 - DNA, 572 bp, Homo sapiens
  misc_feature (1)...(572): n = a,t,c or g
gggaaaaggagaaaagaaggaanaaaggaaaaaagtaggaagggaganagaaaaaaaaggtcgctttgcggatacganccgctaggctgacaacttttctatttcattggcagatatgaagcagtgtcttttccagtaaggtacggaagctttgttgttttcatgtgtacccagctcagccttttagaagcacctcggtttgcttcattaggtatttgatactctccagccttgtcctcaggcctgatttgatttgccagggtcctgacaccaaagcccaggccaagttctaaattcaggtgtgggctcacagtgctattgagcttgtcgaattctggcctcccctgaacattanccccacgggagcctgagggtgtttgaaaagggcgtgatcactctanggctgaaattaaaggtgctttcttttcctccgaaaccangctgcttcttcgggtanacctcctgagccangngcanaancactaccanaaagcagggattgttcangaangccatttaccncaattaggaagnaacctggcaantnaacancaaacttaggcgctccccaa

SEQ ID NO: 27614 - DNA, 567 bp, Homo sapiens
  misc_feature (1)...(567): n = a,t,c or g
ggtgagttgcatgtcttgggaatactatgagttagagaaagtcggccaaggtacctggtattttaagggctatatatgaatagaagacttttattgaaagtcttcaatatgcctatgcaaaaatgcctatggtttaaggcatttttgtatagcagtgtgcagggcattttttttgactttgctattttttttacctagtagacatttgatctggtanaagttctgattttatttatgaacatacacattttaagtagaattttgtcagcatcaatgaattttaatcacagtattttacaaaaattaaattcctttanccacttaatccatgcggtggtgagcttatttcttttcctctttttagtctacggaaattttcatcaagatcagtttctttttccaaatggtcgggcgtggtggnnnnnnnnnnnnnnnnnnnnnnnnnnnnnnnnnnnnnnnnnnnnnnnnnnnnnnnnnnnnnnnnagacaacccgggcaacatggtgaancccatcnctactaagattaaaaatnnccagggtggggtgggnactgttanccanctat

SEQ ID NO: 27615 - DNA, 556 bp, Homo sapiens
  misc_feature (1)...(556): n = a,t,c or g
ggaaacgtcttggagttttgttgcccatctgcctctttatggtancatgactggggtctccctcacancagggctgggaaagaaananaaagacacanaggaagaacacagggatatccccctgcattctttggttcacangggctccttttcctggtcctttggncacaaagaccgagctcttcttggagtttttactgcacatgtcaactgggaantcacttgacngggggttggggangggtctgcctttatatcaaagctgaaaggnnnnnnnnnnnnnnnnnnnnnnnnnnnnnnnnnnnnnnnnnnnnnnnnnnnnnnnnnnnnnnnnnnnnnnnnnnnnnnnnnnnnnnnnnnnnnnnnnnnnnnnnnnnnnnnnnnnnnnnnnnnnnnnnnnnnnnnnnnnnnnnnnnnnnnnnnnnnnnnnnnnnnnnnnnnnnnnnnnnnnnnnnnnnnnnncctnaanccgggaggcngaggttcaatnanctnaaattgtgcaactgaacccanccctgggtganagngacccacccaaaaaganaanaaaggt

SEQ ID NO: 27616 - DNA, 571 bp, Homo sapiens
  misc_feature (1)...(571): n = a,t,c or g
caagagtcagtgtgaccagcctcaccaggctggcttggagtggaggaggatgtggtaggtgactgggagctaaaggaatttaggggcagcgttggtttctgtgggggaancctgcgacagatanaagtctgaggagtgtggaagggttactgtgggatctgggggcattggccactgatgggattgttgggcagtgctgggtttgaggttggtgatggtgattgttggacttgccttgggagtggaagaganaatgcnagccagtgtcanaggtgctggtgaatggaggtgtgtgacccgagcggtaacatccacaaaggatttcccgcaaagacagcgcggcttttcagctgcagctgccccaacctgctccagtctccctcatttccagcctggaaattgttgctaanttccccatttgcaattgggaacgcaacccctgttaanatgtggancaataaantggancaagtatctgtgccgtntgccctcttcctgcaacgtcctccttctncancnttnattggtcaagaatgctggncctctanaaactgcctgggctggtcctgac

SEQ ID NO: 27617 - DNA, 566 bp, Homo sapiens
  misc_feature (1)...(566): n = a,t,c or g
gcggcacgagtcagatatatgccaagagggcaccanaggaagtgcatgccctcctaaggtccttcggcactgactacgtaatcctggaagacagcatctgctacgancggaggcaccgccggggctgccgactccgggacctgctggacattgccaacggccacgtgagcatgctgcctctccctgtgtgggggtctcctggaggggcgggactctgatttgaatcctaagaatgtgaatctttttatccttaatgtctanttgaattacgctacnaatcaagtatttgctttttctcttgcttcctacanaanccctctcttggcactttagtgactgccactggggctgggcaagggacaggtgacaggggagccctgggtccccagtgtcacaccaaacagagcagctctgccttcagctcatttgtatgatggggtccgcaaaaaaatgtanccgttaaaggattttgccgctataaacaaaacncaaccnttaannccaatggtccaaagcctcctattgggnactncncaatggaaaggatgttggggccncctnccccc

SEQ ID NO: 27618 - DNA, 393 bp, Homo sapiens
  misc_feature (1)...(393): n = a,t,c or g
gcaaatattctgaagtaggtggctgtgcacagangaactcaggatccagaaagggcaaactttacatttaagcaattaaattaaaacccagtcattcacatcagattttgaggtacacaaacatttgtgagcagaagacaagtcaaagttctggtgggaaattctggtgggaacactttgttaagtctgttgaaaaaaaatgagttacaaaaccaatactcaagggccctcaatggccaaaaaacaaaagcagctcacaggcccagtcccagagacatgggcaatgttaattctctccttgcttacctacagaaaagcatcagaacaaggcctgccttgaagaaagaggagggaaacaaaccgcagttcaggccacataagcagcttgcgatt

SEQ ID NO: 27619 - DNA, 389 bp, Homo sapiens
  misc_feature (1)...(389): n = a,t,c or g
ggaggctcagctggggtggncttnnaatgggacnggcacagtanctatggccagtactcacctgtagtctgcaggtacattgcaatgagtaaataaaattcactgatgattttaattctggtttgagagatttttggtgatggtggttgtaaaaacgaggaaagaaagtagggccagntgttaagcatcctnanagctccctncagagtttaatcccagccctgtctataaataactaanatctcacatgccaataaaatgaccacaggagccatattgcttcanaattctctgtgaccattatgtctacattgcgtgaggagtatagtaagtgntaaaacagggctttctttaaataccaacttcatgtttttatagtaaatatgttc

SEQ ID NO: 27620 - DNA, 376 bp, Homo sapiens
  misc_feature (1)...(376): n = a,t,c or g
gcacctaaanggggcctcacccctcaccctcaaaacttcctgggttactgctacttctgtgggtgaacacagagtgcttcagtgtcatgccctccatcaactttgcttaaaaattgagggtgctccttgtccccacttctttctccacatctaacctctcagtggcttttctttctatcttcctttaaaacgtttgtttgtttattnnnnnnnnnnnnnnnnnnnnnnnnnnnnnnnnnnnnnnnnnnnnnnnnnnnnnnnnnnnnnnnnnnnnnnnnnnnnnnnnnnnnnnnnnnnnnnnnaaaatgtttagaattagctgccccttcttttacatccccactgtcccctccccattcaaatctacatatttcgt

SEQ ID NO: 27621 - DNA, 571 bp, Homo sapiens
  misc_feature (1)...(571): n = a,t,c or g
gcggcacnagnnnnnnnnnnnnnnnnnnnnnnnnnnnnnnnnnnnnnnnnnnnnnnnnnnnnnnnnnnnnnnnnnnnnnnnnnnnnnnnnnnnnnnnnnnnnnnnnnnnnnnnnnnnnnnnnnnnnnnnnnnnnnnnnnnnnnnnnnnnnnnnnnnnnnnnnnnnnnnnnnnnnnnnnnnnnnnnnnnnnnnnnnnnnnnnnnnnnnnnnnnnnnnnnnnnnnnnnnnnnnnnnnnnnnnnnnnnngtagcntntattcatgcatatngntntccnntnntgtgnanctttcanagnccccannaggtnnatcanantntaacnattgcttccccnatcctgaacttncngcaagaggccactcantggnccccaaggatcaanncttgnttccccnangcacccnancaccantggtcaattcngaanancncnccaaattgncctttnaaacatnggttggattgtgcttcagnnggtcaananccccccagaaactcnacnnggggnccnaaatnaaaccannnttctggcnanggaaaatggtcctgtttnnanccnatacnttggg

SEQ ID NO: 27622 - DNA, 380 bp, Homo sapiens
  misc_feature (1)...(380): n = a,t,c or g
gcggcacgaggggnnnnnnnnnnnnnnnnnnnnnnnnnnnnnnnnnnnnnnnnnnnnnnnnnnnnnnnnnnnnnnnnnnnnnnnnnnnnnnnnnnnnnnnnnnnnnnnnnnnnnnnnnnnnnnnnnnnnnnnnnnnnnnnnnnnnnnnnnnnnnnnnnnnnnnnnnnnnnnnnnnnnnnnnnnnnnnnnnnnnnnnnnnnnnnnnnnnnnnnnnnnnnnnnnnnnnnnnnnnnnnnnnnnnnnnnnnnnnnnnnnnnnnnnnnnnnnnnnnnngtccagnaatgngcaantttnacagtntccnccaggatcntcacagtntaaccnttgnttcctccancctnaanttactgcaaaaggccantnantggtctccaggc

SEQ ID NO: 27623 - DNA, 577 bp, Homo sapiens
  misc_feature (1)...(577): n = a,t,c or g
gacgaagcctccttgcataatggcacagaagagaaaaaagaagcgtgaaacgtgactccagccctaaagaactgaggctatatgggcagcaaacattagatctttgaaaagttggtaacaccaaaattatgctttgcatatatataatgtacttcacaaagcatttttacatgtatcacctaattttattggcatgcaaatatatcttattaaaaaagtaaaatctcttcatcttctggcacttttaactctccaaaacttctgaatttcttgtaaagagcacccaggcaaggtatagagaaccccaatgctgggaaaagagtaggattcttggcctccgacttttaacttttcttgcctgagatgtgtaaggatccacagaagagcaattgaaggactgacgaggcacaacacagctcactcagcatggagccggatcgctggatgatagtatccttaacagctaccaaattatagttggatacaatagaanagatgttacaaggnatgtcatgactcattatcacattaattgtcaatccnaattagcataagagttcanaggatggtagaattg

SEQ ID NO: 27624 - DNA, 571 bp, Homo sapiens
  misc_feature (1)...(571): n = a,t,c or g
agcaaccgccccctaaagaaactggaggcccaaggtacagtggtatttcttactttgggattctgctccctccatgaggtatctaaaatgttgatgaattgctaatacctggatttcccaggagtgtaactaacattatctgggaagaatgaatctgaatcagcttctccttggaatccagcatcctagtcccagcgcttgggaatactacttttccagccatggtctttcttgagttgctgttaccaagtgaaaccttgggctgcccccaggtgtgtttagcccagaggagaggactttcttgccctttctttccatcttttagctccttatcatatactggttcagttgtacccttttaccttacccatttctactatcatggaggttcagaattcacatctgaattcaaaagataattgggagccaggcatggtggtgtgtgcttaataatcccagttacccaggagctgangcangcagcagaggatcacttgagcccangagtttggaggcacagtaaactcanttgtgttattgcantccacctgggcaacagagcaaggcctgt

SEQ ID NO: 27625 - DNA, 533 bp, Homo sapiens
  misc_feature (1)...(533): n = a,t,c or g
ggacatatccangaaactcaataaaacccaagcatgataagcganangaanatcattacantcaactactcagaangcagnantacannaaaaacttaaaagccnccagananttgaaacacattatataaaaaanaaaangatganaataatcactgatgttttttgagaaaatgcaatgtcttgtgcaagacaatgggtgacatctttaaagtgcgtgaacaaaaatctgcccacctatgaattcnataatcagcacaantattcctcaaaaatancgaatgaaattaagaattttttagacaagcaaaatttgatgagcaattttttcaccactctaagaaatgtcgaagggaatttatcaagtcaaaatanaataatgggaactcagatttgcacaanngagaaaatttctaaatnaataaatatgtaagcnggntgtggtggcttatgcctgtatccagcactttgggaaggcaaggcactcggtcattgagggccggagtttgagaacagntggccaacatcctgaa

SEQ ID NO: 27626 - DNA, 518 bp, Homo sapiens
  misc_feature (1)...(518): n = a,t,c or g
gtctgacagctggtgcgcctgcccgggaacatcctcctggactcaatcatggcttgtggtctggtcgccagcaacctgaatctcaaacctggagagtgccttcgagtgcgaggcgaggtggctcctgacgctaagagcttcgtgctgaacctgggcaaagacagcaacaacctgtgcctgcacttcaaccctcgcttcaacgcccacggcgacgccaacaccatcgtgtgcaacagcaaggacggcggggcctgggggaccgagcagcgggaggctgtctttcccttccagcctggaagtgttgcacaggtgtgcatcaccttcgaccaggccaacctgaccgtcaagctgccagatggatacgaattcaagttccccaaccgcctcaacctggaggccatcaactacatggcanctgacggtgacttcaagatcaaatgtgtggcctttgactgaaatcaaccagccatgggccccaataaagnagctgctctgctccctctgaaaaaaaaaaaaaa

SEQ ID NO: 27627 - DNA, 522 bp, Homo sapiens
  misc_feature (1)...(522): n = a,t,c or g
gctggagtacacaagggcagagtgacttggctggggctgcacagtgaattattctcagagctgggactctcacttaatcagttctgttttctccatttatccttgaacccagtactgcaccatcaccccgctagaccccaggagatactaagcagcatgctggaaggagcgctagtcttgcagggccaagtctggtcccgtttctctctcacacgtgttctgtgtccttatgccaatcacttctcttccgggaccttggtttcctcctcagctgggcagggctctaaccagagctgcctccttgggttgtggaggggaatccaaggccacagtgcatgccgagtggagccttctgttcctgcacgtggaaggcantggctcncattaggagttaacctgaattnnnnnnnnnnnnnnnnnnnnnnnnnnnnnnnnnnnnnnnnnnnnnnnnnnnnnnnncaattacctgaagtcaaganttgagacaacctggcaacatggtaaatcctgtctcacaaaaaa

SEQ ID NO: 27628 - DNA, 515 bp, Homo sapiens
  misc_feature (1)...(515): n = a,t,c or g
gtgtttaaattcttaatattagtcatcctaagtataccatttatgtatcctttataaggaatgtgctcctagccactgtcttctcctttccaggcatgactgaaatctaatcactggaaaccatgtgattctaaatatattatgtaaatgttaatgtattatgttttttaaatcattgcattcaatttttaatgtcaagaataatggacagcttttgtcaggtgactactaacaatgctccttcattttactacttcttaaaacaaggttggattctaaagataaagattttggagactctgggatgagtgtgcatttattttcagagttgacataatatgataatgtgacaattatgagactgttttaaaccttaagacctgatgcctcanttgtaacttttttttttttnctgaaacggtgtcctgcctgtcacccaaggctggattgcatggcncaatctctgccantgaaacgtcngcctcccgggttnaagnaatcccnggccnaacccc

SEQ ID NO: 27629 - DNA, 520 bp, Homo sapiens
  misc_feature (1)...(520): n = a,t,c or g
gggctgacatgtcagccccacataagtgattctccaacaagacactgtgcttgatgtccacagaactttgagctgtaggttcagggaggctgccatgagtctgctggggaggctcagagaaggggtanatttcagctgggccttctcatgtaagtagaattttgctttgttgggaaggggtacttggctaagaaaactgtgacagcaagagcctgaagacatgggatgaccagagaattgtggttagtagacatgtcttgggtggagaaaggtggaagggtttgcccagccaggtggtggggaagtacagcaggttgagaagaaggatgtggcacaatttgccacctttgttttangaagttagctgaagggcaagtggaggaaggaaagaatgagcaagaggccgtaaaaaaattggctgggtccaagtgaaagcgacatggtttggtnaaggtttgcatcacatggcaaggaaatgcactactgaantttggancactggagcctaatggatgggaaa

SEQ ID NO: 27630 - DNA, 526 bp, Homo sapiens
  misc_feature (1)...(526): n = a,t,c or g
gccctggaaaaaaaaacagtgcatacaatagttatcctagactaacctacaaacatttttctaactccttctttctcactgcacacatgttttaatgatggtccaagaaagatgtagagaacaagaaaaaagccttctgcctttccaggacacagaagggtatctacctgatttctattacctggtatttactaaaagttcaggcacataaatagcactaggtaacttcacgtgcacatcactggtctctgtgttcaagaagtcaatctgtaggtagctaaagcttgacctccacatgaaaatgaaaagataccagaagatgagattagcacaggtttccaaagtgctcttgcttgagtttttacaacacctttacaaaacaggtancaagtgtcaacatactcattgtagagagaacaaagaaacctgaggcttganatggatgattgtcaaactggaaacagtgaaactggaattgtaaccttccccgtcctggagtttcaaatttgcctaaaaataatctggg

SEQ ID NO: 27631 - DNA, 560 bp, Homo sapiens
  misc_feature (1)...(560): n = a,t,c or g
agcccaaaaagacagggtctcatagagcacagagactgggggtggggtggggacctttgagtttgacccaggcctttctgcttgcctgcctttgcctgcctgtttacattttgatcttcanagggaaaaaaatangtgaactgttgccctttctttctccatggacgtctttcttgacactggcgacatacttctttggcactttttccagtccgatangcattaanaaaaaaagaggnttttcaagcanttgttgacagagcaanaaaggggaaanaattgtccggntcaattgccaacatatnagaaattgggctgcnttaagaaaagangctgtttanangcncngcaacccaacccatgtgtgaatgcncccnggnancanaagaaangngggccannancccgattccctcaccaaaaatnatngggaaacacttttgccncgggaaaaaaagtttttttgcccanatgaantngntttgggaaaaatttttncaacccccccccanatngngnagtnnanaatanttttccanctngtnntaaccccccccccc

SEQ ID NO: 27632 - DNA, 636 bp, Homo sapiens
  misc_feature (1)...(636): n = a,t,c or g
tttatnacgccnnnnnnnnnnnnnnnnnnnnnnnnnnnnnnnnnnnnnnnnnnnnnnnnnnnnnnnggcacnaggggacaggctgggtgcancanancgggaggatgaacactccttggccaatactggncgccctcgggattggctttgagtggggcgtgtctctcttatacaggtgcagaantggagccctggtgggtggttctgcangggctgggggagtttccacatcttcntcccccagctctgtcataaaaagccagcttgcaagangccggtgggggccancaaatccttccanccgggtgcctgctcaaangggccttcccacacaaatctcccatngccttctctcccaactgtcanccaaatcccatcctcctgggtgaatccccaagatgctgggggnaaaatntnaaccaaggcaacctggnatgncaannccgtgcctaaatntccaaaggggtccaacnaaaaaagntcccctgtcctgggaanttccaggggccaantcntccanactnngtgaagtttcttccctccttnggcnccanaancttnaccnatttangggcccngggtnaaatnnaangggnccttnnaaantggtcccnaanaaaaaanggccaaaaaaaa

SEQ ID NO: 27633 - DNA, 568 bp, Homo sapiens
  misc_feature (1)...(568): n = a,t,c or g
gcccatccctccgtaaattgggactcttttaaacccttctccatcagggaagcccttgccactgtggagtctctaggacgccaggccttcccaaacacacccaccacgtgggcctttaccctccacctctcctgactctgtgccaggtctctgctcttctcttcacaccttgctcttcctgggctctanaattattggaattccggaattaanatggcaattnnnnnnnnnnnnnnnnnnnnnnnnnnnnnnnnnnnnnnnnnnnnnnnnnnnnnnnnnnnnnnnnnnnnnnnnnnnnnnnnnnnnnnnnnnnnnnnnnnnnnnnnnacctctccacaaaaaatgttaaaatattatccaagtgtggtggtgggtgcctgtatccnanctacngaagaagctaagtgggaaaaatgcttntcccaagaggtggaggtncaatnagccaanatnnaccaatgnactccaacntgnggaaaaaantttgaccctccnaaaaaaaaaatggnggcaaattttaanccngtaanggngnnantttcccngngnggaaaaaaaancaaaaaaa

SEQ ID NO: 27634 - DNA, 563 bp, Homo sapiens
  misc_feature (1)...(563): n = a,t,c or g
gacatgcacacacagacacacatacatanagacacatacatacaacacanaggtacacatgcacatccccacactcaccaaatgcatgttctttgttaaaaggaagtaagtcctggagcctatcatggaattaaaggcagggttttgcagcttccaaattctgtaacctcagttgggtcacttggcagctctgtgcctctgtttccctatctgacagcaggtaaagtttgagtaaatcagaaactagagaatccggatccancccacaaactgttttaattggntcaatcanggctttnaaaaancttgttgtcaatgtnaaagatnagaaagattccangnnaaaatccnagatncaacatttcctaaagataaggtgtctgccaaancaaaatcagcaagcaatgagaancaacctttatccattntagctgnactccccantttgcanaagcccgcaatcccttttttcccngnaatggtatcaanttcanttnccanttncaaaggggcannangttgctttcctanagttaaagggnattgggaaatccccaancccc

SEQ ID NO: 27635 - DNA, 567 bp, Homo sapiens
  misc_feature (1)...(567): n = a,t,c or g
gacagaatttaataaccaagttgtaaatagagactgagtgaggaggatgaattaaggaagacattgagtacaactttttggtangtgaaaaactcntaaaaaaatacgtgggcaaagatcctacttgattcntataatttaaaaatctcccagttagtaaacaaggctangtggacatttgcatgtgatgtgaggtgtgtgttctgttttgtaatgtgaggactgtganccatctcctggacttgantatccattanatattgaaaatacnatttgagaactcaagagacnccaatgcagttacaaaacccgcaccanttgattccgtcccnaanttaatgcctttatggganaaacgttntgcaagtnggcaaaatngcaaccanaattttgtggggttccgggctgttnggnaaacccaattggcaannccgngggcannttcaaacnttnaaaaaatnnagggcaaaaaantnaagggnccntntcaaanccnnnccccccnnaaantncccggcccncaaaaantnacancggcccccnnggcncnaaatnnaaaaccacggg

SEQ ID NO: 27636 - DNA, 551 bp, Homo sapiens
  misc_feature (1)...(551): n = a,t,c or g
gcagcttctgtgtggtgggcactgagagcanaaccgcattgagtcggagtggagcacanaagtgtaggtccttttgcgctgtttcaagctaaacccgtgtcactgatgccgtacanaagttacagaatgggacgccaccccaaacattacgtcatccgctgaccanttccttgcggtcttcccaacgtccaaatcgccatataatccgaaggatggggtcctcncnccgttcaactcctggggcaaancgttaaccgtcgntcctccctctggnggaaggncttggacggggaanggaattnggacctnggaaggatccggaacctaaaggntcccaaggnaaccggaacaaggtcccccgggnaacccgggantttcngnccccttnaatttgnncaanaatcccggatgggaaacccgggncaaaaattcccattggcccaatnggaattcccnaaaccccaanccggttttccaaangttnaaangggtntttntcccnccngaaaatantttntnggaaannaaangtnttaangttaaaanccctt

SEQ ID NO: 27637 - DNA, 568 bp, Homo sapiens
  misc_feature (1)...(568): n = a,t,c or g
gctggggggtacggaananaagctgggatccctcctgagtcctaatctccctccctggtcagcattcttcatggcaggaacttttccccaaactttccaatcccttttggctgttctctgagaactctggctcaaagggtagttgaggananggaatgttgggaaggtnagctcctnacggncctacctaaaaacccggnctgtctcaaaaagggtcttaanaaatnttaccgaaagactcaaatttccccctnnatgactccaaggtgcctntccctgcaaaatccaaaatcnaagaaccgggggaaaaggcataactcangttcagcctccaaanggtngggcaaatccaaaagganagggcacattggaaaaggnnntttananaaaccnnttcancaaattccccaaaaacaattnnnnggnaacccttaaaccttaaaggagtgtgtgntttggnacaaaaaggggaattttttncnanccgntngggggacantggncccctnncnccttnacccnganaangnnncggaaaaaaaaaaggttttggngggnnccaantttt

SEQ ID NO: 27638 - DNA, 560 bp, Homo sapiens
  misc_feature (1)...(560): n = a,t,c or g
gcggcacgagggacagctctcttctctcctggctaaagctgctctcctggttcanaagacaggctggatgagatctcaggccgagctctgaaatagggaggtaatcctccagcacctgtgtttcctctaacttgctgtgtgacctccanccggtcactcaccctctctggacctcatctgtaanaggagccagctggataagatgatttctgaagacgcttccatggtgggcactgaggcacaaaggaggccaangaaangttgtttgttcaagcatgcattcatccgtgacacatgagtncctactgaggacccatnaacagaacgggatacaganattaacaatttgggtcngtccaagtttgtcaaaaagnggggctgggccaactctgaaagcagaaaantncncaanaaacttgccgttggccaatctanaaaatccttntgaacggnggnatcccaaantgggagaaaaagtncaaaattttttaatccaaaaagggttnangncctnaataccnccggnngggaaaggggttttcanttccgggaaaataaaa

SEQ ID NO: 27639 - DNA, 445 bp, Homo sapiens
  misc_feature (1)...(445): n = a,t,c or g
gggggaaaggcagtgctcggatgancccagtatgatggtcaggattccctggttcatttagctgctccctctgtggctgggctcacctcttctgctctgtcctcctcctccaggaggggatgcatggcaggaatgtcctgtcacactcacagcagggcaggggcagtgtgcacagctggggaggcacaaggcctggagcccacctctagctcagcctctcactctccagatacctcatctggcttcagttccctcatttacaacaggggaanatgtcagccccgcctgccttgtacagttgctgtgaggtggtaatttatggggtggtgctttgtaaacatataangtagtatgannnnnnnnnnnnnnnnnnnnnnnnnnnnnnnnnnnnnnnnaattttancttggaatgggcctcntttanaantcctnnactggaaaaaaa

SEQ ID NO: 27640 - DNA, 522 bp, Homo sapiens
  misc_feature (1)...(522): n = a,t,c or g
gaaatttccaaacaccagcatcatcaagccagtcatgaatctccagcatggtgggatctgggtgcagaactcaatggctgtcatcagattgaggtancaggagttgctcacttgccttcctgccagccagacccagtgcgagatttgttactcagggaactgggagatccccgtgatgtgtttctcaccgttcgagtttgattgtgaaaagagtctggtacctcacacattanatttgatttcagaantcctcaccgtgggcccatagtttacctttcaactcccccttcagggagatccttgttaagtttcggttttctggtaataanggcanttttctgaanagtacaggattttttaaatgntttaatcgagtccnattnagtttccatgggggatagattnggtattnnaaccacgattncaggttttaananaaaaccctntngggntaancctntattaaccngaaataaggaaaanttngntncntttatttgatncnnagcttcccantttggc

SEQ ID NO: 27641 - DNA, 391 bp, Homo sapiens
  misc_feature (1)...(391): n = a,t,c or g
gcttgacgttangngnaaatatcctaagggtttaaagagcagattttcctgaaaagctaaaataatgactttgaagggcgtggactttgtccccaaaagttcccacggtcactgggctgtgaccagcctccccaggggtgttgggaaattattgctccaaacccactggggccacgcggcagcttctgtggctccaggaggccagtcgtcgaagtggatgcagatactcttggtcttcataaaccttcataacaaatcataaaaatggtgtgtaatgttacatgttatatgcccgatcacggatttagagatggtgaaaagtagttgtcgaaaggggccacttgctgcactcatatgccatcagcgctgggcacactcactctcttgcaga

SEQ ID NO: 27642 - DNA, 511 bp, Homo sapiens
  misc_feature (1)...(511): n = a,t,c or g
gcagattatggaggattctgtgactcttgccaaataattttgacttcatcctgtaggtattaagtcattaaggcgttttaaatcatacagtcaggtttgtatttctgagctgtctataatgaatgatatagaaggtggtttcgaaggaggagactccagacaaggaaaacagaaatcttatgttgccaagttgtctttgctcttaggtgggttatcctggagaaaatggactcaggagctaatactgtctacagtggagcttggtgcaattagaagcaaaagactgtacctaactggaatgaggttactttttatggcttatcaaatgcttgtcctnnnnnnnnnnnnnnnnnnnnnnnnnnnnnnnnnnnnnnnnnnnnnnnnnnnnnnnnnnnnnnnnnnnnnnnnnnnnnnnnnnnnnnnnnnnnnnnnnnnnnnnnnnnnnnnnngncttttgcataaaatacnaaaattaacttgggcgtggnggncacgttcttgaatcccagtt

SEQ ID NO: 27643 - DNA, 514 bp, Homo sapiens
  misc_feature (1)...(514): n = a,t,c or g
ggctgctggttttcatagccttggcacctgttgaatgngccaaagcagagcggggagagactctgggaaaagcctcagacaggagtgtccacacctatactgttcccacctgaaggctactcatcttaaggagtaagcactcttcggtttgttggaaccctttggtcactttccanagggctgatatgactgtgtttggcagttctgttgaacttcgtggttgtttttgtgggagggaatggttgatcttcctctgttgtaggaaggaccctcctcaggcccggtgtcagtgctttgtgaanagttgcctggcagtggggtgcaggaggtgtagagctagagggcttgtggcaggttttgcaggagcccaggtgagatgctgaacttggtggtgtcattggggaccgggtgagtgagcacctatgagccatacagggttttccacgaagagctgagaaaaacaattgagccagtcacatagcncatggatgttcaacccattgggggaaacagg

SEQ ID NO: 27644 - DNA, 447 bp, Homo sapiens
  misc_feature (1)...(447): n = a,t,c or g
ggaaaattaaattttttaaaaaactagaacgctcttctttgggtgttttgctgaaatcctgttttgtatttgtttctttacaacaggtgtaggtataggaggtcaagaaaaggagttcggtaaagggcatagctaataacaaccacacattnnnnnnnnnnnnnnnnnnnnnnnnnnnnnnnnnnnnnnnnnnnnnnnnnnnnnnnnnnnnnnnnnnnnnnnnnnnnnnnnnnnnnnnnnnnnnnnnnnnnnnnnnnnnnnnnnnnnnnnnnnnnnnnnnnnnnnnnnnnnnnnnnnnnnnnnnnnnnnnnnnnnnnnnnnnnnnnnnnnnnnnnnnnnnnnnnnnnnnnnnnnnnnnnnnnnnnnnnnnnnnnnnnnnnnnnnnnnnnnnnnnnnnnnnnnnnnnnnnnnnnnnnnnnnnnnnnnnnnnnnnnnnnnnnnnnnnnn

SEQ ID NO: 27645 - DNA, 537 bp, Homo sapiens
  misc_feature (1)...(537): n = a,t,c or g
gcataagtntggattttgncagaanatngggggggcantggggatcacaggctagngtaaagagattaagagcccatcctgcctatcacagcttcaataanaagtggaacttgcctgtttattttcaaataagatttagagaaatagcgggatccttanaancagcacttacagatgtcctggaanatgccccagctgaaagtccgtattgccttttggcttctcatagaacttggagcagccttaggaggtgttggtcatatgagatgttcttgccattactggtgcatcgcctgtggagactcactctgcagattttggcacgatactctgtgtttgtcaatgagctttcactcaggcccatttctaatgaaagtcccaaggagatcaagaaacctttggtaactggtagcaaagaccttcatcacccaaggnaacacttgangaccaaggaagtggtccttccgaaacaaancttggggtttccatttccgacttaantcnngaatttngttnnaaactgganaaacttccaga

SEQ ID NO: 27646 - DNA, 528 bp, Homo sapiens
  misc_feature (1)...(528): n = a,t,c or g
ggatcaagagggggtgcaggcatggagatttatggagcccggtcttggagccaagtcccgaactgggctgtctgcaaagaactcacccgggcaataaccctgcacactggtctcatgagccccattagattgatgaggaaactgaggcacagaaaggcaaagtcctatactcaccgtctctcagctggtgtgaggctgggccaggatggaaccccagactctccgaggctccccaccacaccctgctgctgaaggctgctcagcgaggctgtgccgagtgctgggggggtgtgggtgggcaggggacggattgattagttataagcacctccacggtgcttgagatccagcttctctgtggcccaatccgttgaagggcagatttnttaaaccaaaaaaaaaannnnnaannnnnnnnnnnnnnnnnnnnnnnnnnnnnnnnnaaaaaaaagnttttttnttaggngggcnggtttttttctttttgggggggggntnttttttntngnnnnggggggttttaaaaaa

SEQ ID NO: 27647 - DNA, 531 bp, Homo sapiens
  misc_feature (1)...(531): n = a,t,c or g
gaatttcttttaggggaagtgtcaagataacnggtaacccggnccagaaagccatttccaggctcgtctgtgtgtgtaggcatgtggttttattcttgtaaagatgcattgaccaaactctggaacacagatctgacactggaaggcaacccactcgcatgtggatgctgaagggcactttattttgtatcctgaaaagggcctacagaggccagtacaaaactctcaaacaaaaggaagttgactctgctttgaggggaaggtggcatgccagcactagcttnnnnnnnnnnnnnnnnnnnnnnnnnnnnnnnnnnnnnnnnnnnnnnnnnnnnnnnnnnnnnnnnnnnnnnnnnnnnnnnnnnnnnnnnnnnnnnnnnnnnnnnnnnnnnnnnnnnnnnnnnnnnnnnnnnnnnnnnnnnnnnnnnnnnnnnnnnnnnnnnnnnnnnnncgggagcctgtatnccactnttcagaggccangcagganaatccttgaacctggaaagcaaaggttgaatgagcccaaaa

SEQ ID NO: 27648 - DNA, 548 bp, Homo sapiens
  misc_feature (1)...(548): n = a,t,c or g
gataataggannnnnnnnnnnnnnnnnnnnnnnnnnnnnnnnnnnnnnnnnnnnnnnnnnnnnnnnnnnnnnnnnnnnnnnnnnnnnnnnnnnnnnnnnnnnnnnnnnnnncataatgcgagagtanaataaatggtggttaccaaggactggggtgcaaggatgggaaattgctaatcaacaggggtgnnnnnnnnnnnnnnnnnnnnnnnnnnnnnnnnnnnnnnnnnnnnnnnnnctgtgcctctagttaacagtattgtattatgcacacaatttttaanagggtagacctcatgttgtgttcttatcacagcataataaaattttcnttaaaaaacaaggccnnnnnnnnnnnnnnnnnnnnnnnnnnnnnnnnnnnnnnnnnnnnnnnnnnnnnnnnnnnnnnnnnnnnnnnnnnnnnnnnnnnnnnnnnnnnnnnnnnnnnnnnnnnnnnncncactaaaagtacaaaaattaccaggatggtggtgggnactgtaatccagctacccggaggcgagnaaanaatncctnaacccgnggaa

SEQ ID NO: 27649 - DNA, 559 bp, Homo sapiens
  misc_feature (1)...(559): n = a,t,c or g
ggtctgcttcgagggcaggaaccccatccatgcagtacaggcgctgggcanagagtcaaggcccagcagccatcgaccatggatggtttcctccaaggaaaccggtggggttgggctggggagggggcacctacctaggaacagccacggggtanagctacagtgattaanaggaaagcaannnnnnnnnnnnnnnnnnnnnnnnnnnnnnnnnnnnnnnnnnnnnnnnnnnnnnnnnnnnnnnnnnnnnnnnnnnnnnnnnnnnnnnnnnnnnnnnnnnnnnnnnnnnnnnnnnnnnnnnnnnnnnnnnnnnnnnnnnnnnnnnnnnnnnnnnnnnnnnnnnnnnnnnnnnnnnnnnnnnnnnnnnnnnnnnnnnnnnnnnnnnnnnnnnnnnnnnnnnnnnnnnnnnnnnnnnnnnnnnnnnnnnnnnnnnnnnnnnnncaaaacaaaaaggaaaacaaatgatgaaggctcanaaactgaaaccagcatgttctgcccctctatttgcatggtttgcaatgctcnaattcagnaaacttcactgagntagtttcat

SEQ ID NO: 27650 - DNA, 404 bp, Homo sapiens
  misc_feature (1)...(404): n = a,t,c or g
gacttaaagttgtgggcatagngagtttagatgttgcttggagtgaacattctttgctatagtcatgtttcanaanattggttttttctgactggattaagtgcagtgaggagctgttgagcagcattggttgtgctgtcaggctgcccatccgcaccacagatgcctccaggattatgctcacagcacggttaacagagacttcttcagctagcacaggtctcgttgggcagcttttttaccttagctaacttattcctttgcaaaagaaagcagcctctgcagtcttatttataatgctttccctcagctgaagacagcctaatttgaggaaatattgccctaaatgaaacacactgtaaagaagactgcttggcctatctcagcactccatttttaccctt

SEQ ID NO: 27651 - DNA, 376 bp, Homo sapiens
  misc_feature (1)...(376): n = a,t,c or g
gggcgtggcgattgtacaatcctataaaaaaaaagttgaatggtacactttaaatgggatacgtaatcatatatgatatacagtcacatcatgtaacttacatgatatgtacattgtanataaataaagccttaaanaaaaaaacnctagaccagnttagttacctctaagatcnctttcnanatacaacatcnctgaaacactgaaaaaaantcncaggcaccatgcanagnggcccatgcctgtanccccaaaantttggaaggcnanggnangtggancacttgaggncaggaaatggcnaancccnancncnactaanaancactggggctttnaaatggaaanacccnancccnnctaaaanttgaaaatt

SEQ ID NO: 27652 - DNA, 484 bp, Homo sapiens
  misc_feature (1)...(484): n = a,t,c or g
gaatcctcaaaacttcttcaatttagcatgttgtcatgacactgcagaggctgaagctcagagaggntgagccctctgnnaacaagtcntactgctaacaagtgataaagccagagctggaagtcacatctggactccaaacctgatgcttctcagcctgttgccccttttagagttcctttttaatttctgcttttatgacttgctagatttctacctaccacacacactcttaaatggataattctgccctaaggataagtgattaccatttggttcagaactagaactaatgaattttaaaaattatttctgtatgtccattttgaattttcttatgagaaatagtatttgcctagtgttttcatataaaatatcgcatgatatacaattttgattgngatttcctttaaggnagtactcccctgagccanagattcccaaagctgagtttgganagttccaagtanngacagnnctacca

SEQ ID NO: 27653 - DNA, 624 bp, Homo sapiens
  misc_feature (1)...(624): n = a,t,c or g
gggaatgagtgggcatcactcaccgagtatcccagggagaccttctccttcgttctgaccaatgtggatgggagcagaaagattggntactgcaggcgcctcttgcctgccggccctggccctcgccttcccaaagtgtactgcatcatcagctgcatcggctgcttcggcttgttctccaagatcctggatgaagtggagaagagacatcagatctccatggctgtcatctacccgttcatgcagggcctccgagaggcanccttccctgctcctgggaaaactgtcactctcaanagcttnatccccgactcangcactgagttcatttcactganancggccctggactcccacctaaaacatgtggattttaattctctaatgcactgttccantttttgntcagctncctcanntctttgcnncngccgttgctggnaagaaaaatnacctcctggggaaggtncaataacctntcccatncatncacgccggcngcggactgnccaancctnagctggggcaaactaaatccggtnntcccnaaanccttctggcacntttgtngccnacccctcaggttgggnnaaannccttcacaaggaggcttggaanccttga

SEQ ID NO: 27654 - DNA, 618 bp, Homo sapiens
  misc_feature (1)...(618): n = a,t,c or g
gaactggataattactttctttccgatatcccctcaaactgtatatatagcctccctactttgaacattcattttaagataattggtgcttgagaacccaaatctaaattttttaattccaagaactgacttcgtattaacctgagttaaggttgttggttttaannnnnnnnnnnnnnnnnnnnnnnnnnnnnnnnnnnnnnnnnnagagagacagagagagagagagaggaggaagtaggagttcgttcattttacntggataaacttgcaaactggatactaagacactttcatgtcagttttaacagacatctgcntacttcctcncaggtttaaaatctatcaagaacgacaactcantgtctccngcatttttagcttatgttaatacntatgtntttttagctannggtaagtggatataaaacatatagcgtntcactagatgattgaaanatntctgaaaaactanaattggccgtgcgcggtggctcacgcntgtaannnnnnnnnnnnnnnnnnnnnnnnnnnnnnnnnnnnnnnnnnnnnnnnnnnnnnnnnnnnnnnaaatggggaaaccatctcactnaanncnaaatttngcngggggngggg

SEQ ID NO: 27655 - DNA, 609 bp, Homo sapiens
  misc_feature (1)...(609): n = a,t,c or g
nnnnnnnnnnnnnnnnnnnnnnnnnnnnnnnnnnnnnnnnnnnnnnnnnnnnnnnnnnnnnnnnnnnnnnnnnnnnnnnnnnnnnnnnnnnnnnnnnnnnnnnnnnnnnnnnnnnnnnnnnnnnnnnnnnnnnnnnnnnnnnnnnnnnnnnnnnnnnnnnnnnnnnnnnnnnnnnnnnnnnnnnnnnnnnnnnnnnnnnnnnnnnnnnnnnnnnnnnnnnnnnnnnnnnnnnnnnnnnnnnnnnnnnnnnnnnnnnnnnnnnnnnnnnnnnnnnnnnnnnnnnnnnnnnnnntctgttagataagctatcaaaatgcanctgttgttttgtttttggcncactgttttcntggttgtanctaatangtggaaaggcccatttccaggtttgcgtagaanaagcccanaaannanagtctcaagacccccgctctggactgtcanaagctagnacccgtggtaacgggactaganaantcccgaancccccagcttctgtcaatcagctccgtcaagtcaacctgaacccacccantcaagcnnnctgtgngnaangcggtgtcttaggganagnctgaaccntacttgtcngtgttccccngcccattt

SEQ ID NO: 27656 - DNA, 529 bp, Homo sapiens
  misc_feature (1)...(529): n = a,t,c or g
ggaaaaaggaaaaattannnnnnnnnnnnnnnnnnnnnnnnnnnnnnnnnnnnnnnnnnnnnnnnnnnnnnnnnnnnnnnnnnnnnnnnnnnnnnnnnnnnnnnnnnnnnnnnnnnnnnnnnnnnnnnnnnnnnnnnnnnnnnnnnnnnnnnnnnnnnnnnnnnnnnnnnnnnnnnnnnnnnnnnnnnnnnnnnnnnnnnnnnnnnnnnnnnnnnnnnnnnnnnnnnnnnnnnnnnnnnnnnnnnnnnnnnnnnnnnnnnnnnnnnncttaaagactccgtcttaaaaaaaaattaagaatttgtattctcataacatattcagttttaagcttgtagcttttaaatctttgagcacgtaataaaagctgcgtannnnnnnnnnnnnnnnnnnnnnnnnnnnnnnnnnnnnnnnnnnnnnnnnnnnnnnnnnnnnnnnnnnnnnnnnnnnnnnnnnnnnnnnnnnnnnnnnnnnnnnnnnnnnnnnnnnnnnnnnnnnnnnnnnttaccaagggtggtccatcctgtaa

SEQ ID NO: 27657 - DNA, 534 bp, Homo sapiens
ggtcttcaaggacaaatctgtaagtttcttatttctgtagtgcaagtaaaatttcactttttgaaactatagagagatccctttctgattagcctacagaacttaaagtgagggaaccatttcctctcacagacaaagaggcctgggatattaggactttggggtttgagagcatcatggggcagacagatggtggatggtctggacaagaagcgagtaagccactgcggttggtcatactgaagggaattgatggcaagaggatcccctgagcaagtcagaagttactctcatcagtcgttcatggtcacaacctgaggtactctgctgagtgggcaaggctgaagaagaggcctgtggaatgcagcattacctgctggacagagcagggcaggcagttctatgccttggagctcctgactgcagggactctgtccccacactcagaaagactcagctcactcaatgagagaatgtgatttactttatagaacgtataatcaacttgttgaataattgtccaataaggcgtca

SEQ ID NO: 27658 - DNA, 527 bp, Homo sapiens
  misc_feature (1)...(527): n = a,t,c or g
gcggcgtggggaatgagtaaccaaccagaaaagggatcagctattactaggcagctagagaaacacaagaaactttcccctgccctcttgtcttcttatctttggcatactgggagatggggagggtcatgggcttagctacccagccctctctcactcagatcttgtctttcctctcagttagcctcaaagtgcctgtgaatgaccctgaagagactggtgaacataagtagtgtgtacatcaacctgcaaaaagagatttactcatacgttcatcaagcattgttcattcaacatacattcattcatttattcattcagcaagaatttatgaaacacttaaccactgcaaagtcttgggtttgtggaatanaacangggaaaggatgcaananaaacgggggggggggggggngnnaattnttaangnnncngnttttnnccnnagccccaaangctttttnnnccccnggcaggnganttttnnngnnntacnnggggggggtnttcnnangccngggnccaaa

SEQ ID NO: 27659 - DNA, 524 bp, Homo sapiens
  misc_feature (1)...(524): n = a,t,c or g
gcggcacgagccccacgccactccactcccccacccccaggctcagaaaaaaaagattanttttatttaggcattttcaatattaatacagacctcatgcgtgnatttacatttcaatatgtagttcctctataatttagctgtttgttggtctgcgcaaagccatccatggccgctgctctcacccaccaggcggcctcgtgcccctagccatttcatttttgtantttgctttataaatggaacacnnnnnnnnnnnnnnnnnnnnnnnnnnnnnnnnnnnnnnnnnnnnnnnnnnnnnnnnnnnnnnnnnnnnnnnnnnnnnnnnnnnnnnnnnnnnnnnnnnnnnnnnnnnnnnnnnnnnnnnnnnnnnnnnnnnnnnnnnnnnnnnnnnnnnnnnnnnnnnnnnnnnnnnnnnnnnnnnnnnnnnnnnnnnnnnnnnnnnnnnnnnnnnnnnnnnnnnnnnnnnnnnnnnnnnnnnnnnnnnnnnnnnnnnnnnnnnnnnnnnnnnnnnnnagactctg

SEQ ID NO: 27660 - DNA, 528 bp, Homo sapiens
  misc_feature (1)...(528): n = a,t,c or g
gctccatctcaaaaaaagcacancaancaaaaaaagaattggccaccctgggaagtccattcctttggagtctgtgttaccattcncaataaacctaatgagggctggnanaggggaactggncantctctccttgggctttcaccgtacctcatgccatgtcacctgtaacagtgttgtagttacctgcttatgtctttgtccttgagggcaaggcccatatttanttttanttccagtncttggcatatattantaaacaggtgcttaaaatgtttgtacaaatgagttaaggtggagggaggaganttgaggcacangtcacctggctttggnttcngtcttcttagtaaggtgaacagtgagtcatccacacagattataatggtancagagctggagtctacagctccttgantatgaaagtccccttgagtgtgaaanacanaatggtggtccggggaagagaangggaattaaaangtaagtggnanaaggcctaattgcaattgttancttcacccaaca

SEQ ID NO: 27661 - DNA, 486 bp, Homo sapiens
  misc_feature (1)...(486): n = a,t,c or g
gaaattaaaacctgctgtcaacactgatcaggtcaagaaatagaatattgacaacccccaagtagatcctcatgtgaccttcctgatccaagataattattctgcttttctacatagcttcatcacttattaatagacttaaacttgtaattgcttcattttcaaaaccttagtggnnnnnnnnnnnnnnnnnnnnnnnnnnnnnnnnnnnnnnnnnnnnnnnnnnnnnnnnnnnnnnnnnnnnnnnnnnnnnnnnnnnnnnnnnnnnnnnnnnnnnnnnnnnnnnnnnnnnnnnnnnnnnnnnnnnnnnnnnnnnnnnnnnnnnnnnnnnnnnnnnnnnnnnnnnnnnnnnnnnnnnnnnnnnnnnnnnnnnnnnnnnnnnnnnnnnnnnnnnnnnnnnnnnnnnnnnnnnnnnnnnnnnnnnnnnnnnnnnnnnnnnnnnnnnnnnnnagtgataccctgcctcaatacaaaacaaacaaacaa

SEQ ID NO: 27662 - DNA, 475 bp, Homo sapiens
  misc_feature (1)...(475): n = a,t,c or g
gnnnnnnnnnnnnnnnnnnnnnnnnnnnnnnnnnnnnnnnnnnnnattcaactattgttactccaattattttgaggactgaccctcagggatttttcttttactggacagatcaaaacaaggagacagagctactggatctcagccttgtcaaagatgccagatgtgggagacacgccaaagctcccaaggaccccaaattacgtgaacttttggatgtggggaacatcgggcgcctggagcagcgcatgatcacagtggtgtatgggcctgacctcgtgaacatctcccatttgaatctcgtggctttccaagaagaagtggccaaggaatggacaaatgaggntttcagtttggnaacaaacctgctgggccaaaacatttcaagggatgcatttctgggaaaagctatactaaacttaagctgcaagtcactccagaanggggtattcctctcaaaaacatatatcgcttg

SEQ ID NO: 27663 - DNA, 477 bp, Homo sapiens
  misc_feature (1)...(477): n = a,t,c or g
gagacagtgaacaccaaataaataggatcatttcagatcataataactgatacaaagaaaataatttaggatgaaatgaaggaatgtctgcaagcaattggggaaggtctccctaaggaggtgctatcaaaactgaggtccaaagaancaggccctgtaaaggtttgggnatncnnataaacatntcagacttcnaggtggaaaaaaccanaancccttcagancagggtggatntaccnttaaaanccacnatntggttnaaacccaagggtactgaaccagggagggncctttgccattgtntcaaggaggggnatgaatncnaaagcccaccaaggccaggcaaggttgacccatgaccagaccaggcccaggtgaagccttggnaaccccagctcaggccaggcccagctcatcaactggggccacactggaatgtgggccctggttgctgaaggtgtttcaaattttttttt

SEQ ID NO: 27664 - DNA, 473 bp, Homo sapiens
  misc_feature (1)...(473): n = a,t,c or g
gcattctttccctgttgcagaaatataatgtaagtgggtaaagctcactgcctctgagtgcatgtgtatcttggcctgacagtctggcagctgcaatgtgtagaatatgcttattcaacataaagggtcaactcaggaaaagaaccagagacggtcaagtacaatgtttcagttcccaaaatattcaaggccttttataatgggtaagaactcatttcaaaacctatacaaagaacaaaaaccttaataaattgttattgatttcttttactgttatgagtattttcataaaaccagctaagcctcatatagttctagattgatccacacattgcttttggatcccataaattgcattcaatggagatttatttatctggcagctaaaatacctctaatcagtgatgtgaactggntcaaaaaatactanactccttggaataaatagaacatcaaaggggtattcaagaatg

SEQ ID NO: 27665 - DNA, 467 bp, Homo sapiens
  misc_feature (1)...(467): n = a,t,c or g
gctggagacggaaggtggcgatggccgcacagcactgtgaacatacttcatgccacggcactgcacgccgaacagtggttcaaatggcgcattttaggtcatgtattatttcaccacaatctttttaaaagggggagtggtaacctgcagaacaatgatgaagtcaaaggtgaccttaacacagtttccggtggagaaaaagctcacaggagtgggtagagagagccctttggagagtttccatggcagagccagcaatgggacacctggtggggacatggagtcaaggaaagccccaagcttggccacagtacagctgcgatgccggcggaaccatgtgaaggccaggggcagctgcaggcacaaagtctgagggacaccaagcactcattgcaganggatggccgcggcagcatgaggcantatgccttcctaacgaatgcaggaaagccanagaaggctttaaa

SEQ ID NO: 27666 - DNA, 463 bp, Homo sapiens
  misc_feature (1)...(463): n = a,t,c or g
ggagctagcacatgagcttcaataccctgtaatgtgaaaacactgctcttccacgaaactccccaacatttgaccaggtccagagggtggcccatcaggggacccactacaggtccttgaagagtgaggaaaaaaaacaatcctctctcaaaggcagacttactccaaggctaccatcactggaacctgacacaagcatctgagggcatgaaacacgagcgttctcataagagagtgaaatctcttccccggggaagacctgccacaagacaagggccctgggaccaggatcggacagctctgtggcaactggtncangntcccatgtttgncaaaaccctgggtaaattaagcctgaatcctgncannctcaaaccatgtnaaaaatgntttcctaatgnaggttttgtgangggtcnngaatgcttttccacaatactgggatcaacaaaaaagggtaaga

SEQ ID NO: 27667 - DNA, 519 bp, Homo sapiens
  misc_feature (1)...(519): n = a,t,c or g
ggctcggcgtggttgtaatgatccanaacagnacacacacctgaatgccaaggagctcanattctggcccatgggccatctgggaaaccaanctcaccanccttcattccagaaagccaagggcttcgactcctaaagcaaggtttaccctcaagggcctctcctccttttanctagctatgttgatggcaagctccangcanggtgcaaatagctacctctaaatgcacaaactcatccctttctttgggacanaggacaanngtcaantcacantgatgcccaacctacccatggccaagggaacanggtaaattacacnccagagaaggacaaaggtggcaggaaaaatacacagaaancantgtnatgctattttatattttgtcagttttatctcagctanctatctctttctangactattccccaaaagaaattccattttcattacaaaactagtttcttaggccagggaannnntgctgaactgttancantgccattggtatttctact

SEQ ID NO: 27668 - DNA, 505 bp, Homo sapiens
  misc_feature (1)...(505): n = a,t,c or g
gggcctctgggtccccaactctaaggccagcgaggccaaggagggagaggaggcaggtcctggggacccattactggaagctgttcccaagacgggcgatgagaaggatgtcagtgtgtgacctgccccagctaccaccgccacctgcttccaggcccctatgtgccccttttcagaaaacagatagatgccatctcgcccgctcctgacttcctctacttgcgctgctcggcccagcctggggggcccgcccagccctccctggcctctccactgtctccactctccagcgcccattcaagtctctgctttgagtcaaggggcttcactgcctgcagccccccatcagcattatgccaaaggcccgggggtccggggaagggcanaggtcaccaagctggtctaccaagtagttggggaaggtccccagccaaggggccggntctcgtcactgggctcngttttcactgtncgtctgtgtcgtgtcntcaattgggaaanaaaa

SEQ ID NO: 27669 - DNA, 499 bp, Homo sapiens
  misc_feature (1)...(499): n = a,t,c or g
gcggcacgagattgtattttgagaaatctattttaggacatcaggtaagagtcaactttgcaaatgcatttatcctcctctgtttcatcctgacttcatcccctaagaagattaaccaacatttcataatttgttttgacagagaatgacatcagagatggataagtatgtatgcgttggcccctgagtcccgaaccaaaatcaaggtactttatagaagggtgcaagctctgttccgacacctttctcccagtttccccaaatggaaactttttttttttttaaaanggggtcncaaacngtcncccgggcnaaanngtagnggcccnanannnnnnnnnnnnnnnnnnnnnnnnnnnnnnnnnnnnnnnnnnnnnnnnnnnnnnnnnnnnnnnnnnnnnnnnnnnnnnnnnnnnnnnnnnnnnnnnnnnnnnnnnnnnnnnnnnnnnnnnnnnnnnnnnnnnnnnnnnnnnaggngccncaaancctgantcttacc

SEQ ID NO: 27670 - DNA, 498 bp, Homo sapiens
  misc_feature (1)...(498): n = a,t,c or g
gnnnnnnnnnnnnnnnnnnnnnnnnnnnnnnnnnnnnnnnnnnnnnnnnnnnnnnnnnnnnnnnnnnnnnnnnnnnnnnnnnnnnnnnnnnnnnnnaaatagtaataatggaggcaggatttgcatctaggacatttggccccagagtctgtgctcttaagcaccacaggatggagtccgtctattatggaagttgttttgtgcgtnnnnnnnnnnnnnnnnnnnnnnnnnnnnnnnnnnnnnnnnnnnnnnnnnnnnnnnnnnnnnnnnnnnnnnnnnnnnnnnnnnnnnnnnnnnnnnnnnnnnnnnnnnnnnnnnnnnnnnnnnnnnnnnnnnnnnnnnnnnnnnnnnnnnnnnnnnnnnnnnnnnnnnnnnnnnnnnnnnnnnnnnnnnnnnnnnnnnnnnnnnnnnnnnnnnnnnnnnnnnnnnnnnnnnnnnnnnnnnnnnnnnnnnnnnnnnnnnnnnnnnnnnnnnnnnnnnnnnnnnnnnnnnnnnnnt

SEQ ID NO: 27671 - DNA, 501 bp, Homo sapiens
  misc_feature (1)...(501): n = a,t,c or g
gnnnnnnnnnnnnnnnnnnnnnnnnnnnnnnnnnnnnnnnnnnnnnnnnnnnnnnnnnnnnnnnnnnnnnnnnnnnnnnnnnnnnnnnnnnnnnnnnnnnnnnnnnnnnnnnnnnnnnnnnnnnnnnnnnnnnnnnnnnnnnnnnnnnnnnnnnnnnnnnnnnnnnnnnnnnnnnnnnnnnnnnnnnnnnnnnnnnnnnnnnnnnnnnnnnnnnnnnnnnnnnnnnnnnnnnnnnnnnnnnnnnnnnnnggaaacaactgagtaggtgtcctcttggtgttcctgagaggcaggcctttgaagaagaaacaaaatggtttaacttctgcctatgtaatccccatccctcctccccaaatacacttactcagacagagctacatttcttccttatccctgtacccttctgaaatgactgagatttatcanatcttgcatagtttaaactttttttttgtccagttaaagattgcattggnttctccagtaaaaatgattggc

SEQ ID NO: 27672 - DNA, 496 bp, Homo sapiens
gaaatcgtctgagccctccttggctcttacaatgctcacttgttttcacaatgcagcaaaatgaaatgccttagaaaaagagtaacattccagaaaacggtgtaatttatttttcttccttaattgccccatctgtggaggatttctttgctgaacaccacatcaaagggatcttctgcatttaaaatagaagaggcatcatgctgaagagggaggggaaggtccaaccttacactaaaaccctggatggaggatggggatggatgattgtgattcattttttcctggtgaatgtgtttgtgatggggatgaccaagacttttgcaattttctttgtggtctttcaagaagagtttgaaggcacctcagagcaaattggttggattggatccatcatgtcatctcttcgtttttgtgcaagtccctggttgctaataattgtgacatacttggagagaaaactactccaatcctggggcttcgttgtactggggaa

SEQ ID NO: 27673 - DNA, 506 bp, Homo sapiens
gaactgggcatattaactgagtcagacttgagcacaaaatttatgaaccacccacatcctaggttttgaaaagctaatgttttccctcttcttaaccagattaacagatggaagactctgagaagtcatctagagatgtctttagaaatttcaagcacgttttgcttaacagttcatgtcacactttgattctaccagaaggcaagggactgagactaggatgactatgattaaaagaagactgtagatccaaggatgctgctactatggcatcacacttgtatgcagctgtaacaggcaagatcaacattagcctggttcttctaccgtaacagttccatgtgtatacaatggctaagtccattgatagtgggagcagggggctgcaagctcaatgccttgagctggaggggacaggacccatctaaaggggctgctgctgactgttgtctctttggatttgagctcaacattgtgagatttctgaatttacaagaggatgagag

SEQ ID NO: 27674 - DNA, 190 bp, Homo sapiens
  misc_feature (1)...(190): n = a,t,c or g
ggaaggagtttgtgaagccttaataaaattctggaagcttcaaagggctaccaacaatcatctccaggccccctcatccttgcctctaacatatcactaatggtgacatttcatgggaggccttttactcttcataaatatatgtcatataaatcctactgganatgtcccttctaatactctggcatca

SEQ ID NO: 27675 - DNA, 498 bp, Homo sapiens
  misc_feature (1)...(498): n = a,t,c or g
gcgcnccagganactgactgctctgtgcccacccggggacccgggcccgttcagccgggctggctggtgcgccctctgcaaagcctgngccagggaggaggcaggctcaaccttcagattcccagggcctctctgtcgctgtcgccgtcgccgtcgcccgaggtcccagcggctctaccagattgttgtggaggcctctcacccgcacagatctcccctgcgaccatgtcttccattaagattgagtgtgttttgccagagaactgccggtgtggtgagtctccagtatgggaggaagtgtccaactctctgctctttgtagacattcctgcaaaaaaggtttgccggtgggattcattcaccaagcaagtacagcgagtgaccatggatgccccaatcanctccntggtcttcgcaatcngaagnnatgttgcancaattggganaagttccgngccttnaaccnggaaanaanatncngaatttncttgggcaagg

SEQ ID NO: 27676 - DNA, 494 bp, Homo sapiens
  misc_feature (1)...(494): n = a,t,c or g
gcaaggtcacagaggtagcaagaagttgaaacaggacttgaactaggatctgcctggctccaaaacctaagtctccaaacatggggttattggaggacctcccagggccagggacttagaagccctcctccttcccttcctgtacctttattcctcaagtctgtatagacttactctgtttttttaacaatttactttttgaataggcaatcatggcacgtggtaaaacactcaaacactgcaactcaatctacagaaaaaaaagtaaatttttctccctcatccccatcctgtggacccctttgcctcattagaggcaaatagtcaccaaggcnnnnnnnnnnnnnnnnnnnnnnnnnnnnnnnnnnnnnnnnnnntcaagtganctccatctcagcctcctgaaatgccgggattacagcatgagccaacaagcctgggcctccntaagggtaanggcttttgggnccaacttaanaantcaaccngggcag

SEQ ID NO: 27677 - DNA, 483 bp, Homo sapiens
  misc_feature (1)...(483): n = a,t,c or g
gnnnnnnnnnnnnnnnnnnnnnnnnnnnnnnnnnnnnnnnnnnnnnnnnnnnnnnnnnnnnnnnnnnnnnnnnnnnnnnnnnnnnnnnnnnnnnnnnnnnnnnnnnnnnnnnnnnnnnnnnnnnnnnnnnnnnnnnnnnnnnnnnnnnnnnnnnnnnnnnnnnnnnnnnnnnnnnnnnnnnnnnnnnnnnnnnnnnnnnnnnnnnnnnnnnnnnnnnnnnnnnnnnnnnnnnnnnnnnnnnnnnnnnnnnnnnnnnnnnnnnnnnnnnnnnnnnnnnnnnnnnnnnnnnnnnnnnnnnnnnnnnnnnnnnnnnnnnnnnnnnnnnnnnnnnnnnnnnnnnnnnnnnnnnnnnnnnnnnnnnnnnnnnnnnntgttagantttggataatgggctatttctgctaaggggtggaacccggtgaataagnagatcctactcaatcnancaatanncctgggcgtnngnctnaccggcaaaaatta

SEQ ID NO: 27678 - DNA, 491 bp, Homo sapiens
  misc_feature (1)...(491): n = a,t,c or g
gcatgaacatcttcgagaccatcgtcaacaacaagctcttcttcaacgtctccatcattctcttcctcaacaagatggacctcctggtggagaaggtgaagaccgtgagcatcaagaagcacttcccggacttcaggggcgacccgcacaggctggaggacgtccagcgctacctggtccagtgcttcgacaggaagagacggaaccgcagcaagccactcttccaccacttcaccaccgccatcgacaccgagaacgtccgcttcgtgttccatgctgtgaaagacaccatcctgcaggagaacctgaaggacatcatgctgcagtgagcgaggaagccccggggtttgtcgtcgttgagcagcccccacggctgtcggtcagacncttggtgtgtgttgtcngtgtgggccntgagtgggttcncggancctngcctgggatactggntcaaggatgtgntanccaacaagcaagnnattctaggaaag

SEQ ID NO: 27679 - DNA, 498 bp, Homo sapiens
  misc_feature (1)...(498): n = a,t,c or g
gctcggcgtggaaccctatttttatcttnnnnnnnnnnnnnnnnnnnnnnnnnnnnnnnnnnnnnnnnnnnnnnnnnnnnnnnnnnnnnnnnnnnnnnnnnnnnnnnnnnnnnnnnnnnnnnnnnnnnnnnnnnnnnnnnnnnnnnnnnnnnnnnnnnnnnnnnnnnnnnnnnnnnnnnnnnnnnnnnnnnnnnnnnnnnnnnnnnnnnnnnnnnnnnnnnnnnnnnnnnnnnnnnnnnnnnnnnnnnnnnnnnnnnnnnnnnnnnnnnnnnnnnnnnnnnnnnnnnnnnnnnnnnnnnnnnnnnnnnnnnnnnnnnnnntctcttttcaagatacacagtgaaacatctacagatgagatcatagggnaccaagaattgacnccaaaattccaaattancctaagatgagatcaaccatgaantngcaaaggntaaagctatccaaccaatttggggnaatttccaannaaaaaantntcaggggccaagggggggg

SEQ ID NO: 27680 - DNA, 496 bp, Homo sapiens
  misc_feature (1)...(496): n = a,t,c or g
gtttggttttattttatatatgagttgcttgttctttgaaatttgttctccaggatttctttttcaaatgtcaaagaagcanagttatagggcctgcccctccgacttgaggctgtcactgtccgtgttctaggggtgaggggctgttttctctctgcagggagggtgggcggtgtctacagctcttactgagcctgccaagccagggcgtggtctcccaagcagttaccaacggctgaggagatcaccaggtctcaagcatgttggtggtggccctggtgaatcccgccctgggtgctggagaggaggcagaggcctcacaagaccgagtggacctgcccaaggctcanacgacaccaaggccctcccgtgggggtcnccttcctgcagccaaaagcctctgtggtgccccggccggccttaacgtcccaaaaagggggacaaaatcccnngaatttcanaantccaacggttaancnaggttcccttcccgggg

SEQ ID NO: 27681 - DNA, 486 bp, Homo sapiens
  misc_feature (1)...(486): n = a,t,c or g
gcggcacnagtgagcttcaataccctgttctgattttcctaaaagcttcacactatatannnnnnnnnnnnnnnnnnnnnnnnnnnnnnnnnnnnnnnnnnnnnnnnnnnnnnnnnnnnnnnnnnnnnnnnnnnnnnnnnnnnnnnnnnnnnnnnnnnnnnnnnnnnnnnnnnnnnnnnnnnnnnnnnnnnnnnnnnnnnnnnnnnnnnnnnnnnnnnnnnnnnnnnnnnnnnnnnnnnnnnnnnnnnnnnnnnnnnnnnnnnnnnnnnnnnnnnnnnnnnnnnnnnnnnnnnnnnnnnnnnnnnnnnnnnnnnnnnnnnnnnannccaaanctctcaaaacaaagnnaatttcaanaanncttcacantatacccttagtttnaagngcatattggctagncanananaaatcctaacccannncaaccgcttntggtgaannacaccccatgtgttcaanttggttcacatcttagtcctttcc

SEQ ID NO: 27682 - DNA, 494 bp, Homo sapiens
  misc_feature (1)...(494): n = a,t,c or g
gagcctttactgtgattggnattagaaaggctttcgatatatgccccctggtgaaaatcnacacagctctaattaaagctgacaactttctgcttgaaaatacactgccatcccagagcacctttacattggccatttctgcgtatgctctttccctgggagataaaactcacccacagtttcgttcaattgtttcagctttgnnngagagaagctttggttaaaggtaatccacccatttatcgtttttggaaanacaatcttcagcataaagacagctctgtacctaacactgggtacggnacntatggtngaaacaantgcctangcttnacncacagtccggancntgaaggatataaattccnttaaaccaagcagccaatggntatcanaagacanatgaanggnngnggcttttatncnancaangncncnaatcaangggnttgngggcctganggaatatcaccctggtnaaacaanccccgctt

SEQ ID NO: 27683 - DNA, 506 bp, Homo sapiens
  misc_feature (1)...(506): n = a,t,c or g
gctatcttcttgccctcagagccagaggtaggagaagggaagctggggaccatgctggggaagtttttgggattgcttaaaatccaaacgtgatcatgaaaatggtgtcatttctttcttcattgcctatgaggcacatcaataattcaactccataaaaatatatcctgggttgaaacanttcaggtgtctgacttcccagcttggaaccccattatccagacggcatctgcataaattggttaatgggtgctgttgaagagggtgtactggcattaggctgagctaagcacaanacacatatattcctttcantcttctagtgcctgtaggangaaagggaggcatatgtgtgcttgtgaangattccattcatcagaatcccanacatctgcanttcggcagctagaggctgggttcnttggactccaagtaacttttaacaangcatttnantcnnccaagtttttccannccggttaaccattanggaacttggggcaggg

SEQ ID NO: 27684 - DNA, 495 bp, Homo sapiens
  misc_feature (1)...(495): n = a,t,c or g
ggatcattccggnnnnnnnnnnnnnnnnnnnnnnnnnnnnnnnnnnnnnnnnnnnnnnnnnnnnnnnnnnnnnnnnnnnnnnnnnnnnnnnnnnnnnnnnnnnnnnnnnnnnnnnnnnnnnnnnnnnnnnnnnnnnnnnnnnnnnnnnnnnnnnnnnnnnnnnnnnnnnnnnnnnnnnnnnnnnnnnnnnnnnnnnnnnnnnnnnnnnnnnnnnnnnnnnnnnnnnnnnnnnnnnnnnnncacttgcttcttatccttacactcccccagccccagagaaactgccacatacaccacaaaaaccaaacatcccccaatgaccttagccccattgctccattcactcccaggtgagaattcaggcaaacgtccacaaaggtcacaggcagcgtaatacggttctgtttatacccatatattacccttcaagtctaaagaagacatttcncctaaagatttcatttagngtaccttaaaaaaaatctggggttaact

SEQ ID NO: 27685 - DNA, 526 bp, Homo sapiens
  misc_feature (1)...(526): n = a,t,c or g
gaaataaatccacttgtattcattctttttatgttcaataagttgctacccatactgaccaaatactggcagtttgtagaatgtgcagctaagtaaatgaacagtttataacgcagtctttgtctcatcagggccaaggggttgttttcctgcttttgataaggatcatttctgcaggaaggaagtgtttggttaaacacagtttagctgggtggattccacagtgttttaaagtggagttctgccaggtggctaatcattacagtagttgttgggcttgttangtangtgaagggagggagggggaaaccaagaaatctctcaggtgattcactgtaagctttccaggttagatttgtaacagaaatttaggtgagccagcacttgaccctttggggggacangagatggnttacctcttannttcttgaattattccaattttcctgaaggctcacatggatggcnaattgancanctacactgggctgcccanatggngcaagtggagggaaaanaaccaatt

SEQ ID NO: 27686 - DNA, 525 bp, Homo sapiens
  misc_feature (1)...(525): n = a,t,c or g
gggacatcttttcatatgattagcacagtggaaccacactggtttactcgggacaaagtctgcgactgccatgaacattgcaagctcaataatgccaagcaaagactgagtcttggcatcgggttgaaaataacatttggctatcaacctctgatgcagcatttacaagtttgccctcaaatgcccatagaataggaggaacagggtcaacaacactgaaaatagtcagataaccagttgctggaatctcagtgaaatatccattaactcaaaggcagatggcactggattggntctacccttcacagtcaacacctccaacangatggaacaagaccaactggaaacagctttgtctatcttccactgtcctattcctagactaagagactcagcttcgtaccaagtgggaagtcactctcttctgctcaaaattaagtttttgaaatgaccacaggctcttacnntngntaanttccnacattcagtcagagcanncancaagggaaagggaaggnatttact

SEQ ID NO: 27687 - DNA, 492 bp, Homo sapiens
  misc_feature (1)...(492): n = a,t,c or g
gggcggcctancttgagaaagtttactttcagacttananaaatgagtatgtggttttanggacaaaattcagnaccgccaaagcaggcaggctcagcaagctcaactggctattgcttccnaagtgcattacagcccaggagagtgaacgctgtttacattttttacatgtttcttgggtacagancatgaaactaaattacacagcaaaggccatgctggctgaatgctggtgaccccacttaaaacaaaacaataacaaaaaaaaaanananacnaangaaaaaananaaagaacnttgaagcnaagnncnncaagggntttnaggggcccnnatacntnnncgggganaanaaaaaggttncggccccnnantccaaaanggtttnnaaaatnagggtatcgaaataggggtacccaagttttggcnaaaggngncncnngnggcanggacccncccaacggggccatgaaagggntgggangggttt

SEQ ID NO: 27688 - DNA, 483 bp, Homo sapiens
  misc_feature (1)...(483): n = a,t,c or g
ggaaaaagaaaaaaaattctgacagaanttctgcctcattgatctgcttaatgtgatcagggataacataggatccaagctaatccngccacttancaattcagagctatgcatttagatgaagatctctgtccagccctgtgaaatatgagcagaggagcagaggtaggtgtgtgtgtgtgagacagagagagagagagagggaaagagagacagaangggtgaaagctgttagtaggtttgtaattcttggtaaaaggctggaggggaatctattactttatttttttactagtgtcnccagaggacagatgtaactttccagatagccttgaaaaatgtgactgttattctgcaacaananncaannncagaggcaanagcnatcatttttcatactcccctgaggttcctggcaagaagcgtgagattctataaangagagancccaggtttgcctgtnagctgccctgggcagaactt

SEQ ID NO: 27689 - DNA, 533 bp, Homo sapiens
  misc_feature (1)...(533): n = a,t,c or g
ggtccttaataaaaagatggttagaacctaaggcctaatgtaggtttggtcgtacaaacctttgcccttctcaaacctttgctagataaaatcatatcaggttttcacttacatttaaatccttatttaggcatgtgtgcagccttaatttccatattttaagctatattgcaggttacttatagcaatgctagaattcagtgaaatataaataacactttttgagacccactgaagattgtaaacaaatgcttaaaaattgcaaaagtgtaagtaggcagatgttaatagcagtagcaatcatgcatgtatttcattaaaattaaaaatcagtttatatggaaatctgcaaatgtgctaaagactttaaaggacatcttcatcagagttctttgtgacttggagagagaacacctttggagaaaccactgtacaagcccccggcttgctcattaactgaactcataatgactctgaagcctacaaagagagcaccgacggttttttagnaaaagcatcaagtaactagagtt

SEQ ID NO: 27690 - DNA, 522 bp, Homo sapiens
  misc_feature (1)...(522): n = a,t,c or g
gggaacnactgtttctcnggaactttcctttgtgtggtananggcggagggcctatnaattccnctctgggantcccttgnnctgctgactgtatcccttccttccatgngggtaggttgganccatattcancacccccactcnatanctggccattcaaanagacnaggtcctgtcacatttcacgatncacttccccgagttcanccatnattctttggancggaggcaggaatccnggngaaaatnttgngaggtttnatcaccnccggngagtttgcncncntntgcttgnttctttgcttgcttttgggattgnacctaacaatcgntgtgngnncncagnntaacccgtgggncncnctttcaacagncattccccctgcaaanaggtgtattctcangncanttcccattgtgcnttcctggctcatccatangggctgagnagaagacacnccctcaaggtcctngtaagcanttgancgannnaagatnaaaatcgncaaggcctnggatgt

SEQ ID NO: 27691 - DNA, 527 bp, Homo sapiens
  misc_feature (1)...(527): n = a,t,c or g
ggaagactgatccaaggaggaaagaatcctggtcagataaggactgaaatctgactaatggatttcatagtctgcaggtcattggtgacctacacaagagacgtttcattgaanatgggacagaagcttgattaaataaatcagtggtttctacatcagaggaggttttagggtagttgatcacctgggctccactttagagcaggagacttatgtatccggcattcagctttttgcctggcagaaagcaccaatttccaatttccttaaggccttatattgcagttggtaggactgactttggaagtgtacctactaggatgaccatcagtataggatccactggcccctgttttaggctacaacagtagctatggccaccctagctgtcatttcagttccttgatactcagggaaacttgggcatggttatgggaagcctgcgaatggccaaaattagtanggaacaagatgaacacaaaattcgtcccttgaaaccatggtacaatttggaaatgagtangggg

SEQ ID NO: 27692 - DNA, 530 bp, Homo sapiens
  misc_feature (1)...(530): n = a,t,c or g
gaactggcttataaatctgtctatacttaaaaaaannnnnnnnnnnnnnnnnnnnnnnnnnnnnnnnnnnnnnnnnnnnnnnnnnnnnnnnnnnnnnnnnnnnnnnnnnnnnnnnnnnnnnnnnnnnnnnnnnnnnnnnnnnnnnnnnnnnnnnnnnnnnnnnnnnnnnnnnnnnnnnnnnnnnnnnnnnnnnnnnnnnnnnnnnnnnnnnnnnnnnnnnnnnnnnnnnnnnnnnnnnnnnnnnnnnnnnnnnnnnnnnnnnnnnnnnnnnnnnnnnnnnnnnnnnnnnnnnnnnnnnnnnnnnnnnnnnnnnnnnnnnnnnnnnnnnnnnnntatttgtacatttgtgtacttgccttgacaaaacaaggactanacgcaattnnnnnnnnnnnnnnnnnnnnnnnnnnnnnnnnnnnnnnnnnccnaggcgggcggtcacggggtcaggaatccaaaccatcctgggcaaatggtgaaacccatctctactnnaaaaaaanncannaatttntgggttgggggngggg

SEQ ID NO: 27693 - DNA, 547 bp, Homo sapiens
  misc_feature (1)...(547): n = a,t,c or g
agtactccagttattgatcgtggaatacagcttcataaaatgattcgactcattacgcatgggcttggtggagaaggctatctcaatttcatgggtaaggaatttgggnngcctgaatggttagacttcccaagaaaaggaaataatgagagttaccattatgccaggcggcagtttcatttaactgacgacgaccttcttcgctacaagttcctaaataattttgacagggatatgaatanattggaagaaagatatggttggcttgcagctccacaggcctacgtgagtgaaaaacatgaaggcaataagatcattgcttttgaaagagcaggtcntcttttttttttcaacttccatccaggcangagctanactgactaccganttggacagcattgccagggaaattcaaaattgtgctagattcacatgcagcggaatatggagggcatcagacactggncacagnangacttttnctnggctttgaaaananggngncccaatccctttggcganatcnagcaaaatggccccancctca

SEQ ID NO: 27694 - DNA, 559 bp, Homo sapiens
  misc_feature (1)...(559): n = a,t,c or g
ggactttatccccaccactttacctgaatattttctgtcagtctccacgttggaaatttcagtggtcaattcatagtccttaccagctgccctctcaatggcatttgncacagttgatgactcctacctgcttgaaacattttcttcacttgccttccaggacaccacactttcctgatttttctgtaacctttttacccttcgtttctcaatctcctaaggatttctgctttacctcttaatagaaaggagccctcagggttataccttaggcctctcatcttttatgtccacattcacttggtgattcctttcacttgcaaaactgtaaataccagctataaactattaattcacaaatgtatgaatctagcccatacctcccttctaacttcagattcgtgtatacggatgcctgttcagcatcagcacttggatgtctgatttaaatgttgaaaacatttaangatcccantctntccctctcccccaaaaatccctgnatttcccacattaacttcattcagttcatgacatatatcctccatggcnaaacaaa

SEQ ID NO: 27695 - DNA, 538 bp, Homo sapiens
  misc_feature (1)...(538): n = a,t,c or g
gctttaagctgtttttctttgttgctggtgttttctttttggactcctcttccttgctccatatccctacagtatttcccaccatnctaggtttgtccctttctcttcttcnggganactctcatcaacagtcagtcctcagccccctcctctgcaaatgacactcagaactctctcnggctcanatctcagatttgggattaacaaacttccacttagacattctgcctgactgacctcaggcatttcgcactctgaatgtcaaacccaactcattgtcatctctgaagctgctcacttaattctcctcngtattctctttaacaacccagttgcccaacccagaaactgggagtcacgcagacctcctttctctcttactcccacacaatgagccatgaagtccagtctttcnatcttaacatcactgtcaaacccacactgtattcatgccaagcgctgcacgtgaatgtatctgtcattcttcctggattaccatagccccactnacctccnaccttgcttccccctgaagtag

SEQ ID NO: 27696 - DNA, 508 bp, Homo sapiens
  misc_feature (1)...(508): n = a,t,c or g
ggagagagctancaccatgatcaataccctgtggagtttttccaaaaacttgcttancatcctaaggttgcagcttcatacctaccccagggcttctggtttaggactggatgggatctgtatgtgtgtgatacagacatctgtgtgcaaaatgcacaggaaatactacctggcccatgatcccctatccccaaagaatagacgggaaggaaagggccatttgctcgtaggttcttttttgcaanaaaatgttcacctctaacagctcgactctggtttagtgacattccctgacccttcccactttcttttctgcacactgctgttaccactgttatctctaggcagaggtgtgccaaaccacangcagtcaaaagcagatctgttctggaggggaactaaanggccacttnggangacaangggtantaaagggatggtagaatcacacctnacacangtggaatcctgnnagagaaaatccattaggctgaactgtcncaacaag

SEQ ID NO: 27697 - DNA, 501 bp, Homo sapiens
  misc_feature (1)...(501): n = a,t,c or g
gaactggactcctagagaagaggaactcacattcatttctgggtccctagggccaaagtgtaattaaggaaaggaataactccaattctttcaaattctgaatttgtggtcctctcaaaaataggcagtgtgtattcaagatctgcttgtttccctgatccanttctccacctttgggggtcttacaaaataggccagtaagtcaaaaatgtctagagattactcccacatggtaatctttgcaaataaaactcttagacctaactttatactactaaaaatttcaccatactccttttttttttctttttgaaacaatgtcttgcnctgtcacccaanctggantggantggnacnaannnnnnnnnnnnnnnnnnnnnnnnnnnnnnnnnnnnnnnnnnnnnnnnnnnnnnnngnntanttgaaaccacnggaaccaggcnggtcncnaactcctgaccccaggtgaccgccaacttggcccccaangtgcngggatta

SEQ ID NO: 27698 - DNA, 188 bp, Homo sapiens
  misc_feature (1)...(188): n = a,t,c or g
gctgattaggttgtttctgtttttttatttggcttttgctctaaccagtantacggagctatttctaaactgctagaggtggatagtctgtttaagctaaggcagctggtaaaatgaggccatttttactgaggaaagggaaggctgagccccaanattcccctgatgctctcctgacatcctcttct

SEQ ID NO: 27699 - DNA, 180 bp, Homo sapiens
gatttgattctctaggccagtgctgtttactctgggagtctaggggtcccctgaaaagctctagggcccaagaaggtggagaccaagagagatgaaagctaaagtagctttgcttttttctcttttataaagtgatctttgggcaagttttgttgggagaaaatagactttacttctttg

SEQ ID NO: 27700 - DNA, 491 bp, Homo sapiens
  misc_feature (1)...(491): n = a,t,c or g
gcggnacgancggnacgaggaattctcatgtgatgggaagtgtaatgcttccttccagggcancctgtcttcttaattcctgaatcttgctatancctaggtcccaaggaatcagattcctanagtcaggaggttggtcatcttccatttggtctcagaattttcctttccaaagagtagtcataagaactaaatgtgggaaggcagaaggaaagacctatcaacatcaaggtgccaaagttacaagcctctggcattggtggttcatggcaggatttgatgaanttggggagggaaggggacttgaaggggataaatgaactcctcattagattcagattgaagtgcactgatgtgacctgtggaagagctgaaaacataaaatancacncaggtgattgataaagananctggttggtnaantgganctaggaatcnctggctggtncctggnatcaangtaaatactacccnattcattatcccctga

SEQ ID NO: 27701 - DNA, 473 bp, Homo sapiens
  misc_feature (1)...(473): n = a,t,c or g
gattgaatttctttgggggaatctatgttttacataaatagaatccaaatcgtatgaacagttatttaaataaacaaaattctttgggtctgacagtaacagaaacctcagcactgggaaaagttgcccacactggggtatgcctgggtgatgggcacctctcactgacctcacagcgcagtccgcccatctgagcacagggtctgtccttagacataatggtgaccctccacaagctctgtggcttttaaagttctgacagggataaatacagtaagctctgcaaatgacatcgtagctgcatataaataaacccagtgacaattaaaggaacatgaaattcagaacacactattaagcagggccctgtagctctactnnnnnnnnnnnnnnnnnnnnnnnnnnnnnnnnnnnnnnnnnnnnnnnnnnaatggatattgctatatccatctatatataacaagtatatatca

SEQ ID NO: 27702 - DNA, 473 bp, Homo sapiens
  misc_feature (1)...(473): n = a,t,c or g
gatcaagntacacatngtgtacttttcctgaatgttgtaggatcactcagttatccactgagtgaagagattaggctaaattttgaattatggccttgtaattgataaggcaaaatgctttttatcttattccgtcctggaaaataatggtgctattatttaaaagagaagcagttagcactttctaaaaggagaaaaataaattaactctataaaataatctttttcttttcttacagacatttgcttcatcattgttttcaggctttgatggatcatggtgttaaagttgcttcagtcttggcctactcattcagtaggcggngctcttatatagcagaatcanatgctgcagtaaaggaaaaanccnttcaggtnggntttgtttnaggnaagnaanggggnancaaaagtnttttgtcctgtgatggactcagaattaaatctgctaacaaagaattcttccagggctt

SEQ ID NO: 27703 - DNA, 537 bp, Homo sapiens
  misc_feature (1)...(537): n = a,t,c or g
gggcgtngcagagggtgcggggatggcagggacnnggngnnggnaggcngggaagtcagcctgagttgggtgccatgnnnnnnnnnnnnnnnnnnnnnnnnnnnnnnnnnnnnnnnngaaggattccttgannnnnnnnnnnnnnnnnnnnnnnnnnnnnnnnnnnnnnnnnnnnnnnnnnnnnnnnnnnnnnnnnnnnnnnnnnnnnnnnnnnnnnnnnnnnntcacttgattcttttanaatgggccattcttcagtagcancaaattatttattattaatcaccaggttttattcggagtattgtattttttttttggagtattaagnatgattagagatgcataantgcattaaacatggngaatttgcttagggagttttgaannngtaatagggatctagttactttgctcctggttgcanaaaaancatcccctcattccgggaantattgntgcnaanngggnaactnangnccaccattnattgaatngcttgtggcttannacccttctnaanctgcttttcttccc

SEQ ID NO: 27704 - DNA, 538 bp, Homo sapiens
  misc_feature (1)...(538): n = a,t,c or g
ggtacannacagctttcnactccttctaccttcctatacctgcanccatgtanatggaangaattgatggccacaaggatcacgcnantgccaagaagatcctgctgganatggggganttctttcanattcaggtaanaaggcaggaggcantaccagagaacaggcaccagnttcacncctcctctgcccaggaaccgcancnttccncttttgcngccctccccctccctgcccaggatgattaccttgacctctttggggaccccattgtgacnggcaaaattggcactgacatccaggacancnaatgcanctggctggtggttcaatgtcngcaacgggccantccagaacagtancaggatcctgaaggtgcctgaaaaaaggtggtggggtccctgagttgggggaaagggataaaccantgggtcncanntaaaaggnagttttcctcccnaagggaacattggaatnntaacnaaacantttttgccatgtcnttaaaaccggtgggnngnngtggtaannaattcaa

SEQ ID NO: 27705 - DNA, 537 bp, Homo sapiens
  misc_feature (1)...(537): n = a,t,c or g
ggccctgctctccaggtgntcantgggctccgggccagcaatgcttccataactgtggnngagtncctggctgccttgcagcaggggttcgggcctntggnnacccataaaattgcccaggtganattgtgtaaancctatcaagaggcanganagaaagtatctaactttgtgttangtttggaacccctgctccaaaganctgtanaaaanaatgtggnatcacgtagaaacntgaatcagactcgcctnaaacgantcttaagtggggcnacccttcctgacaaactccgaaataancttaagctgatnaaacagctaaggaagcctcctggtttcctggccctggtgaagctcctgcgtgaggaggaagaatgggaggcnactttatgtcnanatagggagagtntggaggggctggaaattaccccaanggcancttncncgnacaccnggggttggggcaattccccctccctggcnccnggaanaantttngatncagggcttccnanggttacggcncnngggggaaaa

SEQ ID NO: 27706 - DNA, 499 bp, Homo sapiens
  misc_feature (1)...(499): n = a,t,c or g
gcccttcttcgctctatctcccttttaattttacaaggttttttctctttccccctttcataaaggggagaactgggcacgcagggaatcatttcaactcccctataaatctccaaaatgaatacttaaattcgaggaaaaaatacattcttacacctttaatttccctgctatgaagtgtaatgaaaaagcctgattatttttaattcttccctttaataattcagcagcggagtgatttaagactaggattcataattacctttccgctttcttggcaaatggagttttaatagaaatgagagctctggcgactgaaatggatttcaacaggtcgctggggggtcaggttcaacaccaattggtggaanagtgttcctaaggnccctcaggtgtggggtctggactggttaactgggcccacgtggacagangaagtatatcaacntgtgccaatgggaaacanccgttgtaatagtaacanaagncacagngtggg

SEQ ID NO: 27707 - DNA, 494 bp, Homo sapiens
  misc_feature (1)...(494): n = a,t,c or g
gtgcagagtattatgcagaacctactctccaaggatgtgctgtacccatcactgaaggagatcacagaaaagtatccagaatggttgcagagtcatcgggaatctctacctccagagcagtttgaaaaatatcaggagcagcacagcgtcatgtgcaaaatatgtgagcagtttgaggcagagacccccacagacagtgaaaccactcaaaaggctcgttttgagatggtgctggatcttatgcagcagctacaagatttaggccatcctccaaaagagctggctggagagatgcctcctggcctcaactttgacctggatgccctcaatctttcgggcccaccaggtgccagtggtgaacagtgtctgatcatgtgaaacacancacgttttcctctctgagtcccagctatggggaacatcnggagtcagcaannacattgggaaccgaagnaagatttnacctgcggaaaaatccggccgntggcctccgt

SEQ ID NO: 27708 - DNA, 483 bp, Homo sapiens
  misc_feature (1)...(483): n = a,t,c or g
ggtttctctgctggggtggagtgatgggggcataaccgcactcattgctgctgcaaaatatccatcttacatccacaagatggtgatctggggcgccaacgcctacgtcactgacgaagacagcatgatatatgagggcatccgagatgtttccaaatggagtgagagaacaagaaagcctctagaagccctctatgggtatgactactttgccagaacctgtgaaaagtgggtggatggcataagacagtttaaacatctcccagatggtaacatctgccggcacctgctgccccgggtccagtgccccgccttgattgtgcacggtgagaaggatcctctggtcccacggtttcatgccgacttcattcataagcacgtgaaangtcacggntgcatttgatgccaaaaggcaaacacaacctgcatttgngttttganatgaatcaacaagttngcangaagactcccnaaatgngaatg

SEQ ID NO: 27709 - DNA, 499 bp, Homo sapiens
  misc_feature (1)...(499): n = a,t,c or g
aactcaaaatggggtatctgaaagagaacagaacggcttctctgtcaaatcctccccgaacccttttgtgggaagccctcccaaaggactgtccatacagaatggcgtaaagcaggacttggaaagctctgtccagtcctcaccacatgactccatagccattatcccacctccacaaagtaccaaaccaggaagaggcanaaggactgctaagtcttcagccaatgacttgcttgcatcagacatctttgctcctcccgtctcagaaccttcaggccaggcgtcacccacaggacaacctacagccctgcagcccaaccctctggatctcttcaaaacaagtgctcctgccccagtggggcccctggtgggtctaggtggtgtaactgtcacactccctcaagcangaccatggaacacagcatctttgggctcaatcantcccctcaaatgntcccgggagcatgaatggtgggcaaactcaaggtttatcaaccct

SEQ ID NO: 27710 - DNA, 495 bp, Homo sapiens
  misc_feature (1)...(495): n = a,t,c or g
ggacagaaaccactctttaagaacttggattttggcatcgacatggattcaaggatttgcattgtgggccctaatggtgtggggaagagtacgctactcctgctgctgactggcaagctgacaccgacccatggggaaatganaaagaaccaccggctgaaaattggcttcttcaaccancagtatgcagagcagctgcgcatggaggagacgcccactgagtacctgcagcggggcttcaacctgccctaccaggatgcccgcaagtgcctgggccgcttcggcctgganagtcacgcccacaccatccanatctgcaaactctctggtggtcanaaggcgcgagttgtgtttgctgagctggcctgtcgggaacctgatgtcctcatcttggacgagccanccaataanctggacatanagtcnaattgangcncnaggggagggcatcaangattaaaaggngccntnaaccttntnanccattatncccat

SEQ ID NO: 27711 - DNA, 499 bp, Homo sapiens
  misc_feature (1)...(499): n = a,t,c or g
cattttgcaatggagaaaactgagtctagaaatgtaattgatcggcctaccatcacacagtcgagatttaaatccaagcccgtctgagtgcgcttgggtgctttctcccgcgccaggctgtaaagaaccagaatggcccccagaccctcacgctccaggcagcagtaaggacagggactctggaatccancagttgtgagtttgaattctgcctcatctcctgactanctttgtgaccttggccaagtcgcttaagcctgtaaatggggataatacttatatctaccttanaagttgaagagtaactaagaatgaacagcgtaaagcatttagtacagtatcgtcaccatctgttttgagctgtgaggcatttgttcatacaaactctgatttacctgattgggttcccctgttgggttgggagcatccacatgcgtcangccccaaggganaagtnttccaaaaagttcnatccttggancaaccggggggcctgtta

SEQ ID NO: 27712 - DNA, 499 bp, Homo sapiens
  misc_feature (1)...(499): n = a,t,c or g
gtgaaaaaaaggattcatttgagaaaacaataacccctctataatacatatttaaaatatancaacctctttctaagaatgaatttaaaagatcactaagtataataaaatatttttaagtgtcaaaataagctcggctcccccacaaccaccaaccagccattaaaatgtgatttgtgttggaatacctgaccagagtgactcagactctacaacatctagggtaggggtctcagtcttttgtctcctgttggagggataagggagagctcagtccataacagtggctgttcaccaccctggtgatttganagtggaggtgggggcaggcagctggttagctggagggcaggtatcacatcaggtgatctagcagtgaggacaggggaanacganggaggttgcagcacagctgcaaaangngcaaganancaatgtnagcnaaaagnctaaaacaattnaaagtgcaanggttnaaaaggaaaggcttggnttctgc

SEQ ID NO: 27713 - DNA, 509 bp, Homo sapiens
  misc_feature (1)...(509): n = a,t,c or g
gttcagccttgctgtaggacatggaggacccctgagctatttggggtcacaaggaagctgttagtatgtggttctcatattcttaactgtacaanaaagcaaaagccccttgaggtccctcagtatcccttcccaccacctgcaccccacaggtgganaaattgcctgcttttagggagatancagtgtaggcctctttgcttgcgccctgcctggcccctgttggatctcttttctctgcaggaactgcanaggnttctgaagctggatctttcactatgacatttanagttgcttgaccattttctcccgctcttgacaggtcccccaggattagctgtggccaccanaagcaagcgtcgatatggaacgtgcattctgcttaaagctcancaaggcatggttggaagggaaggcactgataatcccaatcntttgtcccaaagnccccccatatnnaaccaatgggggaccaantgccctggatnctgggaactgggtgtcggacc

SEQ ID NO: 27714 - DNA, 544 bp, Homo sapiens
  misc_feature (1)...(544): n = a,t,c or g
gggagcagcgcggctggacatcactcccgggctgggttggctgaggttagtgcgccctggtgtgagacctgtgggtgaaggggaggaggctgggtggtggtgtctgcacccctcgctccaggagctgtcttgctttggggcgaaggagccaggcccctataccttgtgtccggggccttagttcanctgtgagtggtgcccangtgtggagtgtcttgatgatatgaaacggatgtgcttctaagatgtgcctgccccagacctacgcgtgagccttgaggagtctgggaacgtagacctgcctcattgtagactgcattggcatgatttggtttaggaatgctagcttttgaaacttcattcaaaatgtctttgaagccaggtgcaatggctcatgtctgnnnnnnnnnnnnnnnnnnnnnnnnnnnnnnnnnnnnnnnnnnnnncccangatttaaaccaaactggcacatacaaaaccctatgtngacaaaaatataaaaattaccagtacgtggcaatgtctgtatcccanctgttaaga

SEQ ID NO: 27715 - DNA, 630 bp, Homo sapiens
  misc_feature (1)...(630): n = a,t,c or g
gctcctggctgaggactttgggcaggcactggagcaactgcagacagctcactcccaggccgttggagcccccaagatcccctcagtgtcctggcatgatgtgggtgggctgcaggaggtgaagaaggagatcctgganaccattcagctccccctggagcaccctgagctactgagcctgggcctganacgctcaggccttctgctccatgggccccctggcaccggcaagacccttctggccaaggcagtanccactgantgcagccttaccttcctcagcgtgaaggggccagagctcattaacatgtatgtgggccaaagtgaggagaatgtgcgggaagtgtttgccaaggccaggggctgcagctccatgcattaacctccttgatgnactggaanccttgggcccaaacccgggggncaanntggaaatcccnggggaatnnttgcaaggntggggtnccaanncctttncccaacctaantggngnggcaaagaaancaagnantttttttngnaatngggncccacnaanagnccanatnncctggancccngccntttggcggctgggaaatttannaannctngntttttgggggcaaattaaggaacnnccccccaat

SEQ ID NO: 27716 - DNA, 610 bp, Homo sapiens
  misc_feature (1)...(610): n = a,t,c or g
gaactggagaaggtgaaatgaacaatggaatgagaatcaaaagtcctgggtaaagcccanactcccatgaactanagccaccattggtctgtgcctcagcttttccattcaaaccactcataggccaatgaggatagaacaannnnnnnnnnnnnnnnnnnnnnnnnnnnnnnnnnnnnnnnnnnnnnnnnnnnnnnnnnnnnnnnnnnnnnnnnnnnnnnnnnnnnnnnnnnnnnnnnnnnnnnnnnnnnnnnnnnnnnnnnnnnnnnnnnnnnnnnnnnnnnnnnnnnnnnnnnnnnnnaaacttttcttgtacaannnnnnnnnnnnnnnnnnnnnnnnnnnnnnnnnnnnnnnnnnnnnnnnnnnnnnnnnnnnnnnnnnnnnnnnnnnnnnnnnnnnnnnnnnnnnnnnnnnnnnnnnnnnnnngtganacaantatgactccaanaatgttttggtagcncaaaaatntaattttaatattnaatatctnaaagggnnanatttntntanggggtaaanaaanancccccaaggaaaattttncccaatcccntnnaaaagggannnaanggnaaggngggaaaaggangganggntgtggctt

SEQ ID NO: 27717 - DNA, 521 bp, Homo sapiens
  misc_feature (1)...(521): n = a,t,c or g
gctctggtggagacaaatgaggtctattacgtgggtgccctctccaaaggcggggtggcggtggaccaaaggaaggaagcaagcatctccgcatcgcatcctcttccattaaccantggccggttgccactctcctcccctccctcagagacaccaaactgccaaaaacaagacgcgtancagcacacacttcacaaagccaagcctaggccgccctgagcatcctggttcaaacgggtgcctggtcagaaggccagccgcccacttcccgtttcctctttaactgaggagaagctgatccagtttccggaaacaaaatccttttctcatttggggaggggggtaatagtgacatgcaggcacctcttttaaacaggcaaaacaggaagggggaaaaggtgngattcatgtcnaggctanaggcattttggacaacaaatcnacntagntaacttnaaaaacccntttttaaangttgggggcacncaaaannnttnnannncanaccananaccnttgtg

SEQ ID NO: 27718 - DNA, 513 bp, Homo sapiens
  misc_feature (1)...(513): n = a,t,c or g
ggtaaaatggagagtaaaaatcatcatgacctcattgaattactgtaagcattaaatganattgtgactgtaaagtagctcagggctgtgcacataatgtgcttttcatacaagacaggaggtagggtgtccccaccacctcctcctacacctcctgtaagccctaccccttttagaagctgcagcagatggtgctgagacaacactgtgagtcttgcttctcgaaatgggatgacaagtgaaaaggaaaccatgacacagttccagatctacctggggacaggggaggaagaggagcanagggagaaggaggaagcaaactttctcttgggcttgcctcctgccccctcagactcaggtgtccaccaagaagacaacaggtgatttctgaattcgcacacctgaggaaatttccaaaaggacancaagacaacctccttaacacaanttgggaaaccaggatggggaaatctngaggnaaccgggantaaattngtttnccgggtnccgggg

SEQ ID NO: 27719 - DNA, 509 bp, Homo sapiens
  misc_feature (1)...(509): n = a,t,c or g
ggtaatatttgctgatgtgtagtaaacattgttattgcaaataagtatatgctgagaagtatttcagtaatgattgttttccattaaattatgtgttacaaattacaaaaattaaaaaggaattctagttgcaggattaggagaaaaggatgttttcgacgctcatagtttggcttttaaaggtgtttatctttgggtttaatccatcacaacttctctgctaaatttaaaggtatctttgaaacattgaattgtcaattccatttgctttgtaaggaatcaaaatttagctctaagaataatcaggaacgtttgtcaacaagatattttgatacttcaccttaaaatatttaaaataggctgggctcgatgggtcatgcctgtaatcccacctcccctcccaaagtgctgggattacaaggctaagccgtggggcctgcccaaanttaatgttaaaatacaaaatacttaacctttaangggttgcaaagggcaaggttttccaaaac

SEQ ID NO: 27720 - DNA, 509 bp, Homo sapiens
  misc_feature (1)...(509): n = a,t,c or g
nnnnnnnnnnnnnnnnnnnnnnnnnnnnnnnnnnnnnnnnnnnnnnnnnnnnnnnnnnnnnnnnnnnnnnnnnnnnnnnnnnnnnnnnnnnnnnnnnnnnnnnnnnnnnnnnnnnnnnnnnnnnnnnnnnnnnnnnnnnnnnnnnnnnnnnnnnnnnnnnnnnnnnnnnnnnnnnnnnnnnnnnnnnnnnnnnnnnnnnnnnnnnnnnnnnnnnnnnnnnnnnnnnnnnnnnnnnaccaattcttaactggtgacttgacttgtttattagttaatctgtctcactcagcttccttcaaatgctgagcctccgtcctcttgctaagctcttttaagaacgttgtgtaccatgtcaacctgttctaaatatttgaggagaaaaagttctagaattcacgtccccaccaactttcnttttttctttaanaaanaaaatttaagagacaccggtcttncctgttnctgggctggantgtgggtgggnaatcaaagctcatgtggccttgacc

SEQ ID NO: 27721 - DNA, 503 bp, Homo sapiens
  misc_feature (1)...(503): n = a,t,c or g
gagctagcaccatgagcttcaataccctgtattttattatgaaatcaatgacgacaaccccagaacttagatgttctgtctctacttgacatatgtgaaaacagagcacctaaaagactgagtaacttgcaggaagtattctgtcaagaaggcaaatgctttagtagataaatacatttaaatttcactcttagaccttcctctcttaacttcctcctcaggaaccctctttgtggggttaaaattccaccttatttttattatatagcctataagagacttgaaagaattgggtacgatctgatctccttnaattcttgaaacattcctagagcgattcaaaggtttagtgaaattagcctcattccgtagacgaggaattaaaggaacagtgccagtcaggtccctgtcctaagtanagtgatctgtacnaggggtcnagngacctaagtaatganaataggtgaatagncnaaactagtnaaacatnactgattcntata

SEQ ID NO: 27722 - DNA, 511 bp, Homo sapiens
  misc_feature (1)...(511): n = a,t,c or g
gtttcaacatagaattgaaatccctggtgacgaggggcacaattcagcccataacagcccttatggcctttgccccctcgtatcacacctgtgagtacgcaaaagggactttgcagatgcaattaaggttaaggacctgaaggtaaagagattatcttggattagacaagtgggtccagtcttaccacacgaacccataaatggagagaactttctccagttagaggcagtgaattgtgacagaaggagaagtcagagaaattccaagcgtgagaaggacttgatgtaccactgctggctctgagagctcaggagcaaggcctggaaggaggcctctggaagccaggggtggccctcagctaacagccaagcaaggaagtagggatctttgttctacaaatgcaagggaacgaattcagcaacaaactgaaggagntagaaggggattcttccctaaaattcccaanaanggncccctaaccaaggtactccaattctaacttgtgaaacc

SEQ ID NO: 27723 - DNA, 575 bp, Homo sapiens
  misc_feature (1)...(575): n = a,t,c or g
gggccaanaagganaggganaaaggcccgagcccctgccttcccgggcctttctctcctgggctgtctctggtctggtcancctgggtctcgggaaattcagccatgagcagggaaagaactctcccaaccctggggcctanctgtataggaggaattgcctaagggtggcccactcttgtgattgccccatttcctctggcaacaaaagccanantgttgtgggccaagtccccccacagggcctctgcagggcatggccctgatttccctggtttgagactcacttcctcatcnccctgtcctctgagataatatgagtgangcacttaggtatcatatcagatgctcaaggctggcaagctaccccttcttgagagtccaanaacctggngcaaaaataattttttaggnattttttggntttaatgaatgttaaaaaacaagnctcaactgttccttccctttactactaacanttggctcccaatgctgctccaacaagggcctgttttcgaagncnanntgggccaatncccaancanttngcccccanctttngaccattnggnatgg

SEQ ID NO: 27724 - DNA, 582 bp, Homo sapiens
  misc_feature (1)...(582): n = a,t,c or g
attagcaatttaatacganncactacnnnnnnnnnnnnnnnnnnnnnnnnnnnnnnnggnacnagggaaacaggaagagaactagaactggaattaaancatnnnnnnnnnnnnnnnnnnnnnnnnnnnnnnnnnnnnnnnnnnnnnnnnnnnnnnnnnnnnnnnnnnnnnnnnnnnnnnnnnnnnnnnnnnnnnnnnnnnnnnnnnnnnnnnnnnnnnnnnnnnnnnnnnnnnnnnnnnnnnnnnnnnnnnnngannnnnnnnnnnnnnnnnnnnnnnnnnnnnnnnnnnnnnnnnnnnnnnnnnnnnnnnnnnnnnnnnnnnnnnnnnnnnnnnnnnnnnnnnnnnnnnnnnnnnnnnnnnnnnnnnnnnnnnnnnnnnnnnnnnnnnnnnnnnnnnnnnnnnnnnnnnnnnnnnnnnnnnnnnnnnnnnnnnnnnnnnnnnnnnnnnnnnnttatccaggtnnnnnnnnnnnnnnnnnnnnnnnnnnnnnnnnnnnnnnnnnnnnnnnnnnnnnnnnnnnnnnnnnnnnanggangtncaantatncccaaatggngcccctgaacccagcctgggtga

SEQ ID NO: 27725 - DNA, 505 bp, Homo sapiens
  misc_feature (1)...(505): n = a,t,c or g
ggtggacantgacaccgtgtggaatganatgcactcctccantgctgtgcgcatggnattgggctgcctgctgganctggccttcanggtggctgcaggananctcaanaatggatttgccatcatccggcccccaggacaccacgccgaggaatccacagccatgggattctgcttcttcaactctgtanccatcaccgcaaaactcctacagcanaanttgaacgtgggcaaggtcctcatcgtggactgggacattcaccatggcaatggcacccagcaggcgttctacaatgacccctctgtgctctacatctctctgcatcgctatgacaacgggaacttctttccaggctctggggctcctgaanaggttggtggaggaacangcntggggtanaatnttgaacgtggcatggacaggaggtgtggaccccccattggggactngagtnacttanagccttcagganatggngatgccattggccacnagttccaactg

SEQ ID NO: 27726 - DNA, 481 bp, Homo sapiens
  misc_feature (1)...(481): n = a,t,c or g
ggctcggcgtggaggtgggtgggcgagaagacaccagcacatagagganaaacaggtatanaaggggggagagaganagcaagggtgagtaacaagcaagcaagaaaggagcccaanctacacaatggcaantaatgcacatgaaaaaattggnaacacggcaaacagagagtactcaggcgtgaaattgantgacagtgttttgctttnaangtaatagttctggaaangaaggaaacacgacagactacagaagtccaggggagacttcacatgacggtnggaattgaacttgtactgttcaccttcacggtccccatccccggccctcaatacatacntggcgantaantcacgaactnnntcctgttttatggattcnacgntcagttattaacggantgccttcnagtgnaccanttcaattcattcccacagnagncctntnaangtaggggcctnacanccctatttaaaggtt

SEQ ID NO: 27727 - DNA, 493 bp, Homo sapiens
  misc_feature (1)...(493): n = a,t,c or g
gagggatttgagttcttggtgacaccaagtcagggaggagacaaattagaaatgtcagtctggagagagtggtaggtanccagatacngaaggaaagtagatgggaggatttggtaagggctgacgtgtaggaaggcagtgacagtccaagtgacaggcagatcataaaacctcaaggatannnnnnnnnnnnnnnnnnnnnnnnnnnnnnnnnnnnnnnnnnnnnnnnnnnnnnnnnnnnnnnnnnnnnnnnnnnnnnnnnnnnnnnnnnnnnnnnnnnnnnnnnnnnnnnnnnnnnnnnnnnnnnnnnnnnnnnnnnnnnnnnnnnnnnnnnnnnnnnnnnnnnnnnnnnnnnnnnnnnnnnnnnnnnnnnnnnnnnnnnnnnnnnnnnnnnnnnnnnnnnnnnnnnnnnnnnnnnnnnnnnnnnnnnnnnnnnnnnnnnnnnnnnnnnnnngaattaggcctnaancaccgtgccaaccggggaaagttt

SEQ ID NO: 27728 - DNA, 498 bp, Homo sapiens
  misc_feature (1)...(498): n = a,t,c or g
ggcaatgttggaaaaccttggatggatatcttcnctttaaaaaaatgtaaagataatttggncttgagggtttaaacggttgataatgnctctacaacaacaagaaaaaagataaaatacnaggatagaatcatggtgggcacantggcttnnnnnnnnnnnnnnnnnnnnnnnnnnnnnnnnnnnnnnnnnnnnnnnnnnnnnnnnnnnnnnnnnngtaaaccctatctctaaaacaatnnnnnnnnnnnnnnnnnnnnnnnnnnnnnnnnnnnnnnnnnnnnnnnnnnnnnnnnnnnnnnnnnnnnnnnnnnnnnnnnnnnnnnnnnnnnnnnnnnnnnnnnnnnnnnnnnnnnnnnnanctananatncnnaagaattagccggngcctcggtggcnggcggcctngtagncccagntnccccgggaggctnaggnangaagaagggcttaaaccngnnaattggngcctncctnnaccnaaatnncccactgca

SEQ ID NO: 27729 - DNA, 504 bp, Homo sapiens
  misc_feature (1)...(504): n = a,t,c or g
gtggggtagttgtgggttaagttgggttttggaaagcctttgggaagattgaccagggaagaggccctggaantaggcttgagaccctttgggctgggaatttaagggtcccagctacttggaacatgatctanaaagggaagcgaggtctccangtggacaaatccctttggacccaanactccttgcccagagaaaaggggcacaaccagacaagggctancatgggccctgggaancacggagttcagggtggggcaggcttgctgtgtcctggcctggcaanatacctgcactgtgttgtggtagaagaacacaaagctgggaggcagagaactggttctaatcctagctgtaccctgacaagctgtgtgaccttggccaagttactttcctctcctgngacttcatatatggtttttccattctttgcancctgaagccnatgacttaggggcatcaacttggttgtcccntgactgttccaagaatacaacatgccag

SEQ ID NO: 27730 - DNA, 511 bp, Homo sapiens
  misc_feature (1)...(511): n = a,t,c or g
gcactattttcctgatgacagcaccaactatagatactcaccantagaagaaaagcantgtgaaaacggactaatacagctgtgaaagaaatggagatannnnnnnnnnnnnnnnnnnnnnnnnnnnnnnnnnnnnnnnnnnnnnnnnnnnnnnnnnnnnnnnnnnnnnnactgtccatggatgcagtgttaccatcgaggagctcgaggccgaggtcgactctggcaccctgatgacaagtctggagattcancagtanaaagaaagcaggaaagtggtattagccatagaaaagangaggagnnnnnnnnnnnnnnnnnnnnnnnnnnnnnnnnnnnnnnnnnnnnnnnnnnnnnnnnnnnnnnnnnnnnnnnnnnnnnnnnnnnnnnnnnnnnnnnnnnnnnnnnnnnnnnnnnnnnnnnnnnnnnnnnnnnnnnnnnnnnnnnnnnnnnnngcaagcgcctgtgtcccaggtactccaaaggctgaggcaggagaatgnttaacctc

SEQ ID NO: 27731 - DNA, 575 bp, Homo sapiens
  misc_feature (1)...(575): n = a,t,c or g
gctcggcgtggtcataaaaaacaaacagaaaacaataaccaaaaacattgtttttgtataattcatataaaaccaaattgtaaaattcatataaaaccacaacagaggctgaatagccaaagtaaacataagcaaaacaacaaaactgaaggcattacattacctgttttcaaattatactacagagctacagtaaacaaagtaacatggaactggtacagaaaaaaacaagattatgccctttatagcaacatgaagctggagaccattattcttggaaaaccaatgcggannnnnnnnnnnnnnnnnnnnnnnnnnnnnnnnnnnnnnnnnnnnnnnnnnnnnnnnnnnnnnnnnnnnnnnnnnnnnnnnnnnnnnnnnnnnnnnnnnnnnnnnnnnnnnnnnnnnnnnnnnnnnnnnnnnnnnnnnnnnnnnnnnnnnnnnnnnnnnnnnnnnnnnnnaactacttgggaagctggggattgagaattgctttaaccaagnagtggacggttcaatncccaaagtcacncaatngacccaacccggggnnaangttaaaccncnttaaaaaa

SEQ ID NO: 27732 - DNA, 506 bp, Homo sapiens
  misc_feature (1)...(506): n = a,t,c or g
gctggaagattattccttttgatgacactgtttattgtcttgttgaagactgatctctgtacagatgacaagggaagaaacaatttttgtgggtgataatggtaataataatactaattataagtacttgctctgtcccaggcaccactttgagtactttacatgaattaacccttaaatcatcactgtaatcctatgaagtacctatgattagtatccccattttatagatgaggatattaggcaaagaggccttagtagtaaaaggttgtgtggctctgtgccttctctatgctccttcactgcacannnnnnnnnnnnnnnnnnnnnnnnnnnnnnnnnnnnnnnnnnnnnnnnnnnnnnnnnnnnnnnnnnnnnnnnnnnnnnnnnnnnnnnnnnnnnnnnnnnnnnnnnnnactnacncantaaangatgcttttgttaaatgaaaatnnttgtttacttcattcnaccgggcctctangtgaacaagtcactcagaattg

SEQ ID NO: 27733 - DNA, 497 bp, Homo sapiens
  misc_feature (1)...(497): n = a,t,c or g
gcgaggcctgtctgactgtctccttctctcggcccctcttagtgggctccaggatggagatcttgctgctcatggttgatgattctcccctgattgtggagtggaggaccccagatggcaggaaccggcccagccatgtctggctctgtgacctgcctgctgcctccctcaacgaccagttgccccaacatacatttcgcgtcatttggacagcaggcgatgtccagaaagaatgcntgcttttaaaaggccgccaggagggctggtgccgggactccacgacagacgagcagctattcaggtgtgagctgtcagtggagaagtccacagtgctgcantctgagctggaatcctgtaangagctgcaggagctggagcctgagaataaatggtgcctgcttacatcatcctgctgatgcgggcactggaccccctgctgtatgagaaagnagacctgcagtacttccnagacctcaagggngngggcccaatccggg

SEQ ID NO: 27734 - DNA, 499 bp, Homo sapiens
  misc_feature (1)...(499): n = a,t,c or g
gtaacagtatatacattggctcatgtttattttcctcttagcgtacttacactttgtgaatcaattgtttatgagtcattcataaagtattttttcnttcaaagtttcttanatttcctttgtcaagaggacagaattattttaggagggcaagcatatttaagttttcagtggctgaaagttggcagtctgaaaaaggatcggaagttaatgggaggacttcggactgtgataaatgaatttccagtctgttcgttaaagagatttaacaatatatggttatgttccttctgttacatttagaaaacangtaaaagaataaagtgataattacctatctgtaattccactaatctgtcatattactcctcagccttattttaattttnattnnnnnnnnnnnnnnnnnnnnnnnnnnnnnntactctgggggacatacaggtggcatgatcaaaagtcactggtagccttgaactccnggattcaagcaatccccccg

SEQ ID NO: 27735 - DNA, 496 bp, Homo sapiens
  misc_feature (1)...(496): n = a,t,c or g
ggaaaacacgacgtcgtccattttggaagagacgaaagaaaggaaaataaactctttgtatgatatttattaggaggaaagaggactgaaaatgttcttgtgtagaaacagaaggacagcatttctgttagtcatttcctggaaaagtaatattttaaggggaaattatggaaacaatctaattgttcaattgctgtgctagtggtagggtttattttctgggaggtctctcctttgtgtgtctgtatgtttgtgtacacacacgtgcccatctgctgtcccagaggggaggggttgtgtgtgcgagtgtatggagttagtgtggaacttaagagctggaagacagctgtagagcaaagcacatccaggagccccagttgtcactgcagtctgggcaaccccagcaatgaaaangggtgagataacgctcattgctcttcagagaaaatggttggagccccccccgccccgtatgcntacattaatgcccctttat

SEQ ID NO: 27736 - DNA, 491 bp, Homo sapiens
  misc_feature (1)...(491): n = a,t,c or g
gtttcattgatagctatatatgatgtattaggatataggaactgagtttaataagattttagtatgaagttttatattaacctagctaggagccttanatgtgtttaatgtttgctgtaatgttagttgtaggtgccagaagcctcactttcccatagtttccttttttttttttaatttaaaaccccccttncttgggtttnccccaanaacaacttctttnaaaaaatncggtgnccnnaaacccttttagtngnaaccngcattngtnanncnggncccatnttnaaagggaattanggnnttggaaaaaggaaggggaaatntnctgtaacctnaaaattanancggatttttttttttaanccgnanttncnggaaatgnnccctttgnantttttnctnacccacccccccccccggcaancaaattttctttccaaagggnccncnagganggngngttccccccnanncaaananggntcggg

SEQ ID NO: 27737 - DNA, 498 bp, Homo sapiens
  misc_feature (1)...(498): n = a,t,c or g
gaagagaagcggtgtgcgggggaaaagcattctgggtattagcatgcaaatgaacgggcccggcttccaactccgctcgggattcccacngcngcgcgccgagctcgcgcccagccacgcgcgccctgaggcttccgggcgttgccctggcggatgatccgagttcaaaatcgagacctctgccttctggtttcgtgtcctggtgcttagtcacttggcctccctgagattcagttaaactgtttcttaacctgtgcacagggacagcagcacctgtcctgcacacctccgctctagggcatagtacatgccaaactcctgttggagagaatgaattanaggcatgaagaaagttccctggacacgaagccaggagatctgtgttctaagcccaaactcactgtcaccttaagntantgcctccctctctgagccanagntttcttggggcggntttgggaactggnacntttttaattttganaagactgncgggaa

SEQ ID NO: 27738 - DNA, 637 bp, Homo sapiens
  misc_feature (1)...(637): n = a,t,c or g
gagaccacagtcttcttttctgctctgagtgtttgcagacgaacttaaatttactagtatgtattgttttgtaagatgcatcnnnnnnnnnnnnnnnnnnnnnnnnnnnnnnnnnnnnnnnnnnnnnnnnnnnnnnnnnnnnnnnnnnnnnnnnnnnnnnnnnnnnnnnnnnnnnnnnnnnnnnnnnnnnnnnnnnnnnnnnnnnnnnnnnnnnnnnnnnnnnnnnnnnnnnnnnnnnnnnnnnnnnnnnnnnnnnnnnnnnnnnnnnnnnnnnnnnnnnnnnnnnnnnnnnnnnnnnnnnnnnnnnnnnnnnnnnnnnnnnnnnnnnnnnnnnnnnnnnnnnnnnnnnnnnnnnnnnnnnnnnnnnnnnnnnnnnnnnnnnnccgtctctggtctttggtgtacatttttaaagtntggctgttgaattgagatgtgaatcacagcaatatttctngnagctctgctggaatgtttnaatgctgcctaaaanacggggggcaantcctgganggngcctncccngaanaaaacccttncccnaggaaagngancanttccanggcggnnctgnaaaggcaagggaggtnangggatnaanaaaggttnnttaantnacccttnnaatccacnaaaa

SEQ ID NO: 27739 - DNA, 664 bp, Homo sapiens
  misc_feature (1)...(664): n = a,t,c or g
gctcatttaatgcagtgtnatgggacagaatcgaaatgagctgcatgttgaaccccagccatgggtgaagtgcccactggnatatgcatttnnngnatgtcctcattccttactccctgtcccccttaccctagctctgctctccagtccacccacagacagctttagtgaaaccaaacatcagtgggtccctgactattggaagtgatgcttactgactggangggancaanggatcatatctcaaggccactctccttccagactcaagttctgggaggttaaggcttcctccacctggtatgtctttanggcctgttttangtctgaagtgctttcacagnaaagggtggncctagggaaaaacagagaatntgaatcngtcctggnngcaagtccatggattntttttagatngctatggntacgnntgnagactatccctaatccangtctttctgcccttcaagagaatncttttgccgtgnataactgncccaanacnttngggaacccntaaaggnntgggnacctnaaacncnggccttngcaaannaaaaanccggaannntcgccaaaagggttnccaattntttacnggaanccggggtccnggtttttccnaanggcnttnaannaanttnnnnncgggnnnnaagggtgg

SEQ ID NO: 27740 - DNA, 659 bp, Homo sapiens
  misc_feature (1)...(659): n = a,t,c or g
ctcagcagtaactgatantaanaagcctttttacattttttaaatgtatccttccagacattttaatacatgtacaagcatattacangtgtcnattgtttctcaacttatcaggcccaaacaccccttctataagcantacttttaatgtcncctttgccgtcacaaggtggaattcanaaataatggncttaggccaantttcctagaaaacaaaatctgaggcaaggatttntgctaatgctttatttgggagacatggagatgatgaaaaagggggaaaaaggcagggaangcacgaaancaaggcaaggtgacattantgcttcatgaggcccaanagagacacagccaaccactaantaggcatcttctcagtcanatgggatgtctctcanganatagggtgtanagagaaatcatgcctcacataagtacatnaaangaggaanaatangcccggtgtggtggtcangcctgtaacccacactttgggaaggccagggnggaaatcnctttaggcnagagttttaaacanncnggnaaaanggggaaaccnnnntnnnaaaaannnacccccaaatttttggggggggntgccgcntncccnttanccancttttggaggccgacaggnattatttaccaanggggngagg

SEQ ID NO: 27741 - DNA, 654 bp, Homo sapiens
  misc_feature (1)...(654): n = a,t,c or g
nnnnnnnnnnnnnnnnnnnnnnnnnnnnnnnnnnnnnnnnnnnnnnnnnnnnnnnnnnnnnnnnnnnnnnnnnnnnnnnnnnnnnnnnnnnnnnnnnnnnnnnnnnnnnnnnnnnnnnnnnnnnnnnnnnnnnnnnnnnnnnnnnnnnnnnnnnnnnnnnnnnnnnnnnnnnnnnnnnnnnnnnnnnnnnnnnnnnnnnnnnatttaagtaatgttatgtaccgattatattttgattgtatgctgatattagattatagatgaaacccatcagatgtgcaggtanaaaaagggcttttgtggaattgagtcattcactaccatcttcttcgtttaccacatccgttttcttgtctcacatgtttgataaactctgcacttagctgtccgtttcaaaatagatagctgctcttggtgacgtcccttcctcaaaataaaggncatttgtncccttgcactcatacacatnctcagccacaggaanctgntgcagaaccacacaaangctgcaaggccactgcaaccanncaangntactggggaaagaggnctcaaaagtnaacccccaaaggggngggttnnccgnaacccaannnntgggtnaccaannancngtgnnancaacgnnggccanccttnccntgannacnaaag

SEQ ID NO: 27742 - DNA, 669 bp, Homo sapiens
  misc_feature (1)...(669): n = a,t,c or g
gcggcacgagaaatcagcccaactgaattgtgggaaaagttgattactatttacctcaagcaattgggatgagtcctgcttcagggccanntcnaggaagcttctgacctcacctaaataagtcctctactctgggagnnnnnnnnnnnnnnnnnnnnnnnnnnnnnnnnnnnnnnnnnnnnnnnnnnnnnnnnnnnnnnnnnnnnnnnnnnnnnnnnnnnnnnnnnnnnnnnnnnnnnnnnnnnnnnnnnnnnnnnnnnnnnnnnnnnnnnnnnnnnnnnnnnnnnnnnnnnnnnnnnnnnnnnnnnnnnnnnnnnnnnnnnnnnnnnnnnnnnnnnnnnnnnnnnnnnnnnnnnnnnnnnnnnnnnnnnnnnnnnnnnnnnnnnnnnnnnnnnnnnnnnnnnnnnnnnnnnnnnnnnnnnnnnnnnnnnnnnnacatctgggagcgtttttaatcctcccttatcctggggtactcctggacancctctcagnaanagccancanatntgaaaagcctgagcgtttaggttggtnataaggctngaagggtggaccccaaaanttgntgaaanaacccnnattngcaaattcccgnngggaattcccnggagggaatncganttnnttcncaaatttngnaaagggccccggntttnccaagggtgc

SEQ ID NO: 27743 - DNA, 668 bp, Homo sapiens
  misc_feature (1)...(668): n = a,t,c or g
gccctctgtagccatgggggattggttctaggaaccccacccccacagataccaatagccaccnnnnnnnnnnnnnnnnnnnnnnnnnnnnnnnnnnnnnnnnnnnnnnnnnnnnnnnnnnnnnnnnnnnnnnnnnnnnnnnnnnnnnnnnnnnnnnnnnnnnnnnnnnnnnnnnnnnnnnnnnnnnnnnnnnnnnnnnnnnnnnnnnnnnnnnnnnnnnnnnnnnnnnnnnnnnnnnnnnnnnnnnnnntatctttttttttttccggagtattttngatcaagggttcnttnaancnatgattananantgctgactgtgtnaaaaaaggangcnnattgaaantcnaaaaaagtggcnaggcaaattggtncaaacctgtaanccnagcaccttggaaggcaaggnaaggcggtncacnaggncgggggtncaaaacnaccctantcaaatggggaaaccctntcncancaaaaancaaaatttccnggcntggnggggnaaacntttatcccacctgccntttggtnggggnngggaacctttancccggaaaaaaangntcttggnccaaaanacccctttnnccccccnggggaaaantnggncccnccnaaaaaaaaaanaananganaaanggnttttttggngnggnngtttccttttg

SEQ ID NO: 27744 - DNA, 534 bp, Homo sapiens
  misc_feature (1)...(534): n = a,t,c or g
gcataatcctcaaatatagttttctcagtggacctcacaggtgaaaagtttcctcctctttgcattgaaactagccagtggaggaaatgaccttgnggncatgctaacctctgaaatgaacacaagcaggaggtgtttggctggtggaagacaaggctactctgcaggaaatacctcattgccttcgtcttggatgtgagatgcagtaaaatggntgtcttatgaaaataatactaggctaaaatgtcactgtgattacacatatgtttgtaggtagattagagtcagttacggtcattaaaacattaggctactgtagaaaattagctcagctctcgcagaatttcaagtctggcaggctggctttctgtaggtcaaagaaaatgntcagattggcacggagcctccttggntctcacgcagaaactctgtgactttgatactantgaaaaaatgcacatcnggaatganatcagacctcaccctttcangctctgctcttggatttanttnaatgattggatgtgnccaagg

SEQ ID NO: 27745 - DNA, 534 bp, Homo sapiens
  misc_feature (1)...(534): n = a,t,c or g
gactgaatcctcgaaaataatatgatctcattacccatagtttccanatgaggaaactgantctcaaggaggatgaacanggtttcccaaggccacggggtcagcatatgactggcagacccttaggccttcccacatcacagcactcagggcagtgagggtgtcccaagggatctttgctganacttttagcctgaggtcagcttctgagttgattatgacttanttattggaaaaagatataattttcttcaataatctgcatcccaaggaacagtctctgttctcatcgctccanttanttgcttttaaaccctattcaaaaanttacaacgcgggttgaattccttantggggaggatnagaggaaccgcttcaagctgagagcacagttgtttccanatgtggccagggcctccttaaaggttaatgggctggataacccagcattctgggnctagggaaccaacacactcacgtnncatnatcccacangggcaatctgnacctttacntttnccancatccagtttt

SEQ ID NO: 27746 - DNA, 653 bp, Homo sapiens
  misc_feature (1)...(653): n = a,t,c or g
gcgtggtggtgatgtgcccgttgctggactggattatcaggcgctccagctcgggcgacgccagcttgagcagccccacgtcgggcgaggtgaggaggtccgagttcttggcgcggaggtgcggcttcaggctccccactgggtcggccaggttcagggtcatgctctgtttcaggatcttggggttactgtagccataaggtccgctctcggacgggaggaacgaggcgttgagggcatcgtcatagaaggtcgtttccatctttgcagtcatagaacagtccgtcacttcacgtgaggttagtttgggctgcgcgcacaagtttcggggccgcaacagggctctggcaagcgggggacacccgcgccccccggagcctttgacanggaaagtttctctaagagcgcacgcacccgctggctgtcgtccccgctgcgccctcctcaacanctcgctccaaggaacncaaggttaattaagcggcgcaagcttatccctttaatgagggtnatttaacttggaacngccttcgttttaaaantnctancnggaaaaaaannnnnnnnnnnnnnnnnnnnnncccncnnnnngggnnnnnttngggggggnnannnnccnngggcnnnngnnnnnntgnnnngggggnnngggg

SEQ ID NO: 27747 - DNA, 585 bp, Homo sapiens
  misc_feature (1)...(585): n = a,t,c or g
acttgccaatcaaaaaatgacaatcaatttgangaaaatagaaatagatatttttaaataaaaccattcacagtttactttgtcttgatnnggtgggttgtcccanctgaagtgaaccaagagagtttgaattaatttttccattagaatgttttcgcatgtctgcctctaaaactnnnnnnnnnnnnnnnnnnnnnnnnnnnnnnnnnnnnnnnnnnnnnnnnnnnnnnnnnnnnnnnnnnnntcaacccaaaagcccccaaagtggcacttctgagttcctgctgatgttacaagggaccacacttttgagaatctgtgctttaatnctaaggaaatattgccctgntnggttggatgcctggnattgggcatggaaatttngaattccngnttggtaaatggggtgtctggcttaacccacntgcaaanccggnggacananccaaanctnccaaatttttnggcnccccnnnnnnntttnccaancaaaacttttnnangggntnncctcaatnttttttnnccnggctaancacaangccgtnagnttttgggnccgntttttnnacnagtncccnggtg

SEQ ID NO: 27748 - DNA, 560 bp, Homo sapiens
  misc_feature (1)...(560): n = a,t,c or g
ggaaangggccggaagccccaacaaattccagcttcaacccctcaaaatccagcaacttcccaacatcctcctccaccacctggtcatcgttcccaggcacngnngtcatcgtcccccgcctcctggacaccgtgttcagcaccagcctcagaanaggcctcctgctccgtcgggcacacaagttcaccagcagaaaggcccgcccctccccangacctcgagttcangccaaaacctccccatggggcaagcagagaactcattgtccccttcctctaattaaaaaagatagaaactgtctttttcaataaaaaccactgtggntttctgcctcctgatgtgatatccgtncttcatgaagggttttccgtgtgaaaacattgtaacctcctgagggtntgggccaaaaccacctctggatcttcganctcanccangtgggtcaaatctggagtttttggncncctcanngngtncatcaaaccantaggggnatcantataatntggttnnaaaatgttangggccngcananaatctangattcttngccccccag

SEQ ID NO: 27749 - DNA, 540 bp, Homo sapiens
  misc_feature (1)...(540): n = a,t,c or g
caaatatcangaaacagtgtgattgnttccaaggggaccaacccacaaanaaccttgtgaagtttggtcacaaacaangtaaatgttccnaataggngtggngtcaagtcctacatccaacccantgacnacaacgacaccggtgactactacgannccggtgaccaccacancanagcntgtaacnaccacaacaaancctgtgactattanaaatcagccatctgtgancccagcctgctgcaaanccggcccctgcgaaacctgtggntgccanncctgtggccacaaagacngccactgttaaacccncantggcggtgaagccatnantagcatctaaacctgtatcagcaaagccagnagctgttagancccccgctgcngctgcataaccantgggaacaancctgagnccctaggcaacnggaagccaancanctgcacanacngccanacnangccgnggntanatgtccgtcaagtcaaggtttnngatacnggnaatagggcancncactgggaaagnctnnnccccgg

SEQ ID NO: 27750 - DNA, 582 bp, Homo sapiens
  misc_feature (1)...(582): n = a,t,c or g
gaaggactggaaagaggaatgatggaggagtttagagagctgagtgaggagagtgccagaagccgaaatttcggctcttggacccatcagaatgaggcgtggcgtccacctccagcccacgatttcaattctaaagtcgttattattcaaagcccaaaggaagttttcccttccctggcctgctagcatcaataaaatgggggaattcggggtttgggacctgtgtccaggatgctgatgtccaggataccgacgtccaatgtgccctggcttagatatacataaatcgcgttcatttgttatgagaagtgtcagnnnnnnnnnnnnnnnnnnnnnnnnnnnnnnnnnnnnnnnnnnnnnnnnnnnnnnnnnnnnnnnnnnnnnnnnnnnnnnnnnnnnnnnnnnnnnnnnnnnnnnnnnnnnnnnnnnnctctctactnaaatacaaaaatcanccggtgtggtggacccnactgntntcgcagctactcangagggtgagacaagaaaattgtttgnccccnaagggggggtgcntnacccnnattgngnncnggnctcnaccgggggnaaaananacct

SEQ ID NO: 27751 - DNA, 561 bp, Homo sapiens
  misc_feature (1)...(561): n = a,t,c or g
gccctgtttttcggtgtaaggcagcgacggcggctgcgacggcgaagactgagatcctggtgtcgtgggcacctgagttctancttcccccagcgagcgcgcgtcccttcgtgcctaggcnagagccggctcttccccgggagatgcgtttgtcccaggctcgggggctcagtgggagttcatgctgcgctggaggctcttggccaccgctctaatcgccttgtgccgccgcagcgccagctccgtcgccagcggtgagcctcccgattcccccccttgcccctggcgggggcgatgaccggggagaaatccgctcactgcggagggaccacaagcccaacaaagaagaaggggacctgntngancccggggattaggaaacngcggntgcctcggcggtactttacanaaccangatttgnaanggngggaaaatttcnaanacttantnacatcacaccggganantnnaggagtcngggtcctcaaaacccggngcccggttnttnngnnaatctcccgntgnanaacaattccnganntntgggggacaancttttt

SEQ ID NO: 27752 - DNA, 523 bp, Homo sapiens
  misc_feature (1)...(523): n = a,t,c or g
agatctctccttgattgtcatttcattcttttgcatgttatttactataggtatcgaggtagattttgagaccaaccaataaatcgtcttgaaggttancttcttagaaaggaaaatctaaataccagccttttaaaaaaagtanctgaattaaaggatgagtgaaccaaaggcaaaggtagcctttcctcagcctgtgttttanctttctaaatgttaacaatagcttcattcttgacttattggtaacattcaaaatactacttattatttcatactttagcacatgtatctattcagctttaatgctattaacagttgttaacctaagttttcatttgttggnnnnnnnnnnnnnnnnnnnnnnnnnnnnnnnnnnnnnnnnnnnnnnnnnnnnnnnnnnnnnnnnnnnnnnnttncagaccacctgggcaacatggggaacccngnntnncnaaaatgggaanntnnctngnatgggggnccaatttgggccannanttgaaagnggnggnngnaatct

SEQ ID NO: 27753 - DNA, 548 bp, Homo sapiens
  misc_feature (1)...(548): n = a,t,c or g
gctctcactctgtcttctgtcttactctctctctctgcctgcctgtctctctcactctctctctctctgnnnnnnnnnnnnnnnnnnnnnnnnnnnnnnnnnnnnnnnnnnnnnnnnnnnnnnnnnnnnnnnnnnnnnnnnnnnnnnnnnnnnnnnnnnnnnnnnnnnnnnnnnnnnnnnnnnnnnnnnnnnnnnnnnnnnnnnnnnnnnnnnnnnnnnnnnnnnnnnnnnnnnnnnnnnnnnnnnnnnnnnnnnnnnnnnnnnnnnnnnnnnnnnnnnnnnnnnnnnnnnnnnnnnnnnnnnnnnnnnnnnnnnnnnnnnnnnnnnnnnnnnnnnnnnnnnnnnnnnnnnnnnnnnnnnnnnnnnnnnnnnnnnnnnnnnnnnnnnnnnnnnnnnnnngcaatgtcctgtagaccatntactcggangctaaggagganatcatttgaccnggangccgnagcaaaggtccaangagangaggttcatttnccaagtcaaatantgganncaatcnggnanaagtggacnccnnncnaaaaaaaaaa

SEQ ID NO: 27754 - DNA, 510 bp, Homo sapiens
  misc_feature (1)...(510): n = a,t,c or g
gcttctcatccctctttcctgctgatcaaatcctctcctcaataaaaacnaaatggatatttcatttgtttgaagccctttggcaggttccatgccaaagcctatcccaagctggagaactgaaggaccctactgggttanaaaattgagtcttggaaaaactgacccancantcnaaccatggagggatgttgcggaaacaatggaccctccactccaaaacatcatgananaacacacaacgataaacaagacacctaaatacggnaacgtgtttacaaaatancanaaggagaaaaganaatgangacaccaggatatgcactatgatctcagtggcaaggcacagaganatatatgcctgatgcacaaacatcaggactgtaatcacacananacagttatgtnacggtggtgggattatcggcacnttnctttantttcaaattccgtacacgttgcnantttagcaaaaattacacaattatcnnannaaacaccaaatnagtg

SEQ ID NO: 27755 - DNA, 501 bp, Homo sapiens
  misc_feature (1)...(501): n = a,t,c or g
aggtaaagctggtcctccaggaggcagttcccgtgcagcatttccacaaggtggtanaggacggggccgttttccaggggctgttcctggtggggacagatttcctgggccagcaggaccaggagggccacccccaccttttccagctggacagactccaccacgtccacccttaggtcctccaggcccacctggtccaccaggtcctccacctcctggtcaggttctgcctcctcctctagctgggcctcctaatcgaggagatcgccctccaccaccagttctttttcctggacaaccttttgggcagcctccattgggtccacttcctcctggccctccacctccagttccaggctacggcccccctcctggccaccacctccacaacagggaccacctccacctccangnccctttcaacctcgtccacccggtccacttgggcaacccttacactagctctctccgcatcttcctggacaacctccaggtgcccca

SEQ ID NO: 27756 - DNA, 251 bp, Homo sapiens
  misc_feature (1)...(251): n = a,t,c or g
gctggaagaattccttctttttctgttctctggaanagtttgttaaagactgttgtcatttctttgttactgtttanaagaattcgcctatgaagccatatctggtcctagagatctcactgtgggaggttctttacttacagattcagtgtctttattagataagggacnattaaaatgttctagttcttgtttcagttttganaaattgtgnnnnnnnnnnnnnnnnnnnnnnnnnnnnnnnnnnnnnn

SEQ ID NO: 27757 - DNA, 509 bp, Homo sapiens
  misc_feature (1)...(509): n = a,t,c or g
gaataaataaaataaaaatggataggtggtgacccactgagcctgatcataatacgaagaccagcttctgccactgcctttccagactcttaccactgcctgttgattaaatctaactcttcaacatcctagacaggcccttataatctagcttcaaatgctgtgcagccatcttgcctcaacttccctctcatttgcctacagcatctcgggacgcttctgtgtttcccaagtatacgctgttctttcgctctttgtgcctcgccagtgctttccatgtgcctcgtagagttatttttcttgaagaggcagctcaaatgtcaccttctccagaagctgctctccacttgctttaggcagagtcagtcacttttcttctagattccaaagtgcctgatccanttggttgtgggttcctggnncccaacaacaaaacaagatccacnaggcccttganaacnngtgtngagtgaactaataactgtattatanaaagcataangaaaatg

SEQ ID NO: 27758 - DNA, 488 bp, Homo sapiens
  misc_feature (1)...(488): n = a,t,c or g
gcatttatcaagttcattgaacacctgctagctgcctttacattggcatgagccaggcttgccaagaggaataaggggtgatctttttttttaaaatgttcanagtctancgaagacagtcatgtatacagtgtggtaagtgctgtaacaataatagtgtaagtgctatgggtcagggagaagggagtaaagataagtttcatgaaggaaggaggtggcatttatgttgtattgtgaagaacaagagtaattttccaggaaaagaggaggggaagaatatttgccgagataaaatggaacgtacaaagcttctgtgagtgcaggcttagagtgtgaagcaatgacatggganaaggtgatgggaattgatgctgggagtgtgagttgangacaggcantgacaggccatgtaaattttgccaagaancctgaatttggatcccccanggcnatgcnggttacccctggaanccaaagggttccccgaa

SEQ ID NO: 27759 - DNA, 625 bp, Homo sapiens
  misc_feature (1)...(625): n = a,t,c or g
ggtttnnnggnnccaaaagcccannggnttntnnnancngggaacccggtttctgaaggttaagancctggtatgangtgagngttcgctcgancgctcttcctctctggttttctccaagcgggtcttaggacggagactccgtcgtctacggccgacgacctcttttcgaccgcggagcggaggattttangacggtaaggaattggtttagttacgctcggtctcgcgattcgttcgtcgttctttctaatgattangccgttttaatacataccctgtgctacccggataagtaggtgacgcttagaaagaacgtgcgtccccaaaaggttgttaggagggtcggcgttgggatcttatgatagatgangtagtcacctaggcgcgaagtcgctagcggagaagcttataagcgtcgtaagctcgagtcggaacttcgcaaggagtcgtaggagtcggagttcgagaacaaacggcgttcgtccatactacttcgtcgacgtgggtatcggatttttcgtcgcacgagaaggaganttcgtagcatcctaagatttctaaggttncggttttacgtggggtaatgcncttgggcgnttccgtgtagnaancctccgtcgga

SEQ ID NO: 27760 - DNA, 603 bp, Homo sapiens
  misc_feature (1)...(603): n = a,t,c or g
caactacatatccaaaantatcatcananggaacccggtttctgaggtaanaacctggtatgagcgcgtctaagagtagggggttcgaanaacggtcttctcgcccataatatatttaataggaantcggggctactgcgacgaggggtataaatccgcggttctttcatagataaacgtttcatacgcggatttttcgtattcttgtacggtccttggggaggattaacggtaaaaggtcccgaaggttctatccccgtaggtagaagcttcgggagcgggcccgggaacgancgaagggtcggaggggtaggatagcttctccttaggagtcgagtcgtggtactgggccgaggaggggtttttcggaatttacttgcctagtaatangctcgtccggtcagtaagtaaagcccatcccttctctacgttaaggcattcggaacataagaagacttttaatagtaatttattcgagcacaacctctcgggggttcgtnagtttgtacgagatantaagacgaagggcttcganacctactgttaanacnagaatnagattttggaacggaaggttacctcggaggnccgacaanntccaaa

SEQ ID NO: 27761 - DNA, 580 bp, Homo sapiens
  misc_feature (1)...(580): n = a,t,c or g
tcatancngggaacccggtttctganggttaanaacctggtatgagttctgtctctaccttcgacgcggatactgatcttgatggtgctcctaagcacgcgtcgacttgancttatctggtcttttgtcttggggtcttggtcgtagagagtaaggagactgcgtgtggtcataagcgggtcgagcattacgtggatactcatgataaancgctgggtgatacgtagaagtaaggtcgtgatcgcgagcgctcgggtggtgggtgtactctttattagagctaggataagaagacctatgcgcatggtcaccttacggttcacggcttcgtttagtatgttaccctaatcgaggaaaactaaagttaagcattttgatcatgaggctattcgggtcaatgatggtcatcgagtatcttagtttggggttcgtcgtctaagtagtaatcctanagtttttgttccgtcgancttctccgtaggtcggtttcgtcgcttcgtggaattctcggcaatcgtcgcttaataaggttccggaaaaaggcanttcggtaaanaaccaaatgcnccgtaaataaaaa

SEQ ID NO: 27762 - DNA, 543 bp, Homo sapiens
  misc_feature (1)...(543): n = a,t,c or g
aacctggtntnatgacgancgggatatctaactcggttccaaaaagacatataaanangggtcgcgggctttcggaaaggggganagccgtttcccatagaactatctgagtttcccttagtatcgccggctcgacgaatatggccgccccattccanccctctccggaatacactcgaaaattccttttataaacaatccgctatattccccgccctacctcgatgctcccagccccagctacgggtccctcctattcgtctcaggcgtaaaggtacgccgggaaagagacggacgccggggaangaagagaggagacggaccctaagccgggatccaggaggagagcaggcgagacgactagatattggagcctantgctttantagctccggaaaangaggagttcgtcgagttanganggacaaaaganaccnttagtccgtanaaaaacatcagtcccctcccctcccccgcggangggggattggtaggataaggccgggaagnctgannagggcnnnaananaatnntcnccggta

SEQ ID NO: 27763 - DNA, 614 bp, Homo sapiens
  misc_feature (1)...(614): n = a,t,c or g
cttcaggttcaaaaaaccnatannngaanctcgggttctnaggnaanaacctggatgaggtaccccgtaacggagaaaatcgagctcanaaacgcaaccgactggttcattagtatatagctgagacccaaacttaagtttgctcgagcgtgtccgggcgtccctctttgtgttaggtcgcaaagaattagaacggnttttaagatttctatgtcttaggtaagtaagcaaggatagggatctcggaacttaagtangccgcgaagcccgaacctcgttctactcttcgatcaagtcccgcgattccggttaagctgtccaagttcgcaaacggggacaacatccacactcattccacaagccgaagagcaatcaagaacgaataagtgcaaagtacccagcatangcacttgctattactcgccccgagtcgcgaggtacccgcctacataaatctcgacccattcgaccgggccttttcgccgggnccgggagtacttatacgtccacgttctnaaggtatncgcctttanatgcncctacttcccgnaanntttggggnntngccaananagnccctaggtttggattaaaaggttaaccccccagagtaa

SEQ ID NO: 27764 - DNA, 626 bp, Homo sapiens
  misc_feature (1)...(626): n = a,t,c or g
ggccattatgacagccntacgaatttagaacgactcantatncnnaatttgnacctctaggccaanaantcggnantaaaanatgancacacnnggagcgcaggcccctcnattgttgctgccgccgctgctcctgctgctcaccctgccagccacaggctcagaccccgtgctctgcttcacccantatgaagaatcctccggcaantgcaagggcctcctggggggtggtgtcagcgtggaagactgctgtctcaacactgcctttgcctaccagaaacgtantggtgggctctgtcagccttgcaggtccccacgatggtccctgtggtccacatgggccccctgttcgggtgacgtgctctgagggctcccagctgcggtaccggngctgtgtgggctggaatggggcantgctctggaaaggtggcactgggaacctggaatggcagctccangcctgtgangaccaacattgctgtcctgagatgggcnggtggtctgggcttgggggcccttgggaacccntgnttctgtcanctnggtccaaaagggnancccggggnccccaggggnaanccnttttccancccggccccnntnttggggggncacttcccngaaaa

SEQ ID NO: 27765 - DNA, 590 bp, Homo sapiens
  misc_feature (1)...(590): n = a,t,c or g
atgcnnnnnnnnnnnnnnnnnnnnnnnnnnnnnnnnnnnnnnnnnnnnnnnnnnccaattcggcacnagggcgcgagttgtgtttgctganctggcctgtcgggaacctgatgtcctcatcttggacnanccaaccaataacctggacatacagtctattgatgcncnacgggangccatcaatgaatacaagggtgctgtgatcgttgtcagccatgatgcccgactcatcacanaaaccaattgccanctgtgggtggtggaggagcanagtgttanccaaatcgatggtgactttgaanactacaancgggaggtgttggaggccctgggtgaagtcatggtcagccggccccgagagtgaanctttccttcccagaagtctcccganagacatatttgtgtggcctacaagtcctctgtggtctcccctcctctgaagactgcctctggcctgcagctgacctggcaaccattcaagcacatnaangtgggattgtgaccttgatgtnaaccgggatcccaatcngattgatcaattcccgnaananttgtttggtccggttccctcaaaaaanggannggggctt

SEQ ID NO: 27766 - DNA, 531 bp, Homo sapiens
  misc_feature (1)...(531): n = a,t,c or g
gctggaacttcgaggccttgacgcaggccgaggcctggcccantgtccccacagacctgctccaactgctgctgcccaggagcgacctggcggtgcccagcganctggccctactgaaggccgtggacacctggagctggggggagcgtgcctcccatgaggaggtggagggcttggtggagaanatccgcttccccatgatgctccctgaggagctctttgagctgcagttcaacctgtccctgtactggagccacgaggccctgttccanaagaagactctgcaggccctggaattccacactgtgcccttccagttgctggcccggtacaaaggcctgaacctcaccnaggatacctacaanccccggatttacacctcgcccacctggagtgcctttgtgacagacagttcctggagtgcaccgaagtcacaantgggctatcagtccaaaaagggggggcttttgncaaaatattcctcccgattanntccaaggcccctccggnnnanangttnntacccctaac

SEQ ID NO: 27767 - DNA, 454 bp, Homo sapiens
  misc_feature (1)...(454): n = a,t,c or g
gccccggcnacgactctgggcacttcccctgaanctcctctccggancttgacttcnnggacctcctcccccgccccaattccaagctccagaaactcccaactcgtctgccgtccaaaaanctagctgcagtgttcaggacgtccgggaggaagcaancatgtgggggacanaacantanncctggactcnaaagggaaggtgctgaccaatggggccttatcaatttgaanggttgggaaggaggaattatatttgcaaaggggctgtctattatcatatttcctttgagggggcanaaaaaaatnccagtatcgacttttacanattgtngccagtgangatattanaancctatntaaacanaanancccaccttaacngattcattcattcanngtttgtatctgcnccanaattccantgacntggnggntaagggtnggtgnccatc

SEQ ID NO: 27768 - DNA, 515 bp, Homo sapiens
  misc_feature (1)...(515): n = a,t,c or g
gaaacggggtgcgcttctgccttctactatgccattcacttatccattcattctacaagcatttactaagcactgcctatgtatcagatatgatgttcggtgttaggaactgaaaggtaaataagatattgcggtaatgaaatcccaatctctgaagacagtctactttacagggtcaataatgagaaaagatagtgaactagttggaggaaaaggtcctattttaatatactatattatgtgtctttgaacaaaattctcagagtaaatgtgtgtgaggtgaaaactttgctttgttctggtctcttttttaattgtgaaagtaatacatggtcattacagaaaacactgctgacagctaacttctattccaggggtatattccagaggtaacttcctcaccccatccttgcctctttacagtcatatgatttantgaaaattaatagcatttaaaaacttangttantggcatcaacaagttccaaaaaaaaaggnttnaatgncgtgcccgg

SEQ ID NO: 27769 - DNA, 498 bp, Homo sapiens
  misc_feature (1)...(498): n = a,t,c or g
ggcanggatcctcaatgatgagcaatttgccccccctccaggagatatttggcaatgtcaangaaaaanttttggttgttgcaantggagggaaggtacttttgggtatctagtgggtacagacnagggatgctgccaagtatcctgtaatactcaggacaaccccatacaacaaagagtcatctgactgcacatgtcaatactgggcaagtttcaagtctctactatggatgatcaactgtatattttgggctctgaggcatatatgactactgttttgaccttgtaatattaacatcnatatntcaacancaaaatcaatgttaatatcaatatcagtattaatgtactanccaaaagtttantaaanacttantatttgccatgaaaatacatcaataggtnaatnatcacaatannatcctttacataggtaccttnacttatnanttttttananagagtacnacaagttcaaaaagggtangngggcttccc

SEQ ID NO: 27770 - DNA, 507 bp, Homo sapiens
  misc_feature (1)...(507): n = a,t,c or g
gagcattttcctgtaacaacgtggcttggaagaccccagacaacatantgccgctatggcacctcatggggagcctggttcatcatcatggtggtgacctggggcagtggcagtggcaccgggcaaaggcggcagaggctggtgggatctggcancgggccccangtgggtcntggtggccccagcaggtgacttcatctagagggggacaccagctgggcctcggcgggcacatacctttccaggaattagaaataggcacccattctgggcccccctccgctggtcagaancagaacttgacanncagggntcaggctgtgttccaggctcaggctgtgttccagcctctgcatactccaggccaggcacctttgggtgacngccctggacaccantgaanncccgttacgaaatccaaatgtgcanaggaanaaatgggggtgcatgngacctngggggtcnggaaaaaaacctggnaaaagcaatgttttaaatccnnnagaa

SEQ ID NO: 27771 - DNA, 520 bp, Homo sapiens
  misc_feature (1)...(520): n = a,t,c or g
gaaacccactccctctcacaggaacaaaggtctcttggaataaatagcaaatgctggaataaaaactatgttcattcagctgccatgatgtgaattcaaaaaggaagttaaatccaagggcaaagcagagaaaagaacatacaaaaatacacctatttcatgtacattcaaagaggaggctaatcactgtggacaaagggccctctggaatgacagctgtaggcagccagcagtgccacggaaatagaggcactgtcatctggagacacagaaaaatcacatcctcccacaactggcctctatgaaaaccaaccaggacagacaacccttccccaaaagtaatggccaagaataaaagcacaaatattgctggaaatccaagtagcctgttttactgctttgagtgacttatatgcaaacctaaggacttttttccgantccttgntcaagatttatcatataaagggcgtncaaaaattcngggaanatggnactttggacaaaaanttgggnccccgg

SEQ ID NO: 27772 - DNA, 509 bp, Homo sapiens
  misc_feature (1)...(509): n = a,t,c or g
aaaggttacctgagggaaatggantgggcacctcccgcaccaacagtcctgtanctggaaccttcctganttgactgtttantaactccacctcanngactgtgttcaaagaaaaatgttgtttgactggtttacccattgcctccactctggtgctgcacccaganaagtgccagnngtganaantgggacanacngagtnatgtgccagcttcccttgggaaaccanaccnagtgatacntgacttccantgctcagattttagctancgtttttcangatatccactcncctgtctgtcnctnnnctacngtctcnccaccctcttttcgcancccacgtnccctcttcatgactgcggttcatgnanncccaccntnctccattntcggatcancttngnaangcnnangtnactagttctccnaaaantcnncagnnannnggaattctttttcngngttccagctntntngngccnggnntttnnnantgnaantcngnctaa

SEQ ID NO: 27773 - DNA, 512 bp, Homo sapiens
  misc_feature (1)...(512): n = a,t,c or g
gagcattgtgaccagagtcaaacaaagccatgagagaaataagttaaatatctataaaagatatagtccctagagataggaagaacatgaaggtaattcaaaataaaatgaatttatcaagtaaataaattcattggtataccaacaacaacaacaaaagattaggttgtaacttgaacctagagactaccctgttgacaacactgtcaaaactggctaacaaaaaataaaattagccaggagagaatattacttcatgaaaaaatgaaatcaaaattacttaggatgacataattttgcattctcactggacaagcacctttcaacattaanaaatannnnnnnnnnnnnnnnnnnnnnnnnnnnnnnnnnnnnnnnnnnnnnnnnnnnnnnnnnnnnnnnnnnnnnnnnnnnnnnnnnnnnnnnnnnnnnnnnnnnnnnnnnnnnnnnnnnnnngcngggtatgnaaaaatttaccangggttgggggaaacccccgttnncccggtaac

SEQ ID NO: 27774 - DNA, 519 bp, Homo sapiens
  misc_feature (1)...(519): n = a,t,c or g
gttaacctctggagcatcatgaanaactgcatcggccgggagctctccaggatccccatgccggtgaacttcaatgagcccctgtccatgctccagcggctgacagaggacctggagtaccaccacctgctggacaaggcagtgcactgcaccagctcagtggagcanatgtgcctggtggccgccttctctgtgtcctcctactccaccacagtgcaccgcatcgccaagcccttcaaccccatgctgggggagaccttcgagctggaccgcctcgacgacatgggcctgcgctccctctgtgagcaggtgagccaccaccccccctcagctgcgcactacgtgttctccaagcatggctggagcctctggcaggagatcaccatctccagcaagttccggggaaaatacatctccatcatgcgctaggtggcatccaactnanaatccaaggcaatggggaacaatacntttggnggaaaanaaccaangggtcaaaaaannancccnggggnagcc

SEQ ID NO: 27775 - DNA, 590 bp, Homo sapiens
  misc_feature (1)...(590): n = a,t,c or g
nnnnnnnnnnnnnnnnnnnnnnnnnnnnnnnnnnnnnnnnnnnnnnnnnnnnnnnnnnnnnnnnnggcacnaggcatatctccaattcactaaactaaaacttggaaaaaattanatttaggaagcttctacctanaaagatcacacgtgtantgtttctananctctcattagcagcanaanccacanagcactggncttccttccanantcctgtnctangaantttatcantctttagtanaanaacnacaccaaaanacantcanctgcaaatggantgaatcaccannatcctgttanagctcanctgttttcacataacttcngnaatagatcccantgacntctgcagccanaagtaattcnattttanccacnangcagtagttactaaaagagaanntntctgantgatctgtgctttttgtggatgtgggactnttcttgggtttggntttngntgggttgtntttgcnttcctgtgtntnacgggtntggnaantggggctggactcannaangnctgnggagattgggannctnctngggannantgaatagnatgcctcccaaatggnnntccccgg

SEQ ID NO: 27776 - DNA, 503 bp, Homo sapiens
  misc_feature (1)...(503): n = a,t,c or g
gagancaccagcaggcccttgatgttcttgacatggaagagcccatcaataaaagattatttgaaaattacttgaaggatgaaagtggcttcaaagatccctccagcgactgggaaatgtcanagtcttcaataaagagttctatctgtcttctacgcgggaaaatctatgatgctctatataaccgaaccctggctacctacagctacaaagaagctttgaagcttgatgtctactgtttngaagcgttcgatcttttaacatcacatcacatgctgacagcacanggaagaanaanaacttcttgaatcactaccccttancaagctgtgtaatgaacaacaggaattgcngcgttttcnatttgagaacaaattgaaaanatanaanaagccnagtgaaacgtcatccctgaanctgtagatggcntgcaaganaatctggnatgtgggantgtctttanctnangaganattatnnaactggggatttaaaaggnggga

SEQ ID NO: 27777 - DNA, 557 bp, Homo sapiens
  misc_feature (1)...(557): n = a,t,c or g
gcctgtttctgagtttctgataagcttgtccaagtggagcacaggctggncaatttataagacagtattgaagtcagagcaattacaaaaggaaaggggtaagtttcttgtgtgatgtgctgcaaacactgacctctcaaaatttattcggccctgtgtgtatatacgtattcatgtctgcacatatgtgctagttcacttatacatctatacatacacacantcacatatacccaagatctgatggaatagacatgaatttggcttanccagggaaattatagaaagaataatgggaatcctaagcatgtgggaaatgggaaacaatgacaanngcgcctangtangaatacaaagcaactgggtgtgcctaggagaaccngangggcttgagcatggncataantccagacttgtattgnaanaaaatcaggaaantcaagntacaccaaggtcatgnaagganctgaatgtcangtcaagggnccnanccgttcttccaagtaatgnggggtcnntnnaangattngggcnagggnaancncctaggnantttg

SEQ ID NO: 27778 - DNA, 550 bp, Homo sapiens
  misc_feature (1)...(550): n = a,t,c or g
ggagggacaccaatagcaaaaagatgaatctgggggttggtgcctaccgggatgataacggaaagccttacgtgctgcctancgtccgcaaggcagaggcccagattgccgcaaaaaatttggacaaggaatacctgcccattgggggactggctgaattttgcaaggcatctgcagaactagccctgggtgagaacagcgaagtcttgaagagtggccggtttgtcactgtgcagaccatttctggaactggagccttaaggatcggagccagttttctgcaaagattttttaagttcagccgagatgtctttctgcccaaactaacctggggaaaccacacacccatcttcagggatgctggcatgcagctacaaggttaccggnattatgaccccaagacttgcggttttgacttcacaggcgctgtggnggatanttcagtnantgtggcnttcagggtgagaaaagtgaataaaaacncctggcntngcgganatttaagtnccccacaaggcccaatatcngnttaaantaccggggaaaacct

SEQ ID NO: 27779 - DNA, 550 bp, Homo sapiens
  misc_feature (1)...(550): n = a,t,c or g
gccattttagtatttttttctctttattaaaaaatcatcactgaaaaatcttttaaaatacctgcaactaaagtatccccaagaaccccagtctaaggggagtttaaagagcccctctagaatctaaggaggcataacccaattggaacctcaattgcataattgcagaaacaaaagcaaactctacccacatcactactggtatttctgagactcccaggacagcttacatactcttggtagccccctatccttccagatctctgctctaagcttctctgccattcatttctgcctgtccaagctcccccaagctgccatagcatcttccctggtcttcccacatgtagatattggcctgcccctaattccccaaagcacaggnaacaccaaaccagagtgtttaaccaactctacttaagtcctaaggngactacaaagccactattataganganattttaaataaaacaatgggtaaaagtgggctcatccaaacacaaggnactttgntcaaaanaacccaatttnagcaaagganggngggatt

SEQ ID NO: 27780 - DNA, 541 bp, Homo sapiens
  misc_feature (1)...(541): n = a,t,c or g
ggggtgagagctaaaggaatttatccgagaacaactggagctactccagaccaccggaggcatccaagggacattgccactgactgtccanaaggtgttggcatcccaagcctgccatggggccattaagtttaatgatggcctgagcttacaggaaagttgccgccttattgaagctctgtcctcatgccagctgccattccantgtgctcacgggagaccttctatgctgccgttagctgacatagaccacttggaacaggaaaaacagattaaacccaacctcactaaacttcgcaaaatggcccangcctggcgtctctttggaaaagcanagtgtgatacaangcagagcctgcaacaatccatgcctccctgtgagccaacatgagaacangaatcactggtctaaaagggacaaanggatttcactgttgcctcctgacaaagagcagcagnagcaagtncancacgggcctgactgnatcanccaatntcccngngancntnaaaaacanggtcccngganaatncttcctgg

SEQ ID NO: 27781 - DNA, 545 bp, Homo sapiens
  misc_feature (1)...(545): n = a,t,c or g
agcatagggctcggcgtggttttagcttcaagagtgctctgagaatgtgattttcaacatgcaaaagaggggaagggagatgagagagtacacaaggttcattaaggagaagcaggccaacttcactcaggcctaaggctgagcctgctggggtttgctcacaagacattcagatccaggatagtgttctcagccaaaggcaacaagcgttctggctgctgctcgcccatctgctctgatgagactctcccaaaccctggactcccattggtttcattccaaggaatctcctggaggaaagataagcaccagttaagtcacagctgtagaaataataagatctggaggggcacttatatctgtttggccgagttagattttcaagcangccaagtatgtggtgatggtggctctcaatctctctgtgcctttcctcacccatgggactcctctccctgtccaaaagccagatacnattcccaaggcttctggctaccaaagncctttccttgggnngggtctaaccttcccttagccaacctttt

SEQ ID NO: 27782 - DNA, 537 bp, Homo sapiens
  misc_feature (1)...(537): n = a,t,c or g
gggaaagaggagacatatattttgtaaaatctccccagatattttgctgtatgctgtctatgaattgaatatacttagttcatctgttattactgttgctctgattctaaccaatatgagatctgaggtcttctgacacttcccattgtaccacttacttatatgatatccaagattgtggtctgggaggccagcagtcaagaggaagtttatcttctcttaggactangtgctttctgtgtacctaggacatgtggtctttttcatggggagtgattctgcagttaanacagtggttctcaaccccannnnnnnnnnnnnnnnnnnnnnnnnnnnnnnnnnnnnncgangacatttctagttgtcacaactaggggatnnnnnnnnnnnnnnnnnnnnnnnnnnnnnnnnnnnnnnnnnnnnnnnnnnnnnnnnnnnnnnnnnnnnnnnnnnnnnnnnnnnnnnnnnnnnnngacatgaantnntcctgnaggtaagtanncangnncccngtactttnaaaggggaanaaaggat

SEQ ID NO: 27783 - DNA, 549 bp, Homo sapiens
  misc_feature (1)...(549): n = a,t,c or g
ggcaccttagcggttcgcctttcatttgagtgggcccagggtccanaaaagggtagatattcaggaagaattgatcaccttttggatgccaccacacatgcctaggcacaaaataactcagaaaacagtgataaaagttgtgattgtggttgttgtggaaattaaagtagcctcccctcttaagctttgtgaacttcagcaagctcctgaacccatctggaccctctctctcatcagtaacgcagtaacgtanagatgaaaccctaaatgccatccggtgacatcctggattagaccctgaatcagaaaaaggactgtagtgggaaactcgtgaaatcctaaatacagtctgtcatttacttaataagtaacataccattttcataagcataccatgggctgggcatggtggcttatgcccgaaatccagcattgcgggaaggtgaagcaagctgatcacttgangncangagttcnagaccancctggngaacatgggaaaaaccccgttctactaaaatacnnnaattcccggagtgtgggggggcc

SEQ ID NO: 27784 - DNA, 541 bp, Homo sapiens
  misc_feature (1)...(541): n = a,t,c or g
gaactgggattacaggggtgagcccccatgcccggcccctctccatccttcaatcccagctctcgttggcgctcctctacccatcccaggagctgcttctgccggcctggctgtggcgttcanaggcatctggagggcagtggcgatggcagtgggggcagcttgtctctctgagccgagtacagcccaatttggagcntttccctccaggaaaggcanctgatgtgtgcagacagcacaagtgtggagtgccagaacagttaatcctctgggctatttatttannnnnnnnnnnnnnnnnnnnnnnnnnnnnnnnnnnnnnnnnnnnnnnnnnnnnnnnnnnnnnnnnnnnnnnnnnnnnnnnnnnnnnnnnnnnnnnnnnnnnnnnnnnnnnnnnnnnnnnnnnnnnnnnnnnnnnnnnnnnnnnnnnnnnnnnnnnnnnnnnnnnnnnnnnnnnnnnnnncaatttantttgtnttaantttttatttantttttgggtcaaaatccccnccgncntcccaggtggagtnnattggtt

SEQ ID NO: 27785 - DNA, 528 bp, Homo sapiens
  misc_feature (1)...(528): n = a,t,c or g
gcgattgggtcatattgccctcatgtcagcatgtancacccgtgaccacagcacctaatccgattgttttcacattttcctccagcccctcctatctgtaagcgtgcatcgttgctcagtgaagtaacagccagtgtcctctgcgtggacagagccttgacaagacgggctctctgtaattaggtcacantgtgtgacccttttgcaattcactgtcctggccgatttacgtgcttgatttantgaaatgctgctgaaagaccctgactttgccccagctctgcncatcttcttcacttccttcctgtctgcatgctgatgtgaagggtgtccctcccaggacttaaccccaagcangccttgtccanctcccctgacaccaagggtctcaaccaagtcaacgncanagnccacanagcagggttcttccccangnggngttcttaagggngancancntancctggcggcnagtttttccccctggccaaggtggttnggtcagcngttaaanggntnnnggnggta

SEQ ID NO: 27786 - DNA, 535 bp, Homo sapiens
  misc_feature (1)...(535): n = a,t,c or g
gggtttattaaanantgtancctctcaaggtgganaaaaggcttgtgagccaagtgagttctcccctcctctatcttcatctggtgcctgaatgccaggtgttgtatccaantggtgaggtgacctttgcttgaaccctccactgcaggccacgccacctttgagttgactctgaccactagaaagtccctgtctaggctgatctgtgggtgtacangggtttgaagacctgctctaccccaagaatcagcccatccggcttcttcccagtttgagttttttcctcatgacatgatttctaggcattantcatctttttttccatggaatttcttgcactttgtcnatgtcatcctgaagatgtggcacccattgaaactgtggtaataactgtggctgaaaagcctgcaatngnnttaatgttctcagccatgatattaggcnaannttngnananatccattgntgaaacccananctttttttanntncgaanggnttttanaagncanggtangcnnttcccattttttcc

SEQ ID NO: 27787 - DNA, 509 bp, Homo sapiens
  misc_feature (1)...(509): n = a,t,c or g
gggtctcctcaccaacccttggcacagtgggtttcatcttcaccttgaaggagagcaggccagacaagatctcagcacagcttcgcaaggngcgtccaccctctcttctcttctaagagttcacttggaaggcttggcaaaactcagctctcaggtcacttctggcttccaacattctataaatgctctcagaaaacaaaagtccaaggnaaaaactttcaccacacaatcctttcactccatcatgtctctgagcacccttatccatgtacattccgtcccaactctatgtatgtattctgtgtgcatgancctgggtgtgcaccctcgctggacttcctgaaagggaggggccaaccaagactgcatgctgggcaccatgaccggaggagggaccccttcaccatgcatcctctgggaccctctantcnctctcanacattccggggtggnagggaccttnancanaanttcattnggggnnggaaacanggcaattgggcattatg

SEQ ID NO: 27788 - DNA, 385 bp, Homo sapiens
gcagcagaagcagaaaccacaaaacggcaaagctccctgctccttcaatagacagaagcacgaaacctcccctagatcgttcattagctccgtttgatagagaacccttcacactaggaaagaaaccaccattttctgacaagccctcgattccagcgggaaggtcactcggggagcatttacccaagattcaaaagcctcctttaccaccgaccacggaaagacatgaaaggagcagccccctgccagggaagaagccacctgtgccaaagcatggatggggaccagacagaagagagaatgatgaagatgatgtgcatcaaagacctttgccccagccagcactacttcctatgagctccaacactttcccttcaagatctaa

SEQ ID NO: 27789 - DNA, 416 bp, Homo sapiens
  misc_feature (1)...(416): n = a,t,c or g
ggaatttggccctcgaggccttnaattcggcacgaggcgtggnggccacagactgtgggtaccgggtccgagggactcgcgcttttctctccgtgccatggcgccagcgaaagccacgaacgtggtgcggctgctactaggctccacagcgctgtggctttcgcagctcggntccgggacggtcgccgcgtccaagtcggtgactgcccacttggccgcnaagtggcccgagaccccgntgctgctggaggcaagtgaatttatggnagaagaaagtantgaaaaattttggcagtttttggaaactgtgcangaattancaatttataagcaaacagaatcagattattcttattacaacttaatcctgaagaaagctggacagtttctagacaatttacacatcaaccttttaa

SEQ ID NO: 27790 - DNA, 489 bp, Homo sapiens
  misc_feature (1)...(489): n = a,t,c or g
ggagggannntnnntntanatttgaagcctcgtaacnncgnnnnnnnnnnnnnnnnnnnnnnnnnnnnnnnnnnnnnnnnnnnnnnnnnnnnnnttnattcggcacgaggggggtggatgngtccttagctgcggtgagagggcagcttttctcccacacacagccctgcagctctgngcaggaaagatgagctggccctgcactagcttcacctcaggacaccccagcaccggcattgccacagagtttcggaaaatggtcacagaaaagcacagctcagccttccctaggctctagggagatgtccctggtgagtggtgtcaggtcccgctccctgcctttagctgtccccagtgctcctgattttggcttaaaggggctgctggggtcttagggtttctggntttctctctgatgtgtaactcttctgtcttcagaacagtggaagcagctctggaatgnatgttaagtgcaggaaaggctagaac

SEQ ID NO: 27791 - DNA, 380 bp, Homo sapiens
  misc_feature (1)...(380): n = a,t,c or g
nnnnnnnnnnnnnnnnnnnnnnnnnnnnnnnnnnnnnnnnnnnnnnnnnnnnnnnnnnnnnnnnnnnncaggaggaccgcttatgcccaggaggccaagggtgcaatctnnnnnnnnnnnnnnnnnnnnnnnnnnnnnnnnnnnnnnnnnnnnnnnnnnnnnnnnnnnnnnnnnnnnnggtactgctaagttttgcatcaaaaacaatcttttcaacattgtttaatccaatgccttgacaaagaaataattaacaaggaatacacttggaaaagggtggtctanaaagggttcttagtctttaggaacaaaagagatgagaaaaatacctacaggtagaagcaataatatctgatggtattattaaaaacaaaactgtt

SEQ ID NO: 27792 - DNA, 508 bp, Homo sapiens
  misc_feature (1)...(508): n = a,t,c or g
atttntnnnnangtaaantngnngannaanntnnnntaatttgagcctcgtaagaccnnnnnnnnnnnnnnnnnnnnnnnnnnnnnnnnnnnnnnnnnnnnnnnnnnnnnnntntaattcggcacgaggctagaggctctctcttatctaagtaggaagccagaggaggattctggagtccaatgcccacccagcctcaacagtcttgaccttcgagagacaaaggcagcactactgactactagtactgcctactagttccttagcaggatgttaggaagaaagatgaaattggtaccacagccctaaggagagagacagatgccctaagtcaatgccaagtcatgaccatggcccacaggtctatacttgcaacccctgctggactaggaccgacatgcaagcctgagcaaaatattatgggatgccaatgctcagtgggctcagttctcagaagtactcacctttaggaccggcatagctgctcgacagcgggcagtcctactgt

SEQ ID NO: 27793 - DNA, 376 bp, Homo sapiens
  misc_feature (1)...(376): n = a,t,c or g
gggaaggcctggttgctgatgctactttataaatgagttgcttgcattttcacagagaatgaaggaagacgtaacatggctccagaaacttttcacatgatgattgggatcgacaaaaaaatgctaccctntagactagacncatttcatggagacaagcaaaatggtgccagggctgggctgactgtgggatgggatttggtactgcagacagattttgatttccacagttgagctggaaacaaactgtgccttcaaaaaatgacttttctaacttaaggttggttatatgttaagtgtgctactaacttaaaaaatannnnnnnnnnnnnnnnnnnnnnnnnnnnnnnnnnnnnnnnnnnnnnnnnnnnnnnnn

SEQ ID NO: 27794 - DNA, 603 bp, Homo sapiens
  misc_feature (1)...(603): n = a,t,c or g
gaacattccttatcctaagactgattctgaaatcatggaatccctcaagaattgtgtnnnnnnnnnnnnnnnnnnnnnnnnnnnnnnnnnnnnnnnnnnnnnnnnnnnnnnnnnnnnnnnnnnnnnnnnnnnnnnnnnnnnnnnnnnnnnnnnnnnnnnnnnnnnnnnnnnnnnnnnnnnnnnnnnnnnnnnnnnnnnnnnnnnnnnnnnnnnnnnnnnnnnnnnnnnaggaggctgaggcgggaggatagcttgaatccagaaggnnnnnnnnnnnnnnnnnnnnnnnnnnnnnnnnnnnnnnnnnnnnnnnnnnnnnnnnnnnnnnnnnnnnnnnnnnnnnnnnnnnnnnnnnnnnnnnnnnnnnnnnnnnnnnnnnnnnnnnnnnnnnnnnnnnnnnnnnnnnnnnnnnnnnnnnnnnnnnnnnnnnnnnnnnnnnnnnnnnnnnnnnnnnnnnnnnnnnnnnnnnnnnnnnnnnnnnnnnnnnnnnnnnnnnnnnnnnnnnnnnnnnnnnnnnnnnnnnnnnnnnnnnnnnnnnnnnnnnnnnnnnnnnnnnnnnnnnnnnnnnnnnnnnnnnnnnnnnnnnnnnnnnnnnnnnnnnnn

SEQ ID NO: 27795 - DNA, 507 bp, Homo sapiens
  misc_feature (1)...(507): n = a,t,c or g
gaccctgaccaattatgacctccttcctctcaagcanggattcaacacagaacactcatttactaagacccagcactagtgagaggatatgttttccggaattaactagagtttggaccccaagtacatattacccttcattaaaaaccagttcagtgctctgttcggaagactgcacattacctctgcacgctgctcttctcatactttgggaaggccgcactgttgtcagggctgaaataaaagtgcctgatttttgtaccccagcagagtgtggaactacggcagaagcaaatcagatggctcataaatcagatgtcctgtgacaactcttccttttatgaagatcagattttaaatggaccacttcagtttgggtgagagaaacatgagaaagaaggaaagcatttgtacattcttctagtcttttaataaaacaatgaatccttnaaacccctggtaaatttggcnccaagaaccncaggggccnanttggccngggaaatt

SEQ ID NO: 27796 - DNA, 529 bp, Homo sapiens
  misc_feature (1)...(529): n = a,t,c or g
gactggtttanaanaaataatcacaaggtaataaagggaaaattcaagtaatttctaaagctgataaagagaaaggtgaatcaacattacggctgggtaccagggttcatnnnnnnnnnnnnnnnnnnnnnnnnnnnaggagttcaaattcagcctatgcaaaatagcgaaaccctgtctgtacaaaaaaaataaagnnnnnnnnnnnnnnnnnnnnnnnnnnnnnnnnnnnnnnnnnnnnnnnnnnnnnnnnnnnnnnnnnnnnnnnnnnnnnnnnntgcactccagcctggagtgcaggagacaggaggagactctgtcactcaaaaaataatacagacatatatatagtatatcaaggaanagaggaaaacacacacacacacactanaactaggatgtttataaaaccacatagctttctttaatggaaaacncnaatgaaatgttccctggaccttacccanccttaaaaggggaaaaaggttttaataacggccgaagnttaatnccttaanggggggtaatt

SEQ ID NO: 27797 - DNA, 580 bp, Homo sapiens
  misc_feature (1)...(580): n = a,t,c or g
catganccaacatgactatcacggggaacccggtttctgaggttaagaacctggtatgagnggcagagcgacctcggaagagcgtacgtacgcgngnntatacgccccacnggtacgcgaacacgaaagacaccaagtatttacccgcttaccccaaacacacaaccgcactttcctcgcttaatagtaccctatcgnanatacccaagngctagccccccagtcgaaaaatcanaaaattaaggaagcaaactaccgtttaagtcagatccgactcccctagtacgctagagctctacgtcccanaaaattagagattatctctatcaccccgngcctacttctccctcttacccttagctatccccctcgtatcgatcctaggccaactccttacaagagggttccggcgcctctactccaccttcacgtttttatcaaacctcgagcaagcgcaatagttcccgnttcctcgtacgttattagcagccatcatccagaaaccgtnactnacccnaganncccaantcgttcattcnnagccggnggacaacttaantcgnaatcctcgatccataat

SEQ ID NO: 27798 - DNA, 502 bp, Homo sapiens
  misc_feature (1)...(502): n = a,t,c or g
gcgcatctacagcattgaaagagctaccagggccggaagctgtatgtgatggaaatgtcggacaagcctggggagcatgagctgggtactggcatggggagtggggagaggtaggcacagggcagggccccaggcatgaacccgctgcaagcccccatgtgtccccaggggagcctgaggtgcgctacgtggctggcatgcatgggaacgaggccctggggcgggagttgcttctgctcctgatgcagttcctgtgccatgagttcctgcgagggaacccacgggtgacccggctgctctctganatgcgcattcacctgctgccctccatgaaccctgatggctatgagatcgcctaccaccggggttcaaagctggtgggctgngcctagggccgctggacaaccagagcatcnatcttaaccataattttgctgncttaacacaccntntggaagcccngaccattggaaaagnccccaantttcccaacnttacttgc

SEQ ID NO: 27799 - DNA, 515 bp, Homo sapiens
  misc_feature (1)...(515): n = a,t,c or g
ggatagttgttttaccttctcctttcactagttcccactagtgagccagtggaaaagtcccactggttttctcacacatgagagcctcagtgctcagaaaaagtcttcaggagaccctgtgcaaatttatcacaaggtcaatatggcaggatgcccctttttaatagtagcttacttcttttgtctattttgaaatagtgaattcttgctttctatcaggtgataatgacttcataattactgnggggctcttgttaattccagccttctttattcatttctgctgctctagcagcatcttttaattgggcttagattcttgtgtgtgctggttttgaagatgtactgacagttcctttgtgtttcctagtgtttatgcttatttctgtttgtttcagatatgtttgctctttgttggaatcagaataaaggacctgggtgttgnatactttatcttttaaganaagtctgaaaataacctaaatttcagtngnaaaccttggaanacctgggcc

SEQ ID NO: 27800 - DNA, 508 bp, Homo sapiens
  misc_feature (1)...(508): n = a,t,c or g
gagcggcacgaggaacgctgtaagctttatgaatcaactgttttctaaatggtaatacatgaaatctgacaattttttatgtgantttattcaattttctaagaaaagtaaaaaatcagatncatagccgctcttctcttgggactagtcttgataccttttgtatttttatatagtgctttgntcatacccttcttgctnnnnnnnnnnnnnnnnnnnnnnnnnnnnnnnnttttggtgggggggtgggggatggagttttactcttattgtccntncntgaccacacttccgcattccaanctgnncnatangaccangactntngtctnnnnntcaatntcaatanangnnctcatntnnncancctgaccccnnctataccttncacttatcccnnantccntntctcnacnnnnnctccnnctcnntccttttttccctcnnnntntntantnnctacccnnnncnacnnctctctacccttccanantatnataatnnctcg

SEQ ID NO: 27801 - DNA, 517 bp, Homo sapiens
  misc_feature (1)...(517): n = a,t,c or g
ggtttcaccatgtttggtcaggctggtnnnnnnnnnnnnnnnnnnnnnnnnnnnnnnnnnnnnnnnnnnnnnnnnnnnnnnnnnnnnnnnnnnnnntctgagccaggctatttttgnnnnnnnnnnnnnnnnnnnnnnnnnnnnnnnnnnnnnnnnnnnnnnnnnnnnnnnnnnnnnnnnnnnnnnnnnnnnnnnnnnnnnnnnnnnnatgccagctannnnnnnnnnnnnnnnnnnnnnnnnnnnnnnnnnnnnnnnnnnnnnnnnnnnnnnnnnnnnnnnnnnnctatgtcgaaaggatcaagagaaagggaatgnnnnnnnnnnnnnnnnnnnnnnnnnnnnnnnnnnnnnnnnnnnnnnnnnnnnnnnnnnnnnnnnnnnnnnnnnnnnnatgtgctaaaccattcaggagaaatcaccttcaagactaataatcaccttccaccaggcccacttccaaccttgggattcnctttaccttgaattttngcaaanggctaaacatctcaggggg

SEQ ID NO: 27802 - DNA, 505 bp, Homo sapiens
  misc_feature (1)...(505): n = a,t,c or g
gggagaggagctgtaattggaacgcacactgncgtccaatgtgganagtctgatgggacaataccctgttggaagtgacaactgaacacactgtgttggatcggaggttccgttaggggatccttccttaggcttaacgacagaggcaagccttcgcatgccgtcagtctggagtttcctccgagtctctcatggcatctccagctcctgccctagttccgcactgttcttgcagtgtttcatcaactcctggagcattggaatggaaggggcttgggagatgattcctagacttcacaaacactcggcatgcctccctgcactgtccgttcctctgcccaaggccgatattgctaactgatcacagattctttcccacctcacaatccttcgaatgtgctccagcagnaccatttgcattctgntttaacgcaaaccctgntttatngttaaggacctnggaaccaanaanaaagggnntttttaagttnnatggggacccctt

SEQ ID NO: 27803 - DNA, 507 bp, Homo sapiens
  misc_feature (1)...(507): n = a,t,c or g
gtcttnnnnnnnnnnnnnnnnnnnnnnnnnnnnnnnnnnnnnnnnnnnnnnnnnnnnnnnnnnnnnnnnnnnnnnnnnnnnnnnnnnnnnnnnnnnnnnnnnnnnnnnnnnnnnnnnnnnnnnnnnnnnnnnnnnnnnnnnnnnnnnnnnnnnnnnnnnnnnnnnnnnnnnnnnnnnnnnnnnnnnnnnnnnnnnnnnnnnnnnnnnnnnnnnnnnnnnnnnnnnnnnnnnnnnnnnnnnnnnnnnnnnnnnnnnnnnnnnnnnnnnnnnnnnnnnnnnnnnnnnnnnnnnnnnnnnnnnnnnnnnnnnnnnnnnnnnnnnnnnnnnnnnnnnnnnnnnnnnnnnnnnnnnnnnnnnnnnnnnnnnnnnnnnnnnnnnnnnnnnnnnnnnnnnnnnnnnnnnnnnnnnnnnnnnnnnnnnnnnnnnnnnnnaatagaaatggggttcgcctggttccaantgggcttnaactctngcctaactatccaccttcttggcctnaaaagg

SEQ ID NO: 27804 - DNA, 509 bp, Homo sapiens
  misc_feature (1)...(509): n = a,t,c or g
gggtaactacagccttccttttgccaagccaggtttctccgggagatgtttcgggctgtgggttcatgtcaggagccctgcatctgctgaatcctttgacctggttgtcgtccctcatgttgctcctcatggctttcaccgcacatcctgggctctgatggttgtcagatggaaaccatctttgtagctagagacggccctgttatgtcatttaggacaatggcaactgtgggattactgctgcttcgcgggaggaccctgtcagggtatatgattaacatagggatcatcagctgcccccagtcgtctgctgggttgccactgcatgaacttagggcaaattccgtgccaaggagctggcccaccagagaatggttatggagagcctgcaccgttcatagagcacaacctntacctntacgcacttataacctgnnaacccaaggcttaatgaatgcccnngnanantgggtaagttttagggcagttaaaaccttatggaaaccagc

SEQ ID NO: 27805 - DNA, 512 bp, Homo sapiens
  misc_feature (1)...(512): n = a,t,c or g
ggaaaagaaactgatgctgctgaaaagagagaagcaattgatcctgtgtaaagagtgggcacctgtagngttttgccaaatgcacagctttgctctttgtcctgacgcaggcattacccagagtggtgggctctgtggaggatgaccgtttcgaggcagaaggcctgagcacagtctgccggggccccctcctgtgccacttgcatgtgcaaagaccacacttgtgctcaccatagctgagtggaggtcttanagacacacaatgcagccaccctctcccttgtttacacctgcatnattggccatgatgacactcagtgctaagtggtggctcatgtcatggcccccatgaantggtcttgaggggcaggagctggagactgcangacagtttaggactggaaatggggaaactggcanggctacttgatggcaaacctnaatgggtttnnanncntattacnagtcccggaaccaanttcccattaccnnagcccttcctgatccatttg

SEQ ID NO: 27806 - DNA, 626 bp, Homo sapiens
  misc_feature (1)...(626): n = a,t,c or g
gctggaagaannnnnnnnnnnnnnnnnnnnnnnnnnnnnnnnnnnnnnnnnnnnnnnnnnnnnnnnnnnnnnnnnnnnnnnnnnnnnnnnnnnnnnnnnnnnanttggnnngaaccnggcaancgnntttttngtcgncccggaaaanngcntcgnntgntngaaccaggacaanncaggcccaaaagattganccanaaaagggancncccnttnantcgcnaaanncntantcccntcagtntaaatcngancaaangcnnnaanntngcaancnncntnntgnatttnnggnaancnncntngnntaaccaaanancccngcttttnnattatngtcntaacnntgnnggggnttttananggagcacccacttttttanccacaaanggggttnccttccccgggntccctttanaggcttttnanaataaagcccntganattaaanggnaatccttggntacccnccccatcccccaacnnatcancntatngccnanttnaannncaatngggaaaaattnttcctttnggctttggaacccaattttnaaaaaatccttnttcccccctattttttgggnnccctttttttaaaacngggtaaggaacctttccccgg

SEQ ID NO: 27807 - DNA, 604 bp, Homo sapiens
  misc_feature (1)...(604): n = a,t,c or g
gattattcttggagaaaccctgtctgtttactgtaaccttttgcnctcaaattcctttatcaggaataactacatagccactatttacaaagccattggaacctttttatttggtgcagctgctagtcagtccctgactgacattgccaagtattcaataggcagactgcggcctcacttcttggatgtttgtgatccagattggtcaaaaatcaactgcagcgatggttacattgaatactacatatgtcgagggaatgcagaaagagttaaggaaggcaggttgtccttctattcaggccactcttcgttttccatgtactgcatgctgtttgtggcactttatcttcaagccaggatgaagggagactgggcaagactcttacgccccacactgcaatttggtcttgttgccgtatccatttatgtgggcctttctcgagtttctgattataaacaccactggagcgatgtgttgactggactcattcagggagctctggttgcaatattaagttgctgnatatgtatcggatttcttcaaagaaagaacttcttttaaagaaagaaaagaggaggactctcatacaactctgcatgaaac

SEQ ID NO: 27808 - DNA, 597 bp, Homo sapiens
  misc_feature (1)...(597): n = a,t,c or g
ggacctggccaagggagccagccagcgtgcnactgccnaagctccaggtctccaggacaagagcagttgtctgccatgagcacccatccaggatggagaataagggcttctctgcctctcagaattctttttaattgaagatgtcttgagctctgcaaagatcagagcaggtgagcatccactttgacatgaaggacaagaagacgcatggctcatggcgggcacatgcggctgccagtgagacagcgtctcctctgggagctgggcgggcacagcatcctcagttctgtgcccagccaagggtgagcatctctgctgagacagtccttttgctctcggaggccagggaagatggtacttanaggcttttcccctatcgctctgggtgtctaggaatcccaccagcttgtcttaacagtacaacagcttctttgaggacccagtgggtatggagtatagacagaacccagggttgagaacagaaggtgggcggcaggatcagagtgaaagcagaggcgtgaggagaggaaagcagggaggtctcctggctgccangtcaacctctctggcaaggctttctttgaccccgcccttttt

SEQ ID NO: 27809 - DNA, 605 bp, Homo sapiens
  misc_feature (1)...(605): n = a,t,c or g
gccnnnnnnnnnnnnnnnnnnnnnnnnnnnnnnnnnnncattccccagctccccatctgccttccttaatgagtaaaagcagcctgaggccctcaccaggtgcanatgcccaatctcgaactttccagccatcagaattgngaaccataaaaacctttttgttttataaactactcagtctccagcattttgttatagcaacataaaatgaatgaagacaactgcctttgctctgtccagcctggcagagccatgcagagcatcttctacccaagaacccttctactattttcaggcaatgttcacatcttctctggatggattctgtaaagcccaactcatatgccccacccggttcctagtctctaccacctccttgtggcacttgtctgaatagacacttatagttgtaaatgtctgttgtacagaacttactatacctcaccacactaaattccctacttttgctaaccacagccatggtgatttattcagacgtaaggatgtcaagtttcctgctccaaatacaactagcaggagcaaatcaaaactcttcttgatcaagcctcgctctcacctcctctgntctcaaccttcacatttca

SEQ ID NO: 27810 - DNA, 639 bp, Homo sapiens
  misc_feature (1)...(639): n = a,t,c or g
ggatgaccaaagtggactgagcatttcctagatcttgannnnnnnnnnnnnnnnnnnnnnnnnnnnnnnnnnnnnnnnnnnnnnnnnnnnnnnnnnnnnnnnnnnnnnnnnnnnnnnnnnnnnnnnnnnnnnnnnnatgttaaataacttacctagtgagtgtancataggctctggtgtaaaaagctgattcaaacacctgccttgccactgtgaatcacggccctcagtcctttcctgtgaaaannnnnnnnnnnnnnnnnnnnnnnnnnnnnnnnnnnnnnnnnnnnnnnnnnnnnnnnnnnnnnnnnnnnnnnnnnnnnnnnnnnnnnnnnnnnnnnnnnntagacaattctaccatgtcagcatcctgagtaccttttaattttttagagagatgggatttccctaggttgcccaatgtattangccaattcttgcaatgctacaaaggaactaacctganaacnggggtnaccttttaaggaaaannggggtttaaattgnccccaagggttctnaagggctgttnaaananccanggttgggggagggnttcagggaaannctccattcaatggggnaaggtgaaggggaaccagggaaaanntaanttggcctgggnaaggnggaaaaaaa

SEQ ID NO: 27811 - DNA, 615 bp, Homo sapiens
  misc_feature (1)...(615): n = a,t,c or g
ggctatatctcatactttactttctccctccttacagtagaagcctcctcctgcatctgtattagacaaacattgcagccctgaattgcatggcctctggccccttcgaaggcttacctgtggtattacccttcatctcctgtatcatcagtgttgtcttctccacttgatcattgtcattaagtcacttgtcttaatgtctgtcacctacttttaaaaaaaaaaatgcaaataaaacccatttgaactcatcttcactgatttatttctgcccactggatcanactcttggaaaaagttagctatgcttactgttgccacttgctcattcccactgtccgttcagctcttttctaatcagactttcttccacaccgttgcactgggaatattccttacaaggtcatcagcctctatctaatgaaagaaagtgttccattccccnggnctgtcantcaacctttaanancnattggcnnngggcnagccaaanaaccttttaaaaccccctttcgncncngggcttctggggaacnacctgaacaangtttggtttgtcccaaatcccggccttcttgccccctaangggngttctcctaaggtgcttgggcccc

SEQ ID NO: 27812 - DNA, 613 bp, Homo sapiens
  misc_feature (1)...(613): n = a,t,c or g
gagttgggagcactttgccgtcagatgatacagtgccccccaagcaccccacaggacagcgctgcctacatagtgacgtgatgttctgatgacaatagtgagaagctggagagcactgttgacagcatgttaccagcattctctttagcgtatccttggagctttgctaaggagacacaagtcagtggcctcaaatactgagcagctggtgaataatggaggcagaaggccacctcttttgggtgagggagctcactgcttcacagtggccttccagggacagtcttccagctttgcagatcacgaggggcgtccaggaagggctgaggccctcgtcctctgtgggcagtgacctccaagcccccaccctgtgccacaagctcaaccttttccaagtatggagagccttgtccagccctgtctcacaagcctctgggggaaatccccttgacctngaaagattaantgcacacccnncttatccaagggctcacccaaaaaccttcccaatttcananaagatctaccccggtgtggtggtcacnccgtaatccagaacttggtangcaaggtggtggattgcctgacccaggnntttagaacnncctggcaa

SEQ ID NO: 27813 - DNA, 601 bp, Homo sapiens
  misc_feature (1)...(601): n = a,t,c or g
gttttgaggagacagctcatatttttctgatttcaaaaaatgaggaaacgcaggctcagagaggataagtgatttgatgaaggtcacacagcacacaagtgaggaaggtctggctagactaaggctanacctgagtctatgaaccctgtagatgatgaaattttccggagggactgagaaatgcataggagttggagagaagtaatgttagtcaagtaagattggaaagattggacagaaatgaaattttatctacataatgccaaaaaataatacatcagtcgcctgtagctgggtggtagcaaatgtcagaggattagctgtgttttactttttaacctggatattctgggtaaagtaatcatagtacagtagaaagaatatggagggatccaaaggtctggatttgagcccatcctcagttactacatatgcgtcctcaagcactttgatgtgtcacttgaccctcctgggctttgacaaccncancctaaaatggttgaaccggctgggcacggtggtcaaacctgtaanccaacactttggaantcngggcaaggaggattcctgacccanagtttganacaacctatcaacatag

SEQ ID NO: 27814 - DNA, 593 bp, Homo sapiens
  misc_feature (1)...(593): n = a,t,c or g
ggtanatttttgacaaacagtggctgctctgctgactatcttttaggaattcaggaagcaaatcacatagtgacaagtccttacagacaccacttctagtaaatctctgtaaatgtggatagaaagctcagtgtgaggcagtgcgtagacctaacgtctacctttacatctgctgttgaacatgggcactacctgttacagatcctgtcaggctgttgaactggaggtgtacctttatcttcctttctagtgtctgaccctgcaagcctaatgttggtttgaacccttttggtttgttcagttgccagcctccatctctcccactgtatggccgtgcctagaccgatggcagccatcgaatattcctctgggctcacggggtgttttccacccccctgcagcacctaagatggtgggggaaaaggggttagaataaagcatctgaatacagttttcaggactcagcaaacttcctanagacttgttcctnaaaagntccttgcctcanttccctgcnactggaaagaagatggacaaanacctgccggcactgagaaaggcaantcaaaaacccatggggcttgntttggatt

SEQ ID NO: 27815 - DNA, 545 bp, Homo sapiens
  misc_feature (1)...(545): n = a,t,c or g
tgaggttaagaacctggnatgatggacaaaccgctctttaagggntctaaacngcacgtacagaaatccgaaggcgccctgtccatagttaggagcgtaatagaggccccggaataagtcgggcttcattagagttagaggcgcagtagtcgtagatccttatctcatttgtattctatacaccagccgcgaacccgacaaacgttacttcgaagagtaaccgacccaccaaccaggtcgacctagaacgcctccaggatctacccgggacacggagctaccacaacccaaaaacgctagtgtagcgtaacagaagacgaaaacggtattctttaggggtttcgcgggttaagtccctcttcccggcgagcggggccctctctgacggtcataacgttgcttacgggaagccgtcctactagatttaaatagcgaggtgtaggaagcgagaaacgttacccccganatagaantcgaggttagataggatctactagttagtagntagcannaccggcnacnatggggaaaagagtaaccttcca

SEQ ID NO: 27816 - DNA, 571 bp, Homo sapiens
  misc_feature (1)...(571): n = a,t,c or g
agggaacccggtttctgaggtaagaacctggaatgacgtggaaatcttcccctaatgaccgcgaggacaccaaaaccgatcgacggaacagaggtcttttaggacgttattatcgcgcaaaactgtagtcttctaaaccattctcgcccaaccctaaacgccagggcttaaggaagtttctcgccgtaattagacacgccccgaatttagcctacctaagaaattacggccggcggctactactcatccgcaccgcgaaaaattagaaaccttaaacctaagtctcctagccacggctcccctacaccaccccagaacgcgaaatccacgtcgcgcgttttcttccccacgcggtgaatataattcgttttgcacggcgttcaatctcttcgcgaatttcgggtcctttctacgcccaatacctcggcccttcttccttccgaagctttcgcgggttctccaaagnttcattccttcanttccaactccgngggctcgctaaaccgacgtaacaaaacggttccttcgacancggcttcnaantggntccnacgaggggaaaagganggta

SEQ ID NO: 27817 - DNA, 642 bp, Homo sapiens
  misc_feature (1)...(642): n = a,t,c or g
gaggnnnnnnncnnngttnaacccncaagnttcntgatcccaaaatantctatgggttgggaacccggtttctgaggttaagaacctggtatgagcaccgacccttatcctaaaaagcaagcccaacatcgcgaaatgcatcgccttcaagtaaaccataagcatatgacggctagagcagaagcgcgcatctccgacatcctttctcctttttctaatagcggaactccgtcgggaccccgctagcgtcgcccagacgggatgcccacttccacccgactaactttaaaaggtagttttcccgcggcagccccacatcgcgaaaaccagccccggaataccaagttaagaagcccgtaacanaactaaacccgcccacgcacctacccgagatagggctccgtcgcgctatttaggacgtangcgtagcggcacgactacggtttatcgtaagttccgattcttcggctttaagcgacttctttgttctagttctcggaacagctcggacggattataggtacgtantaatacgttcggacaanccgccaaccccgccgatagatctccntnangccgtntanggcggtnccngattttcggggntnagncgncttttcggttcngtttntnaaancgtcg

SEQ ID NO: 27818 - DNA, 599 bp, Homo sapiens
  misc_feature (1)...(599): n = a,t,c or g
ggttnccatgaaccnanangantctatcancagggaancccggtttctganggttaagaacctggtatgangtctagctacagcggcctttcgggaagttttaggatttcccgatccgcgataccatcggcccgtagatacaacaatcatatctagaggattacggaggtagagggactacggccctagggtatcgaaaatctcatgagttaagaggatcagcgtacggatcgaaagctaggtacgtttctaaacaggtcgcacccctcccttaggaacgcaattcccttttccccctcctcgattcgagttaagaccggaaactagaaagctcttcgcatacggagtcgaagaggggtcgtcgccccttgaacgccccttaccctataggtgttattcgtccgtttggggccggctccgagaagatatttaaacgcctacgttctanaaaggtagtanaacgttccccaggaaaccccccaaagcaacccgaagccacacagaagcccggaataanaagtagcgccttctccctcttctaacctacggaggngcaacgantacgngcgggtncganggctnnacggtagnccctaccc

SEQ ID NO: 27819 - DNA, 601 bp, Homo sapiens
  misc_feature (1)...(601): n = a,t,c or g
ggttnccatgaacccaaatgatctatnatangggaancccggtttctgaggttaagaacctggtatgangagaagtcgtagtaagccgcttcgacgactcaatcaagactaccgacgaaggcgccaaaacaaacagtaggacctcttacgcagataaaatagttactcaccggattcctacagtcagagaggagaagttaacgttcgggcctaaagtcctaaaggacaggtcgttcccccaggagtcaactctgccggcgagcccgagccgaagttaacgtctatcgattacctcaaaagtttcagggtttccaagaaccacgtcaaacgcattccgttcgcgctcacaaacggaataataaagctcgacgatagaggcacgcccgtagtacggcccatcgaacaccccaggtctatcgccganacacagcgtctagaaaaatagaccttccctaaaacgccatacatagtctaccgatcccgcacttaactaggtaagagtctcgacgganacggtaangagacgtacgcaccccttcgttcgtcgataatagnngtanctcggaatttaaggncgntaacaanccgatcccgancccca

SEQ ID NO: 27820 - DNA, 598 bp, Homo sapiens
  misc_feature (1)...(598): n = a,t,c or g
gttcctntccnaaatatctgtanagggaacccggtttctgaggttaanaacctggtatgagtatacataaagcgttcattatacgtcaattatcgtcgtaggtatccctcacagaagaatcaacccaactactattacaatttcacggggcaggacgacacccccataattcttaccccatagacgaagaaatcgaagtacagattcgtccacgcgagaagaaatgtagggagatagcctagctatcgtaactcctacgtttactangccctccgcgagaagaaaataagatcggtaatgttcgtccttcttctcgaagtcgctaagcaggaaagcttgggtcgtctcgtcagaaagagaagctacgcgtaggagtatcgaggtactttaggcgcgatatctccttattcagagtaccttgctctctacttctcgttacgcagtaaatcgtcacgtacttcctagtcgtaagggaccgaacgtactaataattacatangcggngaagtagacgtctttcagtcgagntctngggatgtatacgaacccggggtnnnanntaacttggggnttttttccgggaaannantttttttcc

SEQ ID NO: 27821 - DNA, 583 bp, Homo sapiens
  misc_feature (1)...(583): n = a,t,c or g
tcatcagangggaacccggtttctgaggttaagaacctggtatgagttanattatgggttctatagcggagtaaaataggcttcgcagtacttataagcactagtgcccctcgcttctcttctcgggttcggttccttcttatttttcttcttctcgttcttcttagggttattcttatcccctgagaacgaaggtaaaaaagaggaactcctcttcctatgtctagtcccacccgtttaatccaattagggagaagtaaccataaaagggtcttgttacgctatagacgattagaagatacataaaaactttagttcgtgggtctaaggagggtaaatctaactctttattaaaagctatatcttaagctttatactcttcaaactccgcttcctctaaaaatacgttttangcgccggagccggaaggaaggaaacggagagcggagcattaagagganaggaacgattccgcgaccctagagatngagtcgaaanagcgggccatacccctaaacgtnaaaactaatcancttggccaaagggaanccaanttacncaccgnaattgcagaaanttggtg

SEQ ID NO: 27822 - DNA, 554 bp, Homo sapiens
  misc_feature (1)...(554): n = a,t,c or g
agaacctggtatgangaacgcccttcgcanaagcctaaaaanccntaaagcaaggttcaacagcaagttcaacacgctatctccgaatcctaggaagttcaacacttaaaaagccatgcccaaggctaaaagcccccgaaccaatccccccttaccagcacggctacactccctccatcaacccgcaagccacgcaacccactaacccccccccgccgcctcgccctttaattctcacgctannacaaagaactatttaggttagatataacggtctacgtccgcaactttaatatcccgggaanttaaggcgggagaaccgtccgaagttaggaactcgagtttagttcgggtgataaagtaacattttcactctcataaaaaacanaaaacagttaggcgcactgatatatattcgcagctttagtcgtctangaggtaggtaggangacggtccgggnttanggccaattcgtaacgagtcacancntaacgggtgannnaagcnancggaatnctttntttngggnnaaanaaccttcngtaaantttaa

SEQ ID NO: 27823 - DNA, 641 bp, Homo sapiens
  misc_feature (1)...(641): n = a,t,c or g
atagngagggcnaggnnngtnctccnnangttnnngnnnccaaatcccancngntctatcacagggaacccggtttctgaggttaagaacctggtatgagtcggcgacccacccctaaacacaagccccgcaacgatgatccactcaacccacgcgaagaggacgatagtacggaacttctctacaaagggcgtcggacaggttctatctcttctatagttcgggctctcattcgttanaagtttagcccgcacgaaggcggtttcccattctaagcctaccctgtccggttttgctatntcgtagcattgatcgcatcctatcanctatagggatataggtcgtcttaagcgttcgacgtaggcgcggttcttaggtaacgcccgtcggcggcggtatcggtctccgttcgggtcctttaaatttcgtatagtcgttcttttccctcttggttatctttgggctctcgtaggtcttttcttattttaaanctctcgnaactcgattccttttctatattcagtctgganttttnagtagtttaacttagnctngnnaagcanataacggctttctaaggacagtncaaaaaattccnaaccttttanaancntaananccantccnggaacccncggttt

SEQ ID NO: 27824 - DNA, 588 bp, Homo sapiens
  misc_feature (1)...(588): n = a,t,c or g
aaaaaccnanatgatctantancagggaacccggtttctgaggttaagaacctggtatgagtcggacgtaccctctcggggcacccggggtccacccccaaaaccccaacacgggcctccccccgcgcgacccaagatatcccccggatctaatgccatacccccgaacgcagcaagcaaaccaattaaaaaagccataatccttcaaccccagcgatagtctcgttcgccagatctccatcccccaaaactcccctcacccctttctgtcggggtagcgtttcttcatttttagggccgangggattaaggcggtatggcggcatcgggggcgtggtagggatatttgattatattagagtgcgggaagatggcgggttccgcttttcgttcgcgttcgttcgggaagccccgcacctactccccgcacagccgcggtacccangataagctcccgggcattcacccctaccgcaaatactcgantaccanagctnagtcccctcaaaaaaanaaaanctggaanaanaagnntccaaccaangggnnnnnntccacntttccaggggggggcacccattccggttg

SEQ ID NO: 27825 - DNA, 606 bp, Homo sapiens
  misc_feature (1)...(606): n = a,t,c or g
ggttnccaaaannccnaanntgantctatcannngggaatcccggtttctgaaggttaagaacctggtatgangtataagcggaaatccgtacggataattcgcactcccttcttcgaaggaatcaaaaggaaagacctttgacgcgttaggacctcttcgggcgatctttcgcacactcgttaaggacaccgcgcacaccggtccgagagatgcggatttcggggaatatcataccccgaaaatctcaggtaccaaacatcccctaacgatcgaagcggatagatcaggaaccggtaaggcgacggaagaaatatctagtcactcatcaggaagaaagaaaaggttaacctactcaagccccgacgccgatggatcggatttactccctatattaagtcatcggtatattangctgcgggaggctcgatacatagagaaggctctcatactataagaagaaactcatagaatagggtcatctctaggaccagacacaacggaagcgnatttactttcggggaaaatattagnagancnatctnaatagcgaatatagtatccgtaaaaattccnggccgcctngncctnttggaaggcnatttaa

SEQ ID NO: 27826 - DNA, 600 bp, Homo sapiens
  misc_feature (1)...(600): n = a,t,c or g
tgaaccnancntgattctagtcancagggaancccggtttctgaggttaagaacctggtantgaggtacagggtctggtgcggggaggcagaagacgtcgctccatggaccgcagtacgtccattaggtactttcggctctcatatatcggacgttagcagtacatcccgagccgcgataatttaggtaccctctcaaataccgttaaacgctttttgggggtaaaataacttcgagacgagaattatccagaaggaagaagttagtacccctacctaaccgatagcaggcatgctttagagctcgcctaagacgaacaaaggataaaccgaggctctcgttcctaagagtctatcccgaacttcggcgtccgacccaatattctctcttacgtacagtcacacgagttctatactacgatangctcgattcacacacctttcctagttagttttcaaactggctatcttcctaattataactaacggtattcctatcgatttaaacgatactccgtanctacctcgacnaaatacctttcaanctttggantaactatnngctaagcttcggtgnccccttaaggngcaaaaaantttc

SEQ ID NO: 27827 - DNA, 556 bp, Homo sapiens
  misc_feature (1)...(556): n = a,t,c or g
acccggtttctgaggttaagaacctggtantgataatcggagttcttatttccgtaccttaacattatttccattttataaaaggagggcaccgatttatatagcaacgtcgattcgcggttagggtcggggaggcttaaccctcaactcgcgtcccgctttactcttatcgccttttattttcaggcccctgcaatattttagggttcgcaaggcccggcgccctttccctaagacgttatccctagatcccacctcggtctcgaaggataactttcatcccggggtcggacccgggtcggcgggcgcgggtatagtttcggtttcggtttggaagggcgcttaatcgggttcggcggtaccttggtgttaccatacgnctatatcggaagctttcgtctggataggagtcacgttcggccgtccagtcggctatttgttatagcatttgcatctagtantctagcgcttagatccttcattcctantangaaanggntgaccctataaagccganccgctttaattcggaaataaccctttggnnctngggaac

SEQ ID NO: 27828 - DNA, 517 bp, Homo sapiens
  misc_feature (1)...(517): n = a,t,c or g
gggcaaacaactattttgatagtcacagcagattgtttcagcagctgctaggtaaaaccaggctattcaccccaaatgagttttcccccggcccctcgactgtgatttagttgggtatgacatataatcacttttacagtgtgaactggaataatctaggagagcagtaaaaggaagtgaaatgccagtggagggctgagtttgcatacagttgtccctctttatctgtggcaaatgcattccatgttgtgttaattcaatagctatnnnnnnnnnnnnnnnnnnnnnnnnnnnnnnnnnnnnnnnnnnnnnnnnnnntggtctctctttctcagaatatctcattgtaggtaatatttccagactgtanttgactgtggggtaactgaaaccttgaaaagcaaaactgcanacaagagagatctactgtttgtgaagggaattcatggggtggagatgggggaaacagaatttngatgangcatggnaaggtgggaatggcatgcatnnttntatg

SEQ ID NO: 27829 - DNA, 518 bp, Homo sapiens
  misc_feature (1)...(518): n = a,t,c or g
gggcctggnanatccagaaaatggcttatngngttaatgaaataactcagtaatctanacattcttggatcactatgttgggcttgaattgttttttctgataacatctcttttggcaggagggtctcttgctatctgcagtagcatccaaaaaaacccaattntcaggattttgncttgcagtgtgttactgctgtgtgcatcacagataattgttgccaagacattaatgaatatctgatttgttactcacatgttatgtgagtactaatggcttgtactaatggctttcgcccatnaataaaggatagcatctgttatcatctgaggnacattctgttgagagtgtntcaagtgttactctctttttttcccctttggaattnggggcttncctcttaacttacnnttggtaatggaaganananatngtaangtcgactganaangactattattgnatcangaganatccaactttnacatnccgaagggatntnantngnnaanccncattt

SEQ ID NO: 27830 - DNA, 517 bp, Homo sapiens
  misc_feature (1)...(517): n = a,t,c or g
gctcacctgccaggctacaggttatcctctggcagaagtatcctggccaaacgtcagcgttcctgccaacaccagccactccaggacccctgaaggcctctaccaggtcaccagtgttctgcgcctaaagccaccccctggcagaaacttcagctgtgtgttctggaatactcacgtgagggaacttactttggccagcattgaccttcaaagtcagatggaacccaggacccatccaacttggctgcttcacattttcatcccctcctgcatcattgctttcattttcatagccacagtgatagccctaagaaaacaactctgtcaaaagctgtattcttcaaaagacacaacaaaaagacctgtcaccacaacaaagagggaagtgaacagtgctatctgaacctgtggtcttgggagccagggtgacctgatatgacatctaaagaagctttggactctgaacaagaattcggtggctgcaaanttgcatttgnctttcaatgccttggatgac

SEQ ID NO: 27831 - DNA, 523 bp, Homo sapiens
  misc_feature (1)...(523): n = a,t,c or g
gtcctcactgaccctgtcctggtatggctcctcatatgatgggggcagtgctgtacagtcctacagcatcgagatctgggactcagccaacaagacgtggaaggaactagccacatgccgcagcacctctttcaacgtccaggacctgctgcctgaccacgaatataagttccgtgtacgtgcaatcaacgtgtatggaaccagtgagccaagccaggagtctgaactcacaacggtaggagagaaacctgaagagccgaaggatgaagtggaggtgtcagatgatgatgagaaggagcccgaggttgattaccggacagtgacaatcaatactgaacaaaaagtatctgacttctacgacattgaggagagattaggatctgggaaatttggacaggtctttcgacttgtagaaaagaaaactcgaaaagtctgggcagggaagttcttcaaggcatattcagcaaaagagaaagagaatatccgcaggagantacctnatgaactggcttcacccccttaa

SEQ ID NO: 27832 - DNA, 516 bp, Homo sapiens
  misc_feature (1)...(516): n = a,t,c or g
gctgcttcactctggctctgacagtggtaggtgtcatcggtgacagggctgaggaggaggaggaggaaggtaatgctgatgtggtcacagtaaggatggcttctttgggcagtagtccattctggcgtggacagtcttgcaggcaggtatgcagagagattgtgcagaggagtgctgtgtgtaaggcctgtgtccttcagagcctcagcagcctctggggaacatcgctgttgccctcctgccactggcttggccttgcaggtctgcctctgtccccatggtcatgcagggtcactgagaggtgcccccaccaggcctagactggcttctggtccttggctgttggggccgctctcgagggttccatgaagtcacagcagtgtgtgtgcagaggggccaggtttggataattcgagaaaggatggttgaggagttttctgagctctctcttcctactttccacagttggagggaacttgccgnaaagtctcgaaaacatctgcaaattcccaggcc

SEQ ID NO: 27833 - DNA, 520 bp, Homo sapiens
  misc_feature (1)...(520): n = a,t,c or g
ggtgnnnnnnnnnnnnnnnnnnnnnnnnnnnnnnnnnnnnnnnnnnnnnnnnnnnnnnnnnnnnnnnnnnnnnnnnnnnnnnnnnnnnnnnnnnnnnnnnnnnnnnnnnnnnnnnnnnnnnnnnnnnnnnnnnnnnnnnnnnnnnnnnnnnnnnnnnnnnnnnnnnnnnnnnnnnnnnnnnnnnnnnnnnnnnnnnnnnnnnnnnnnnnnnnnnnnnnnnnnnnnnnnnnnnnnnnnnnnnnnnnnnnnnnnnnnnnnnnnnnnnnnnnnnnnnnnnnnnnnctagagaacacnnnnnnnnnnnnnnnnnnnnnnnnnnnnnnnnnnnnnnnnnnnnnnnnnnnnnnnnnnnnnnnnnnnnnnnnnnnnnnnnnnnnnnnnnnnnnnnnnnnnnnnnnnnnnnnnnnnnnnnnnnnnnnnnnnnnnnnnnnnnnnnnnnnnnnnnnnnnnnnnnngtacagttgaagactactttcagttgcaataactttactcatggggatgggtaaatgtaaaaagt

SEQ ID NO: 27834 - DNA, 513 bp, Homo sapiens
  misc_feature (1)...(513): n = a,t,c or g
ggactggtgcacttattatattaatgagaaggaatnggaacttgggagaaggccgccctcataagccgggctcttcccaagccctccgagcgccgaccaggccacatgatgggtggaaggagccctcctggggcctgtccccactccgggctctgtgcccggcatccaggagagatgcccaatgagctgaggcctgcacggagctgancaagtccctgccagcaggacangctcccagaaccaagggcctgcacccaccaggttctagaatggtgacagtgccaagctaaagcccaggacctgtatctccaagacccaggggaaagaccccttccaccaagaggttctgcaaacagctaagtcttgcacacacntttggttgggcaagagattgaactaattnccattgcatcgtgactcaggaggggcacaggggccagggacacttcacgccctgtgcgtgggganaatatgatctggcggatctcatgtgccctactatgtgggatctgg

SEQ ID NO: 27835 - DNA, 515 bp, Homo sapiens
  misc_feature (1)...(515): n = a,t,c or g
ggannnnnnnnnnnnnnnnnnnnnnnnnnnnnnnnnnnnnnnnnnnnnnnnnnnnnnnnnnnnnnnnnnnnnnnnnnnnnnnnnnnnnnnnnnnnnnnnnnnnnnnnnnnnnnnnnnnnnnnnnnnnnnnnnnnnnnnnnnnnnnnnnnnnnnnnnnnnnnnnnnnnnnnnnnnnnnnnnnnnnnnnnnnnnnnnnnnnnnnnnnnnnnnnnnnnnnnnnnnnnnnnnnnnnnnnnnnnnnnnnnnnnnnnnnnnnnnnnnnnnnnnnnnnnnnnnnnnnnctcaattttttaaaaaaggtagtgttttaagatggcatagcttattagtgcttatctatgtttaattacacaatgttatgaaacttgaaagattttccttctgcacattgttatttcctgactttngctttcangtcatcattcattgatcaattttcaggaaatataggcagttgatctatgcaaagatttaatactaaaatattgccactttacattntgaacctaaatcta

SEQ ID NO: 27836 - DNA, 522 bp, Homo sapiens
  misc_feature (1)...(522): n = a,t,c or g
gctggaagaactagttacggaaaactggaaaaattnnatnnaaatggaaaaattcaagctggacccagaaacggacaaatcccaaatggatctaagatttaaatgttaaaacaaanaacccaaatagcancatnanactattanatgaacatatgaangaattnctttaaaatcnggcagnctttaagtgcgatacttaatttatggggctatcttcttttaaatgtcaagtctttgaactggtaaagcatgcagctaanctaggtttgcaaaattaaacactaaaaaagataatgattattgcttgcnnnnnnnnnnnnnnnnnnnnnnnnnnnnnnnnnnnnnnnnnnnnnnnnnnnnnnnnnnnnnnnnnnnnnnnnnnnnccnagacctgatttctcanaaaanacnnaaattnnccgggngtgntnncacttgcntgnaatcccagctacttaggaacctgntgngggannattnctgaaggccagtgtttgctattntacaaactnttacatggct

SEQ ID NO: 27837 - DNA, 517 bp, Homo sapiens
  misc_feature (1)...(517): n = a,t,c or g
ggttgtctgtgccatttgattcggtaatttaaactatctttgtttttcatgtgtaatagagaaaataatattaaccttttcatgatttctctcatattttcctgtagtggtgttggggaggaaaaaaacgtttcctctacactctttgactctgttcttaagtcctgtgaattttaagacctgtgaattaaattgacagaagacagattagcaaaagaaaagacatgtttattcacatgcctgcgtttgtgcgtgtctctgtgtgtgagagacagagttcatagaaaaatgtgactcnnnnnnnnnnnnnnnnnnnnnnnnnnnnnnnnnnnnnnnnnnnnnnnnnnnnnnnnnnnnnnnnnnnnnnnnnnnnnnnnnnnnnnnnnnnnnnnnnnnnnnnnnnnnnnnnnnnnnnnnnnnnnnnnnnnnnnnnnnnnnnnnnnnnnnnnnnnaggtcctgnatcccactactcagaggctgagacaggataatccttgacctgggaggngaggtgcg

SEQ ID NO: 27838 - DNA, 162 bp, Homo sapiens
gatttttcatctaactgtaaaactggtcctagctggtcttctcaccctgaactcttcctgttttattcatcctctgccagatgatttctctaaacccaaatatgatcatgtttttctactgcctaaattttttttttaagagacagagtttttttttttttt

SEQ ID NO: 27839 - DNA, 523 bp, Homo sapiens
  misc_feature (1)...(523): n = a,t,c or g
gcggcacgagctnnnnnnnnnnnnnnnnnnnnnnnnnnnnnnnnnnnnnnnnnnnnnnnnnnnnnnnnnnnnnnnnnnnnnnnnnnnnnnnnnnnnnnnnnnnnnnnnnnnnnnnnnnnnnnnnnnnnnnnnnnnnnnnnnnnnnnnnnnnnnnnnnnnnnnnnnnnnnnnnnnnnnnnnnnnnnnnnnnnnnnnnntgnnnnnnnnnnnnnnnnnnnnnnnnnnnnnnnnnnnnnnnnnnnnnnnnnnnnnnnnnnnnnnnnnnnnnnnnnnnnnnnnnnnnnnnnnnnnnnnnnnnnnnnnnnnnnnagtctgacacatgctacannnnnnnnnnnnnnnnnnnnnnnnnnnnnnnnnnnnnnnnnnnnaaaacaagacaaatactacataattctacttaaataagatacttagcagagtcaaaatcagagacagaaagtagaatggtatttaccaggggctaggagggaatggctnaagaatggggagtattttttantaggacnaaagtttaggcccc

SEQ ID NO: 27840 - DNA, 525 bp, Homo sapiens
  misc_feature (1)...(525): n = a,t,c or g
gaaggatcaacctttcctaagagagagtggaggcaggaagggtaaaccacttccatgggactgtaaaccagacttgccaatgttctcagtgttgggactttattacccanacttggggtgctgctttggaagagaatctgacatcatggtttctgttgtgtctctttttcccctgcagaatgccactcctcctgcanaacctgccagggcagaggacctttctcctgctcctcatgtgacaccaacctcgtgctgtcccacactggcacctgcagcaccacctgcttccctgggcactatcttgatgacaatcatgtttgccagccgtaggtttttccaatgaaccttctntcctttccttcttttctgcctttttggagccattgaaagaaatgcgaggttcttacttccatcttctcacctggtagcctttatttttntaaaaggatgaaaacaaatctctaaaggcananagnttgcnttttcagantttgntcanatntcnaccttatnaaagggnntggg

SEQ ID NO: 27841 - DNA, 514 bp, Homo sapiens
  misc_feature (1)...(514): n = a,t,c or g
gcaagattctgttttgagcccaccaagttgcttttcccatcttttcactctgccctaatatagcatggaatgctgcttggtgctgttcccttgtcttcctggttgttctccctgcttctttctttctccctttcctttcctctctctgtttttctctgttgctttctcagttttgcttatgccctccccctccccacctcctttccttctcccatttttaaaatgcatggacatcttagttttttgagcatgttttgatctgcaggctaaggtggtttaaaactctgagaggcttaattatttatcttggtttctgggatggaagcagaacccatagtctatttactctctcccagggagaaaaaggaaccttgccaaattgagggtgagagggggtggtgcttgctcccctagagttccttctgacccagaaggaacagacagaccctgaggccctacccccatgaatctcaccttgggaagcagggaggactgacatgctncttacacccct

SEQ ID NO: 27842 - DNA, 502 bp, Homo sapiens
  misc_feature (1)...(502): n = a,t,c or g
gagccttacagcctggattgtctacataggggaatcgnngganaatccacaaaaagctactggaactaataagggaggttatgtgatcaacatacaaaaatcagatgtatttctatatgctagcagtgaacaatcagaagtaaaataaaaaattgaataccataacattttaaaattacttaggggtaggtatgataaaaactatgcaacacatatatcctgaaaactatagaagcttggtgagagaaattaaagcctgagaagatacagaaatgtgttcatgacattgaatgaaaacaataccttagtttccaattcatggaaaataaaacagcagttttctcccaattgatctataatttcaaaccaatttcagtcaaaatccaaacagatttatgtaaaaaactgattctaaaattngtcatttcaangcanagaactccgatngctaaaataattcaaggtggaggattccactanttttanggtcccaaaatatctg

SEQ ID NO: 27843 - DNA, 512 bp, Homo sapiens
  misc_feature (1)...(512): n = a,t,c or g
ggnnnnnnnnnnnnnnnnnnnnnnnnnnnnnnnnnnnnnnnnnnnnnnnnnnnnnnnnnnnnnnnnnnnnnnnnnnnnnnnnnnnnnnnnnnnnnnnnnnnnnnnnnnnnnnnnnnnnnnnnnnnnntnnnnnnnnnnnnnnnnnnnnnnnnnnnnnnnnnnnnnnnnnnnnannnnnnnnnnnnnnnnnnnnnnnnnnnnnnnnnnnnnnnnnnnnnnnnnnnnnnnnnnnnnnnnnncatatnnnnnnnnnnnnnnnnnnnnnnnnnnnnnnnnnnnnnnnnnnnnnnnnnnnnnnnnnnnnnnnnntggtattatcaaagatcactgataacagatgatgaaaataattgatggtggtattattagtattattctgaaacttctcatataacacggaataaagcaactgagtagttatggaatgtctaattccatcatnccctgngctttgagaatgaatattcttgctatggaagaaagggaaaagcngatttaagattgaaagttat

SEQ ID NO: 27844 - DNA, 507 bp, Homo sapiens
  misc_feature (1)...(507): n = a,t,c or g
gagatcttcccaccttggcctttcaaagcactgggatnacaggtgtgagtcaccccatgctgggacaagaaatgaagttttgatatatgctacaatctggatgaactctgaaaacattgtacccaatgaaataattcagacccnnnnnnnnnnnnnnnnnnnnnnnnnnnnnnnnnnnnnnnnnnnnnnnnnnnnnnnnnnnnncagaaggtagatagttggcaaactatataaacctcaagctcttagtgtgggagcagtcatgagaataaacttctctctgtgaacccctagctgatggttcttcttactcaacagctatcaccagagaacagctatcacagaaaacagaggtcagcctaatgaccaggatgggacaggccctgctgaaccacaccagggccccaattccatggcattctgacttaatttacacattaggaaagaggaacaaaaaccttttaaaaatattttttcttggccgggtgcantggctcacgttgcaag

SEQ ID NO: 27845 - DNA, 508 bp, Homo sapiens
  misc_feature (1)...(508): n = a,t,c or g
gnnnnnnnnnnnnnnnnnnnnnnnnnnnnnnnnnnnnnnnnnnnnnnnnnnnnnnnnnnnnnnnnnnnnnnnnnnnnnnnnnnnnnnnnnnnnnnnnnnnnnnnnnnnnnnnnnnnnnnnnnnnnnnnnnnnnnnnnnnnnnnnnnnnnnnnnnnnnnnnnnnnnnnnnnnnnnnnnnnnnnnnnnnnnnnnnnnnnnnnnnnnnnnnnnnnnnnnnnnnnnnnnnnnnnnnnnnnnnnnnnnnnnnnnnnnnnnnnnnnnnnnnnnnnnnnnnnnnnnnnnnnnnnnnnnnnnnnnnnnnnnnnnnnnnnnnnnnnnnnnnnnnnnnnnnnnnnnnnnnnnnnnnnatttgagaattgtctatgttttttttaacccattttttgacaggattggtggtttttgtntgttcgtttggttttgctggtttgntagnattccttgtagattctggatattagcctttgtggatgcatacttttgcaaaaaattttctaccacttttggt

SEQ ID NO: 27846 - DNA, 503 bp, Homo sapiens
  misc_feature (1)...(503): n = a,t,c or g
ggagcttcactgttagttagatttttctcnganacgagnattgatctaaactttagatcactaaaaactgctgttcaaagtagccaaacatccccagtattggggaacatagggtattgaagctcatggtgctagctctctctctgaaacgtcacatttcctcttattagctctgtatcacagtgcagagaaaaactaacaaaaaaaaataagggctgaagngaaancagaatttttgctatttanaaataaggctccctaagtttgacccacaactgcagcattaatgacactgtttattanaagagacataactattcatttatgttnnatgttttctttcctaattcattagncagggaaaaatgctnaacagatntccaaacatgtccttcactgggatttattacaaattattgnaaaggtagtatttaaaatgnnctttaatctctaaacatgattctggtttcctccanaatataggaaaaatgttaaagatgtta

SEQ ID NO: 27847 - DNA, 589 bp, Homo sapiens
  misc_feature (1)...(589): n = a,t,c or g
gggaacccggtttctgaggttaagaacctggtatgagtgacgtgaattactttctcgcgcaagtttgcgttgngcgatctgaagttcagtgtttctttcgtgaagtactagatgttatttagtttcggggggaggtttatgttcgtcggattaatgtgggcctcggggcgtatagtgttaggccaacgtcgaagttcgttttgtcgagtttaggagttgggaggttcgtgggtcgatttagaacttgactacgtattcgcttctacgttagtggtcccggtcggggccggctcgaagttcgtatgtggtagcctcccgccaaagactcgagggatcttctagcttcggggtgctgttgtcgtagttctccttaagtttcgtgcttagtgagtgctatagtataattcgtaaaaatggatcgggtcgtatcggggtcggtacggatccctaccctagagacctgggccccaagaagactacgttcaacgggctcccccccccccttaaggaccnggaacacttaccccacgatcggaaatccccccggtnaatatcttaacaaataccccgaccccaaaaaaaaaaaaaa

SEQ ID NO: 27848 - DNA, 693 bp, Homo sapiens
  misc_feature (1)...(693): n = a,t,c or g
cccgaantccccaatttcccggaaantttnnnnnnnccancacggggaacccgtttctgaggttaagaacctggtattgagtggtcncagggtnnacgccggtacgaggcctccgtcgcatccttagcgccccgaccttatcgggagaacccggttcagcgcgcggtcccggacgaacttgcgcagagagaggcgagtccgcttcgccatagacgtcgctagatacagtgacagcaggtattcagggaggaagcggttgccagccccatatcgatcccccaagaacggagaacgtatgcgggccctcgccgtggacgacctacagcaagtaagtggccgacgtcgccaacattggttttatttgaccgataccaagcccacctagtccccaaaaagacgaagaatcaaggggaataaacccaagcccgccgtaatccatttttacgtccntccgnttnanncgnaacnantagcctataggtccccctaggattcccagggccncgattagnnncccgcnagtnccgnncncncncggaaagccnntaaaaaacgtccaaaagatacganggaccccccaaatntgttcccccaaaaaanaggcanncccccccaaanaaanggccccggggncntccccccttcaanactttataaaccccgccgcnaancccnncgccaaagggaaacatt

SEQ ID NO: 27849 - DNA, 514 bp, Homo sapiens
gggaatgcagggcttgcaggccatgggaaggatttggggttttatacgagaacaatgggtagctactgacttgttttaagctggggactgaaacgatcactggaaataagaaaaaataaaagagatcatcaattaattataaatctaaaaattacattaggaagtggaattaagggtttctgtgactacccttctggatcaccagatgtgactatgccgagagcagcaacagttgctgggcatatcttccctctcacactgcaagctcagctctgcctctgacagtacagccacgatggtgtcccagtttgtaaatcctttccccctccttcccaacaatagcatgtgagatggaaacctagccggtggttcacttcgtgatgcaaaaagcataattgaatacattttactgctttgcagccagagtaaatgatttttccattgttaagagtaaaaaccaatttgttagtaaacggagcagatatgattcaaaagaagcagaaagctggcgccg

SEQ ID NO: 27850 - DNA, 658 bp, Homo sapiens
  misc_feature (1)...(658): n = a,t,c or g
gctcaaaaacaagccaatngggagtttcatttactattcancacttgctaaatgtttccctcatatctgcatcgtaaatttctttttattcttacagaatagctagagatcaccagtttaagaaatcctacaagactttttccatgagagctatgcactctctctccagcatcacctctccatctgcttttcacgatgcatttcttacactggaatgtgataaaaccgtacactgtacttagcccttccctgtaaaggggcaatgagctgtttaagggtaaaggggtagttactgagcccatgccatcgtctgtattaagtcttatttttgtatttctacaagggtggaaagagagcctgttaagtgaatgtacctgtaatgaacaagttcatgccaaacagtggagtagctttcaattattttggagccaaagaccttcacttcattctggagtattgaaacacaaagatggcattggaaatgttggaaactggtttttttcctacatcagtaaaagcataccacacttcattttaaaatgtaatacagagttatagaaaatatattcaaggcccaagtgacaaattggtaaatagcgaaaagaatcagacttgaacaatttacttaagttcttctgagcacacttttncaacctgc

SEQ ID NO: 27851 - DNA, 669 bp, Homo sapiens
  misc_feature (1)...(669): n = a,t,c or g
gggataatggtaccacgctgacaccccagaaaggttagagctttgcggnccattatgatatccatgtgtggcttttannnnnnnnnnnnnnnnnnnnnnnnnnnnnnnnnnnnnnnnnnnnnnnnnnnnnnnnnnnnnnnnnnnnnnnnnnnnnnnnnnnnnnnnnnnnnnnnnnnnnnnnnnnnnnnnnnnnnnnnnnnnnnnnnnnnnnnnnnnnnnnnnnnnnnnnnnnnnnnnnnnnnnnnnnnnnnnnnnnnnnnnnnnnnnnnnnnnnnnnnnnnnnnnnnnnnnnnnnnnnnnnnnnnnnnnnnnnnnnnnnnnnnnnnnnnnnnnnnnnnnnnnnnnnnnnnnnnnnnnnnnnnnnnnnnnnnnnnnnnnnnnnnnnnnnnnnnnnnnnnnnnnnnnngttcagtttctccttcacgctaatcacagttcacgtgcttgacattcacatgccggctagtgctaccatactgggcagtgctnggtttaagactgttttctacagttggacttgtggnaaggataaaaattncanaggaaaaagtatgggccaaaggcacanaggaggataagcaagcaagcttcgtccanatganaattgagggaagannaaaagagtgcaangttcgaggcactaggcttgtctgggttcaaagacctgct

SEQ ID NO: 27852 - DNA, 672 bp, Homo sapiens
  misc_feature (1)...(672): n = a,t,c or g
ggttactctctggtgccgagggccggtccatggagtaggatacattctgcacaaagaaggagaagccacttcaatgcagctctggggatccaccagtaatgacggggcattccccatcaccaatatatctggtactagcatggggcgttacagctgctgctaccaccctgactggaccagttctatcaagatacaacctagcaacaccctggaactcctagtcacaggcttactccccaaacccagcctattagcccagcctggtcccatggtggcccctggcgaaaatatgactcttcagtgtcaaggggaactgccagactcaacatttgtcctgttgaaggagggggctcaggagcctttagagcaacagaggccaagtgggtacagggctgacttctggatgccagcagtgagaggtgaagactctgggatctatagctgggnttattatttggactctactccctttgcagcttcaaatcacagtgactccctggagatctgggtgactgataagccccctaaaccctntntgtcaacctggcccaacaccatgttcaagttagggaaggacataccctttantgccgangacccctgncangtgttgaattggtctaaaacatgatggagaaaaagcccctnancaagttttcaaaggatggagac

SEQ ID NO: 27853 - DNA, 712 bp, Homo sapiens
  misc_feature (1)...(712): n = a,t,c or g
gattacgaatttaatacgactnnnnnnnnnnnnnnnnnnnnnnnnnnnnnntcgacacgttcaacccgttctgctggctcgagaacgaagtaggccgtctcgctctgggtctccaggcccgcgaccgtccgccagtcgtcccgagaatctccggcctgtgaaactgtgaggggattcggccaagacgtcctcttccctctgcctcccacccaggccactcttcacctccaccatgagcctggacatccagagcctggacatccagtgtgaggagctgagcgacgctagatgggccgagctcctccctctgctccagcagtgccaagtggtcaggctggacgactgtggcctcacggaagcacggtgcaaggacatcagctctgcacttcgagtcaacccttgcactgcagaactcaacctgcgcagcaaccgagctggcgatgtcggcgtgcattgcgtgctccagggcctgcagaccccctcctgcaagatccagaagctgagcctccagaactgctgcctgacgggggccggctgcggggtcctgtccagcacactacgcaccctgccaccctgcaggagctgcacctcagcgacaaccttttgggggatgcggcctgaactgctctgcgaaggactcctggacccccantgccgcctggaaaagcttgcactggagtattgcagcctntcggctgcanctgcaacccct

SEQ ID NO: 27854 - DNA, 652 bp, Homo sapiens
  misc_feature (1)...(652): n = a,t,c or g
gacctattaggactatgactttggacaagtcacttacctgctgtgaacttcagctagtatccttatctcacagggttgttaggcattttcaaggaggtaaggtacataaaaagcccgnnnnnnnnnnnnnnnnnnnnnnnnnnnnnnnnnnnnnnnnnnnnnnnnnnnnnnnnnnnnnnnnnnnnnnnnnnnnnnnnnnnnnnnnnnnnnnnnnnnnnnnnnnnnnnnnnnnnnnnnnnnnnnnnnnnnnnnnnnnnnnnnnnnnnnnnnnnnnnnnnnnnnnnnnnnnnnnnnnnnnnnnnnnnnnnnnnnnnnnnnnnnnnnnnnnnnnnnnnnnnnnnnnnnnnnnnnnnnnnnnnnnnnnnnnnnnnnnnnnnnnnnnnnnnnnnnnnntctcccaaaacaaacaaacaaacaaaaaacgcctataggctggcatctcccaaaactaacagacaaacaaaaaacgccnnnnnnnnnnnnnnnnnnnnnnnnnnnnnnnnnnnnnnnnnnnnnnnnnnnnnnnnnnnnnnnnnnnnnnnnnnnnnnnnnnnnnnnnnnnnnnnnnnnnnnnnnnnnnnnnnnnnnnnnnnnnnnnnnnnnnnnnngtttgccagcgtggtggcaggtatctgnaatccactacttgaga

SEQ ID NO: 27855 - DNA, 670 bp, Homo sapiens
  misc_feature (1)...(670): n = a,t,c or g
gggggtatgttactgggctggtgactaggaaggtaaaggagcctggctggagtgcaacaaaagacatcactttcccgtggctctggggcatgaactctcagtactgctgctgtagatgcctcatgttctaggttctggaaggttgccagtcactatgagtcttgctgagaattagcagttgggctggtcaggttctggagtgtgtgaggtctagaccagcactctgtacataggagctcagggtctcctgccattgctcttagtcaagcgcttatctatgccttccttcaacacttatctaaatagtccatgtttgtcagcattgggctagatcctggggacacaacagtgcctaacgaatgaggtccctgttctcagagcactgagggagcagacgttcatcaatgagtcacatctatcagtatataaaatgctaattgggaaagatttatgaatgagagaaaggtagtttggggagcttgtataacctgacctaacctggggaggtgcaaaggccttacggaggaagtgacccaggagctgagagtgaagaaagagtgaggctggtgtttaaaggagccaaggagttctcaagagctcccanggccatgggcagtacgaataggaagctgagttcctcctcatgcctctctttttccctggnccaccc

SEQ ID NO: 27856 - DNA, 667 bp, Homo sapiens
  misc_feature (1)...(667): n = a,t,c or g
gtgtaatgtcatcaaagaagctattttttaccaacctatttaaaataacatcccttctcatnaccctttctgtttcctttccttgctttatttttcttcacaaatgaatcatcttctgccatataataagttcacatctatacctgtagcatctaacaatgtacctggcaaaatagtaggtgctcagtatatattaaatgtatggatggatgaatgaaaaatcttgtccaaacagttgtatacatggatatggattataggagaatcttagctgaggaaatgtgtgtgtgtgtgttcttgttttatatttgttcattcattgntcatttagtgaacatttactgatctccctgtactttgctttgttttttttttttnccctttttttngnggnaaagtnnaanncnntngccnagnntgaannncagggccntannntggnntnacggnatcctcngttncnggnctnaaaaattccncnggantaagcccccaanganctnggaacnanngnccctnnccattntcccgggnnaantttnttnttttttngntttttnaaaaaaagngggnggnccnatttnggccncggggggnttaaannggggccnaaaaannncngcccttttaccccnttaaaaaggcttgaanaaaaatggggggcccc

SEQ ID NO: 27857 - DNA, 673 bp, Homo sapiens
  misc_feature (1)...(673): n = a,t,c or g
gctacggtaagtgatgtctgctggttccccactgtaccctagaacctgccccatgtggacaaggacctgaggccgtccccactttgagaatcttcacagggatcccgagaaggaagagtgtcgcgagctgtggcgtgctggtaaaccattaaccgtgggccttctaggaggaaagtggccctaggttgtagcacgtgtcaatttctgtagtgtacatagccccgccatggccaatttcaagctacctaatgttcctaaatgtagaggtgggagagatgtgctattaccatcatatggagacacattccctcaagagcagagagcattgtaaagggccggaaaataggaagtgatgagattttcgcatgtcttacctttgtttttaacatgattcatttaattgtgagtttatataatttaactttaaataattgctgngtttaacagccaggtcataaaattcctgaaagttcaacgtcagccacccccagcacactcctgctggctgggtgtcaggagatcctgacctgctgtccggctctgccacacagctgcagtgtgaccttgagctctgtaactcaactttctcacttcaaaagtgggtaatggacttggattctaattctagatgtcctcttcttttgggggtgataagaaaataaagttctttaaa

SEQ ID NO: 27858 - DNA, 644 bp, Homo sapiens
  misc_feature (1)...(644): n = a,t,c or g
gtgagaaaccacggtctagaatccagcaaaatctttcgatcttcaccactgtcgactggggagggctcagcacaactcatgaagccatgggtttcagcacagccagggaaggtccccgagtgaaggtcagatggggagaggcctgcatggctggcaccgaggagacacagccagaccagtagctgcatgctcttgggcaagctcttcccgtctgagtttagtttccttaaatgccaagtgaagaaagccagccagggtatcacgaaaaccctttctagaactcatattccaagattctggccctgaccctctattctcataacctgggcatgattcaagaaatgtgtgannnnnnnnnnnnnnnnnnnnnnnnnnnnnnnnnnnnnnnnnnnnnnnnnnnnnnnnnnnnnnnnnnnnnnnnnnnnnnnnnnnnnnnnnnnnnnnnnnnnnnnnnnnnnnnnnnnnnnnnnnnnnnnnnnnnnnnnnnnnnnnnnnnnnnnnnnnnnnnnnnnnnnnnnnnnnnnnnnnnnnnnnnnnnnnnnnnnnnnnnnnnnnnnnnnnnnnnnnnnnnnnnnnnnnngaggttgcaccactacttcacttgggctgcaaagcgtgagactctgtctcaaaaaaaaaaaaaa

SEQ ID NO: 27859 - DNA, 603 bp, Homo sapiens
  misc_feature (1)...(603): n = a,t,c or g
gctaaagggcacaatgaagcttttacaaggaaaaaaaacagtttcacttctcatgtctacatttctattactcctcacctagtgattttagatatagaacaatttcaaggaaaaggtagctgtttcagggaaaattctactttggcctcgcgttcagagttttcttacataagaaaatttgctatttctatagcagacagaagaaaaagtgacaaaattaaagccaaaaaagagaaatcgatagatagctagatgatagatgattgatagatggtggatggagacagaaaggctagaatgaaatgctgaggaagtatcaggacatgtgagtgaaggagaagttcttcttttacgaaggacattggcaagaattcccatcccatgtgttaactgaccttctagctgaccacaaaggtgagggaaggttgctggaaaaactgagatggctcagtacatcaaaatgacaccattcnnnnnnnnnnnnnnnnnnnnnnnnnnnnnnnnnnnnnnnnnnnnnnnnnnnnnnnnnnnnnnnnnnnnnnnnnnnnnnnnnnnnnnnnnnnnnnnnnngaagaaaccctgctctactaaaaaaaaaaaaaa

SEQ ID NO: 27860 - DNA, 510 bp, Homo sapiens
  misc_feature (1)...(510): n = a,t,c or g
gaacattttaaactaaattaaaatgaaaacatagcatattaaatttgtgggattcagttaaacagtgcttagaggagaattcatagtttaaatgcttatatttaaaaggaggtccaatgtcaatgaaataatcatctacctgaagaagatagaaaaagaagagcaaattaaatccaagtagattaaatgacatagtaaagataagaaaaaatcaatgaaataaaagacaaattaggaaaaattattgaaaccaaatgctgactctttgaaaagatcaattnnnnnnnnnnnnnnnnnnnnnnnnnnnnnnnnnnnnnnnnnnnnnnnnnnnnnnnnnnnnnnnnnnnnnnnnnnnnnnnnnnnnnnnnnnnnnnnnnnnnnnnnnnnnnnnnnnnnnnnnnnnnnnnnnnnnnnnnnnnnnnnnnnnnnnnnnnnnnnnnnnnnnnnnnnnnnnnagcttaagcaggaaaaatgcttgaaccccgaggcaaaggttcatgagcccaatgt

SEQ ID NO: 27861 - DNA, 510 bp, Homo sapiens
  misc_feature (1)...(510): n = a,t,c or g
ggagagagctagcaccatgagcttcaaaccctggaaattcattcttatctcttcttgtcttgcacagagatttctattccttttaactcttgttttctcccagtttaccagctccctactgtcttctagcccttctatccaggccctacatgctttatcacgaacctttaatgtctttgttactcaattctattcattccactcttgctaaactttctcagagctgttcacatgtgctgaagagaatttcccaattttagaggctggtgtgctacaaatccacagtgcccaatatcaattgatcctttgacagtactcagaaataattctgcatatcacacatgtggtattctctcatttatctcaataactatttaaaatcttcnnnnnnnnnnnnnnnnnnnnnnnnnnnnnnnnnnnnnnnnnnnnnnnnnnnnnnnnnnnnnnnnnnnnnnaacccgaagttcgagaccagcctggtaacatggnnaaaacctgtgtacaaaaaaa

SEQ ID NO: 27862 - DNA, 510 bp, Homo sapiens
  misc_feature (1)...(510): n = a,t,c or g
ggtatctgcactgtgaggagaatgttcatagangcctgttgtgtgcatatttattcacatttttgttaaatgttaaatcgtttagcacggtaatctgagtgcacagtatgtcatttcattccgtttgagtttcttgttttcgttaaatgtctgcagagttgctgcccctttcttgaactatgagtactgcaatctttttaattctcaatatgaatagagctttttgagctttaaatctaaggggaactcgacaggcctgtttggcatatgcaatgaacatcaagaaaccatcttgctgtggaagcataattatttttcttctccctttttgaaagatctttccttttgatgccagttttcttccttggttacacaagttcaattttgaaaggaaaaggcaatagtaagggtttcaaaatggcanagaaatttgaaagctcatgacattcatggttttgatctgggtctaagtatatggacttaaaccttgggttgcggaggcaatgcttg

SEQ ID NO: 27863 - DNA, 512 bp, Homo sapiens
  misc_feature (1)...(512): n = a,t,c or g
gatttgtatcatgtgtgatttgtatcatgtgtgattcccactcccaggtactggatcaagaatgaataccnnnnnnnnnnnnnnnnnnnnnnnnnnnnnnnnnnnnnnnnnnnnnnnnnnnnnnnnnnnnnnnnnnnnnnnnnnnnnnnnnnnnnnnnnnnnnnnnnnnnnnnnnnnnnnnnnnnnnnnnnnnnnnnnnnnnnnnnnnnnnnnnnnnnnnnnnnnnnnnnnnnnnnnnnnnnnnnnnnnnnnnnnnnnnnnnnnnnnnnnnnnnnnnnnnnnnnnnnnnnnnnnnnnnnnnnnnnnnnnnnnnnnnnnnnnnnnnnnnnnnnnnnnnnnnnnnnnnnnnnnnnnnnnnnnnnnnnnnnnnnnnnnnnnnnnnnnnnnnnnnnnnnnnnnnnnnnnnnnnnnnnnnnnnnnnnnnnnnnnnnnnnnnnnnnnnnnnnnnnnnnnnnnnnnnnnnnnnnnngnaanccgtnttnctaaaatccaaaaaaatnactnggnctggg

SEQ ID NO: 27864 - DNA, 515 bp, Homo sapiens
  misc_feature (1)...(515): n = a,t,c or g
ggatgttgccaataaaaagctgaaatgcacagagacctggagccttaacagtctggttaaacacctcttaggtaaacagctcctgaaagacaagtctatccgctgtagcaattggagtaaatttcctctcactgaggaccagaaactgtatgcagccactgatgcttatgctggttttattatttaccgaaatttagagattttggatgatactgtgcaaaggtttgctataaataaaggtatgttaagatccataaataaaatgtgaattcactcttttgtgaggtttatctccaaaaaaggcaatattcacatatttgcaaagcatttagtactataacttcttgaatgtctgagcagtcctgacattagggtgggatccatcagggcccaagatgagtgtttcatctttggtacttgtggcaaagcagccttacttcttttactttgtaacattgctatgtatttgcttctaaagttggggcttttnggntttcttattgcagtgacacaac

SEQ ID NO: 27865 - DNA, 506 bp, Homo sapiens
  misc_feature (1)...(506): n = a,t,c or g
gccagcagcctgggcgtgtgcatttctaatgggtgcctcaagtgatctgtttctgatttgtatttctattgtgaagagtcagcccagtactgcaggcctcttacctaagcagaatcccagtctggcatcaaagctttagaggacaagttgattcaggcagagaagaacttgggctatacaagcgctgttcttcagcattgaagtattttggaggcattagatagtttaaccctttctcagtcaaggaatatttacagaacatgatctctgggcattgtaactcctggtcttagtggggaatatagggaccccatgtctccatggggtgcacagaatgtctgtgagactgatggagtggagaacgccatcccccagcctctccagctactcgaggcattctgtanaacataagcccatagnnnnnnnnnnnnnnnnnnnnnnnnnnnnnnnnnnnnnnnnnnnnnnnnnnnnnnnncnntccccccgtccntctnnanaacnnaaaa

SEQ ID NO: 27866 - DNA, 492 bp, Homo sapiens
  misc_feature (1)...(492): n = a,t,c or g
tgcctactgttaggctaattttaacgtactttgaacatcttttaactggttgctatttcttttacataactgatagcatcactttccaggcttaaacttggttgctttatatcgtnaatgtttttncagntatcctcatnttcttactgcctctgtgagcactgcttttaagtgaaataagatgctacagctgatgattaccaagcgatagagatctgtatctcaaggatacaacttgattctttttaaatatggaatattgctaagaatagctctgctctgtatgaacagggaattcaaacttttaaaaatgaaaaatgagaaccttcctgaatgaaatnttactcaaatctcctattaaatcctangaataggctgtgcttcattacttcaggaaatganaaatggcttaaagctaagtgagctaagtagcntcntctntcattgntcagttctcagnatgctgccaaaatgtgccataangactcctgg

SEQ ID NO: 27867 - DNA, 514 bp, Homo sapiens
  misc_feature (1)...(514): n = a,t,c or g
ggttaaatgtgtttacaccacaaaaaactctagaagaatttcaagatgtgtatttggttatggaattaatggatgctaacttatgtcaggttattcacatggagctggatcatgaaagaatgtcctaccttctttaccagatgctttgtggtattaaacatctgcattcagctggtataattcatagagatttgaagcctagcaacattgttgtgaaatcagactgcaccctgaagatccttgactttggcctggcccggacagcgtgcactaacttcatgatgaccccttacgtggtgacacggtactaccgggcgcccgaagtcatcctgggtatgggctacaaagagaacgttgatatctggcagtgggttgcatcatgggagagctggtgaaaggttgtgtgatattccaaggcactgaccgtatccttcccgcgaccttggcccgccatgctttcttaatgcctaagcaanatnaccactggttacacaancgttacaaggacaaagtc

SEQ ID NO: 27868 - DNA, 513 bp, Homo sapiens
  misc_feature (1)...(513): n = a,t,c or g
gnnnnnnnnnnnnnnnnnnnnnnnnnnnnnnnnnnnnnnnnnnnnnnnnnnnnnnnnnnnnnnnnnnnnnnnnnnnnnnnnnnnnnnnnnnnnnnnnnnnnnnnnnnnnnnnnnnnnnnnnnnnnnnnnnnnnnnnnnnnnnnnnnnnnnnnnnnnnnnnnnnnnnnnnnnnnnnnnnnnnnnnnnnnnnnnnnnnnnnnnnnnnnnnnnnnnnnnnnnnnnnnnnnnnnnnnnnnnnnnnnnnnnnnnnnnnnnnnnnnnnnnnnnnnnnnnnnnnnnnnnnnnnnnnnnnnnnnnnnnnnnnnnnnnnnnnnnnnnnnnnnnnnnnnnnnnnnnnnnnnnnnnnnnnnnnnnnnnnnnnnnnnnnnnnnnnnnnnnnnnnnnnnnnnnnnnnnnnnnnnnnnnnnnnnnnnnnnnnnntttgatagatctctgccgggtcctcatgntagacacacgggcaaattaaggnttaaaatccccaaaattcttcccgtactgggaaggcaaaca

SEQ ID NO: 27869 - DNA, 518 bp, Homo sapiens
  misc_feature (1)...(518): n = a,t,c or g
gtttgatgttttttgcagcggctactggaaaattttaaattacaatgatggcttcatcatatgtcttttggatccttctaaacctctgtccatgcgctgggctctctctcacctggctgaaggctctggctttgtgggaagccagggccaagagtgcagcttctttttttttttctggnannnnnnnnnnnnnnnnnnnnnnnnnnnnnnnnnnnnnnnnnnnnnnnnnnnnnnnnnnnnnnnnnnnnnnnnnnnnnnnnnnnnnnnnnnnnnnnnnnnnnnnnnnnnnnnnnnnnnnnnnnnnnnnnnnnnnnnnnnnnnnnnnnnnnngtatgttnagggnaaatnaggtttntccatgtttgccagganggctnaaactccnaacctcaggtgacccacctgcctnannnnnnnnnnnnnnnnnnnnnnnnnnnnnnnacacagnccctgccaaaaggccttnttttntttcgggccnaanaangcctnaatggantntgancctttttactgga

SEQ ID NO: 27870 - DNA, 514 bp, Homo sapiens
  misc_feature (1)...(514): n = a,t,c or g
gggcgaactccatngttaacantttatcctgatgttggagatatgatgggaagagagagggtngtagtagaagcaggatgtantgaagggtttgttttcacagagtggacattaggctcggaggtcgggtgtcttgtgcagcctanaacccanagaacaggcccaggatgtaaactctgcaactgagtaacctccaggaaaaatccccaaagaagtacatgggggacagcggacagcctgcanagcccagagctcttggcgagtttgacctggtcagccccagagggctgggacccagggaaagagtcgagtatgccctgccaggcnacatgaggcggagggttaagaccccctcatggcctggcaaagggtgtccganaatgagcggggccttctcaagccttctcaganagaggcagtcctggctgctctgcagcaacangggncgggnaaggaggcagcttaaaaggtgtctaccggnaaacnnnnngtcaaanttggatnanggaaaaag

SEQ ID NO: 27871 - DNA, 531 bp, Homo sapiens
  misc_feature (1)...(531): n = a,t,c or g
gggcaggtngngggatgctccgccgttccgcgaccacccgcctccccggcccagcagaaccgggtccaggctgggggaggngctagcggngtatgcacctaagtccacctgggcctggaggaggacagaaccctgttgtcagaggtacacccagagcaactccacaccgggtgcatgccacagcaactccatnttaaataggagctggtaaaacgaggctgatacctactgggctgcattcccagacggcatagcgaggaggtgctgaanagcgcaggtttggagaatgatcacctggattggaaccatagctctaccaatatggaacccagctccttaggcctcggcttctcatgganaacatggtgtgataatcctactcctctgggagggtggctggtaaagtnagtgattgcacacgagtcctntagctgatgtacccanccggccttggttttagagcttcccaaaagggtgnnggnccacttccaaaaaggngggaagcctttggtctntgacctggggaattgc

SEQ ID NO: 27872 - DNA, 500 bp, Homo sapiens
  misc_feature (1)...(500): n = a,t,c or g
gggatgggtggaggcaggaggagggactgccgtgagcaaatggacagagacagtgaagcccaaggcatgctgggcacctgcaggcccactgtgattagaccatgtggcacagtcagaacgcaaaaagactgtgaagtaagtcgggcccagatggtggagaatcttgaattcaagccgttagagggattggatttattctatatagtaggatgaccttgnggtccagtttcccagggtgcttcgtcccaatgtgactattactagtgcccccttttcctcttaagtgtccctgcttggatgataaattacatggtcttgcaatcctcaaggccatatggcacccctgaaggtttcacagtgggccatggtcaagctggcttaggaaggcagtgccacagtgcctgctggagtctagggcaggagatgagatgcttctggctaagcacttcaggcttaacttgaggagctgaatgactttgaaagngganatggtccaaaaa

SEQ ID NO: 27873 - DNA, 500 bp, Homo sapiens
  misc_feature (1)...(500): n = a,t,c or g
gggctagccgaggctgggagcgcggtgatggccgggncccgtnagcanagggcancggcggcgggaccggggactctgggccaatgggtaaagccaggaggaagcccgtgcctggcccgttgggctccctcctcctcagagccgaagcagtccacactcggaacccagcttcacccggattaccgaggggttccacgcctggaggcagagctgcagcgtgggcccgctcgcggctttgcagaaaacaaataatgacacacttctttggaagcccggggcctgggcccagagccgtggcttctgccaaactttctggtcccggacaccaactccccgctctaacccgaggccacagcggccagcaccctgcaccttttaaaagtggctccaaaaaggagaaagccaaattagatcaaggttggtaggcnccantgcanggagctgccaanttggaagntactgnttttaaactggccaaaagcaaattcttagcgaggaaa

SEQ ID NO: 27874 - DNA, 493 bp, Homo sapiens
  misc_feature (1)...(493): n = a,t,c or g
gctccctcttttctttctcctttcccttccnttccngtttacnnnnnnnnnnnnnnnnnnnnnnnnnnnnnnnnnnnnnnnnnctctctctctctctgctgctgctcccgcatcattttgcccagctccttcttcttctccttcanttcatcctncaccttgtccatacgcttcttgtccttctcgatctccttgntctttgaggccagttccttgttgagcttctcaatttccacttcattatggtaaagcttaaagagctgcagctgtacctgancccgtactacctcatccttcaggcgctggtaccggtcagcctctnctttctcctgctttgcttccttgcgttcanccgcaatatttttcttgcgatggtaattaaactgngtgcctcttcagccttcaccatttccttctttcgcttgnntacnccttgngccaggtcccaaaacgactaacccttcaaaaaaagcngncccctntttgggggctt

SEQ ID NO: 27875 - DNA, 515 bp, Homo sapiens
  misc_feature (1)...(515): n = a,t,c or g
gcactcttcagtgactcctgctggtacctgccctctatttattagccaactgtttccctgctgaatgcctcgctcccttcaagacgaggggcagggaaggacaggaccctnaggaattcagtgccttcaacaacgtgagagaaagagagaagccagccacagacccctgggagcttccgctttgaaagaagcaagacacgtggcctcgngaggggcaagctaggccccanaggccctggaggtctccaggggcctgcanaaggaaagaagggggccctgctacctgttcttgggcctcaggctctgcacagacaagcagcccttgctttcggagctcctgtccaaagtagggatgcggatcctgctggggccgcacggcctggctggagggaaggccggcagcgggcggaggggatcaaccncttcccctttttttttgagaatntaannttnccttttgggaanatggttcccngggnanttggccacnttggccccgggaatnccttnacatt

SEQ ID NO: 27876 - DNA, 520 bp, Homo sapiens
  misc_feature (1)...(520): n = a,t,c or g
gttttttgagactgcatangnnnnnnnnnnnnnnnnnnnnnnnnnnnnnnnnnnnnnnnnnnnnnnnnnnnnnnnnnnnnnnnnnnnnnnnnnnnnnnnnnnnnnnnnnnnnnnnnnnnnnnnnnnnnnnnnnnnnnnnnnnnnnnnngcncagtcaaatcgatgaatgatagtatgtgagtttggtcaaaancaaccaanaaactttgaatgnaaatagactaaantntccaatcaaaagacggagtggntgaatggataaaaaaaaancaagacccaaccatctgctgcntacaanaaacncncgtngcntataaagantnacncagactgaaaataaagggatanaaaagganattncangcaaatnananccnaaaaaganccagtancnnccanagttntatcaaaggggnatttntgacaaaaacnttnncngagacnaaatagnnccttatataattgnnaagnggtaattncnncggnggnnntcccttttaaaataattnccccccncctg

SEQ ID NO: 27877 - DNA, 504 bp, Homo sapiens
  misc_feature (1)...(504): n = a,t,c or g
ggttggcagtgtanatggacacatgaaactgtacagggcagtcaatccaatcatccctcccacaggttnggtccgggcaccctgnggactctgcccggtttttgatgactgccacgaaggnggngagatttcaccatctaactgtatttacatgacagagnggctcgaattttaatagagagctatgaactttattgacattttgcaaatgaagttacttanggagcagataatttaattcatgatggaacacgaaatctccttgaaagcaaacttnacaataatggacgtagacttgctgctatnaaaacatattttttttatttatgaagactaaatttatattggtaaaatagccagtanaatatgaaanaaataaggttagtagtgaaattcattnttcataaattaaaccctttgaaactctggggccacatttttagacttttnagggtnangaaaanatgtnanntacccnnttnncncgtcttganaatggnttag

SEQ ID NO: 27878 - DNA, 527 bp, Homo sapiens
  misc_feature (1)...(527): n = a,t,c or g
gtcnnnnnnnnnnnnnnnnnnnnnnnnnnnnnnnnnnnnnnnnnnnnnnnnnnnnnnnnnnnnnnnnnnnnnnnnnnnnnnnnnnnnnnnnnnnnnnnnnnnnnnnnnnnnnnnnnnnnnnnnnnnnnnnnnnnnnnnnnnnnnnnnnnnnnnnnnnnnnnnnnnnnnnnnnnnnnnnnnnnnnnnnnnnnnnnnnnnnnnnnnnnnnnnnnnnnnnnnnnnnnnnnnnnnnnnnnnnnnnnnnnnnnnnnnnnnnnnnnnnnnnnnnnnnnnnnnnnnnnnnnnnnnnnnnttagatatacgtgtgngcgtgtgtatcaggttggtncaaaagtaatcgnggtttctgccatttctgccattaaagttaatggcanaaatcacgattaattttgcaccaacttaatatatnctaccatagcagcgccttttattaccaaggngaaaatttcntttaganattttaacttatttaacncttatntctaaaggtaccccactaangggntgaaattaaatttantttt

SEQ ID NO: 27879 - DNA, 527 bp, Homo sapiens
  misc_feature (1)...(527): n = a,t,c or g
gcttcaataccctgtngctattgaggctgctaagcctgagaccagctctctgttaagatgggagattagcaaatattcaacacatacgaaaggcacattcacaccaagcccattttctacttgactaaacaggatgtttgagagagaattgaaaagaaaacaactttcctgtcatgtgattcagtattccttttcctgccttctccacgaaccatntaaaaccagctngggtttacacctggagagtgagtctcccactttgggaaacatnaatttanagaaacaataacaaaaacaaaccctggacatagaatcagaagtcttgggtttgacagcagtctgctatcttatttttgctgcataaacttgagcaagttgcttaagtttctgggagcctctgattcctctgatataccccctgcttncaagagtgcttgacaatnaactgngtngcagcccagaacacaatntanggnacacaatggcncggggttaaaaaggcccattngnnantttnggnttggaaa

SEQ ID NO: 27880 - DNA, 527 bp, Homo sapiens
  misc_feature (1)...(527): n = a,t,c or g
gcacgaactggagcatcaagcttgtatatcaatatcaaagggaaagnggggcctggtccacggaggtccctccggagcagctgaagatttcaaaacaagataatggtgatgggggngggatggcctgggggcacaaaaggaataggtgaaactggatgtaaagngtgggagtctgtatttttaacaagcacccaggtgattnggggataaagcctaagtagaagatcttgcttatatganaatattgggctagaanaaaacgctgtagttttccagtgaaaacctnagctgcccttgacatgctaatttgtatctgaatttccaagaaatgattattgcaacccctgtggggttataatccagtcccctaccgcggcaggtggccttccccttcaggaatttaaatcctgggcaatcatgaatgnatgccggccaaattttnaaagcctangaangggntcttccttggccanaatgaactttttaaaaaaggnttgggcctttnaaaactttccaacccttgttaa

SEQ ID NO: 27881 - DNA, 518 bp, Homo sapiens
  misc_feature (1)...(518): n = a,t,c or g
ggagactgcatagggctcggcgtgggaagtngtcatgtgacctgcanacctgatgtagctcaagcaagagagcgagctggctaggagttgtcttaaatatatttcccccagtcccagctntacccccaacaaagngctatctacagagcagnggactgccaacagtngggtctctgngnggaggnagacaatttgaaaaccaggggcccagaggagagtcttaaggngccagctgcatatgagagatctccaggaataacangggaganagatcacagaagaacacantaagagaaaacggcagctttacacatcttggtaaccagaggagacaacnttggctcaccatgctgnccattgaattttttgcccattgagttgagtttttcctgctgctatctctcttactagctactncttnctggggtancccttgangangtaaaacaancttgaacnttggaggaaggaggaaaanngaacgtcnaagggnacaanngcngnaattngggttcctt

SEQ ID NO: 27882 - DNA, 517 bp, Homo sapiens
  misc_feature (1)...(517): n = a,t,c or g
gcacagaagttcagtaaanggttgctgaccaaacctttctctgngacccaaaaacatgagtcttcctttcacctgngtgagaaagaaagcagctgngngttattgaaaagaacactaataacagctctggaagcagaacacagaggcatgtctcctgtcagccactggttgatatatttgtcctagcagtatttttaaatacaggcaatacattaaagtaaattttcttgngttgaaaattgtcagtaaatgtaagatcctgtgccagattatttcgaaagaacctnannnnnnnnnnnnnnnnnnnnnnnnnnnnnnnnnnnnnnnnnnnnnnnnnnnnnnnnnnnnnnnnnnnnnnnnnnnnnnnnnnnnnnnnnnnnnnnnnnnnnnnnnnnnnnnncactntgttaaaatntaaaaaaattanccnggcatgnggngggcttctggaanncccctttttaggaggttnaancngaaaatgcttgaccnataggtgaacttgagtaancaaaaa

SEQ ID NO: 27883 - DNA, 525 bp, Homo sapiens
  misc_feature (1)...(525): n = a,t,c or g
gttaaaaggaaagaaatgtaaatattggaagaggagagaaaacggtagacatatcgtatttacatttgatatgattacctacctagaaaatcgtggtgaagcagcattaaactattaataaattaaataaagtggcctgatggaagggcaacatgtaaaaaataaatgattagaaaataaatggaaagaattacccacaaaccccccagatacttgannnnnnnnnnnnnnnnnnnnnnnnnnnnnnnnnnnnnnnnnnnnnnnnnnnnnnnnnnnnnnnnnnnnnnnnnnnnnnnnnnnnnnnnnnnnnnnnnnnnnnnnnnnnnnnnnnnnnnnnnnnnnnnnnnnnnnnnnnnnnnnnnnnnnnngccacatgnnnnnnnnnnnnnnnnnnnnnnnnnnnnnnnnnnnnnnnnnnnnnnnnnnnnnnnnnnnnnnnnnnnnnnnnangntnnancatcctnctntttggccttcccaaaggntntgattcaggggggacctccnnttaatcccccccccaaa

SEQ ID NO: 27884 - DNA, 356 bp, Homo sapiens
  misc_feature (1)...(356): n = a,t,c or g
ggatgagcttcaataccctggaatagcccttggaaaccttctccttctctatcaatacctttgtgatgttaaagttcttttcaccaggactccgcaggatgctcacctgaaaacattggctctgaatgtgggaatgattccattaagccactcacaatctataatctctattttgcaaatagaatcccaaatttacagaataaattgttgtccctttggctgcaaaatttacaaagtaaattgngatcattactaagagttaatataataaagtcagaaatcactgagaacatggactaaaattcagagatattatttcttttcttttcttcttttttctcttttttgngaaggag

SEQ ID NO: 27885 - DNA, 522 bp, Homo sapiens
  misc_feature (1)...(522): n = a,t,c or g
gagagctagcaccatgagcttcaataccctgtacttntgtttccatatctttttgtcttgcacagatgttcttttcaataccattactactttcttccactaacaaagcataactgcgtaagaaagtacaatcataacatccaattattaatatgagtttagaaatctagatgacttaaaactacagaaccaaacaaacaaaaaatgggtgttaaagcatgagactccctaacaacactttacccatggacggggaggagcaggacacacaagcctgctctctttggctgctggagtccacctcaacagatggcttcttcaggtgattcatgaacagcatgatttttcatgggttagtacagtactgtaagttcaaactcgagaatattttagaaagcaaaagtttgctatgagaactataatgatacaaaggattacagttaaaaaaaaagtngatgacttatatgtaaatctttgtatggngnancantttgngaacaactacccttaagaaaaactgga

SEQ ID NO: 27886 - DNA, 518 bp, Homo sapiens
  misc_feature (1)...(518): n = a,t,c or g
ggtgtcagacactgcagagtcctggagcttctcatactctaaaaccaagatgtagacaatcccaaacaaatatgctgagggcttcagtttgtggtacaaagtgggtcctacgggagccaggttggaggaagcccctgtaagtctgaggaactcagaggaacccagaggaagtgctggctgagctgggtctgaatggatgagaagtagcactctttcaataggaagaacattccaggaagtgaaaacagcaagagtctgaggtgaaagagcatggcagacacaggaagctactgctctggagtttctgaaagtatcaaagtttgaaggaaatctttacatgactgaaccatgggtgggactagcccaccttgtgttgttagatctattacactgctttaattttggtcacttttaataagctaataataggatgatgaaagcacccaccaacatcaagagtaagtattcttgntgaaataacttggaactcntacttaaaatntctaggcnngcncggg

SEQ ID NO: 27887 - DNA, 581 bp, Homo sapiens
  misc_feature (1)...(581): n = a,t,c or g
aaatggtgagcttacaggtgacagccactgagcccagccttagctggctctttccaagcaaaaataatttctgggggaaaagaagctcgtctaatngaagtngcttttaatttctacagtagcatgatttctgactttgtacactctgctttattgaatctcctcccaacttaattacccccattagtagtacattttatntgcatgccgtatagatacataatccttaccactcaagtttagatttcatttttacgacttgtgaacagcaacatttttgngtatacaccgagttaaaaaacatgagcaggaatgatgatttgacatttcaacacagtcgcaaatatcagagcagcttatttctgaggaanaannnnnnnnnnnnnnnnnnnnnnnnnnnnnnnnnnnnnnnnnnnnnnnnnnnnncactggccgngntctacaacgtcntgactgggaancnnnggttanngtntcgcactattaggtnncttcntnnctatgccntcannagttanaaatgaancctaagggctttgngnnantnggncncaaatgggngnggnccttnnttctntccc

SEQ ID NO: 27888 - DNA, 527 bp, Homo sapiens
  misc_feature (1)...(527): n = a,t,c or g
gnnnnnnnnnnnnnnnnnnnnnnnnnnnnnnnnnnnnnnnnnnnnnnnnnnnnnnnnnnnnnnnnnnnnnnnnnnnnnnnnnnnnnnnnnnnnnnnnnnnnnnnnnnnnnnnnnnnnnnnnnnnnnnnnnnnnnnnnnnnnnnnnnnnnnnnnnnnnnnnnnnnnnnnnnnnnnnnnnnnnnnnnnnnnnnnnnnnnnnnnnnnnnnnnnnnnnnnnnnnnnnnnnnnnnnnnnnnnnnnnnnnnnnnnnnnnnnnnnnnnnnnnnnnnnnnnnnnnnnnnnnnnnnnnnnnnnnnnnnnnnnnnnnnnnnnnnnnnnnnnnnnnnnnnnnnnnnnnnnnnnnnnnnnnnnnnnnnnnnnnnnnnnnnnnnnnnnnnnnnnnnnnnnnnnnnnnnnnnnnnnnnnnnnnnnnnnnnnnnnnnnnncagtcaatgttgtcannttgaacccataagggagccattggtaaggctnttagaaggatgcaaactggtgatggagtatcttgcctttgggatgagtnttct

SEQ ID NO: 27889 - DNA, 520 bp, Homo sapiens
  misc_feature (1)...(520): n = a,t,c or g
ggccttgtccctccagtgcacgatgtctggatgcctntgccacacaccaccccctgcccagtccccatgtctgtctggtcagtgcccagctctgtctcactagggtttggtcaccggccctttgaactgagaccaggctgtgtacctgtgagcccagctcggggtgagatttgaggtggagccttcccagccctgtgcagaattcccatcacctccaggtgtactcagaaatggggatcnnnnnnnnnnnnnnnnnnnnnnnnnnnnnnnnnnnnnnnnnnnnnnnnnnnnnnnnnnnnnnnnnnnnnnnnnnnnnnnnnnnnnnnnnnnnnnnnnnnnnnnnnnnnnnnnnnnnnnnnnnnnnnnnnnnnnnnnnnnnnnnnnnnnnnnnnnnnnnnnnnnnnnnnnnnnnnnnnnnnnnnnnnnnnnnnnnnnnnnnnnnnnnnnnnnnnnnnnnnnncttgcacnagctgagatacgcnactggactcancctggcaanaaangagattcntttaaa

SEQ ID NO: 27890 - DNA, 527 bp, Homo sapiens
  misc_feature (1)...(527): n = a,t,c or g
gtcggcgtggtaatcaacatattgcaatcactttgnggtcttccccttggttttggccaccaacagatactttcttcattctaagacaacatggatcaactcaaagtcattatccttcacatccaggtgaggaggagaaaatattcttgtgatattataatttttcatccaccacctcaaagaactcagagtgtgaaacattgacccttttactctcataagctgtaaggatgggtgtgagggttgcagctggttatctgggtctacaaggagaggatggcctgaccattgtctcaagcctgaagaggaacaaaggaaaggatgcgactcagggcgctggactccaaaatctggtgtttcaggcccttaacaaatgctgagtgatagaactacaattagctcttaattatctgtgcccatgacagatgtaaaaataattaataatgattttgctttggaaaatattatactcatttctgcaagacctgatangataccgnaatggcaccatactagaactttatcgc

SEQ ID NO: 27891 - DNA, 519 bp, Homo sapiens
  misc_feature (1)...(519): n = a,t,c or g
gactcccccatgtctcanatggctttcatgggggcaggagaaaggatagtgaccttaagtcttctcccgtgacggtgacagctcgtttgccagctgttgctggaaccggccctggatttagaggaaggcgtggaagttcaagactcaagatacttcctggatagagaataactggaaaggctcaagtaagtttttccgaagctctcgccttaggaggagttcagcctggaataagagcgtgtgttagttttgtcatcccacctaactacagattgaattaccctgataggtttttaagccattccagtgtgcattatctcaataaagctgttatttaaaaaaaatactagattgcagttttaaaatacttaaattttacagcttctaaaaaaggaaagttatttccaaccagaaaagtaaagtagaaaatggattctttgcgcaaacatggtggcttacgcctgtaatcccacactttggaagcaagggcagcaggatgcttgaggccanagttnaaac

SEQ ID NO: 27892 - DNA, 516 bp, Homo sapiens
  misc_feature (1)...(516): n = a,t,c or g
ggcagaatcttcatgatgatagccttctatatggtagtattttctgggggaaatgtgaacacagtggcccttggccacttacctaatttggtgggaaattaaagtatgaataatgagaaagcaagttttcccaccctacatattttgttaaagaacacttagctagaatattttttaaaaaaagaaataaaatgagaaaccaagggatctgagacccaaatctagagttagaaattgtagtttctaggttggtctctgccgtggaattccttttgaggttccatttgagtctgtgctgctcagtttctcacttgttaaaggataatttgattgccactatggtgttaaaatactcatgatggaaaagtgttttattttccagagatcaaaattccaatgttnnnnnnnnnnnnnnnnnnnnnnnnnnnnnnnnnnnnnnnnnnnnnnnnnnnnnnnnnnnnnnnnnnnnnnnnnnnnnnnnnatngagacccagctgggcaacattggnaaaactt

SEQ ID NO: 27893 - DNA, 519 bp, Homo sapiens
  misc_feature (1)...(519): n = a,t,c or g
gccccattgtacagacgatccaacggaggcacaggcccactanggaacctgctcagggttagctggctaggaaatagcaccagtaaaagaagagatggtttttaggccgggcacggtggaannnnnnnnnnnnnnnnnnnnnnnnnnnnnnnnnnnnnnnnnnnnnnnnnnnnnnnnnnnnnnnnnnnnnnnnnnnnnnnnnnnnnnnnnnnnnnnnnnnnnnnnnnnnnnnnnnnnnnnnnnnnnnnnnnnnnnnnnnnnnnnnnnnnnnnnnnnnnnnnnnnnnnnnnnnnnnnnnnnnnnnnnnnnnnnnnnnnnnnnnnnnnnnnnnnnnnnnnnnnnnnnnnnnnnnnnnnnnnnnnnnnnnnnnnnnnnnnnnnnnnnnnnnnnnnnnnnnncaanntgggaganngaancaggcttactntgacttcctggagtgnacttttcctgcttacaatacttggaattttngcttgcctcnaaatgactcatgatgggntttgaagaacantgctt

SEQ ID NO: 27894 - DNA, 518 bp, Homo sapiens
  misc_feature (1)...(518): n = a,t,c or g
gggaaagaaggaagcacagagagtttgcatgacttgngcaaggtcacacatgtggagagagccgggatatgacctgaagccatcaactctgaggcctgtgctcttacctaagacctcacagctcctctcgatcacaataagggctatttcatgatcgctgtgttctaggcacatgctgagtgcccaacagactcatcgcccacaagtagatctgttctgagcccagtgctggagattcagtgccaactgagtcagactgggtcctgtctcgagctccctgtgtagttggggagcacagatagaggagcaaactgctcaatacagtgatgatggaataggacagggctctgaaaagaagaaagcagaagaatggaacagcgagtggttgggcccagctggagactgctttaactagagtggacaggatgagctcctgtggggaggctgtgtgagaaggaccaggcctgggaaagcagagaccagcagaacaggcanaggcnacaggtgcaaaggccttt

SEQ ID NO: 27895 - DNA, 193 bp, Homo sapiens
  misc_feature (1)...(193): n = a,t,c or g
acgagccaggagctgagcaaggaagtaagcctgatgcttttgggaactgcaaatagctctgtatgactggagttgggagcgcanacgttgatagcacaaccttangagacgcacgtatttgtgacaaagcantttttctgagatggcagatacagaaaggcagagtcagagcacagccccactgaggtatctc

SEQ ID NO: 27896 - DNA, 179 bp, Homo sapiens
  misc_feature (1)...(179): n = a,t,c or g
gttaacagtgtgtgtatttaagagacaatgtcgcactgttttgcccaggctgcagtgtgttggtgtaattattgctcactgtagccttganctcttggacacagtggtcctcctgccttagcttcctggnnnnnnnnnnnnnnnnnnnnnnnnnnnnnnnnnnnnnnnnnnaatttttt

SEQ ID NO: 27897 - DNA, 542 bp, Homo sapiens
  misc_feature (1)...(542): n = a,t,c or g
gtctgaattgtttccccacagatggtgagctttttggagtaccttgtatggtgcaaaatggcacccaaaacagtatcaaccagaaacagtgagtggtttcnggccctatggttcccagggaggctttctgagtcctggcaagcagcctctacactccgtagtcaccaggccaggaggtggataanagagaaggccgagtggaaggactgtcttgattttcaggagtggtcacagtcccactgtcctgtgtgcgggacacagcactatgtgttatacccaggaccaccttcatcgaggtggctgctgagccaaagagggtgtttctgcatgtgggtancttcaacanaggangaggaccatgggagaagtaggaaaacataacttagcttatagggccttgactcaaaacagaattcttatacacaaagcttggggaacacaaattgttaaggcctgtccaagggcnaagnaacaaccttggctacccagtttcttncttttttttaanggaacncccccgttacccaagntnggtttcccgg

SEQ ID NO: 27898 - DNA, 540 bp, Homo sapiens
  misc_feature (1)...(540): n = a,t,c or g
ggacaatattaagtccaaatccaacctcctgtcantggagcagttatgttttatactctacagattttacaaataatgaggctgttccttgaaaatgtgttgttgctgtgtcctggaggagacatgagttccganatgacccaatctgcctttgaatctggaggaaataggcagaancaaaatgactgtagaacttattctctgtaggccaaatttcatttcagccacttctgcaggatccctactgccaacctggaatggagacttttatctacttctcnctctctgaanatgtcaaatcgtggnttagatcaaatanaattcangccataaagccanggagggttaccngtcnaggggnttgcatcanntgttanggggcaagttataaagggatggnancaaagaaaccaaaatnntccccgnataaanaaacattttgaaaggggngaaancccaatttcnccncagngngaanctctggganaaccctnccnacngggaaggaccnccccctttnanacntttgnnttccnaaat

SEQ ID NO: 27899 - DNA, 551 bp, Homo sapiens
  misc_feature (1)...(551): n = a,t,c or g
attcggcacgaganaagataaggtcactgggaccctggttttcactgtcatcactgctgtgctgggttccttccagtttggatatgacattggtgtgatcaatgcacctcaacaggtaataatatctcactatagacatgttttgggtgttccactggatgaccgaaaagctatcaacaactatgttatcaacagtacagatgaactgcccacaatctcatactcaatgaacccaaaaccaaccccttgggctgaggaagagactgtggcagctgctcaactaatcaccatgctctggtccctgtctgtatccagctttgcagttggtggaatgactgcatcattctttggtgggtggcttggggacacacttggaaaggngaatttnaaggctgggtncnaagtataaccgtgaaatgnccaaacggtcccaagggaacanttggaatttnaaccactggcaaccncacgggcatctatagcaggctnnaaagccaaagntatgatatgcnccaagnattatgaaatgngaaaaaaaaaaagnttttttt

SEQ ID NO: 27900 - DNA, 554 bp, Homo sapiens
  misc_feature (1)...(554): n = a,t,c or g
cgagcacccaggcagcatagagaggcggtagcagcctcctgtttctttccagaaggaagactggccaagtagtggcttacatcccctanagggtgctagggtccagatctggccctagccagagtctacattttgctggcctttccaagtcacttccttgtagccaggctctaggaggacccagagttcatcaagagcccctcaggcagacaggtcctctctgttctgatctcccaactagcagcaaagcagccctactatttcctctccagccacccanactgctgggtcattgtcaccactgaagcatgcacaggaataaatctgccaaccccagtcaagaggccagtggcttggcaagtggatactagttaattttccagacctggactcaaattccacctctgccanttagtaactgtgtgacattgggcaattacatcatgggtctaaacctcaattccttaactataaataggataatatactaattantcatnggacattgggggacaatggatcatgagntaaacattacacaagcagcattgtgg

SEQ ID NO: 27901 - DNA, 594 bp, Homo sapiens
  misc_feature (1)...(594): n = a,t,c or g
gcaaaggggagccactggaaaaacttaagcatcgggggccagaaggattgaaaatgtaccagggacatatgcccaccacataatgtcatgatttcggtcctggtataggattttccttaattgccagcatttagcttaaagtgcatttaaatattgttttgtttttaatttactatctaaacttgtactaaaggagttggtatcttttatgtccttagttatttttgttattgtctccaacagacctttttcctctaggtaaattttgggttattgatgacatgtatgtatttgaggtcctggtccttgtttcatatttaatttaaagaaatgtaatgttttaaaaattanttanttatttatttattgtagatatggggcctagctatgttgcccaggctggctcaaactcctaggctcaagcaattctnnnnnnnnnnnnnnnnnnnnnnnnnnnnnnnnnnnnnnnnnnnnatgcccanccttcagatttcttcagtananatccttttgacaaaaagnttcctttccttttaagtttaatttntaanggtttganaaagagcccanccgtnaaaaaggnnggcccnaccc

SEQ ID NO: 27902 - DNA, 696 bp, Homo sapiens
  misc_feature (1)...(696): n = a,t,c or g
gcatagggctcggcgtgggagggggcagcaggctcaggttgtggtgacactggtcaccgtagagcttccacttctcaaacaggaagtccatcacctgagcggaggggacctgtggctggcaggccagcagcagcagcaacagcagcaggggtcgctgtggctggcaggggggcatgcctctgggcagctagctgcctcccacatctggcaggggctgcacagctggggcaatgcagtcctggtgggtgtgtacgctcctccgagggcagctgagtggcagagcagcagagcctggggcgtcctggccagtggggtgtcctcccctgaagctgcccctctgagcctcagggtcctagggataaagagggagctgnnnnnnnnnnnnnnnnnnnnnnnnnnnnnnnnnnnnnnnnnnnnnnnnnnnnnnnnnnnnnnnnnnnnnnnnnnnnnnnnnnnnnnnnnnnnnnnnnnnnnnnnnnnnnnnnnnnnnnnnnnnnnnnnnnnnnnnnnnnnnnnnnnnnnnnnnnnnnnnntccanctactcggaacttgagnaagaaatgcntaaccggaagnaaacttcattagcgaataancattcatcaacctggttacaancggacccntccaaaaaaaaaaaaantnttttagcggcgaagtttccctnatnggtaatttcttgnatgcctntttaaa

SEQ ID NO: 27903 - DNA, 717 bp, Homo sapiens
  misc_feature (1)...(717): n = a,t,c or g
nnnnnnnnnnnnnnnnnnnnnnnnnnnnnnnnnnnnnnnnnnnnnnnnnnnnnnnnnnnnnnnnnnnnnnnnnnnnnnnnnnnnnnnnnnnnnnnnnnnnnnnnnnnnnnnnnnnnnnnnnnnnnnnnnnnnnnnnnnnnnnnnnnnnnnnnnnnnnnnnnnnnnnnnnnnnnnnnnnnnnnnnnnnnnnnnnnnnnnttgtcttttatctcaagttccttcattgctactcaaagtgtgctccacaacccagcacagccacatcatcggagagcttgctagaatgttgggccctatcttagacctactgagtcagactctgtattttaagaaggtgcccacgtgactcacgtccacgctaaagtttgaaaaatgctgagctacttcaacctggactttgtcacctataatagaattaaatccccttcatcagttgcgacaacagaaaccccanctcaaacttccctaaatcattagggaactttgattggcangtgcaatggccacatctgtaattcagcactttgggaagtgaacagggcatccttgaggcaggagttggaacagccaataacgtngaagagactcacnttcaaaagttaaagaaaaaanaaggcttattagcggcgnagntntccntagggggtattttncttgaanggcgnntttaagtcgnaggggnanaggnnnncggngannctccaagggggnggtggg

SEQ ID NO: 27904 - DNA, 146 bp, Homo sapiens
gcttaaattaagcttaaatatacattctcaagataaattaacagttcagggcttcacaacttgaaatctgtggaagatgacattggagacaacagaactctgggggaattcttagatggaatttgccgaaactttttttttttttt

SEQ ID NO: 27905 - DNA, 720 bp, Homo sapiens
  misc_feature (1)...(720): n = a,t,c or g
gggagctcttccttaaggggacctggcctcccctttgttcaagggcttctgggtctcttcactggctcaagtctgggtattcattgagggacactgactttctgtctttatgaatcaagttatgcttttgttcacttgacctanaagtcttccacttacacaaatcaattaactctttagtagatttcctatctatttaacttccatcaaagaatatcagccatcttcccagatagttaccctgtaacagatattttctttgaaatgttctttcatggccattttgcattctttatcacaataaattattgtttcatttttattaaattgttttaaattagacactggctctgaactgacctcaattccaggagatccaaaacatcactgtgatctaccagtcagagtangggcttatggcagttaggtgatgaatggngttttagctcaggtctgtctcacaatgggacagcangtcccaaaagcatctgtggttgtatccccaatancatacacataattggnntaatcacttantaaccggcagaatccccacattgatactgactgtggactgaagctgtatgtggaaagcagtggagcacnaaacgtntcaccagaaaaagnagtttttacaattggaaaagnaaatncaattcaaatanataagggtccaccaacacattactgcattgcccgcaaaaaaanggnttaaagaag

SEQ ID NO: 27906 - DNA, 715 bp, Homo sapiens
  misc_feature (1)...(715): n = a,t,c or g
gatccccaaatcctacatttctttagttacttcttattcgcactatatagaaccttaaagtcctttatccttttccctcactcttcatagccgagtcttatcaagttgaccactgaaacgtttcttgtgtgaattctttcctttccctttcttgccacagtctttgcaatacacaagtatttctgttanagtattgggaaactgtcttttctgttaattcataaaatgccttgtttttattaattttgangtttcgtctgaanacatgtagagtctgactataactgcgtgaatttaccaatgagtctcatcctgtatttgttaattttgcacatactttatagtggggagttgcttcatgatcattaatagataagacctaatttaaactctatcatattgtcntctagtatgcatttgaattataattaggtatagtanaactatgtanatttttganaatcaattagatatttatatatacngnancttgtantgaggcantatattctagtgaaantagtacaanactttgacttacttgcattatcatttantanntctatggagcctacaantgaaatagttgcttgcangcatgcaggtgtagtacnnagtggaaaggcanttgtcatgnctangactanntcaggaggaagcagtngtnacatgncaacaatnagagggagtcttgaaaaacnnngaaccantaccg

SEQ ID NO: 27907 - DNA, 715 bp, Homo sapiens
  misc_feature (1)...(715): n = a,t,c or g
gccattctaagaaagcaatgttttaatgatattaatgatatacaggttaattccttttctgaagatccctggagaagaagctgtcccatacttgctggtaatccatgtcaaaatttagcagttcaaattcttaggctataattattttttatttttatagatttaggggtgtgcaagtgcagttttgttacatgggtatgctgcatagtgactagtgtaaccatcacccaaaagggtacattgttagagaaggtttctccattctgaactgaaacctacctctgtatatcactctttgatattggttaaggcatctggtgaaacacagatgatgctcctgcttccaaagttaagtaaagctgatgagatttagagagtacaagctaaggaatttgggaagtgactaatgggagattgatttctgatctatgaggaacacctgatccacgtgcctgtcccatggaacacgggtcatactggggattgagaccctttgtttangttaaaccaaggttcagatggaggatgttagagggagtgtgctaagtgaaaatgctgtataactgcatgctttncaaccgttgtggtccctcccacctgctgactgaccgtccaaatgtaatcncantaaccaagcccttgcnggntcanganctntcagcctgtncgggcatccacggcatcnattntcannanacaagnacaattagtcttg

SEQ ID NO: 27908 - DNA, 712 bp, Homo sapiens
  misc_feature (1)...(712): n = a,t,c or g
gggactgcgctgcaggttatgaaacttggaaatcccgagattgccaggagactgctacttanaggtgctaatcccgatttgaaagaccgaactggtttcgctgtcattcatgatgcggccagagcaggtttcctggacactttacagactttgctggagtttcaagctgatgttaacatcgaggataatgaagggaacctgcccttgcacttggctgccaaagaaggccacctccgggtggtggagttcctggtgaagcacacggccagcaatgtggggcatcggaaccataagggggacaccgcctgtgatttggccaggctctatgggaggaatgaggttgttagcctgatgcaggcaaacggggctgggggagccacaaatcttcaataaacgtggggagggctcccccacgttgcctctactttatcaattaactgagtagctccctgacttttaatgtcatttgttaaaatacagttctgtcatatgttaacagctaaattttctgaaactgcataagtaaaatcttacaacaggcttataatatattaacaacatctttaacctgcaaaatcgttcaacattaatncagataactttgcttctccgaanattaccttcctggntttccttgctccctttcaatcnaaaccaattgancttgntttaaaggttgcccaagnttgcaataannttnaaaaagaaaaaa

SEQ ID NO: 27909 - DNA, 715 bp, Homo sapiens
  misc_feature (1)...(715): n = a,t,c or g
gaggcggaatggccctcgtgccctatgaggagaccacggaatttgggttgcagaaattccacaagcctcttgcaactttttcctttgcaaaccacacgatccagatccggcaggactggagacacctgggagtcgcagcggtggtttgggatgcggccatcgttctttccacatacctggagatgggagctgtggagctcaggggccgctctgccgtggagctgggtgctggcacggggctggtgggcatagtggctgccctgctggcacttaagtcatcgatgaagcccttgctggtacactgccttttattcttttcaggtgctcatgtgactatcacggatcgaaaagtagcattagaatttcttaaatcaaacgttcaagccaacttacctcctcatatccaaactaaaactgttgttaaggagctgacttggggacaaaatttggggagtttttctcctggagaatttgacctgatacttggtgctgatatcatatatttagaagaaacattcacagatcttctcagacactggaacactctgtacaatcacctgtgatcttttacatgccgaattcctatgaacgggataacactctacatgctgagaggaattactgtnaaaaggtcntacatcctanaaagtttcatattcancnngananaacnangnggctnnatggnnaattaanaagtgcntgntggcctagg

SEQ ID NO: 27910 - DNA, 711 bp, Homo sapiens
  misc_feature (1)...(711): n = a,t,c or g
gccagttctattgggagatcttttttcctcctgttgcaaggacttcaaccttatacccatcaggtgcctgccatggtcctagaagcacattcaggatttgtcttggtctanaccgtcatcatatgcctagggaaagactcttgtattccgtcctgagcattcacaatctgcttttgagaagccaaataaatcatgcacttatttcctccttacacaaagagcaaacacacaaagtatggataggaaaaaagtttcttaggtgttgttgatgggaagagaggttggcattagattgcagagagcaatgaatgtcaaataaacgagtttggatttaattctgtaagtagcaggggtgctcacagggctttgaatcagggagaaggaacggttgcaggggtgctggggaacttgctgagagtgactctgtgtanaggagcttaaaatgggagacatgaaaggggagccttttggtaacacagttttcancaaggagaattggtctanggttctcccttttcctggatgtcctgagaagcaatttcnccctgaccttaatgggtgtacaatttcgttaactgggtaaggagggtcatganagagggtttgcaaaggtaagggtggttgcttcaaggtgnagttgcnaccctggtgntnaccatggttctcnctcaaaatgggggcaaaagctcaacnccgggtnanttctccttg

SEQ ID NO: 27911 - DNA, 713 bp, Homo sapiens
  misc_feature (1)...(713): n = a,t,c or g
gggaaaattaaagaaaggcttcattcagtgtgatgggctttgaggaccaaatggtttgacttttgagaacatgaaagccattgcaaaatgtaaagccaaggaatgatgtgttgtgacttagtttgaacaggactttggttggattctgggtgtattttgatggatcacatgtggaaccaaggatgactttagttgaacaacngaatctttaatcttgcttgagacantaaaagtgacctaggagttagaaatattctctggaatttttgttgggagttgtgctttttctgtgtgcaaggaaataatgggaaangacatcccacagttgtgagtgtcagcccacattgcantacnatgatacctgtggaggggatacctttggctggaataccaatgtgctttttctctagaggtaanattttgagacaaatctaaaatgcgttcantgattatgggcaantagtcatttagaaaattagttacaactatnacgttggtgcanantannngnntttttgcattgngaataatgcaanaccacaatttgnacancanaanacatctcaanaattaaganttcantatcacattanngttgngacanattcccctnntttaaaagaactgtcattagctttgacctngtccnaaaggacccggcattaagcacggcntgggccggngnccggnccaagcgggttgcnancanccac

SEQ ID NO: 27912 - DNA, 718 bp, Homo sapiens
  misc_feature (1)...(718): n = a,t,c or g
ggaagttctgtaaggaagtcctanacttgantaaggagaaaggagcaggaccagtcaggaggtagactcaacgatgtagtgattggttgggggataagggggaaagagangtctanaatctaggctaggtgaccaggtagttgtcccatgctgtcaccgtaagcatgacagtaacaggtttaggggagtgagaagggaagganatgatgactttggttttttgactgtgttgatgttgatgtacatcatatctaagagggcatgttcactagtcaattggatgcaaggtctganactctagaaaggtcantggatataaggttagagatttattanactggaggtaggttggtttgggttgccaagaanagtgtgtanactgagaagagagaacanantatagcagaaccctggaaaattctaanccatggctanaggatcagaatcccacaangacacactggacaagtgggcataganacaggaaggagaaaacagtaccatgaccatgaagagaaggagtctctgaaagggaaaattcaatggtgtccacaccacanngaaatcaggtacnaaggaaccattctggacttacatgnaagaatactcaccataatgccctacaattannctctaanttctggagccttattnaaatacccagnggcaactcttattaatggcttanttataagnaatttaatgaccaaatnttaat

SEQ ID NO: 27913 - DNA, 721 bp, Homo sapiens
  misc_feature (1)...(721): n = a,t,c or g
gctcaggtgctgcttgcagtgctcctcaacagagggagagtctccctaagatttccatgttcctagacaaagtcctaagctgtttggaagtctgtgagcattttcagtanatgaggagctgagaaagcgctgcctgtctggtccttcatttggccagctaacattctgtcgagcacctgcattgtgctggattcatgcttccanatgtgagatgtgtgttctaatctgacagtgtgttttgtaatctgtcaatcagtgttggagatatgcccaggctattacaggcatattatggacaaatataaaggccaactagtgatcccagcccaagaggttcagggaagtcttatgaaggatttgtctcaagctgagcctgacaggacaagcatatanaaagacaagaggggganagagcagggcattctgcaaaggggaccgatggcaagagcagctgcatgggatgtgtgaggaaatttgccactgtgatgtgtatgtggggtannatgggggtggacangggtgacgggctccacaaagacaggatggtggagggagttntgtcaattnacttgatctgtantggtttncctgggtggcccccatntgtggantgaatttagggaanagctggggcattaggaanagaaaccttnatcaaagggganaactaagcaggaaaagttgagaaagggttgaacattccagggaactgaaaaactgt

SEQ ID NO: 27914 - DNA, 713 bp, Homo sapiens
  misc_feature (1)...(713): n = a,t,c or g
gggcagatgcagtaagacttcagagagcccaggtctttagggcggaactgattgcttagtaaaccaccttcagccttgttttggggaaggctttctaaactgcatcaacttctctctgtgccttggaaatgagaagaagaatatgtccttgagtgggggggcattaattgagctctttttctgatcattaggacctttagccctagggtcacccggggcacggtcacccgtcccctagtgcctcantgctcatacacacgtggtagaggacaggctgggcctctgccaactccgggacggcctggacatgggattattgagagagatttttaggctcgcatattttgttacatcatttgcctctttctctgcaagttgancaaaatangagagaggatccagacgattgagattttgctgtttttactttaatgagtattcattgcttccagtttacaaagtacctttacataactggatgtttgattttaacaaggcctttggangtaaccaggcaagtgcattagccttcgtagtaataagaagaggcttganaggtgccaaagcaacagctccaagaggcacactgacatggatcaggcacaacccngactggaagtggnccccggantcaaggcatncaggnacangccgtnnataaatnttgaaaaaaaaaaaaanacttntnagggcnagntttccttagggggatt

SEQ ID NO: 27915 - DNA, 546 bp, Homo sapiens
  misc_feature (1)...(546): n = a,t,c or g
gcatagcatctggcaatgcagaaggcacacaataagtgtgaactattcataagtcgttttcagtgagacacttttagaaagatttttttccttcctttgtaggtaattaatcaacctccaaaagagattcagtaaaaataaaagtgatcatttaacctttccctcttgtaatggtcttttataaaaattcagttggnnnnnnnnnnnnnnnnnnnnnnnnnnnnnnnnnnnnnnnnnnnnnnnnnnnnnnnnnnnnnnnnnnnnnnnnnnnnnnnnnnnnnnnnnnnnnnnnnnnnnnnnnnnnnnnnnnnnnnnnnnnnnnnnnnnnnnnnnnnnnnnnnnnnnnnnnnnnnnnnnnnnnnnnnnnnnnnnnnnnnnnnnnnnnnnnnnnnnnnnnnnnnnnnnnnnnnnnnnnnnnnnnnnnnnnnnnnnnnnnnnnnnnnnnnnnnnnnnnnnnnnnnnnnnnnnnnnnnagatctttattaancgggcgcaagcttaatnccttatgagggtaatttaacttggannggccngctttaaaaa

SEQ ID NO: 27916 - DNA, 690 bp, Homo sapiens
  misc_feature (1)...(690): n = a,t,c or g
gttcagtcttgcatctcactgatcattaaaacgttcattttgaaggagggtgatgggattagggagcagtggtgttaagaagaaaacgaaaggacttttttttctttttaaagattaatgtttataataggcttagtactagaagtacatacagcctgggcatcataaggagagcccacctctacagaatatnnnnnnnnnnnnnnnnnnnnnnnnnnnnnnnnnnnnnnnnnnnnnnnnnnnnnnnnnnnnnnnnnnnggcgtgaaggnnnnnnnnnnnnnnnnnnnnnnnnnnnnnnnnnnnnnnnnnnnnnnnnnnnnnnnnnnnnnnnnnnnnnnnnnnnnnnnnnnnnnnnnnnnnnnnnnnnnnnnnnnnnnnnnnnnnnnnnnnnnnnnnnnnnnnnnnnnnnnnnnnnnnnnnnnnnaacntnaaaaaaaaaaaagttctttnattangcggnncangtttnnccctttanngngggtnntttcnnttgnaantnnccctcttnaannnccnnaagcggggaaaangtgnngaccnnccagnatacccggcgnggnannanncngncgangtctgacacccnntannccgangcacaactggnttcgggccgggcggnaaatcttcngcctnaccacnncacnccnccnnnnnccangnctgacggcatncnnannaagggg

SEQ ID NO: 27917 - DNA, 717 bp, Homo sapiens
  misc_feature (1)...(717): n = a,t,c or g
gatttgggttaaagttgctgaagccagagccaggtccaattctatcctgaccactcacattcctccaatttcctagtccattgttgttctctgtagtagagttggaagattgaacagatttagccttagggtcagatttccagaccccaagattacattcgttcccagaacttgcagactggcactggctcccttttcctttgttactagtggtgcttcctggcagagtgctcttctcagagccagggttcgaggcactgttgttatcggtggtgttttcggaagaagattcagtgtctttgctggcaatacaaggccactcttccatgtcagacccgtctacaatcaccttgtcccagatgtgaattgggttgggggaggtgccgttgttggaggaggctcccgagccccaagtggaatttgcataatttgaagcagcagcacctccaagggttgagtctggcgcagtcccactctcactctgcagcaacgctcctgtcacttgtgcgttgtttgggtttgctcaagtgctgtcaaggangaggcctgcccaccccaaggagcatcaggacgtggagggggtgccactttataaacttgtggcctgctgnaacggaacccggggactccgagnattacggggggctggcggtgccgtcggatgcanctttggatgttcacatnacngngnatggaactnaatggcggggcntgttg

SEQ ID NO: 27918 - DNA, 514 bp, Homo sapiens
  misc_feature (1)...(514): n = a,t,c or g
gaactgggagctgattaaaggatctttgcaaaacaagcctatttctgagtcagacagtcaagtaactcattatccattaagtaatttataggatgcctttaattctttttatataaatctaattacaagaaagaaaccttgtctccttgactctcctatttctaattttcggaatctctgagtttcctatttttaatttttaaattcntaanatatatatttttaaaaaataatgtttccttcctgtgagtggctcaatgttggagcgtccccactctanttctggngactaatttaaaatagctctcantgtgctctctctgttgatcgatgacttggccgcatcctaagcctatcagatgcanangcctgggcgganagggncctggaggagctgccannctnaangactggggctnagagccatttgnttccagaaggnnggtgttaagacnggcctnntttncaanccccgngaaaagncctaantnggggccgcccnanngaanccatt

SEQ ID NO: 27919 - DNA, 606 bp, Homo sapiens
  misc_feature (1)...(606): n = a,t,c or g
ggtcttctaattttagtggaattattccaaaagagatgatatctggctggagcataaggcattctanatgtggagttgtgggaattcnggggaagtttccaagttgtctaattttgcttcccatgagaggaaaggggattgtgaggctggctgctgtcccggagctgactggctgccttttcagtgtgcccccgccactggccagtgcctgccagtgcagctgatgagacatttaaacttctgtttgtttctacaatattttccttagttgcaaaactagaggcaagcgtttgtcaatgaagacaatagcatgttttaaattgttattaccgaagtgagagttttctagctgtagcattactaggtatgcaagtgttttatttttcttcctccaagttcaaacacccagtnnaagtccctgcnaagtgggcnccaaanacccggntcccggggtnacccnggcnaannngncncccgggtnntaaaaaacccggaaaaanntttgcccctggnttnanggcccanaaanacnnggnatttanggatgggattnattccnaaaaccncgnggaaacnnnaataaaaacnccanngcnaantttttgg

SEQ ID NO: 27920 - DNA, 607 bp, Homo sapiens
  misc_feature (1)...(607): n = a,t,c or g
gctctctctctctctctctctccctctttctggactgagctttgccttcacctccatcccctgaaggctttctcaactctagctcccantcccnggaagctgcctcctctcctcttccatagcagccagcacttgcctaactggacttattaactttttataactgttcatttacatgttcacatgccaccaaactgagttatttgaagacaagaatttcaacttagcttaattttgcagcccaaatgctatgcctgacactgagtagaccctcaataaatgcttgttgaataaacaaaatcaaactgtatgatnnnnnnnnnnnnnnnnnnnnnnnnnnnnnnnnnnnnnnnnnnnnnnnnnnnnnnnnnnnnnnnnnnnnnnaattcaaggntgcagtaagctatgnncgcancactgnactcnaanctggggggagaaaannaaaaanccgnntctcaaaaanaanatttnaaagngaaaanntttttntgggattttcagggannagttanggttaaaggccaaattccgggtcctnaggnnnnccaatnaggannaaanaanttcccnctntaancccaaattggganccanaaatttaaat

SEQ ID NO: 27921 - DNA, 606 bp, Homo sapiens
  misc_feature (1)...(606): n = a,t,c or g
gcggcacgagctgcataggnnnnnnnnnnnnnnnnnnnnnnnnnnnnnnnnnnnnnnnnnnnnnnnnnnnnnnnnnnnnnnnnnnnnnnnnnnnnnnnnnnnnnnnnnnnnnnnnnnnnnnnnnnnnnnnnnnnnnnnnnnnnnnnatgacagagtgaaaccctgtctctaaataaataaataaatacatggaataaaaagttaatatttaataatgggctaatgctaatttgtgtgtgtgtgcgcgcgtgtacccaagaaaataaaatccaagagtgtcaaaaaacttggaaatacaacagccatgcttcaaaggactagagcacaaaaaagaaattgtcactgatcactgagcaccgcttttaccgtgctttaaaggttactatgtccaataataagggccttctttccanntcaaattcttgttcaannaacaggggtaacaaatttncanaaccaaancccccttaaancccaaaaatccnccgaantngggnctnntnaccccaatcccctnntnaaaaacnggngagcagnttaagnaccttngaanggtnaaaagcnncttnccggccaagggagcnanggttnnaccnnatttttaaa

SEQ ID NO: 27922 - DNA, 503 bp, Homo sapiens
  misc_feature (1)...(503): n = a,t,c or g
ggagagtggcagtagtgggcccaacaaattcatcctcatcagctgtgggggagccccaactcagcctccaggactccggcctcaaacngggnaccagctnngatgccaaaaggacagaagtgaccctggagaccttgggaccaaaacctgcagctagggatgtgaatcttcctanaccacctggagccctttgcgagcagaaacgggagacctgtgcagatggtgangcagcaggctgcactatcancaatagcctatccaacatccagtggcttcgaaagatgagttctgatggactgggctcccgcagcatcaagcaaganatggaggaaaaggagaattgtcacctggaagcancgacaggttaaggttgaggagccttcgagacatcagcgtcctggcanaactctgtttctgagcggcaacctacncctaaanggcatgannaattcncaaccannancactgnaaggacccatgntttgaagcnatcnanccgtgat

SEQ ID NO: 27923 - DNA, 499 bp, Homo sapiens
  misc_feature (1)...(499): n = a,t,c or g
ggggctcgggccactgtctcaggtccacccgtggctccaaaatggtctcctggtccgtgatagcaaagatccaggangggctgcagaggaagatggtgcaagagttcctggccgatttcatgagcacatatgtcatgatggtattcggccttggttccgtggcccatatggttctaaataaaaaatatgggagctaccttggngtcaacttgggttttggcttcggagtcaccatgggagtgcacgtggcaggccgcatctctggagcccacatgaaccgcagctgtgacctttgctaactgtgcgctgggccgcgtgccctggaggaantttccggtctatgtgctggggcagttcctgggctcnttcctggcggntgccaccatctacagtctcntctnacnggcattctccacttttccggttgacanctgatngtgacccggtcccntcgctacagctgggatttttgncagctacctcctgatnacattacatt

SEQ ID NO: 27924 - DNA, 503 bp, Homo sapiens
  misc_feature (1)...(503): n = a,t,c or g
gaaattttaaagtgaaattttagtggttcagaacttctaaattacaacttgtctctaatgatattcctctgtcctggtctcccacgcnnnttcacacnntctcactcaattttccatttccttcccaactcctcctccttcataccctctcacacacttttcttttgtacattacccaaatcctgggtaattcattccttcttaccttcaactttctcagggcagcagccactggcctgcaattataatatcaacttagtgtctaaaccaagaggataacggtatcttggnatactggctgggaggaactgctggttagtgtttgggaggctggttctagggtgattgagtctgtagggaaaccaccccttgtcacttcccacaanggggaagggtaancatgtntagganctttggagcttgctttgngaacagaanantatcaaaccctgggcaatcaaaaccttttnaaggtccanaaccanttttaancggcaatttta

SEQ ID NO: 27925 - DNA, 495 bp, Homo sapiens
  misc_feature (1)...(495): n = a,t,c or g
ggtaatgtaatgaggcttctctggtgacgtcacttgtaaatgtggtcaaagtccagttcttgggggctagtanaagcgggantanaggncattcggtttgcatgctttcacttctcaagctgtcactgtgccatggtgcctactttcagccantgaaccaactcaactgggccgggcatgaacgcttacaantatcanaagttcctggagggactcaacaaccttagaggtattacaaggcttcaggctccctaccctttgtccttgctgatcgtgtgagcacttattatggtgtgtgttgtatanggtctgtaaaaccctcctgctctgacctggccctattttttatgcgtttaggcaattaaacanaagggatanagttttaaatgcatcctaagtgagtaggagagaatctccttaggtacttcancaacaanctggtgncntgcntnaacggcaantnaganatntccctgtntccttgnagcnnnaggg

SEQ ID NO: 27926 - DNA, 484 bp, Homo sapiens
  misc_feature (1)...(484): n = a,t,c or g
ggttgtgaattgcccggagacacgggagatgaaagggaatgaattaattacgatgaaactttaattcccatttgaaaagctgctcgtgggatcaataatgcccactgtttggcatcagttcactatcagagtctatgctgttgagttcttttctgggccactcctagcacataccgtgcttttgcgtgaattgaaaaaagatgcccgtccttcaggcaaatgcagcgccatccagggcacgtgacttggccaagatgctctgtacaattaagtgtgttgttggacatttttccactactgatgatggatgagtgtcagtaacccacattctcttcctcaatgccatgaatcccgtggtaaataatttgaagcaatggttagatgtgattagcatctaagcctaggaggagacaatcactganactgttgataataacaatattaattaaaaccgnantgacancccggggaananaaggatacc

SEQ ID NO: 27927 - DNA, 469 bp, Homo sapiens
  misc_feature (1)...(469): n = a,t,c or g
ggaaanaggtnatngtcnattatntgtagtcnagtncttaatggnccttgcagtggtgtctaacttctgcaataaatgaggctgccantcctagtgtcnggctttatgcantttgnttnccnttgnggntnaantgggagtaccgacttgttgctgtgaggatcaggtgaagtggctaggatanggacacactttacttganttggganacagnccatgtanccctagtctgcananngtggcangtcacacgtgtaancccggaggttnannttgngcccannattgcannggtnacntgcntgaggcnttctttgcttgngcanncatctcattcattanacgnggtcaccntttttgcacacatgntgcaaaaccatnnccgnacttttccaaagtctacttntcaaagctnccngatggatcatngtnnatncagttgnacnacntnaagtcaacaaggtggcac

SEQ ID NO: 27928 - DNA, 477 bp, Homo sapiens
  misc_feature (1)...(477): n = a,t,c or g
ggcagcagatggaagccacaagcgcagccaccgaggccggcctggagctggtggacaagggcaaggccaaggagctgccagggagtcaagtgatttttgaaggccccactctggggcagcaggaagaccaagagcggaagaggttgtgtaaggccatgaccctgtgcatctgctacgcggccagcatcgggggcaccgccaccctgaccgggacgggacccaacgtggtgctcctgggccagatgaacgagttgtttcctgacagcaaggacctcgtgaactttgcttcctggtttgcatttgcctttcccaacatgctggtgatgctgctgttcgcctggctgtggctccagtttgtttacatgagattcaattttaaaaagtcctggggctgccggctanagagcaacgaaaaacganaaagntgccctcaaaggngtgcnagaaggantacnggancctggggccctttccttc

SEQ ID NO: 27929 - DNA, 471 bp, Homo sapiens
  misc_feature (1)...(471): n = a,t,c or g
ggtaagttaacttttcttgacatttgtgtacattgtanatttataaaagttttagtactgtagggagtagggaagatanaaggcttancttanctgctgattttttaaaagtgatattctttcctttanctctttctctgagaccacgattttgttttcttgagctcattttacaaacctttgtggataggactccaggaatagagtatgtctacacaacttcctggcccttttggaaactgtccttacaaagctaanttgagatgacagcacagtttgtagaagaccctttcacacacatagttaagcttatctacatgtaagatcgattttagcctctgcctttgggctggtggcanatgttttctctatacaatattgggtattacgggaggctgangcaagagaattgtttgacccgggaaagaaaaaggtttaatgnnccaagggctgngcannggaaaccaaccc

SEQ ID NO: 27930 - DNA, 487 bp, Homo sapiens
  misc_feature (1)...(487): n = a,t,c or g
ggttcaaaagggatcttanaggtttgaacccataacctcatctcactgatgaggaaattgagacctgggaaaatgttgatttttcccagttaaaacacagctagttaggaataatccagtttcgaagccccctgtgtatattctcatcctgcccatgattttccagcctggtcatgaggctttcacagaagacaatatcaaattactactgagagcatcacctttgcccactctactctgtggtttcacgggaaatagtttgtggcccttgaggtaaactgggagtcaggatggctggatgctggtcctagctctgtcaaacgtgtaagtgcccacaaagctaggagaaatggcacagatggggcattcagaaaggatctcaacacaanttgaaccantgtgccttgaanacanngtgnaanttaagttcgngattanttaannccaanccctngngtcctnaatttanatnaaagggnangggggc

SEQ ID NO: 27931 - DNA, 473 bp, Homo sapiens
  misc_feature (1)...(473): n = a,t,c or g
gttggattatgtctacctataaaatggtttatgcattgtagctctttgaatattgggccctataacataaacaataatttacgtttctaatctaaccaagtgtgttgcgtatgataggcaggtagtaagtaatatgtaaagtaataaaataaagtacaattactaccagtataattatcacactcaaaattgtttattagtgatgagcatatatcttccttattcctcttcaatgtaaggcagaaggagttcctgtttttagtgagaatttgaaatagaaaaggtcagaatatctctttgttgacagatgtgggatctgttgttgagagatgtagagaaacatgtttgaacatttcactttgtgtgttttatgtgttaagttccaggcagggtaatagaattaaattattctttattttgaaaatacagatatgatnaagncacgntcaataanccanggannacanttccag

SEQ ID NO: 27932 - DNA, 471 bp, Homo sapiens
  misc_feature (1)...(471): n = a,t,c or g
gtgaatttatgtaatatgtatattatatattctacatatactatactgtatatatttatgatgatgataatgatgcgttgcaacctggagagagcataaggaaaagataggaaacatttattcatatacacaaaacattaattgaactttgtgcaaaaactgtctcgtctttcctattaaataggcccttggagtgaatggcttacattanttctctatctccacaggtactgtggtactacttggtacgtagtaggtactcaaaaaatgtttgcgagtgaatgaatggctacttctaagttggtttgtatgtcantgagtagttgtatctggattttttctcnangtgttttggaaatgtgtantgtgtttannnnanatgcccaaanantctgaactccaagagtgttgtcttaatcnaccttcnannnttnaaggccttcccaatggtctttncgcnngcaangggaa

SEQ ID NO: 27933 - DNA, 542 bp, Homo sapiens
  misc_feature (1)...(542): n = a,t,c or g
gaacaaataatgaagaagaatctttttggctgttanatgctcttgttggaagaatactaccagattactacagcccggccatgctgggcctgaagaccgancaggaggtcctcggggagctggtgcgggcgaagctgccggctgtgggggccctgatggagcgtctcggtgtgctgtggacgctgctggtgtcccgctggttcatctgcctgtttgtggacatcttgcccgtggaggtgagcgcctcactcgggccctggggcgggcgggccgccagggagtgacaccgggttcccatgtctctgcagacagtgcttcggatctgggactgtttgtttaacgaaggctcgaagattatcttccgggtggccctgacnnnnnnnnnnnnnnnnnnnnnnnnnnnnnnnnnnnnnnnnnaatttancttgggacngggngtcnttttttaaantccgngncnggggnaaaanaagcngctnttnntnggngccncnctggggngtgnggggaannnggnnnnnggggtngtnnaggncngggcg

SEQ ID NO: 27934 - DNA, 529 bp, Homo sapiens
  misc_feature (1)...(529): n = a,t,c or g
gccattttaccatcacaccagcaatgtacaagggttccagttactccgtgtcctcaccgatacttcttttctaattttgcttttgtcnnnnnnnnnnnnnnnnnnnnnnnnnnnnnnnnnnnnnnnnnnnnnnnnnnnnnnnnnnnnnnnnnnnnnnnnnnnnnnnnnnnnnnnnnnnnnnnnnnnnnnnnnnnnnnnnnnnnnnnnnnnnnnnnnnnnnnnnnnnnnnnnnnnnnnnnaattggncnattcatttgttttttgagttgagttgtgggagccctttcactccatcttaattaccatagntttctgtgtcttaatatctggtagaggacaagcccccaaccccaacacacacctgtctgttgctcttgtttaaaagcgatttgttattttttgggccttgacccttccctgtaaattttgggatcagcgngttcagttcccnttttaaaaaccggnatggagtttntngggaatncccccnaaaaaaannttttgggggaaaacaggtttttaacaacgg

SEQ ID NO: 27935 - DNA, 533 bp, Homo sapiens
  misc_feature (1)...(533): n = a,t,c or g
ggggtcggcgtgnnnnnnnnnnnnnnnnnnnnnnnnnnnnnnnnnnnnnnnnnnnnnnnnnnnnnnnnnnnnnnnnnnnnnnnnnnnnnnnnnnnnnnnnnnnnnnnnntctggtganananttagtganantgtctcaaaaaagaaacaaataataaattanaaagaaaaaatgaaaagaaaaagtgaccccaaaggcactctgaaggggctcccattcggtaaatctggtaaactgaacatctaaaaaaataacaatactagtggattctgctccattgaataaaacaaaaatatgtgagtctatacgatcanatttttttttttttaanaaaaaagatgaggtcaggtatggtggntcangccngtaccccaaaaatttgggaagcccagggaattgggtcacttcagggcanggnnttntagaccaacctngtcnaanaagggggaaaacccncccnnnaanaannaaaaaatanccccnnccaaatgggngaaaaattngtgtcccccaaantnnggggggggggggg

SEQ ID NO: 27936 - DNA, 528 bp, Homo sapiens
  misc_feature (1)...(528): n = a,t,c or g
ccctgtatctttctgtgtcatgtgctcaccctggatctatacctttattagctctacctattaacatccttcctctctttcaaagttccgctcctacttctttaggaccttccctggtcttccctctgagaactccatctctctagtctatgtacaacgttcttgatactgcatatcactcgactctctgtcttgcattttagttatactggtccacgtttcttatcttgcctattagagcatgaaattctaagggaagggggttgtagacttatccttacatcaatcctagtaactcacagcgcagagcattccctgaaatgatccttggcaaaaggcatcaaatactctacctgatagatgtggtgagaaatgaaatataaacaanatgaccaaacttcanttatcanaaagttgagactggnaaaaatgggggactggtagcaagcncctnntnaganncattttttcnnggggggganntcnccccccccgtngnggngggncangtnnnanagttncctgggg

SEQ ID NO: 27937 - DNA, 536 bp, Homo sapiens
  misc_feature (1)...(536): n = a,t,c or g
ggagagagctagcaccatgagcttcaataccctgcactgcttcataagaagacaaggagcggtagctgggttcaagagaagccactgaacactggcagccgtgatccctgcacagccatcccagccatagaagaacctggaaccaacccccagggaactcctgctcttccctggagaccagagaaatgcttccaaggccttgcctataacatcgctttgtcctctgcctaatgtaggcgctcaataaatacatatgaagttatctctgccaggaatctttaacccaggcagcaagaggaagctgggagcgtacaaccactggacaagctttctattttcccttctacttcacgccagctctggtccttggtggctggcangggttaacactaccacacctaatacagacacacacacaaggtgtgataatcgccctgggcttttttttaaaaagcccccngggngnnccgaaactttttannagngggcccccgnaaaaanccccggggggggggcaanaaaaaaaaaaaanaaaa

SEQ ID NO: 27938 - DNA, 584 bp, Homo sapiens
  misc_feature (1)...(584): n = a,t,c or g
aacccggtttctgaggttaagaacctggtattgagagcacagactccggaatacactttgcacagacaagaanggatcgncggaaagaccnggaacgggacgaacaaaaggacctctaggttctctagcctccctattacnccctatttaacgacgcttcctacttccttcaagttatcggtcttaacggctatatttcagtcttccctaccatcaacaatcactatcttctcacaatccctaccctagccactatctctcctagccgctatcctccctcacccaatctttctcagcaacctaatcgcgacaaactcccgactattgcggattcttaacctcccccgaccggtcttccattctccctaccctttcttccattcagtccataccacgcaactaactgaacatctcaccaaacacattcccaacccctacgntcctctgtacacggtcccctccgggngaacagcagtttttngagacntaganaattcggancaataagataccccnaaaannccnttncgggaaatcccccntanncccttnncccgtnanggtaggaaaccgtttagaaaaaa

SEQ ID NO: 27939 - DNA, 602 bp, Homo sapiens
  misc_feature (1)...(602): n = a,t,c or g
ccaaccncatgactncacagggaacccggtttctgaggttaagaacctggtatgagcctactagaatcgccccagggtaaagactccgaggtttgaaaggaacccgtccgcggagaaaccgcgaggggggcacgcagtctccccgaatccctcagtcactccaccgaagaacaaaatgggaggtaggcccgctcgacgtgatttctagtccgatcccctctcccggtgcagcgactccggggctttgagacccaccccttccctatagcaggacataccgactaggctagcgttatagcataagggctanaagcgcccgaatttgagtgatcttactccgaataggggtcgggcaaaacgaggtcgagaatcgtcgggtcttacttttaggaggccgggtacctccggctataggacgaaacaggaggctagtaggccccggcactatnagacataggcttaaagtttcgtcnaccccaaaaggaccttgcnaaaaatttnntnaaanttnnngcgcccaaaangnccncgnggggtttttnttnccccnattnnnaaccananntcccnnccncaaaantnccnnatngngtcnnanagcc

SEQ ID NO: 27940 - DNA, 603 bp, Homo sapiens
  misc_feature (1)...(603): n = a,t,c or g
ccaaccnactngatctatcacagggaacccggtttctgaggttaagaacctggtatgaggaaactcacctgaagcacattcgttcattccgtagagatttctcaccacgtcacgaagggagtcgggatagacgactacatttctactagagctacggcccttaggagcgagaccgactcgcccaatactaggaaggagcccaggaagaaccccgttattctctcccaccttacgaccaagggagacatactcggggatcacaagaaagtctcctcgtcgtctcgcggagaagacgatcaatgcgctatggggaagagtctttcgtcgcgcgttcgtattattttatcgttccttcctagtattcccagtcgtacccgcacgttagcgtccaatataccgttccacctacatcagtacgtctacgattaatatacatatgctacagaagaaaacagggggngtcctccctcgactctcagcggagantctccgatcgtcgcannatcaaanggntccaaagggtnaancccaaagtntggtnccccnntncnaanaanncccccaaanggntcnaggnncccntttccccaaaaantttccccc

SEQ ID NO: 27941 - DNA, 557 bp, Homo sapiens
  misc_feature (1)...(557): n = a,t,c or g
ggtttctgaggttaagaacctggtatgagtaaaaatttagttctacagngctacgtagtagccgaggggaacatgaggcgacattaagttcctacgtcataggtataacgtaagccttaaagacggatttctggtctgtcaaagttaggagaagtacccatctattaacgtacggggccgcccccccccccnaantntanaaccaaaangtcnacnacnttnacgttgnagntttcggnaaaatacctnctatacaantgnaaacnacaanantcgangatngantagccgttcganggtcnanaaattgcccccatttatngtnctttgcaaattcnaggacnaatacnggntacnattaanggtnntanccttanacgaggaanncgtanttggnacnancnagncnaaagttctttnctnagncaagggnccnggggtcaaggtaatttcannngtntanagggataggtnnanaatngcccttnaacgngaaattcccggaataaangncggggcaaaagnttnaacnccnccggnnaatttncccccccccc

SEQ ID NO: 27942 - DNA, 638 bp, Homo sapiens
  misc_feature (1)...(638): n = a,t,c or g
ggtttctgaggttaagaacctggtatgagtcccatttagtaaggattttggtcctgggtacttaatggtancggngaataataacgattccgcgaggaagaggaggtccgtggattcgatcgggtttactacctttaagcgttggagcggngntcagcgcgcggtggcggagcttacgttcccgaatcggacgcgcctcaccgacgattcgngtctcgtnggggaaattnnaaggtaaaacgtcggnagtacgaaatttccccgcggcctagcctcncacgtatcaaggccccaggccgatcantggcngaagccgaaaaccncactnancattggnaacgcgaagctncctcccagctatagaagccgaactcggccaccacccaaaaatcanantttttaantagnagactcctcgaagacgacgntnagtagtagtgatncattnaaggagttnagccctaacgttccgtcgagcggcgnctangggtacccaaaacgcgcgatatagaatgggaatccccctatacgtccccgnngcnccncanatatccaccattaacccgtccatcccattngacaaacgncaatnctccacaatttctccnggaccccgaaatncnannaagcngtaaacg

SEQ ID NO: 27943 - DNA, 620 bp, Homo sapiens
  misc_feature (1)...(620): n = a,t,c or g
ccganttnccgaaganccaaccncatgactacacagggaaccggtttctgaggttaagaacctggtatgagcgaacgtcgagtcgcgcgctcgggtacgcaccccgcttatattcaacttccctcggtacgccccaatcatcttccagagcggaggctagtagcgctcgaccattcttagagccttctctctccactgcactccgctttctgtcttacccttcccctcggtaccaccggatagtaagcgccataatccaaaactaacatgaagtaaccctacccgcccacaatcacgaagacgagtgtccttagtagagtatcgcatccctaagcaaagcccaggccccccccccccccntnatccccctngnnngggnttnaaaaggtncnaaccccnnacngttaanccngncnangcnantttnnccngacnnaaggttcngcntttacnacaacncccccaaaatngggacngngggtacnngaaaaacccccgggccccgnaggttccaaaaattnagnttnccgnncccntttttttctntttggacnccccccaaaaaggggtaaccccccnncttttaaanntnggggaaaaaaacccgccccaaaaaaatt

SEQ ID NO: 27944 - DNA, 653 bp, Homo sapiens
  misc_feature (1)...(653): n = a,t,c or g
cccgaaatttaccagcccacgnccgncantttcccnaggnccctnacccacataactatcacagggaacccggtttctgaggttaagaacctggtatgagccttccaggtaatcaaaacctatcccacataacacgaacccagcgttattcgcagatacgaanccaaaagaccagatatccgagcatcgggataaactctcaaccccgcggggagataccccangactggtcaccacnatccccaccacaccaacccgtccctagatctaaagcgtgacaacgtaccgagcacccatatcgaaccnacgacgatccgtccgataggggaccgtcatcggccccggncaaggagaacggaccacaaagatcccgtacaacccaacgcgtagtactagcgggaataaacaacgagacacacccgcagacgctanganaaacacccagacccagggacccgngagaacccggctatctcgggncancaacctcttattagggaaaccncgtttctaagggataccggttgcggtncaaaaagacacccccggcagngagaatcacccgganttcacnggcnganntagggggggncnccaaanagcntccacnnnattttttnttaaaaaaaancccgggtnaaactcntngggtg

SEQ ID NO: 27945 - DNA, 550 bp, Homo sapiens
  misc_feature (1)...(550): n = a,t,c or g
gctcgctgcagctggggttccctgctttttgggngcaagggtccagagatgaggngtttttttcggggagctaataacaaaaacattttaaaacttacctttactgaagttaaatcctctattgctgtttctattctctcttatagtgaccaacatctttttaatttagatccaaataaccatgtcctcctagagtttanaggctagagggagctgaggggaggatcttactgaaagcaccctggggagattgattgtccttaaacctaagccccacaaacttgacacctgatcaggtctgggagctacaaaatttcatttttctcctcactgcccttcttctgagtggcattggcctgaatcaaggaaagccaggccttgtgggcccccttctttcggctttctgctaaagcaacacctccagcagagattcccttaagtgactccaggttttccaccatncttcagcgngaataattttaatcagttgtttctnngagaaattttaaaattattgaagaanttgaattttgaatgntttaaaaaaaaa

SEQ ID NO: 27946 - DNA, 521 bp, Homo sapiens
  misc_feature (1)...(521): n = a,t,c or g
ggtgggagggagtccancattgncttgggagctgaggggntngtggaaaaactgaangatcaaggaggaagtggcnaanatgaatgancaattcancaaatccatttacttttcttcctagactcacngtgagactacctttctcanctcctctttcaattaggtgtgnccaggtggctnaaccagaatgntatctattcccntnaaaaccacccnnncccnancttanttccntntagaatgaatgaatcctgcaaanaactncccaanancctaaggantgcanagccccnggatggaaggnncttggatccctnanagactanctggancngaggganccttcttaccccccatgccaactggactttacctnagtgagaaatacaaatctntgtggaaaacccatattcttaggggttttggttaatanctattgtacttaanctgctaaaangggaatnangggncctttngggattaagaattacccgggnggttttgggntngganaatggaaa

SEQ ID NO: 27947 - DNA, 579 bp, Homo sapiens
  misc_feature (1)...(579): n = a,t,c or g
gtgtatctggaagagttaggccaaggccttttgacatgcctagaaagtacttccctaccttgctcacctggagcacacctactttttaaagatctancacaaatgtaaactttacagaaagctttccctgatacccactgccacagaggattattcttcactttttcatacctctgtgtttgtaaatgcctctgtcacagcatccactactgatgtaaagacatctgtcacattatgtttttacattttcttggtggggagtgtcttantccattcaggttgctgtaacaaaatatcatanactgggtgggttannnnnnnnnnnnnnnnnnnnnnnnnnnnnnnnnnnnnnnnnnnnnnnnnnnnnnnnnnnnnnnnnnnnnnnnnnnnnnncgaagctccctttcctggtcacagacagctgttgtttcactgtgtcctcacctgatggaagganaaagggagctctgaagtccaagtgcagaaatcccattcatgagggtctgctcttacaacctggctcctcctggaggtccatccccaatagcacacttggggataggattcaaggnaatttgg

SEQ ID NO: 27948 - DNA, 592 bp, Homo sapiens
  misc_feature (1)...(592): n = a,t,c or g
gctctctcaggattgaattgtaagtcatattttttaattacncttcttgtaataattcctctacctctgtagtcatgtttttcttttttcattttgtcttgtccccacaatgtctaacaaaacanccaaatatacctctgtaaagacagagggtaaaataatgctagttctgtgagttctctcttcttgtgcaaatccataaactgccaccaatctgtagtcattttaattgcccctaaaccgaanancatcatggcaactacctttcccctcatagagtgacactatcactagtcttattgaggccaaagttanaaagatgggctctcgatctactaatattaagtaaaatgggtttgggacttactaacatttgtgcttanaagagacagacctggcaaagagcttgganaagtgagttccaaagaganangtgtgggaaccaggatggaaaantcaggcctccaganagcgttacttctcctttcttccttgatcantgcccagagataattaggttcanaanagnagaaaaaaaagtgactcaacatgganananttttcctanccttanctacaaggaaangaatgg

SEQ ID NO: 27949 - DNA, 589 bp, Homo sapiens
  misc_feature (1)...(589): n = a,t,c or g
gacgggatataaggtactctacagacctgatggccancatgatggcaagctgtattcaactcacaaacactccatanaagtcccantccccanagatggagaatacgttgtggaggttcgcgcgcacagtgatggagganatggagtggtgtctcaagtcaaaatttcaggtgcacccaccctatccccaagtcttctcggcttactgctgcctgcctttggcatccttgtctacttggaattctgaatgtgttgtgacagctgctgttcccatcccagctcagaagacacccttcaaccctgggatgaccacaattccttccaatttctgcggntccatcctaagccaaataaattatactttaacaaactattcaacngatttacaacacacatgatgactgaggattcgggaaccccttcatccannagaatanacttttaaatgganataaatgatttttactcgttccaatatgcttataanccacttaactgattccgtganagttgatgatttaccaatggganagttcagtggtcanttcaatacnaagggcgtaagtgaangcaatcacattaaagggct

SEQ ID NO: 27950 - DNA, 608 bp, Homo sapiens
  misc_feature (1)...(608): n = a,t,c or g
gnnnnnnnnnnnnnnnnnnnnnnnnnnnnnnnnnnnnnnnnnnnnnnnnnnnnnnnnnnnnnnnnnnnnnnnnnnnnnnnnnnnnnnnnnnnnnnnnnnnnnnnnnnnnnnnnnnaataaaataactaaaattacttttaaaaaataaaagcaaaacaagactaaagccaacttaattttatttatggaaacctctgtanatgctgtgaaaacagatgctctcatnnnnnnnnnnnnnnnnnnnnnnnnnnnnnnnnnnnnnnnnnnnnnnnnnnnnnnnnnnnnnnnnnnnnnnnnnnnnnnnnnnnnnnnnnnnnnnnnnnnnnnnnnnnnnnnnnnnnnnnnnnnnnnnnnnnnnnnnnnnnnnnnnnnnnnnnnnnnnnnnnnnnncagctactcaggaggctgangnaaggngaatcacttnaacccctngnggngaagtttcattnnncaaagantggccantggaatccaacctgggnaaaaaacgagacncaacnccaaaanaaaaanaananaangctcttnaataaggggggnnaagcttttccccttaaggggggnaatttancttgnaacggnnncntttaaaagtnccgnagggg

SEQ ID NO: 27951 - DNA, 608 bp, Homo sapiens
  misc_feature (1)...(608): n = a,t,c or g
gattgagatattcctcagctgtttcttctctgtgtaagataattcttttttctcacatttgttttatactttttgtttaatgtagatatcaccgnatttcacatttgtttaacaagtgatttatcttgctgtgagtctttgcaagtcatgttaaattctttctgaacaagtaagacaaacatttaaaattctattttagttgctcctttaattatttttcttttttttttccgananagggcctcactttgtcatccaggttggagtgcatttttttctaaannnnnnnnnnnnnnnnnnnnnnnnnnnnnnnnnnnnnnnnnnnnnnnnnnnnnnnnnnnnnnnnnnnnnnnnnnnnnnnnnnnnnnnnnnnnnnnnnnnnnnnnnnnnnnnnnngnagttgcctttaagatgcatccatgaggnatctccaaancccanaaagggnttaaccaagggggaaaagggttngcaaancccaaccgggnggtcaataagntnccnacagccnaanggtgccaacttantaagngggggnagccttatncccttaggggggggtaattttacttggaatnggcntcctttaaaacgcnngncggaaaaaa

SEQ ID NO: 27952 - DNA, 602 bp, Homo sapiens
  misc_feature (1)...(602): n = a,t,c or g
gcagatggcagcatggctcagtctttatctccttcagctctctgcttctctgccaccttccctaggagctttctcagggcagctacgtncagtgtgcagcctgccctgtcactcccccaccccccgacccgcttgctccttgtcttttctccctctctgccccgcgcctaggagtataataagcttcacagtggcagggtctgggcctgctgtgttcactgctggagcctgagcagggcatgtattttgagctcggtgactatatatcaagtcatgggaagatgcatatcagagtgatttcaaaagtggaattgttgggaaagttgcagttaactttgtgtgagagacttgggtactacagatctttttatgaccaaagtgtctgctctacccaaaaaagaaaattacttgtgttccctccatttttgaattttgntttaattanttaatngataccnggggagcaggatattaaatnattgggntaatccgtccttttcccaaaaanttcggnattcaaaaaatngancattgggtancncngangaangaaaanggcaaggaacgggggttaaccccaaaannccaanggnttgggggac

SEQ ID NO: 27953 - DNA, 644 bp, Homo sapiens
  misc_feature (1)...(644): n = a,t,c or g
cgacncactatntgaaatttggacctcgaggcaaacaantcggcacgatanttcntgcngttcnttctgcttggcatcatcttgacactgctctgccaagcgaacttctctttgaagactgancttaattgnccctcngaaaatcaatgtatccagcttcctatgccaagttagtcacttcttcctgtgtgtccctgaagttttntacccccctctattaccaggggcactgatacagctcaataaaagatcantaaaaggttactgagctcctaacatgtaccatgcactgtgcttagcgccaggcttacagagatgagtaggatggngagttcncnacccttaagggactcaagtcctaaggnaaacacatgtaantgagtcttctgtggttacagtgannagggtcatcaanaagtccttcntggnttccttcctcctctcacngcactcacacancttanatcctggantgccncaaatccttnngtccaantcttcncccncaanctncaaaantnnacggntgcaggttaantagnnaagcntttaatgggcaannannnggncgngcnnnggangntcccgntggngaannngttaagtttcngcangttnaaaagggtnnttngaacccccggggg

SEQ ID NO: 27954 - DNA, 600 bp, Homo sapiens
  misc_feature (1)...(600): n = a,t,c or g
ggtttgtttgtttttgagacanagtctcannnnnnnnnnnnnnnnnnnnnnnnnnnnnnnnnnnnnnnnnnnnnnnnnnnnnnnnnnnnnnnnnnnnnnnnnnnnnnnnnnnnnnnnnnnnnnnnnnnnnnnnnnnnnnnnnnnnnnnnnnnnnnnnnnnnnnnnnnnnnnnnnnnnnnnnnnnnnnnnnnnnnnnnnnnnnnnnnnnnnnnnnnnnnnnnnnnnnnnnnnnnnnnnnnnnnnnnnnnnnnnnnnnnnnnnnnnnnnnnnnnnnnnnnnnnnnnnnnnnnnnnnnnnnnnnnnntggtggtttattcgctatcttcccctgaanaatgtgacttccaggaagggaaaggttttgtctaattctgttccttgttgaatcnctagtacctanaaccangtntgggccctnaatanggacctngnganngttttngatnganaaacccnnancgnntccttaacgggcccncangnanccnattntnnantttngggancnnnggggaaacctgggcnnggnccttgancaaatnanggtaggntnnggttcgntcccaaattttaanaaaattantgggggggnggcctggg

SEQ ID NO: 27955 - DNA, 592 bp, Homo sapiens
  misc_feature (1)...(592): n = a,t,c or g
gccactttaaaaacaaactcataactgcagtttgttggatttgtccaatttcttttatcatttgcaccttttacctccttttcttgcccatccactgctggccctctctgcccctcccccggcctttttagttagaactcctgaagcatgtctctgctggggtanaaagggactgttttacacctgaccaatttttaaatattcacagcgtctagggtgaaagcttattttaaaccagaatttgtaaccaattaaaaatgtggnnnnnnnnnnnnnnnnnnnnnnnnnnnnnnnnnnnnnnnnnnnnnnnnnnnnnnnnnnnnnnnnnnnnnnnnnnnnnnnnnnnnnnnnnnnnnnnnnnnnnnnnnnnnnnnnnnnnnnnnnnnnnnnnnnnnnncagntnnccagggcatgggtggnaatgcaccnggtancccaggnatcnaggnngntgaaaaggnaggnnanccacttgacctgagggaggtggaatttncgggtgngccgaattggaaagtcactgganncnaccctggncanagannaangactcggtctccaanaaaaaaaaagagggggaananttcccggg

SEQ ID NO: 27956 - DNA, 604 bp, Homo sapiens
  misc_feature (1)...(604): n = a,t,c or g
gggttccttgaaatccctgctaagtccttcgttttaactgaacccttcaagaaatttgtgtggaggtgactattcctatttttagccanncccttctttttcccccttttgctatagcttgtccatagggaaaataactggcattgggaataactgaaagccccattggcatgtgttttcattttgtgtatctcaaccacataaactgaaactgtaggtcagtattagtcaagaaaaatgaatcgtgagaagaaccantgtgactaacaggttgtgctgtnggatgagtctgtgggaacaggctgtgatgccacaagaccccctagataccagcacgaanagggcttgtnaatgaaatttgagccatgttcattttccgttngaaaaaaccaggctgggttggggctnaagganaaatgcngaccccctggccttttaaacccggggggtaaanngggatganggggcaacngggccccgggggtngagtnttccaaanggnngggccnttaaaccttcccaaaantcccaatccaatttgnncctttnccccngggttcnngncccnnaggcngaaccaancnntcnattttccgntngggca

SEQ ID NO: 27957 - DNA, 517 bp, Homo sapiens
  misc_feature (1)...(517): n = a,t,c or g
ctgcttcctggagagaatcanacccatgtganctcttgagcctcctgttccatggatctctccaccaananangagcctactccaggntgcnaacctgagattagaganttcatactctgattggtccccatagaattaatcaanggtggacaagagtgtaggtanctanatggntcattcagatctgatactcattcctggacttgtcanctgtggcctgggtggcagagtcacttaaaaacattgcaggcatcntcanaaatctttggttggagtagaatagatgccaaaaaaggtanttgttggcttctgatgaattggaagggtcaaattaaatctagctgaggtctcatcncttcnacccatngnattctatnanttatcacnaatacaatcacatattacgaggtcatnntcanttccacacaanntcctcgaanctncaaaatttcntananctatggncaagtacacactcttgcangaattnttcancangtattncgtggacaagtt

SEQ ID NO: 27958 - DNA, 624 bp, Homo sapiens
  misc_feature (1)...(624): n = a,t,c or g
ggatcatctaccaactgcaggacgtcttcaacctgctgccanatgtcagcctgcaggagttcgtcaaggccttttacctgaagaccaatgaccagatggtggtagtgtacttggcctcnctgatccgttccgtggtcnccctgcacaacctcatcaacaacaagattgccaaccgggatgcagagaagaaagaagggcangagaaagaanagancananaggatangaaagaggacaaggagaangataangataaggaaaagagtgatgtanagaaagaggagaaaaaggagaaaaagtanaacatgtattaaatancttttttaatttgtaaattaanatcttacaaactaaatcagtgtgctgctaaangggtcnttttcacttgacatgnntattagaaagctgaccancaaaaactcctgcctccgggcatnctggggggggggcccccntngnannggaaaggggnncgggccccaanntctgaggngnattttccnngcggtgattggggganaanagtggncagccnaggnttanattgtngnnaaaatggggagaanccacaantattttgggaccctcatncattacccaanccaggngttgatttccccaccg

SEQ ID NO: 27959 - DNA, 505 bp, Homo sapiens
  misc_feature (1)...(505): n = a,t,c or g
gggcaagaacattgaaagtctagtctcagcaattttcaagtatataatacgttattattattactatcgnnnnnnnnnnnnnnnnnnnnnnnnnnnnnnnnnnnnnnnnnnnnnnnnnnnnnnnnnnnnnnnnnnnnnnnnnnnnnnnnnnnnnnnnnnnnnnnatcaccccctcccacttccccactaccagcccctcctgggaactgccctctactctctgcttctgtgagtttgactgctttaaattccacacaaannnnnnnnnnnnnnnnnnnnnnnnnnnnnnnnnnnnnnnnnnnntacgataaattgattgcttctcttcccattgtttatagatacccattctcgtaatgatggcactgtgtctgtcatagaaggcctaattctccctgttaacattgaacataaaaacctcatatgggccaagcaantggtcaaactgaaatcccancactttggaagctgaggcggntgatcactgaggttggagttcgagaca

SEQ ID NO: 27960 - DNA, 604 bp, Homo sapiens
  misc_feature (1)...(604): n = a,t,c or g
ggtgtaaagagcacctgccctcctgccttttttaagttgcatgacaagtgtatcatcacatgccatatgtataagatcaagcacacatgaantancccctgcacaggggtcgctggctggagtaaggagggagtaagtttcactccgtcctttgcttcctggccttgggcaaattaacttagaggtattgggcctcagtttcctcacctgttgagatgggggcattcgcacacctgcttcctggggttgtgaattcagggagggctgggagctcacatttatatgggtgtggaggcgccgattgttttttctcagcggtgtgaatgagttgtgttgaactgtgttaggattcgacactcancagatatgcatgtggtgttgtgccgtgccgtgctgggcccaaagtgccaggtggggtgagatgtgtttgatgcctgttcantttagaaaataagnctgnggancancaattgcgggaaaggggtanagggcccngnattttanaaaaggggggaattgncggaaaaaaaaaggggggngatctgtgggggnaaaggaaancccgggcccgggnaantttgcggganaancctcttcccnaggc

SEQ ID NO: 27961 - DNA, 605 bp, Homo sapiens
  misc_feature (1)...(605): n = a,t,c or g
gtacattattgacagaacttacgatgattttaggtggctcagggatgtagtaaagtacttgtgttctgctggttaggctaagctgaagtgacaaatggccctcaaatgtctggtttcaacaaaagttcatttgcttttgttgaatgtctggcacatgtctgtcagccagcaggcacctgggaccctgctccgggttagcttcaccccgggactcgggctgccatgtctgacacgtggtggtccactggcagagggacacacgatcggggcaagttctgctggcccttaaagcttctacccagaagtgaccattanccacttctgcctacattcactgggcaaatcaggtcccatggcaacgtggagagggcatgtactctccctgaagggcaacannnagtaactaccaaaaccantgaatatttcaantnangagnttaatggtangnntaaanggagagnnaaannccttncaaggggtggganaaaancncgggtntggngnngccggggggggggcaanggggtagntncccgccngnnaggnggggncaaannganggggccnnggtgggganccngagagnttngggnttnngntgggg

SEQ ID NO: 27962 - DNA, 607 bp, Homo sapiens
  misc_feature (1)...(607): n = a,t,c or g
gatttattcatccaacaaatattaagctctgctgtatgctagtgttggagacacctagctggagcaatgaatgagatgacaaagcccctantgttgtagaacttaacattctgagagtgacaagacagatagtaattatataagtaaatatanatatgtaatgtgtcatatagagataagtactatggtggaaaaataaagtatantaaattaggaagtgctgatatagggtggtanatatctctgctgccgtgtcaacttancagacttgaaggaaacgggaataagacgtangatatcnggnggaggnttacaggcagagganacttgnnngacatgggccatgcatanaannttggttgggatgggttgnanacangcagngngggcangtgtggantncggagggnanggnagtaggggagnnggttgnnagggccangggtncgaacnnagnncnnnccnngnnganngcctttggngcccnncnnngggggctaggccggggngnccggnnngcnntnnggnngtnttnnancangggccccccntgtgncgngagaagnngncngnnggggnggngnggananntntgggtccgagggcc

SEQ ID NO: 27963 - DNA, 600 bp, Homo sapiens
  misc_feature (1)...(600): n = a,t,c or g
gtccaacagaggcagaatttcagctggttagagatgtggttctgtgttcccttctgaacttcctgccagagggngtgaacaagctcaaantcagtccagtcactctgaaggaggcanatgtgnagaagctagtgaaggtttgcacggacactgaccgctggagcctgatctccctcnccaacaagaacgggaanaacgtggagctgaagtttgtcaactccattcggngtcagtttganttcagtgtggactctttccaaatcancctggattctttgcttttcntcnatgactgttccaatantcccatctctgagcacttccaccccaccgtgattggggagagcangtacggggactttgaggaagcttttgaccatctgnagcacaaactgatcggcaccaaggnnccangnagaantcanaggnggggganatncangttgnagnancttcntgtgnngggnantttanggccaannngccnggggnangcnaancnncgannnnctaannnggcccaaggttcttcnannagttccngnacaccntgnncanaggggaagtngggnnttacnttnaaancaanttnntgagaag

SEQ ID NO: 27964 - DNA, 615 bp, Homo sapiens
  misc_feature (1)...(615): n = a,t,c or g
gaagaaaaatgtcccgtaaaagacaaagaagctatcctgaaaagaatataactcaagaaacagaagaaattttcttaaaactatgcaactgnntaaccataaaactacttattacaacatgaatttaataaataaaagttcagtaatgagatgatanaaaagaggatattatagaaccaaatgaaaagnnnnnnnnnnnnnnnnnnnnnnnnnnnnnnnnnnnnnnnnnnnnnnnnnnnnnnnnnnnnnnnnnnnnnnnnnnnnnnnnnnnnnnnnnnnnnnnnnnnnnnnnnnnnnnnnnnnnnnnnnnnnnnnnnnnnnnnnnnnnnnnnnnnnnnnnnnnnnnnnnnnnnnnnnnnnnnnnnnnnnnnnnnnnnnnnnnnnnnnnnnnnnnnnnnnnnnnnnnnnnnggttcaatgagnccaaaattgcgctggggggaaaaaattgggacncnggctcaaaaaaccaacnnttngaaanncacncgaaaaggggttaaannnttacanggnttaaaatttttaaaagnngctaaaggagnggcatagancccactganactcagtttngaaaangggaatgggcgggaaaacantgtncaggtaaaaaaaa

SEQ ID NO: 27965 - DNA, 594 bp, Homo sapiens
  misc_feature (1)...(594): n = a,t,c or g
gnnnnnnnnnnnnnnnnnnnnnnnnnnnnnnnnnnnnnnnnnnnnnnnnnnnnnnnnnnnnnnnnnnnnnnnnnnnnnnnnnnnnnnnnnnnnnnnnnnnnnnnnnnnnnnnnnnnnnnnnnnnnnnnnnnnnnnnnnnnnnnnnnnnnnnnnnnnnnnnnnnnnnnnnnaagctgtttttcaaagtgattgtaaaacagtacctaaaagctccagttgctccacaacgtcaccaacccttggnattgccagttattcanatttaagccattctaatagatgcgtantagtctcgctgtgattttaantggcatttccctaangattgatgctatggagcatcttttcacctgcntatttgtcatccgtacgtgtttttttgancangtgtctgtttcaattaattggtccccatnggnaatccttaaaatccttggttcnnaatatgggcggtnggantcccttaaaagncggnccnanncccttttnangnccccntgngnnttttggnaaagctcctgnnanccggngggttgnnntttaggccctnaaaagggcctngttttcnttntgnaanggggcccccccatcaca

SEQ ID NO: 27966 - DNA, 618 bp, Homo sapiens
  misc_feature (1)...(618): n = a,t,c or g
gtgaatgtagccaaaaatggttttgtgttgtccttcacaactgtgttttgcaagcctcgctgttttctgggtttctaacttcctcatgttttaatagatttatgngntgttttcaaatttgtcatgaattatgtgtcggtttctgactaaatgtnaattanaggacatcnccttaaaanaacactggtgattttccanatttgnnagtcatctgccttttctttttccccttgaaaagganagttgatanataccccatgacagattgncagacccttttcagagctgcctgtcccataatgttgtccctgccctgagactcaaactatctttctttgaaaactttgaaatcaactttttaaaanntggganatgnggtagcccangggttctggganagnatcaatttcaagggaaangcncctttggccaaagggttnaacacgttcnattccngggnaaaaatnntccccggnttngnaaanaggaagggcagaaaaanannttncgggctccgggannttcctnnaanagcagcncaattcgggtttaaaaggcngggnnagtgggcaaacnggnaccnancacttgggagggggngggcaggaanccaccggg

SEQ ID NO: 27967 - DNA, 603 bp, Homo sapiens
  misc_feature (1)...(603): n = a,t,c or g
ggnnnnnnnnnnnnnnnnnnnnnnnnnnnnnnnnnnnnnnnnnnnnnnnnnnnnnnnnnnnnnnnnnnnnnnnnnnagagtanggtantgtnnnnnnnnnnnnnnnnnnnnnnnnnnnnnnnnnnnnnnnnnnnnnnnnnnnnnnnnnnnnnnnnnnnnnnnnnnnnnnnnnnnnnnnnnnnnnnnnnnnnnnnnnnnnnnnnnnnnnnnnnnnnntgtcggaaaacaacaaaaaantgtggaggggaaananggtttcnaaaaaanccnnatttcggccagccannnnnnnnnnnnnnnnnnnnnnnnnnnnnnnnnnnnnnnnnnnnnnnnnnnnnnnnnnnnnnnnnnnnnnnnnnnnnnnnnnnnnnnnnnnnnnnnnnnnnnnnnnnnnnnnancatnggaaaattacctggggcaanngggggcnnacctgttancccnanntttccaanngnggntgcnganggggaaccnnnntnanccgggaaaanaagnttccagtncccggncntngcaangggccccacctgngggtaaaaagcccccancncagnnanancangannccccatttncnaaggccaagcanaaaaangggg

SEQ ID NO: 27968 - DNA, 509 bp, Homo sapiens
  misc_feature (1)...(509): n = a,t,c or g
gcagttctcaataaagtggctttccactagtttgagttgtcaccttttccaaagacttgacaccacatcttcctcaatgaagtaattctgcttcaagcaggtagattttcatattcatggcctacaggccagatttcaaatgctctttagtattttctttatgtcatagcacacttggcttttgggtagtttctgcctcattttcatactagctttgtaaagatttctgtagtatgtaagagaactctaaaattgaggcttatgtaattaaatgagatatagtttagacttatgaaagaacggcatgaagtatgtgtctcataccaatatcaatggcattanagtctccatatgtatcaagttanctaccttangggatatgaaatgngtangttgcaagtngaagtcanntaaaatttggnggggngtggcgnncgggggggngagnnngnggggggnnnnggggggncggcgnnaanggggggggggnggnngngnggnnngngggg

SEQ ID NO: 27969 - DNA, 517 bp, Homo sapiens
  misc_feature (1)...(517): n = a,t,c or g
ggatatttgtgaagtatctcctggaccccacttgaatatgatcgttggagccaatggaacagggaagtcgagcattgtgtgtgccatttgccttggtttanctggaaaacctgctttcatgggacgagcagataaggttgggttttttgtgaagagaggatgttctacaggcatggttgaaattgaattgtaagtgttaaaagtgctaaaactcctttttcctataaaattcttagtttatattcatgttttcctgatgattagaaaagagtattaatanagtattatggcataaatattggaaataatatttaaagaatacttaatccanataagtaaggggtttaaaaaatatattttaaaaacttaaantgtnggctagccaaggtggntcatgcctgtatccgacaanttggggaggccnagnggcantcacctgggacaagggnttgggacaacctgaccaacatggggganccctcnctactanaatngaaaanttccanggnatggggga

SEQ ID NO: 27970 - DNA, 515 bp, Homo sapiens
  misc_feature (1)...(515): n = a,t,c or g
gcggcacgaggacacagttaagatctaaaattaaagtttggttgcatgggactgcagtggagcctagagcctaggacttctgactggataaaaggataatgatttaacatttttgtgtgcctaccacatgccagccttaacctcatttaattctcaccgtaaatctaagcggtagcaactattatgatcgtcattttgtaaatggggaaactaaggcacgactccgtctcccaaaaaagacagtctcccaatggagtctcccagaannnnnnnnnnnnnnnnnnnnnnnnnnnnnnnnnnnnnnnnnnnnnnnnnnnnnnnnnnnnnnnnnnnnnnnnnnnnnnnnnnnnnnnnnnnnnnnnnnnnnnnnnnnnnnnnnnnnnanactaaagtgcatgccaacaagcccgggtanttttccaatttaanaaanggggtttaaaaatttggcanggtgggccaaacccngtcccagggatccgccngctcggctccaanggtgctggnttaaggaa

SEQ ID NO: 27971 - DNA, 523 bp, Homo sapiens
  misc_feature (1)...(523): n = a,t,c or g
gcggcacgagggccatcaccctcaaggccattaatcccatcaacaccttcaccaagttccttctggatcaccaaggggagctgttcccaagcccggaccccagcgggctctgaacctggcccctgccccaccagccccttctctggtagcccgggtttggactcttcctcctggcatcaggggccatgaagccccctggagagagatgttggagccacccatcaggcatgctctcccccacctctgtccagcccgcctcacggccctggcggcctcgcngttaccaanagnacgtttttctctgccttacacttctcactgcctctctggacaccgggcttttgctgggctctccagagctgggttgggtcttccaactgggnaaagggtggnccccngntngccctttccnggnttttccggnncggtttcccnanaangnggggtggnncaantngngnncgggttggntgggnaagggggcantcccnngcnttatnggggnancggnagntgggncgtt

SEQ ID NO: 27972 - DNA, 517 bp, Homo sapiens
  misc_feature (1)...(517): n = a,t,c or g
ggtgctcagtggttaagcacccaaccttggacctanactccagcttggaatcttcactctgctgcttactaggtcaagtcactcagtctgcccaagccccaggtctctcatctgtgaaactgggataataatgctgcctacctcacagagcggtaatgaggattaagcaagttagtgcctactttatggtaagcgctcagtaaatgttggctaatattatattaatggcnnnnnnnnnnnnnnnnnnnnnnnnnnnnnntaaaatctatcattgttatagctcttggcatagctgtgcctcgtacactgtcctgcatgtaaaaagcctttaacagtgtttgaggntgggtgcaacatttcaaaccttantcccangtggttaggancctgaggngttttggtcgcttgagcccagaggnccagncancctgggnaangntttngggacccgggnccnnaaaagtntnnaaattgcgggggngggggcaagcctgtatcccangagtttggaaggcaa

SEQ ID NO: 27973 - DNA, 514 bp, Homo sapiens
  misc_feature (1)...(514): n = a,t,c or g
ggaatttttgaaactcaggctgtgcttctgggaaaatctttcagtaaccttttgggagggacacccagtgcccatggggactcacccttggccaacccanctggaagtgggagggcgttcaagcccactgtctgancttggacaggccanccctggaggacacanancaccatgagggatctggaggggcaaaacggtggcaatntgcaatctcatcatgantctcnccaacnngcagtcagtccaaancacatngtnnctgttcannagngcatggaacgctgcaccgncnanatgganntccatgacnctgnnggannagnagngannnncnncgganttccnngngcancatcgntngtnctncncnggnngncncnagntcnnnncngcaggcgnaagncctgncttggggggnnngnaangcctgncnangggggnnncgggngggctnggncggccgngnnnngggncgnnaacgggnnngggggnccccnttggtgggnnggnttta

SEQ ID NO: 27974 - DNA, 519 bp, Homo sapiens
  misc_feature (1)...(519): n = a,t,c or g
gggtaccagacccaaaggacctgattcagggttanggtctttcccttccattacttaaatcttccttctggttcccactggaggtggtggtgggtggtatgtgagtttgtgatgtctggatccagccaggaagaaantcccagcatccattaactgtgaccttgtgcaagacacttaactgttcgtgtcaccagcaagatangtcggatataaaataaatgagtggattcactcacctcaggagattgttgggangatnaagtgagatcagcctcctttggtgcctacatacagtcttaggatgtgggggcttattattgttcctgggacaaanagccacagaggctttgggggcangggatggcaaggctctgggantctggtctgcccggncagtgataccagctggtccccagggaanaaggcaccttngggaaaacanggaganaaggntnaaaangnnnaccaatttggnanttattctggggccctgatgatcgngcaaagaatgtccaggga

SEQ ID NO: 27975 - DNA, 328 bp, Homo sapiens
  misc_feature (1)...(328): n = a,t,c or g
gcggagatncattctgagaaatgtgttgttangtgattttggcattatgtaaacacatagtgtacttacanggncctatatggtanngggcangacacacctaggccacatatccctgcancatgccactgtactggatactggnggcagttgtgacacattggcaagtatttgtatgtttaaatcatantanacatagaaaatatacagtaaaaatacaatattatcttanggtaccactgttgtatatgcngtccatcattgactcacatggtatgcagcacatgactgtttcttttttgttgttgttgttgtttttttttttttt

SEQ ID NO: 27976 - DNA, 327 bp, Homo sapiens
gggaaaataactgaaatgtgaacatatttgtggaaattaagtgacagtaattataaagtaagagtacttaaatcaggtagagttcataataaagcttaaatagggccgaaatgaacaggctaattatttttccaccatttgtgatatatatggtaatcatttagaccgggggtctgcaaagtttttctgtaaaggaccagaaaatcaatgtttttttgttttgtggatcatactgtctttgtcttaaccactcaggtctgccattgtagtaggaaagcagccatacccaaatgaatgggcatggctgtgttccaaaaaaaaaaaaaa

SEQ ID NO: 27977 - DNA, 485 bp, Homo sapiens
  misc_feature (1)...(485): n = a,t,c or g
gacttcantacnnnnnnnnnnnnnnnnnnnnnnnnnnnnnnnnnnnnnnnnnnnnnnnnnnnnnnnnnngtctcctgttgcccaggntgaantgcagtgctgcgatcaaggcttactgcagcctttaactccttggactcaagcaatcnnnnnnnnnnnnnnnnnnnnnnnnnnnnnnnnnnnnnnnnnnnnntacnnnnnnnnnnnnnnnnnnnnnnnnnnnnnnnnnnnnnnnnnnnnnnnnnnnnnnnnnnnnnnnnnnnnnnnnnnnnnnnnnnnnnnnnnnnnnnnngataaagcagcagcagggtttganaagatggacttgcattttgnaagaattctacggtgagtanaatgctaccaagcancatcacangctaccaagagaaatctttcatgaaaaggagagtcantcantggagcaaactttaatactgcctagttntttnaattgcacangcncccnggcgtcngaancggca

SEQ ID NO: 27978 - DNA, 514 bp, Homo sapiens
  misc_feature (1)...(514): n = a,t,c or g
gggcctttttttcattatctcttctaattggctattttggtaaatagaaaaatatggacttctcttnnnnnnnnnnnnnnnnnnnnnnnnnnnnnnnnnnnnnnnnnnnnnnnnnnnnnnnnnnnnnnnnnnnnnnnnnnnnnnnnnnnnnnnnnnnnnnnnnnnnnnnnnnnnnnnnnnnnnnnnnnnnnnnnnnnnnnnttagcatggcatgatngcacacacctgtagttccanctactaggtaggctagggcaggagganctgttgancctagaanntcanggctatngctaactatggtcacangcactgcantctnnccnggttggccctgtcgctgaannnnngaaaagtggtnnctctatgttgannntnnnagccacccnntgtacggggggccannnttcccgaacantncntnnnaatgggccncgggnncgggggggcccaacnnnntgcagaagnggggnnnnannggnnttngccagaancccncggngngcnaangggg

SEQ ID NO: 27979 - DNA, 512 bp, Homo sapiens
  misc_feature (1)...(512): n = a,t,c or g
ggannnnnnnnnnnnnnnnnnnnnnnnnnnnnnnnnnnnnnnnnnnnnnnnnnnnnnnnnnnnnnnnnnnnnnnnnnnnnnnnnnnnnnnnnnnnnnnnnnnnnnnnnnnnnnnnnnnnnnnnnnnnnnnnnnnnnnnnnnnnnnnnnnnnnnnnnnnnnnnnnnnnnnnnnnnnnnnnnnnnnnnnnnnnnnnnnnnnnnnnnnnnnnnnnnnnnnnnnnnnnnnnnnnnnnnnnnnntgggcgacaggtacttgtactaggcattgtgcctggtgcttattagacatgttgagtcatccaagaggtgttggaatgtctgcctatctctgtgtgctcacaaaaatgactannnnnnnnnnnnnnnnnnnnnnnnnnnnnnnnnnnnnnnnnnnnnnnnnnnnnnnnnnnnnnnnnnnnnnnnnnnnnnnnnnnnnnnnnnnnnnnnnnnnnnnnnnnnnnnnnnnnnnnnnnnnnnnnnnnnnnnnttaggtggcatgatggacacatgtt

SEQ ID NO: 27980 - DNA, 510 bp, Homo sapiens
  misc_feature (1)...(510): n = a,t,c or g
gcannnnnnnnnnnnnnnnnnnnnnnnnnnnnnnnnnnnnnnnnnnnnnnnnnnnnnnnnnnnnnnnnnnnnnnnnnnnnnnnnnnnnnnnnnnnnnnnnnnnnnnnnnnnnnnnnnnttagaccctatctcaaaatanntanntaaatannntannntanaaatggaagtctcttctctgatcccaggcttctancctacctgcgcagggtagcancaccactggcgtggcccccagtgatgtgtgttgggtgtgcgtgagtacggggntggtgcacanagcactganaanatggtgcccggaggctgccctgtccgttctgtgacctcattatnnaggaggtccggacgtgggccactgtgtgcagtcactgctcnctgttgtttccatangntacgggcgcacctacttgaactgnangtctgnccanaacaanagcatcnaccggaaggcaanntcaccagggaaggnttccttgcaagaccnganttngtcanttcacccaaagg

SEQ ID NO: 27981 - DNA, 510 bp, Homo sapiens
  misc_feature (1)...(510): n = a,t,c or g
gcacaaggcaagtaatgccatttgacttaagaacaatctgcatttaagaagtcagggtgagccaccatgcccgacccctacttgagttttcaaattgtttatatttgagacaggtgatagttactgcttgtggtaagggacactgtaccctaagaacattcctgctttactcccagtcacagtctttccatcaacaactcttcctatggaaaggaaccttcagctcttgattctgttaggtgtctctgagggataaatttatcctcatcatttccacaaacatttattgttgagtgactcttacgtatcatgcacctctctagatattgaagatacaaataagtctaagatagacccctaacttcaggtaactcacagtctggcagggaaggaagaaagatacggattgttacagtgaaataagatggggaaaatggtgggaaattgaattttcnatgggccatggttccttggaanaaaaaggngggnngtangancaccaatggtttt

SEQ ID NO: 27982 - DNA, 494 bp, Homo sapiens
  misc_feature (1)...(494): n = a,t,c or g
ggagcttcaatacctgtagttatgctacacctcaaagttctggttctcaccaatcctctagtaaatctagtnggcacaanaccaaaaccttcccatttccaatgagaatacatgaatatgcatattaagagcanataatgctccccagagacaactactaataaagtacttgaagactgaaataatgtggttaagaatagtaataataactaccaatttagaaaaccggggccgggtngnnnnnnnnnnnnnnnnnnnnnnnnnnnnnnnnnnnnnnnnnnnnnnnnnnnnnnnnnnnnnnnnnnnnnnnnnnnnnnnnnnnnnnnnnnnnnnnnnnnnnnnnnnnnnnnnnnnnnnnnnnnnnnnnnnnnngtgcggtggacacgcctgtnatcccagctactcnggaagccgagggaaggaaatcgcttnaaccgggaggnggggggtttcagttngcnnaattgncccggaatgggnccngcnaaggccac

SEQ ID NO: 27983 - DNA, 513 bp, Homo sapiens
  misc_feature (1)...(513): n = a,t,c or g
ggctgaaggtcacaaggatagcaaatggaaatgcctccgcaaatcacctgtttactatttttctgattattaaagtgattgaaaatgtgntgactgtggaaaagnccaatgaacatatcattatgttcttccctgattccacctcccaaggatgaccctcactcacatgttagtatgttttttttcagttctttctttccatgccatacttcccttccaatggaaggttcaattaaggacgttaaaatacaacaacaaaacacacaaaagtaactccctgggcttttgaaattcaaagcttcagaggaaatggtacgaatgcaacccaaatggnaaatttcccatctgattttattttcagtacactctgaacccatcttctgccccttaccctagctcttcctcaggcaaccttgagtttccttctccaaagggaatcctgcaggatggggcaangactggaaggttaaggggnattgggggggacacctgggcagggtgcanaaggggggt

SEQ ID NO: 27984 - DNA, 460 bp, Homo sapiens
  misc_feature (1)...(460): n = a,t,c or g
ggggagtcagacaattggaaagcctaggtagttatttggggaggggtctctacgccttggcgaagcgcacagntgcatctttttggcttgaggcctgaggccttgtcganaagcttccgtgaaagggtgggccanccgggccacgagaaataaagtgaataaatcaggaatataagtgggcggngggcccctganaggggggncncanngggtnagacatngccaccaggcgtttanccgacgctttcttgttgttgccgnataattcnatccaaaaccggcaactgttaaccgagcaacttgctgangaccgtatggcactgntntcangnatcancttagatccagaagcagcgattggtgtcncannncggccacctcctaantggttggntaggcngcggggntcnngcgaangtgnnggnncgntggagnannnnnangcngngnnagnggcgcc

SEQ ID NO: 27985 - DNA, 506 bp, Homo sapiens
  misc_feature (1)...(506): n = a,t,c or g
gcagaaataatgggttgggtgatcttagtttctatatntaaacaaaattttgtcaattttcagttagttgcttgttttccctgaccactgggctatctcgtatttctggtcttcagtcatgttgttccttttgtgtggtgtaacctttagcatttacgtgccttggccacctctcgttgcttagaacagacccaatctccanaaggttttctgggtgttcttcttttccctcgggttcccctttgctgccccgagcaccattgngtacctcttgccacagtgtgcttttgttactccatttcacagtaggttcctctatcagcatcttgcacagttgcctagcaacatagtttaatgtgntggaggcaagaagggaggaaattcacaccatgttcatcctactcagtgtgaactgagtctatagttgatatcctctttgggcactcaatggtgnctgctgagttcaagcttggtnttacgttgcggaantcttttgctttattaag

SEQ ID NO: 27986 - DNA, 502 bp, Homo sapiens
  misc_feature (1)...(502): n = a,t,c or g
ggtcacaaacacatgaaactattcatggatggacctacctgtctgatgatggtggtagtgatgatgatgatgatgttatcctaggatataaccactattctttaacccttgaaactgaggtgcataaggtacaataattcgcccaagctcacatagataacaagtttgcagggctagaaatcttactgagtttcatctgaaatgcagactttcagagagagagagagaggatgcttagtgtgccatatcttacgtctaacaatggctaatgaatctttaaagagaggactactccctanacatgagcgtgttaggactctgttcccatttctacacatttatgcttatatgagggccattgattggccaattttagcatttctttgtactcgtgggatgatatttaaaatatttaacaactnnnnnnnnnnnnnnnnnnnnnnnnnnnnnnnnnnnnnnnnnnnnnnnnnnnnnnnnnnnnnnnnnnnnnnnnnnnnnnnnn

SEQ ID NO: 27987 - DNA, 319 bp, Homo sapiens
  misc_feature (1)...(319): n = a,t,c or g
gacagttactaccttattagcaaaggaaaacaaaacaaacaaaaaaaaaataaagaacaactgaaaaagcaattgtaggaggcagnggggaatagngtttanagacttggatngaattcccagcttancctcctagctttgngactccgcangttgcttctntntgaccccatcaggaacttcacaagaggcctnnnnnnnnnnnnnnnnnnnnnnnnnnnnnnnnnnnnnnnnnnnnnnnnnnnnnnnnnnnnnnnnnnnnnnnnnnnnnnnnnnnnnnnnnnnnnnnnnatctctggttctataaaaaaaaaaaaaa

SEQ ID NO: 27988 - DNA, 503 bp, Homo sapiens
  misc_feature (1)...(503): n = a,t,c or g
gaattatatttctcttttattataatacttcaaaataaacagacnaaaatattaaacgtaagtacaataccataaggaaaacataggtgaatatttatgtgatcttgaggaagagtttgtgagtgtgatgtcaaagagaaaacaagtttaanaagtttgactactgatagnnnnnnnnnnnnnnnnnnnnnnnnnnnnnnnnnnnnnnnnnnnnnnnnnnnnnnncacttaacttccgaccttgttaaagaaacactaattctgacacttgttgaaattgtacggaagactttagtcatgacccctgtaataaggggcattgcagtagggaggagagctnangttcacctctgggtgaaaggaaaagtggggatttgtagcccacaagcagaatgaggggatcagtgggtggaaaattcctaacagatggggntggggggactcttgtaaactggcctaacaagatctttttgaagcagcttagggcctaccccacagtgctg

SEQ ID NO: 27989 - DNA, 506 bp, Homo sapiens
  misc_feature (1)...(506): n = a,t,c or g
gcacctgagcttcaatacctgggtctctctgacagaggactgccttccagctacctgagcaaggaaagccanaagttcctgggaatttacgtccttctggatgtggcccttaacagtgagtgacaggtgtgagaatgcttcctgccccatccatcaggagcactctgaagtatgatctgcactggctccaggactttcctgcaggactaagtcaaagttactctcttcaggacctgcttcatacagcacctttgctgggcttcctttccttctctatcccactgcctgctcccccactgatctttcctggaaacactttctaacaagtcactttcacacacatgatcatttcggggtctgcttctagggacaccaaactaagagcccttgcagcttctcagaagaccgacanagaacattcctaagatgccacatcttacctatatacctnacttgcactggtctgctgaattggngctgccatgtaaactcncattttatgcttc

SEQ ID NO: 27990 - DNA, 509 bp, Homo sapiens
  misc_feature (1)...(509): n = a,t,c or g
gtaattttcagataaacaatttatcnnnnnnnnnnnnnnnnnnnnnnnnnnnnnnnnnnnnnnnnnnnnnnnnnnnnnnnnnnnnnnnnnnnnnnnnnnnnnnnnnnnnnnnnnnnnnnnnnnnnnnnnnnnnnnnnnnnnnnnnnnnnnnnnnnnnnnnnnnnnnnnnnnnnnnnnnnnnnnnnnnnnnnnnnnnnnnnnnnnnnnnnnnnnnnnnnnnnnnnnnnnnnnnnnnnnnnnnnnnnnnnnnnnnnnnnnnnnnnnnnnnnnnnnnnnnnnnnnnnnnnnnnnnnnnnnnnnnnnnnnnnnnnnnnnntgacgtaattacaatgggccctaatgcaatatgaccaatgtccctattttaaaaaaaaggaaaaattttcaagaatcccttttggtgaagaaaaaaagaaaattaaaaaatannnnnnnnnnnnnnnnnnnnnnnnnnnnnnnnnnnnnnnnnnnnnnnntnaagccggcaaataactttgnggcncggattc

SEQ ID NO: 27991 - DNA, 503 bp, Homo sapiens
ggatacattccggttggtttttctgaatcattgagccaaaaacaaacacacgcacagtttggcttactcctagtggaatcgcattccactttggttatggtgcatttccttctctatctttggcacatcaggtcaaactcctgtgttcccagagaatgaggaatgaagtgcatgaagtgtcactctgcagtgcacggttaacttggctgagcaacaccagatgagaataaggcaggaaacctgtatctgatttctggagacaaaagtacatttaactcctcttgtttctcctgcattattactggtcactcttaggacagccaaggattttcacctttccaatcatggaggtgtttagataaaatcagatgcaaattaatgtggagctgatctagttgaagaggaggtgaggggttcggagccccttcccccaacccctttcatccccaaccagatggtttccacagaacccccaggtcagcacaaggaagtttggaagtcct

SEQ ID NO: 27992 - DNA, 508 bp, Homo sapiens
  misc_feature (1)...(508): n = a,t,c or g
gtgaaaaacngtntaaagttagatctgncttgcgtcccagtcaggntgggggacagccatgcactgcgcctctggtngcctttcaaccatgcattccatctaagctntgcaaaattgaanaggctgactgcangaataaattccgntgtgacagnggccgctgcattgccagaaagttaaaatgcantggagaaaatgactgtggagacaattcagatgaaagggactgcgggaggacaaaggcagtatgcacacggaagtataatcccatccctagtgtacagttgatgggcaatgggtttnattttctggcaggagagcccagaggagaantccttgataactctttcactggaggaatatgtaaaactgtcaaaagcagtaggacaagtaatccataccgtgttccggncaatctggaaaatgtnggctttgangnacaaactgcanaagatgacttggaaacagatttctacaaggtttaacttntttggacacatgaaaaaca

SEQ ID NO: 27993 - DNA, 507 bp, Homo sapiens
  misc_feature (1)...(507): n = a,t,c or g
gctagcaccatgagccaaaagtgtcctctaaaaggagngccacatcccactggaatgggcctannnnnnnnnnnnnnnnnnnnnnnnnnnnnnnnnnnnnnnnnnnnnnnnnnnnnnnnacctccatgagacaccaacttcattttcaccttcccagcnnnnnnnnnnnnnnnnnnnnnnnnnnnnnnnnnnnnnnnngactactctaggagcctcacataagtgnnnnnnnnnnnnnnnnnnnnnnnnnnnnnnnnnnnnnnnnnnnnnnnnnnnnnnnnnnnnnnngtgaacccagaaannnnnnnnnnnnnnnnnnnnnnnnnnnnnnnnnnnnnnnnnnnnnnnnnnnnnnnnnnnnnnnnnnnnnnnnnnnnnnnnnnnnnnnnnnnnnnnnnnnnnnnnnnnnnnnnnnnnnnnnnnnnnnnnnnnnnnnnnnnnnnnnnnnnnnnnnnnnnnnnnnnnnggaggatattggntcanctggaaagnaggacaactttgaac

SEQ ID NO: 27994 - DNA, 506 bp, Homo sapiens
  misc_feature (1)...(506): n = a,t,c or g
gctttggagagctaacaaagcaacaaggatttaagggaccaagatcaaagatggaaaagaagtgcaggaaaaaaaagtgcagtgaagtaagcttgacatttggtttcctttcctcttaaggtatttgttaatttgtaagcactggtccagaagctgagtggtgtttacagcagtctcatgagtctgaagggacaaaaattggaattcaaggtctgctaagaagcagagcctctagttatactcaaggctttcagttgaaatccttaaagggccatgcctaggaataagggcaaacatgaaataaacttgctttcacaatacaggaaacacaactttgcctctgctcagtctcagattggattaaggtgatctctttctacgccatctgtcagaagcaaacaaaattttctttggtggaaaatagaaactcaaatgattctagacctttttatatggaaatgttcagcatttcaccaataaatggaccngcncctaacncattaaga

SEQ ID NO: 27995 - DNA, 511 bp, Homo sapiens
  misc_feature (1)...(511): n = a,t,c or g
gcggcacgagttattatttatgttttcaccctttagaaaattacangcaaaattgcttttcttctatgagtttccactttagtttttccccccttggattcagtaggagcttatttattttgcagccactcaaaaatgctgggttcctgtccttggtcttaatgaaaaaacaatgttgttataaagaaagaggggaaaattacctgatttccgaatgtagaaataaacaagcaaaatataagccaggctatttatatttgcttaacaagaaagaacttctttcttgctttgcgatgcatttgaaataccgtttgtggccagataaattacgattgcttttcaaggttacatggtgtttctcactcaccatgctccaccttctggccaaaaggagtactctctgttcctgttttcccaactagctcactaaatatggggcaagattctgacgacccacctaattcatattgacttttaactttganggcatcgtgagaanctggggggcaac

SEQ ID NO: 27996 - DNA, 575 bp, Homo sapiens
  misc_feature (1)...(575): n = a,t,c or g
tgggcntttaggccctgaatgcngcacgagcacaagtgttcaaccatcctttctcactggagtggaagnntccctcggacttaggggttagagaaagagacacttccagtccccttagatcctgctgttcaatactttcccaaattaacaaagagggcctcactgaaaataatcagtaaaaaaaagacttagcttttggaaacaggtctgtgctcttaagagaaagtgagacctgatgccagacgccagcacttcctttgtccacagaaggtatcacttcttcctgactggttagagatgccctctcccacttccctgacttactgtagtgacaaaaaatcttccatctgcacatccttccacccccccaagtgggcgattccatattcttcctgcttttgctctcccangaaaatgaagactctatacctttgaggagagatctcttccctcttgtatatggaaaatgacncagatggttcttttctcctttccttttaaacagaggaaactttatncngaagcttttgtcgtaaaatcaggagcttttcccagttcactcntagngggacagg

SEQ ID NO: 27997 - DNA, 562 bp, Homo sapiens
  misc_feature (1)...(562): n = a,t,c or g
gagggacccccatgaaaccgaacacacaagccacgcctnngtgaacctatcccgggacagggcctcttcctcggccttcccatattggnggcagnggtgccacactgaacagagtggaagacatatgccatgcagctacacctaccggccctgggacgccggaggacagggcattgtcctcagtcagatacaacagcattnggggccatggtacctgcacacctaaaacactaggccacgcatctgatctgtagtcacatgactaagccaagaggaaggagcaagactnaagacatgattgatggatgttaaagtctagcctgatgagaggggaagtggtgggggagacatagccccaccatgaggacatacaactgggaaatactgaaacttgctgctattgggtatgctgaggcccacanacttacanaanaagtggccttcatagacatgtgtagcatcaaaaccaaaggcccacttcctgacggatccacttgggcctgtgctactgaccnacccttgagaaaggattaacattggaattaccccnattantgggggg

SEQ ID NO: 27998 - DNA, 559 bp, Homo sapiens
  misc_feature (1)...(559): n = a,t,c or g
ggttttttcatttgtaagaaaggggatgatagaatttactnnacaagatgttgagggtattaaatgagatagtgaatataacntctgnngcagactangagcctnatagatgttanccnanactgtttctaaaggcgggaactgtgtctcatttatccttgagtctcctttacctagcatatagcctgngncatataaagcntanaaagagnttttnggggaaaataanananctnnactcatatatttaaatgtgctntactngtcaccctatgaggngaaaaaaaatnttccaatggggccctntgcnnantactatttatcaccctgnttnttgggggtnttttcngcgnccnangttacccccctnataaaatncntcatngncgcggncatgggggctcgcccctgtaatcccagnactttgggaccccgangctgcngatacgaggcagganaccaggccatctggccaacatggngaaccccattttctgaaaatcanaaattggccaatgtggtgngcatnctgaaacccggttcttggaggggtaagggg

SEQ ID NO: 27999 - DNA, 571 bp, Homo sapiens
  misc_feature (1)...(571): n = a,t,c or g
gcctacttacagggnggtcaatggctcnatagggncntcnggaancttgttanaaatncaggttctttgactcttcagtcagaacatgcattttaataagatctccataggcttctatacactttacattttaagaagtactggtctgaatcacactgtccttgaagttgaagcaatcaattttctcccttaactgagttaaattattttcaaatagggaagtagaaacattctaaggcagtatttctcaangggacttttgcatcagaaatacctaaagaacttntcacaatactaattcttgggcttctcttcacatctactaatctgcttcanaanatataaaagctccacaggagattgtgattgatacctaggcaaanaagcacagataatacanaaaggtataatttccttaggncattataccagtcttagttcagtctcanttttggaattgcantgtttgacaccctgcaattattgcccanggaacttttnacttcaaagacttntgataaagggaatattaaaaatctanaaattgggnatgcnccatttgtnttataaa

SEQ ID NO: 28000 - DNA, 569 bp, Homo sapiens
  misc_feature (1)...(569): n = a,t,c or g
gggcantcncaaggaagtcatgtatctctgaaagccccnggntntttggagagtagtctacaaacctcctataccagaatcacctgagatgcttgtttaaaatataggctcttgaattccactccaaatatgctgaactaaggtatctgggggagcagggcctggaaacctgcattttanttaagtgttccaggggattctgatgctggtgatctcatacctgaanaancctagttctgctagagattctcagactgtgggcatnaatcacacagcaagcttttcaaaggaggactccagatacggcaaattgcaggtttggagtggcccccgggagatgcattggtagcaactccccagcttattctgatgcagatggtcaggatggtggngacaggtgtggggtaggagggctganaaatgtttgaggctggcacaaatgaaatggnatctgcactnaaccttcagcatgggccctgcantgcccgncctnttnttntaggntcaccngnctatgggngctgggtntcttgacnccttcattggactgcnccttttnaaccaaccaa

SEQ ID NO: 28001 - DNA, 674 bp, Homo sapiens
  misc_feature (1)...(674): n = a,t,c or g
gggattcagatgcagaatatataaagaactcccaaagctnngtaataagaaaacaaacaacccaattcaaaaaagaaannnnnnnnnnnnnnnnnnnnnnnnnnnnnnnnnnnnnnnnnnnnnnnnnnnnnnnnnnnnnnnnnnnnnnnnnnnnnnnnnnnnnnnnnnnnnnnnnnnnnnnnnnnnnnnnnnnnnnnnnnnnnnnnnnnnnnnnnnnnnnnnnnnnnnnnnnnnnnnnnnnnnnnnnnnnnnnnnnnnnnnnnnnnnnnnnnnnnnnnnnnnnnnnnnnnnnnnnnnnnnnnnnnnnnnnnnnnnnnnnnnnnnnnnnnnnnnnnnnnnnnnnnnnnnnnnnnnnnnnnnnnnnnnnnnnnnnnnnnaancngggnaaaaattgancaggggnttccccaantaaantttttgaaggtnaantancccctnggaaaggngttcnccntcntnagnntttaggaaaatncaatttaaanccnccntgaaggggctttcccncctnttaaaanggctaatgttaaaaagactgntcataacaagtgttggtnaggaaaggganaaattggaactnttatgaatngcttggggnaatgtaaaangggttaatcnggaaaanaattngggagtttgaacttaancctaaatntactggntgacccacc

SEQ ID NO: 28002 - DNA, 671 bp, Homo sapiens
  misc_feature (1)...(671): n = a,t,c or g
gtgaagtgctaagcactttgctagcctcttcccaggattnggaatgagattgtcctaatnggtaagtggttcactatctcataagggagacagacaaatcttggtaccgtaaggcagcgttgaagtgctggaatagggcatgggcagagtccttcatgtttacggatgatagaaccactgatcctctctgagatagtgggaaggcgtcacagcatanatggcattaaagngatccttagagaatatggggcaagtgtagtgggagttaagttgaaaagggtccagaacgttgttgtgaaacttgtacgctaagtgtttgattggagctgtgctttggaactgcgtgtgcctcaaatagtaactttcatagccttcttgccgatacttggagcttcttttcagcccatctctgcccttgtggcagccaaaataatggctccccagagatnnnnnnnnnnnnnnnnnnnnnnnnnnnnnnnnnnnnnnnnnnnnnnnnnnnnnnnnnnnnnnnnnnnnnnnnnnnnnnnnnnnnnngattatcctggattatttcaatgggcttaatgtaataacaggggtccttaaaagtaaaagaactggtggcccggcacggnggcttacgcctgtaatccagcacttttggaaggccangtggggaaaatcaccctggg

SEQ ID NO: 28003 - DNA, 678 bp, Homo sapiens
  misc_feature (1)...(678): n = a,t,c or g
ggagcttcaataccctgtgttacatttggttattctttcnggntttcaaaatttgtattnggggtatatctgaaataatgatctacgatctttgatgttactattgtaatgatttaagggcaccataaaccatgtccttataacacaatnnnnnnnnnnnnnnnnnnnnnnnnnnnnnnnnnnnnnnnnnnnnnnnnnnnnnnnnnnnnnnnnnnnnnnnnatcccaannnnnnnnnnnnnnnnnnnnnnnnnnnnnnnnnnnnnnnnnnnnnnnnnnnnnnnnnnnnnnnnnnnnnnnnnnnnnnnnnnnnnnnnnnnnnnnnnnnnnnnnnnnnnnnnnnnnnnnnnnnnnnnnnnnnnnnnnnnnnnnnnnnnnnnnnnnnnnnnnnnnnnnnnnnnnnnnnnnnnnnnnnnnnnnnnnnnnnnnnnnnnnnnnnnnnnnnnnnnnnnnnnnnnnnnnnnnnnnnnnnnnnnnnnnnnnnnnnnnnnnnnnnnnnnnnnnnnnnnctcaaatgnctctgtttgcanatgacatgattcccgaatttanaaaaccctatcatctcaacacnnnnnnnnnnnnnnnnnnnnnnnnnnnnnnnnnnnnnnnnnnnnnnnnnnnnnnnnnnnnnnnnnnnnnnncaggcccggccggtttgcttanacctggaatccac

SEQ ID NO: 28004 - DNA, 658 bp, Homo sapiens
  misc_feature (1)...(658): n = a,t,c or g
gggtaggattaaaattagngntcggtaaattaccctggtgngggaaaagcagaatctgttaatggtttcacaggaagattggcttatcagttattttctaggttgatgaaagattatgggctgctaanaatttgaactttagaaagtaaggttgattttcctaatatttacatattttaaagtataggtattgattaaaaagaaagttattacagttagaatttgggattttatatgtgtgtgggagatgatttacaaaccaggttttttgcttagctgtgaacattaagggggccgtcgagagtgtgtgttttaggcaatccttaaatcccgtccaggggaatagtagaccattttggaaagcattttacatgttttggacccacgaaaactccatttagattcctacaaggtggtaggtgatgaaactgcaccttcttggcccgagcggggttagggcggccgcattttaaagcacggngttatatcgttaggagtgttacattgacttggtgtaatgacccgtgaaggaaagcatttgctttcgngattggttatgtcctttgnaaacttacattatttgatttgggcttggtttaaaagggtaatattgaccatcatatatgggntataactgcaggaaacttggangtgattt

SEQ ID NO: 28005 - DNA, 554 bp, Homo sapiens
  misc_feature (1)...(554): n = a,t,c or g
gcacacacaccagcaagatattgacgacctcaaggggcagantgctcttctggagcagcaagtccgtgcactggagaaggcgaggtcaagtgcccaactgcagaccaactacccctcctcagacaacagcctctacaccaacgccaagggcagcaccatctctgccttcgatgggggctcggactccagctcggagtctgagcctgaagagccccaaagcaggaagaagctccggatggaggccagctaagccactcggggcaggccagcaataaaaactgtctgtctccatcgtctcatcctcctttcagttcgttggtagagccctcagaaccatttaagagactctttatttttctctttctcccttttttttttaaatttttatttttacgtaaaagctcttggacaacagntctcgttctccttcccatttccactggtatttttnaaggattcccttcagggattcctgtcccacaggaatttttaaccaaacaccccacnttggcagttttttttgggangacaaacggccngccggacntttggac

SEQ ID NO: 28006 - DNA, 550 bp, Homo sapiens
  misc_feature (1)...(550): n = a,t,c or g
nnnnnnnnnnnnnnnnnnnnnnnnnnnnnnnnnnnnnnnnnnnnnnnnnnnnnnnnnnnnnnnnnnnnnnnnnnnnnnnnnnnnnnnnnnnnnnnnnnnnnnnnnnnnnnnnnnnnnnnnnnnnnncaactgcttgaaccaaggaatctgaagctacagtgagttataattgngccagtgcactctagctcactacacacagtgggctatgattgcatcagactgagaccttgtctttaaatatataggaatgaagtaaatacttgttcctatgcttgacccatagggtgctccccataattaagtggggtgcttaatatgcagaggaaatactttgtattacctttccaaaatgtaaaaaaaaattttaattccataacacgtctgactcaaagcattttgtgaaaggaaagtccataatacatctgctcaatacattttgtgaaaggnggagctacacagaccttgtcggccctgctattggttggctggactgtaatagcatgcaggcgcacatggtcaanactgctgccaaggctaatcccctttt

SEQ ID NO: 28007 - DNA, 546 bp, Homo sapiens
  misc_feature (1)...(546): n = a,t,c or g
gnnnnnnnnnnnnnnnnnnnnnnnnnnnnnnnnnnnnnnnnnnnnnnnnnnnnnnnnnnnnnnnnnnnnnnnnnnnnnnnnnnnnnnnnnnnnnnnnnnnnnnnnnnnnnnnnnnnnnnnnnnnnnnnnnnnnnnnnnnnnnnnnnnnnnnnnnnnnnnnnnnnnnnnnnnnnnnnnnnnnnnnnnnnnnnnnnnnnnnnnnnnnnnnnnnnnnnnnnnnnnnnnnnnnnnnnnnnnnnnnnnnnnnnnnnnnnnnnnnnnnnnnnnnnnnnnnnnnnnnnnnnnnnnnnnnnnagacctattttttaaaacccataatacttctagtttttatgacaatatgccagttgtaactatttcccagtcttctttgaggtaaatccatacatattcaattgngatgcttctaaatatattcaaggatatgcataatacaatatctaagatgnatttaatagaccagaattaaacaagatgctggatgactatattatatcagggtatcnactgnggggatgattaaanaataacntttntttttttttg

SEQ ID NO: 28008 - DNA, 494 bp, Homo sapiens
  misc_feature (1)...(494): n = a,t,c or g
gtatttaaacaatgtatcttagtcctaaatttgaaggctaaaataaataagcagctatgatccgtaggataggaannnnnnnnnnnnnnnnnnnnnnnnnnnnnnnnnnnnnnnnnnnnnnnnnnnnnnnnnnnnnnnnnnnnnnnnnnnnnnnnnnnnnnnnnnnnnnnnnnnnnnnnnnnnnnnnnnnnnnnnnnnnnnnnnnnnnnnnnnnnnggaaattctttattccttgaaaatgtattatctgagtttaaattggctgtgaagtaggtaaatagaaaaatgcctaaaaatgtttttatttctaggagcttattgggctaggttatatgccctttataagctcaaaggggttaataagtaagaatttctatttttagtattaaaagtgtggcatgtctcacacaaaacagtgcatcctcttaagaaacttggcatggagatcagtgggccagaatctcctacataaacattgggtgaaattccttaaa

SEQ ID NO: 28009 - DNA, 495 bp, Homo sapiens
  misc_feature (1)...(495): n = a,t,c or g
gcggcacgaggttaagtgatgaggggaattccatagagataatgtttggcaaaaaatgtgacagacttgcatattattgttattattattannnnnnnnnnnnnnnnnnnnnnnnnnnnnnnnnnnnnnnnnnnnnnnnnnnnnnnnnnnnnnnnnnnnnnnnnnnnnnnnnnnnnnnnnnnnnnnnnnnnnnnnnnnnnnnnnnnnnnnnnnnnnnnnnnnnnnnnnnnnnnnnnnnnnnnnnnnnnnnnnnnnnnnnnnnnnnnnnnnnnnnnnnnnnnnnnnnnnnnnnnnnnnnnnnnnnnnnnnnnnnnnnnnnnnngaccagccacataatatttttatagacaacacagaactgtagtgaggataaaggtcaatccgtaagtgtgtgaatgctcatacagaaaaatggtagttaattgaacaaaatcaagctaggccatcaaccaataccaacttgccaggcatatagataagccacgttagaaacag

SEQ ID NO: 28010 - DNA, 486 bp, Homo sapiens
  misc_feature (1)...(486): n = a,t,c or g
ggaagatctttatgtagaaggacttcctgaaggaattccttttagaaggccatctacttacggaattcctcgcctggagaggatattacttgcaaaggaaaggattcgttttgtgattaagaaacatgagcttctgaattcaacacgtgaagatttacagcttgataagccagcttcaggagtaaaggaagaatggtatgccacaatcactaaattaagaaagatggtggatcagcttttctgcaaaaaatttgcggaagccttggggagcactgaanccaaggctgtaccgtaccaaaaatttgaggcacacccgaatgatctgtcgtggaaggactgccagaaaacattcctttccgaagtccctcatggtatggaatcccaaggctggaaaaaatcattcaagtgggcaatcgaattaaatttgttattaaaagacctaacttctgactcacagtaccactgaagttactcaccnagaacgaa

SEQ ID NO: 28011 - DNA, 490 bp, Homo sapiens
  misc_feature (1)...(490): n = a,t,c or g
gccagaattaatgtaatacaaaattaataaaacacacatactganttgaatatcatcagagctcatatatttaagagctgactagctggtgctttaaagaggataagccatctgttttcaggttgnggcagtcattaaaaggtgcttggcatattgcagatatttcacatcacagacattctgaatgctctatctgcagattaaagcctgtcatgagtnctntagtgtttaccactcacagtggttttgnggcaatactgtattcttagtagtattctatagcttttgtttcttgctttcagtaaaattagatgaaaatatgcntatgtatntatgagaacatgtcagtcaaatatttcttctctgtgtaaggcacaaatcctctgccttatctgcttgataggtaaggtatcaatattcctttcccatccccaccttcctcccaggaaaagagctgacaagggatgcaaacattgcaggaaaccactgt

SEQ ID NO: 28012 - DNA, 486 bp, Homo sapiens
  misc_feature (1)...(486): n = a,t,c or g
gcggcacgagcgtcttcttgggcttcatgtagtactcatatcctatttgcagattacaaacccttgagttcttatgtttaatgttgttcttatctttgctgtatctctcacctcagtgccctcatttgagaacagggtcccaagtaaatttaactcaaccgagaccaaccagctgtgatatgattggtgaagttggcaaaaaagaatttagaatccatttatttccaggacctgtttagttgcttacccctctgagcactgtactacctgtaaagtaggaaaaatacctgttttgcattngttgggagggttacagaaaaactctgtagaaagcatcatttcagtgtttggtataaanaaaggccagtangatagtagatggtattgttattagacactgntcctactctcaattctagaggaagagacagaatacattgggttactatttgttattacaatctattgntagaactgtaattcttg

SEQ ID NO: 28013 - DNA, 489 bp, Homo sapiens
  misc_feature (1)...(489): n = a,t,c or g
gcccaaatagtaaacatagtacccaataggtggtttttcaacccgtgccctcttccctccctgcttttggagtccccagtgtctatcgttccaatctttatgtgggtggagactttttttttaagacaggatcttgctctgccaggctggagtgccaggttggnnnnnnnnnnnnnnnnnnnnnnnnnnnnnnnnnnnnnnnnnnnnnnnnnnnnnnnnnnnnnnnnnnnnnnnnnnnnnnnnnnnnnnnnnnnnnnnnnnnnnnnnnnnnnnnnnnnnnnnnnnnnnnnnnnnnnnnnnnnnnnnnnnnnnnnnnnnnnnnnnnnnnnnnnnnnnnnnnnnnnnnnnnnnnnnnnnnnnnnnnnnnnnnnnnnnnnnnnnnnnnnnnnnnnnnnnnnnnnnnnnnnnnnnnnnnnnnnnnnnnnnnnnnnnnnnnnnnnnnnnnnnnnnnnnnnnnnnnnnnnnncacccatagtcccagtncttaag

SEQ ID NO: 28014 - DNA, 489 bp, Homo sapiens
  misc_feature (1)...(489): n = a,t,c or g
gggcaaatgcattttgagtggtgggggcgggtcatgcttcacaacttatgcttaaatatcctcttaggaagatttctctagtagaacagaaatccttttataaaaatctagccagttctgtgagcctaaaaagaagacagtgtctctctgagtgcccttaagttactactcaaattgcaaattccttttgggggaaaaaaagagcatcaaaataacttgaggtctgtttgtgtgtgtgtgtgtttttcaagacggggttgtnnnnnnnnnnnnnnnnnnnnnnnnnnnnnnnnnnnnnnnnnnnnnnnnnnnnnnnnnnnnnnnnnnnnnnnnnnnnnnnnnnnnnnnnnnnnnnnnnnnnnnnnnnnnnactgcaggaatgtggcaccatgcctagctaattaaattttttttttcatagatggggcatcactgngttacccanactggcctccaattccggccttaacaatccttcactttgggaag

SEQ ID NO: 28015 - DNA, 492 bp, Homo sapiens
  misc_feature (1)...(492): n = a,t,c or g
gaccgaatgtacctatggattttattcagtctgataagngatctgcaagtagataagaaatgtgtttagaaactagaaggggaaaaaggcaaagatgcagaatacctagagtactccagaaacagagcaagatgagaggagggatgagcatgggataggagacatttatagcattattgtcaccttttataattctgttgaacaggctggtaaaaaagcaaaaacaatccaaagaatattttagctggtactgatctaaaactgtaaaacactgtaatatgataatatatgtatatgtatgaattattttaggcatgcttttcttgctatatttattttaagagattaatctacggcttattcttgccacccccaaaaataatcgccacaaaccctaaacccaactnttgaccttggttattgagcgctgccttcccttctgagtggtcacttaactggaaatatggggcctctttcagattgaatttcttg

SEQ ID NO: 28016 - DNA, 488 bp, Homo sapiens
  misc_feature (1)...(488): n = a,t,c or g
ggtattttgcatttaattgtactttaaaacagaaatgtnttatgatatcttgttcactgttacccacttcccagtttaccacacacttaatccttctagtttggtagggtaacaccaaatgctagcctagataactattaaaatgtcagtggtttagcacaatctgttggtcagcttttgctaggttattctcctgtgacaagcaatccccatatcaaccgcaaaggtttatgttttgctatggaatatgttagctacgtgtcagtcgctcctctgctccacttgtcttctttatctgggatccagcctaaatgtcccttctgtatatgggatccaggctaaatgctgttctagaacaggagaaaggatcatggtggaatcatgcaatagctcttgaagcttctgctggaatgtggctacatcacgtctgctcacattccactagccaaagcacgtcagatgaccaagcccaacatcagtggcaggaa

SEQ ID NO: 28017 - DNA, 488 bp, Homo sapiens
  misc_feature (1)...(488): n = a,t,c or g
gactgggctgaaatttttacatacaaatgcacttacatttggtaatctgtagataatgatttgccacctggtaataatgcatggccactaaagggataacccagttgaggttttcttcagcagaaagagctagaagactctcttctgaggagagacatgaataactcagcaaagggaggaagtccttccaaacaagcctgttaggccagccagtcatccatctagtgagagagatttttagggagagaaaagctcccctctagccataggactacccaaaagcaccttcagccagggtgctggctggcccggaacccctgctgtaaaagttgcccctctgggtcatccagcacaagcgagcactgtgtctccagagcgtctctcatcaagacaggacacccagcaggctgacagatgccaggggaggcctctggataagtagcagccacaatatagtgctttggaaactccatgggactcanacctgt

SEQ ID NO: 28018 - DNA, 134 bp, Homo sapiens
gatctgttaagggtaatctgcccgttgtcatctattctgagggtgttgggcgtggggtggctggtgtgagatggaaaggacagtggagatcacctagtcccatcttttccagcctttacatttttttttttttt

SEQ ID NO: 28019 - DNA, 524 bp, Homo sapiens
  misc_feature (1)...(524): n = a,t,c or g
gnnnnnnnnnnnnnnnnnnnnnnnnnnnnnnnnnnnnnnnnnnnnnnnnnnnnnnnnnnnnnnnnnnnnnnnnnnnnnnnnnnnnnnnnnnnnnnnnnnnnnnnnnnnnnnnnnnnnnnnnnnnnnnnnnnnnnnnnnnnnnnnnnnnnnnnnnnnnnnnnnnnnnnnnnnnnnnnnnnnnnnnncattattcagaatgaaataaattcttattaaaacgtctcttnnnnnnnnnnnnnnnnnnnnnnnnnnnnnnnnnnnnnnnnnnnnnnnnnnnnnnnnnnnnnnnnnnnnnnnnnnnnnnnnnnnnnnnnnnnnnnnnnnnnnnnnnnnnnnnnnnnnnnnnnnnnnnnnnnnnnnnnnnnnnnnnnnnnnnnnnnnnnnnnnnnnnnnnnnnnnnnnnnnnnnnnnnnnnnnnnnnnnnnnnnnnnnnnnnnnnnnnnnnnnnnnnnnnnnnnnnnnnnnatccctggcttcacctgggaaacaganggagactntntnaaaaccaaaaaaaaaaaaaa

SEQ ID NO: 28020 - DNA, 563 bp, Homo sapiens
  misc_feature (1)...(563): n = a,t,c or g
gtgttcccaagagaaagggaaggaaacagttatgctatatggagcatgaagtttcactttcaggatctagaactctggttcctatgaaagcatacgttctttcctaacgtgaaacaggctactgaaatcaaccttgaagagtagttctgggaatcaggggttctcagcctttctgtacatgtcagaggttttctgagtctctattctataagaatgcagnggggtaaagctattactttgcaagctgaaatttaaaagggccaattattcccctgcagaccaagaaccaagcttaggatgtgatcttggggatgcttttgtgtgtgcatgtgtgtgagttgtataaagctggggngtggnccctcacctttggttgatcaataatccaaactattggcagggcagctcagccagttagtctggataaaccaaacttgaatgtatacataggcccagcgaccacccagatgtgtagttgtanaggatganaaacacnnanagctgtaagcctntataaacttaaacangnagantgttaccannccttggccacagttggggtc

SEQ ID NO: 28021 - DNA, 561 bp, Homo sapiens
  misc_feature (1)...(561): n = a,t,c or g
gagcactaacccaaagagacctttatcttctggtaaccagaattttaataattctgagaccttggggcaccaaggaagccatgtggtcaccctccaactgagaatagatggaangcattgtaagtcttgcgtcttgaatattgaagaaaatattggccagctcctaggggttcaaagtattcaagtgtccttggagaacaaaactgcccaagtaaagtatgacccttcttgtaccagcccagnggctctgcagagggctatcgaggcacttccacctgggaattttaaagtttctcttcctgatggagccgaagggagtgggacagatnacaggtcttccagttctcattcccctggctccccaccgagaaaccaggtccagggcacatgcagtaccactctgattgccattgccggcatgacctgtgcatcctgngccattccattgaangcatgatctcccaactggaangggtgcagcaaanattggnnctttggcnaaaggactgcacaggtcttatancccttggaatagncccaagaacttnagttgtttttaaa

SEQ ID NO: 28022 - DNA, 556 bp, Homo sapiens
  misc_feature (1)...(556): n = a,t,c or g
ggtggaagctgcacaatgactggccagnggtggaggctnagtaagttggagtcacttaaagctctgccttccaggtgtgcacaactaagttgatgctccacacaggtgcttctgctcttgnggtctgngtgcattctgaaaatntaggaatgcaaacaaggtgccacagctatctattgctgtagattatccatgtcnnnnnnnnnnnnnnnnnnnnnnnnnnnnnnnnnnnnnnnnnnnnnnnnnnnnnnnnnnnnnnnnnnnnnnnnnnnnnnnnnnnnnnnnnnnnnnnnnnnnnnnnnnnnnnnnnnnnnnnnnnnnnnnnnnnnnnnnnnnnnnnnnnnnnnnnnnnnnnnnnnnnnnnnnnnnnnnnnnnnnnnnnnnnnnnnnnnnnnnnnnnnnnnnnnnnnnnnnnnnnnnnnnnnnnnnnnnnnnnnnnnnnnnnctactaaaaatanaaaanttaacttgggggtgngggcccccctgnaatccgntactcggangcttagcnngaaaattnttgaccnggaggcgaggtttcatngnccaaaat

SEQ ID NO: 28023 - DNA, 568 bp, Homo sapiens
  misc_feature (1)...(568): n = a,t,c or g
gcaagactggcgttnactgnggatgataatccgaccaagcgaaccanngggcaaagatacgacggcagcaccactgccatggaaattctccagggccgggatttcactggcaaagnggttgnggtcactggagctaattcaggaatagctttctgaacctgaanaactttgtagattgaaagctgtanctngaggacctctctctgtggagatcagcatctcagtatccagggggaagccatctcttcacccaaagcttccgctaggagatnaagaggcccggaaccccgcagtcctgaatgctaaccagtanagacaagggaggaattcatttctgtttgtgttcaacatanactgagcangaagggccaggtgttttacnactctttggagttagcagcttgtnggctctgatttggtaaaagcaanggaaatgccttcagcacngtgaacngttacatgcaaatgttggnaagtnttannaaagggaatttttangcnanggaattnncattgnggaangccctgcttcnttttaacncanctntcgtnnctnaattggtattct

SEQ ID NO: 28024 - DNA, 567 bp, Homo sapiens
  misc_feature (1)...(567): n = a,t,c or g
gcnnnnnnnnnnnnnnnnnnnnnnnnnnnnnnnnnnnnnnnnnnnnnnnnnnnnnnnnnnnnnnnnnnnnnnnnnnnnnnnnnnnnnnnnnnnnnttgaggctnnnnnnnnnnnnnnnnnnnnnnnnnnnnnnnnnnnnnnnnnnnnnnnnnnnnnnnnnnnnnnnnnnnnnnnnnnnnntaataataataatttgtactgtttattcacctttaataaatttgttcatttggtatgtggaaaagagaatttanactgaatgnnnnnnnnnnnnnnnnnnnnnnnnnnnnnnnnnnnnnnnnnnnnnnnnnnnnnttnnnnnnnnnnnnnnnnnnnnnnnnnnnnnnnnnnnnnnnnnnnnnnnnnnnnnnnnnnnnnnnnnnnnnnnnnnnnnnnnnnnnnnnnnnnnnnnnnnnnnnnnnnnnnnnnnnnnnnnnnnnnnnnnnnnnnnnnnnnnnnnnnnnnnnnnnnnnnnnnnnnnnnnnnacaccactgcattctacctgggcacagantgagaacctgtttaaaaaaaaaaannnnnnnaaaaaaaangntttttttttt

SEQ ID NO: 28025 - DNA, 558 bp, Homo sapiens
  misc_feature (1)...(558): n = a,t,c or g
gggaaaattttcttacagttgatgcaaagtatnggctactttaccctaccttctccccttttagatgggttcttcctgagttttggagtcttgtatgattatcagtattcccctgtcaaaatcaaatctattcaggtttcttcactgttganaacacctaaatgtttttatttttgagaagnnnnnnnnnnnnnnnnnnnnnnnnnnnnnnnnnnnnnnnnnnnnnnnnnnnnnnnnnnnnnnnnnnnnnnnnnnnnnnnnnnnnnnnnnnnnnnnnnnnnnnnnnnnnnnnnnnnnnnnnnnnnnnnnnnnnnnnnnnnnnnnnnnnnnnnnnnnnnnnnnnnnnnnnnnnnnnnnnnnnnnnnnnnnnnnnnnnnnnnnnnnnnnnnnnnnnnnnnnnnnnnnnnnnnnnnnnnnnnnnnnnnnnnnnnnnnnnnnnnnnnnnnnnnnccacgcttggnaagaacacctaaatttttatggtcttggttnaaaaccagttcattttaatgtggctcacaanaagntnaatggtngtanacaacanggangaggaaa

SEQ ID NO: 28026 - DNA, 563 bp, Homo sapiens
  misc_feature (1)...(563): n = a,t,c or g
gttttttttttccttgaaagataattgctgtntaaagtaaaaantagtaatancaaaccaagggatttatgacaggtcaaagtaaagtgcatcagtnnnnnnnnnnnnnnnnnnnnnnnnnnnnnnnnnnnnnnnnnnnnnnnnnnnnnnnnnnnnnnnnnnnnnnnnnnnnnnnnnnnnnnnnnnnnnnnnnnnnnnnnnnnnnnnnnnnnnnnnnnnnnnnnnnnnnnnnnnnnnnnnnnnnnnnnnnnnnnnnnnnnnnnnnnnnnnnnnnnnnnnnnnnnnnnnnnnnnnnnnnnnnnnnnnnnnnnnnnnnnnnnnnnnnnnnnnnnnnnnnnnnnnnnnnnnnnnnnnnnnnnnnnnnnnnnnnnnnnnnnnnnnnnnnnnnnnnnnnnnnnnnnnnnnnnnnnnnnnnnnnnnnnnnnnnnnnnnnnnnnttgaacccagggggtggaggttcaatgagccgaaccatccttgacttcaccttggcaacaaacgngactttttttnaaaaacaaccntttacncacnaaaaanccaagttccccggcttntggggg

SEQ ID NO: 28027 - DNA, 553 bp, Homo sapiens
  misc_feature (1)...(553): n = a,t,c or g
gatttctccaacctcagaaaaatctacttaaacttccattncttgttcttttaaacagaagactatttcttggagctcccctgctatttttttttttaaataaaancattancnctntnacgcttccctccatttctccctctactttccaatctntaaatctaagttnatgtttttccttaagtcagggttganatgangttctgngttgnaattngtctggggttaatttttaaaaatagaaaanctaataaactgaatttgcattgtnatgattatgtaaatattgggactnactgaaccaagtatttaataatatgngattacncttntcaggggttccgatgtcaaaggggaattttttaaaaaatatattagatatattccacctgttgatcaaaattgtgccgaattttagttagcttcatttttagttttnatcttttttttttcctnangttcnaatngccctnccttcctttcctcctccatnttcaccatnaaccctttttcctcctccttctttctttnaagggggnttnttcccctcccc

SEQ ID NO: 28028 - DNA, 563 bp, Homo sapiens
  misc_feature (1)...(563): n = a,t,c or g
ggagatcggcaaagccttgatggattctacagccatgggatgggagctgagggtcgagaaagtgagagtgagcctgctgacccaggcgacgtggaggaggaggagatggacagtatcactgaagtgcctgcaaactgctctgtcctaaggagctccatgcgctctctttctcccttccggaggcacagctgggggcctgggaaaaatgcagccagcgatgcanaaatgaaccaccggagttcaatgcgagttcttggggatgttgtcaggagacctcccattcataggagaagtttcagtctagaaggcttgacaggaggagctggtgtcggaaacaagccatcctcatctctagaagtaagctctgcaaatgccgaanagctcagacacccattcagtggtgaggaacgggttgactctttggggcactttcagaagaggatctggagtcanaccanagagaacatangatgnttgaacagcagatatgtcacagatntaagcngcagggattaaatactggccataancntttctntcattgccaaancctttcataaggg

SEQ ID NO: 28029 - DNA, 576 bp, Homo sapiens
  misc_feature (1)...(576): n = a,t,c or g
ggtctgatgccatcttacatttaaggtcaaaagattcctgangcccccacacaactnaaacccaacttctcccccatngntttccatctnagtcaaagtagcatccttccctctcttccccacccaccccacaatttacctagttccctggccccagtttctctcagngcccacatgagcaagaccagttgcctttatcttcaaaatatatcctgaacctacagtattaccaccctagtccaagcaacctgcaaccattcctctctggattcttgtaatngcttcctacctggcatctctgcttccattcttgcccctgcccgccccatactctttacatggattttttaaatagataaatcagactgtgccacttcccttcccagagccctgcggnggtttctcatcatgaaaataaatagctctcctgacccaggccttgcttagctttctgacttccttttctactgctggagacagttagaggtgagcaccctgtanagaggngggcctctaataaggggaaggnaagggaagaaaaggatgaaaggannggaaaaaagcttgaaacccccc

SEQ ID NO: 28030 - DNA, 536 bp, Homo sapiens
  misc_feature (1)...(536): n = a,t,c or g
ggactgcttgaggggtgctaagcaaagccctgcctcttacaggatgaaggtgctctccagaagggacactggaaagtattccaaggcgagtcgaattcccaactgagggagctttgtggaaataagcccgcccagccccacttntggagacgttcccattcagtaggtccgagctgtcttaaagagaaaccaaagtggggatattaatggtatccaaagtgagatctaccccaccctccctcctcaaaggaggtcagatcaagaaagcccaagcccggcctggcaattgggacctttcttctcactccagcccagggtgaaggtggacaagtcactttgacccttcangcttctgagctgtgtttctgaattcagtgaatatttactgagtgcatagaatatgctagatattctggctaaaggttgaagggggggtgagtttaanggttctgtcttgnttccaaatgctttnaattggaaggaacccntggtttggcgtanaccaacttgcgtagncaaatcaanaaattgntgaa

SEQ ID NO: 28031 - DNA, 394 bp, Homo sapiens
  misc_feature (1)...(394): n = a,t,c or g
gnnnnnnnnnnnnnnnnnnnnnnnnnnnnnnnnnnnnnnnnnnnnnnnnnnnnnnnnnnnnnnnnnnnnnnnnnnnnnnnnnnnnnnnnnnnnnnnnnnnnnnnnnnnnnnnnnnnnnnnnnnnnnnnnnnnnnnnnnnngtagtccctggtgtctatcannnnnnnnnnnnnnnnnnnnnnnnnnnnnnnnnnnnnnnncaaagtgactactagagggggaaagagagggacggggacaagggctgggaagctacctgttggtaactgtgctcactccccgggtgatgggatcattcacaccccaaacctcggcgtcctgcagtatattcttgnnnnnnnnnnnnnnnnnnnnnnnnnnnnnnnnnnnnnnnnnnngaatttttttttttttt

SEQ ID NO: 28032 - DNA, 536 bp, Homo sapiens
  misc_feature (1)...(536): n = a,t,c or g
gaatgataagggctggctgtccagagagaggagatgtcacccttgcaaaaaaactagggccattctagcatgatataacctacagtcacacaagtaaagtagtcatgttaaggatttgtatggtgccataaaagccactgcacccggcccggtcttaactgtttctgagctgagaggtcactagagaactgagagaatggtagcttgttctggcccctccttgggagagggtgtgtgctggtgtctatcactcanagagtgggcggggctgggaagggaagttccaaacccatgacgaagaagagggctgttctggggtggagcaggaactttcttggctctggggtttccttgtctgtcaaatgaccaggtgagatccaaagtctaagccagctctgatattttagtgttaaatcctgngcttcatcctcttantcccaaaatccagctgatggaaggtatttaattgatttgggccccttggtgcanaannaagcctgnganttgccaaaactnntnggggacttttncnattg

SEQ ID NO: 28033 - DNA, 555 bp, Homo sapiens
  misc_feature (1)...(555): n = a,t,c or g
gtataaaaggaaaatgcagtttaaaataatttcagtaattgcattcttgagttttctgtcctccctggtaccatgaaactggagatctttggagacctatcacagaacatgtactggaattgtttgtgtgtggagtaaaggcagctgtttgtagccatctagttgggaactgtctttccttggatagttagctactctgttggtgtgtggtgtaacacttacctgttgctggcacgtagtcagtgatttctgtcatgtataagtaggccttgccattgtcagcaggtaatgatcctggaaagaccaacttctgttaatgtaatccacaatctagtgaggggattatagctatcaaacatatttctcagtccactttttaagaagtagtcatttannnnnnnnnnnnnnnnnnnnnnnnnnnnnnnnnnnnnnnnnnnnnnnnnnnnnnnnnnnnnnnnnnnnngtgaatgtgagacccacctggcaaataggggaccctacttacnaaaataaaaaacctgatgngntnccatgttggaacccaccttggaggtt

SEQ ID NO: 28034 - DNA, 600 bp, Homo sapiens
  misc_feature (1)...(600): n = a,t,c or g
gtggtannnnnnnnnnnnnnnnnnnnnnnnnnnnnnnnnnnnnnnnnnnnnnnnnnnnnnnnnnnnnnnnnnnnnnnnnnnnnnnnnaggtatgcaccattgcacctggctaatttattttttannnnnnnnnnnnnnnnnnnnnnnnnnnnnnnnnnnnnnnnnnnnnnnnnnnnnnnnnnnnnnnnnnnnnnnnnnnnnnnnnnnnnnnntccagactactaagatnnnnnnnnnnnnnnnnnnnnnnnnnnnnnnnnnnnnnnnnnnnnnnnnnnnnnnggtggatcacttgaggcangagctcgagacanctgggcgaatgatgaaacccctctcactaaaatgtaaatattaccantntctgggccaccgtatccanctacttggagctagnanaaaacattaacccggaggtgaggtcatnaataanacncatgaccacctgggganaacaaatcaccaaaaaaaanaaaaaagtttntagcggcnanttnncctaggggnatttncttgngggcnttaaagggnngnganannnnnnnnnnnggnnngggnnnggggnnngtncgggnnnnnccnnnngnnggcnnnnnggag

SEQ ID NO: 28035 - DNA, 552 bp, Homo sapiens
  misc_feature (1)...(552): n = a,t,c or g
gaccnagtgttaataatcacatctgagctagtctccatctttggagttcacaaccccagaataccctagataaactgaagcataattctggaagaagttctaagaactctgtcatcactgccgaactacataactacattgttagttatccaatgctacttaatttaaaattggatatttgatctcttaatgaatggctgttgtcacatttacccagaattagaatttctcagagctctctggagaaatattggacccaactaatggatttgaagtttcaggaacccagcctaattctaaactgattacaaatataatcattagatttgttaagccaagaaaaatgtatgatccagtatgtgattgattctgtgtctgcaaatttatatgcacagcgtattttaaaacattgctcttataccatcattttctcaactattttgaacttgctgcctcattcaattttaagtcatttgagagnatatgtggcattactacttggaaattcaatataagctcaatcccataactggttgntctaaaaaaattttc

SEQ ID NO: 28036 - DNA, 544 bp, Homo sapiens
  misc_feature (1)...(544): n = a,t,c or g
gaatttataannnnnnnnnnnnnnnnnnnnnnnnnnnnnnnnnnnnnnnnnnnnnnnnnnnnnnnnnnnnnnnnnnnnnnnnnnnnnnnnnnnnnnnnnnnnnnnnnnnnnnnnnnnnnnnnnnnnnnnnnnnnnnnnnnnnnnnnnnnnnnnnnnnnnnnnnnnnnnnnnnnnnnnnnnnnnnnnnnnnnnnnnnnnnnnnnnnnnnnnnnnnnnnnnnnnnnnnnnnnnnnnnnnnnnnnnnnnnnnnnnnnnnnnnnnnnnnnnnnnnnnnnnnnnnnnnnnnnnnnnnnnnnnnnnnnnnnnnnnnnnnnnnnnntcctttggaggttttttaaaactttcaaaaagtgaactagagacagaaagagaaagttaaaaagtgtggaagaaaaaaatggaggagacttggaagacatctctgtattaaacactaatcagcatggttattangnggaatcctatagcttgagggagaactatctcttattatatgaaatcatcttaatcanaaactagttctntttttgcncaaccagttatt

SEQ ID NO: 28037 - DNA, 516 bp, Homo sapiens
  misc_feature (1)...(516): n = a,t,c or g
ggctaattttaaaaacaatgattcaaccctatataccccaaaatgttattatgtcagcatgtaatcatatgaatgaaatattgtatagtttttattatactaaatctttgaaatctggtgtttatcttataacacagctgaatttggactgggcacatttcacatgtggctactgtaatgtacagtgaagctctccttctacctaaaatgttatttcttatttctcatttgcctgctttgttacctgtcaagtgaaatcaattatttctgatttgtacctgtgtggtttttttgttttaattattggtcttaacaatgtgttaggtagaaacctctgtgtcatacttgattcctgcttctctcacacatctaagttactgaatcctttcaattttatctcagaagtctgnctcagatctgcccattaaaattttttattacacttgcctatttcatatcctttttcatgccttgctgactattctaacagctttggancaatttcctttttcaggg

SEQ ID NO: 28038 - DNA, 517 bp, Homo sapiens
  misc_feature (1)...(517): n = a,t,c or g
gctggagaatgaatgaatgctctatatcaagtgggaagcccgtccgaagactgcagtccttcagatcactaggatgctgctaattgagtaggacacagcagcttacagtaaatattactttctggctactttcttatgatagttgaaattacatctaatttatcaagaaagtgaatgcttatttgatttggctatgaaattatgctgctcagttttaagatgtcttcatgaacccagtctcagtgaagatgtttctgtattttagggtttgtttgggttttttggcctcatcctcccacgaatgtttaaaattagcttggcattttaaatctgtgcttttatgttaggtcttagataattataaaatagaagaaaaattaagagcnaaaaattagatatgccaggtttgctatcttggtgaaagtgatcgacatctgaaagctgataatttatttagaccaccagntttgtagagntcagttacntcatgggctataatttacttcncatactacct

SEQ ID NO: 28039 - DNA, 515 bp, Homo sapiens
  misc_feature (1)...(515): n = a,t,c or g
gtgtgtcttcagagacggtggtgcgcggtattcccctcgagtgagtgtgatacgtgaacgcacgctcatcgatcccttgtaaggagaggtcattcactttacaatgctacccaagagacaagcccttcaaatacagatgttggagtagagacggcagagtggaggtaaggcaggattgatctcagagaccatgaccccccatacctttctctcgctgttctctggagggctgtgagtcactgcatggacaaagtgtgctgaaaagcagtccagcacagcccaggctactgcctttgggaattcaattggtagctgccctcccagcctctgctgttggtcatgtgggaccacccagccaagcccagagtgggagactagaatgcttatgttcatcaggcactaaaattctcgtggccgtaacctccctgagaggaaactggtatgtgggtggaacacacaaccgngtcagcctgcaggatgtccagtcagngaatnccttnaagcaacatggccct

SEQ ID NO: 28040 - DNA, 515 bp, Homo sapiens
  misc_feature (1)...(515): n = a,t,c or g
gagcttcaataccctgttttatatttctcaatgttaagataagtttacccaaagtttgaaacaactgataacttctggtctgcaagatccctacggcattagatctctaaaacagaaaccaacaacatataatattacaagatataacagtatgtatattatagttcctgagtttaaggacatcagtaacttgatttaaaaaaaaagaagtcatgctcaaacatacgactcaaagttttcaagccatattttacaaagattgtgttttttggttcgtatgctataattactatttaaactcatcgcttatatttgaaaataacttgtgtgaaatcatcaagggaaaaggggtcagtcgcctagagacaccacattaaactcactctttaaggccatcataaatacaggtaacttggaatcagaaaaaaaaattcaaattcacagtaaggcctaagtnaaaatttnaccaagattttccaatttttttttaaagcaaatggaacncgttaaccttg

SEQ ID NO: 28041 - DNA, 512 bp, Homo sapiens
  misc_feature (1)...(512): n = a,t,c or g
ggcccactgnnnnnnnnnnnnnnnnnnnnnnnnnnnnnnnnnnnnnnnnnnnnnnnnnnnnnnnnnnnnnnnnnnnnnnnnnnnnnnnnnnnnnnnnnnnnnnnnnnnnnnnnnnnnnnnnnnnnnnnnnnnnnnnnnnnnnnnnnnnnnnnnnnnnnnnnataataaaatatacttttatcattcaggaaattgtgttttaggagctgtgtgctaggaaccagattagggacaaagaccaaatatatattttgtattannnnnnnnnnnnnnnnnnnnnnnnnnnnnnnnnnnnnnnnnnnnnnnnagagagagagaagaatgtaaacctcattagaggagagaacttgtctgtctccatcatgtgtagtccctaacacatagtnggtgatcagtcaatatttggtaaattaaaaaatagnaacccacaattattggttgagaggcatgtataaaaaattatggggtggccccggggctattctgnatcccagcnnttgggaggcaagggg

SEQ ID NO: 28042 - DNA, 519 bp, Homo sapiens
  misc_feature (1)...(519): n = a,t,c or g
gcaatatttgttgaacaaattatttgactcttcctgtttccatctgagtactatttaacataggactgcttgccaggtgtacctgggtatactttcccacataagcaactttcccttttggggagaatttaaccaaaagtgccaatattacatagtggttaataatgcatagtccagaattagactacctggatttgactcctgtnnnnnnnnnnnnnnnnnnnnnnnnnnnnnnnnnnnnnnnnnnnnnnnnnnnnnnnnnnnnnnnnnnnnnnnnnnngagaagcaataatagttctttctcatgtggtcatcatgaggattaaagtagttaatagaattgattctttaaatagggtctgtcacagagtaaaccgttgatgaaagttgntattattatggctttcaaagatctttcanggaaggagtattgctgctaaaggcattcaagaagtgctangggagctggcttaacactcagaatcttcctntaaccatggttggcaganattataaatg

SEQ ID NO: 28043 - DNA, 517 bp, Homo sapiens
  misc_feature (1)...(517): n = a,t,c or g
gggacagaatgaggggtgcggctgtgtnnnnnnnnnnnnnnnnnnnnnnnnnnnnnnnnnnnnnnnnnnnnnnnnnnnnnnnnnnnnnnnntagatctgccagtctcnnnnnnnnnnnnnnnnnnnnnnnnnnnnnnnnnnnnnnnnnnnnnnctcagtcagattcgcttttcattgggaggatcttaacatgattggttgaaaacaataaataaaattagcaaggagtnnnnnnnnnnnnnnnnnnnnnnnnnnnnnnnnnnnnnnnnnnnnnnnnnnnnnnnnnnnnnnnnnnnnnnnnnnnnnnnnnnnnnnnnnnnnnnnnnnnnnnnnnnnnnnnnnnnnnnnnnnnnnnnnnnnnnnnnnnnnnnnnnnnnggcacctgtaaccctagttgctcgggaagctnaagggggaaaattgctttgacctggaagnggaggttnanaaagccnaaatatgcnctggtttcancctggcgacaaatgagacncatctcgaaaataaaataaaataa

SEQ ID NO: 28044 - DNA, 522 bp, Homo sapiens
  misc_feature (1)...(522): n = a,t,c or g
ggctcttctagaactagaatacaaaatttcttctgaaaactctgagatattctagactcttagttgtatattcagagaaacaaccatgtaagaaagcataaaatgagtccaagattgcatgagctcatgtttcttttgcaattaataataatagtgatgataaagaataagtaacttgctgagatctaagtgctagaggngtgccaacattattatagacattatctcctttaatgcttccagtgacctcatgtattaatattatttctgtgaggaaagtaagacttaaaatagagaactagaacccaaatccctctgattctaaagctgtaccttttcacctcaaaaacaaaataggtccaaacattttccccaaccatcacctggtaaaattcatccactaaaacttcacaggggcttagtttcatctgcattttcacctctgaaangactcccaaantattnccagagccatttgactggcaaatgaagtgccttgacttgaagtaggaaaggggtctt

SEQ ID NO: 28045 - DNA, 508 bp, Homo sapiens
  misc_feature (1)...(508): n = a,t,c or g
nnnnnnnnnnnnnnnnnnnnnnnnnnnnnnnnnnnnnnnnnnnnnnnnnnnnnnnnnnnnnnnnnnnnnnnnnnnnnnnnnnnnnnnnnnnnnnnnnnnnnnnnnnnnnnnnnnnnnnnnnnnnnnnnnnnnnnnnnnnnnnnnnnnnnnnnnnnnnnnnnnnnnnnnnnnnnnnnnnnnnnnnnnnnnnnnnnnnnnnnnnnnnnnnnnnnnnnnnnnnnnnnnnnnnnnnnnnnnnnnnnnnnnnnnnnnnnnnnnnnnnnnnnnnnnnnnnnnnnnnnnnnnnnnnnnnnnnnnnnnnnnnnnnnnnnnnnnnnnnnnnnnnnnnnnnnnnnnnnnngnaaggnctggntgaaaatggaatcatattntnaggaactattgnnagaacnaaaacccaacaccgcatatttcctnatatgggggaaaatgagcctgngatncntggcncncggaaggggaattcccactttgggacngttttggggtggggggaagggggaggggt

SEQ ID NO: 28046 - DNA, 517 bp, Homo sapiens
  misc_feature (1)...(517): n = a,t,c or g
gcaaactctcttgacaacctttccggcattatagcttcaggtaataatttgtccaactgctgggtgtgctaccatcatccccaggctcagaggggctgcctcttgcactccctaaaagctcaactaccaacttcacaaaagaggtatggaaacctaaaataacctctgcacctcttatggtggacctaagtgtctccctttcctttgaatgtataaacctcattgggctgctaaatgctttggtcaccaaaaagggtggaaaaaagagaagttggactgcctactttgaaatcccaccgggttttctcttagcagtaaagaaaaaccctaatcaaacttgggcttaggaagggctatctttttccccatgcccaaacaagcataccttttttcacagnttaactgntnacctnaactcttttgncntggggaaattggccccatngggaatccggtcctttggggacncccaaactgcatttggacaacagtacccttaagcaatttnccttttgta

SEQ ID NO: 28047 - DNA, 526 bp, Homo sapiens
  misc_feature (1)...(526): n = a,t,c or g
gttccagtatttagcctgatattaatttatatttttcctcataatctgataatacagngctagcaagatagatcacaaagtgtaaatgagtgtttctggagcatagatgggtacgctcaaatctttgtatcnnnnnnnnnnnnnnnnnnnnnnnnnnnnnnnnnnnnnnnnnnnnnnnnnnnnnnnnnnnnnnnnnnnnnnnnnnnnnnnnnnnnnnnnnnnnnnnnnnnnnnnnnnnnnnnnnnnnnnnnnnnnnnnnntccttgtatcattttttaaaattcaagtaagagaaaatgtctggcaatagttcataagctataaatgaaacctagtcttaggacccagctttatattgcctcaatcaaatattaatatctttagttcaaaatttgtatttacaaaaaacttttgggtcttgggganaccggtaatggcttctctggtgccatccaaaaatgganggnggnnntttttnccctntcctttggggtggggttaatgccaaaaaactttccaacccaat

SEQ ID NO: 28048 - DNA, 505 bp, Homo sapiens
  misc_feature (1)...(505): n = a,t,c or g
ggtcacttcagccngggngngcatcatcattggttctttttcacaggctgagcctcctgaaaacccatgaacgctggggctggggaagtgaaccctgaggnggggaccctctcttcccatcaaatcatccagctcagngnggggcgtggcaggggggtaaatgaagccagccaatgtgttaacctgtctctgtcaacctaanaatgttggccttactgacacaccttngctccatgttcaagaccagaagtagctgggatttgtttgcaaattgggtaattagtttaaaaatctgtgattacatttttaaatgaaattttcaaagtggcctatattgaggtgattcanataggtttgcgaatataccattttatattgttganaaanaacaaaaagggaatttccagatgcctanaaatcctagcaacagatttctctggatgcagntncctgganaangcnccgaataggaattccaatnggtggaatctntttcnttcaggcc

SEQ ID NO: 28049 - DNA, 526 bp, Homo sapiens
  misc_feature (1)...(526): n = a,t,c or g
ggctagatggttttggaaaatcctatagctggtacatagcaaacacacacatatatgccaaatagtctcagagtcatgtgcctttggtactgngacagacaatctggtatgtaaaaggaatatcaatactgnggtnnnnnnnnnnnnnnnnnnnnnnnnnnnnnnnnnnnnnnnnnnnnnnnnnnnnnnnnnnnnnnnnnnnnnnnnnnnnnnnnnnnnnnnnnnnnnnnnnnnnnnnnnnnnnnnnnnnnnnnnnnnnnnnnnnnnnnnnnnnnnnnnnnnnnnnnnnnnnnnnnnnnnnnnnnnnnnnnnnnnnnnnnnnnnnnnnnnnnnnnnnnnnnnnnnnnnnnnnnnnnnnnnnnnnnnnnnnnnnnnnnnnnnnnnnnnnnnnnnnnnnnnnnnnnnnnnnnnnnnnnnnnnnnnnncnaaacnaaacnaaatnaaaaccaatactgggggttaaaagcaggcggccgtgnaacacatgctggagtcttaactacttggaagnttgaggcaggaggac

SEQ ID NO: 28050 - DNA, 504 bp, Homo sapiens
  misc_feature (1)...(504): n = a,t,c or g
gcttgagaagagacttcgagctgcttttatctgcatgctgggttnggttccattatactcactggaccctctgngctctcttgggttcctcttgtcatctgcctttgtgaacaggcaacacaagtgatggccacaggccctgcctgtctctactgcctcatcacttgcccttctcaccatggtctaccgcatcatggcccccaaggtctgcctgccttcctttccagtcctcatttgtgtgnggcgtgatcttggngtggagctctgcacccagatctgtgnggctgtcctcgtaatcaggtcccacccagctcaaatgccaactcctcagaagcagctttctatgatcaccccagctggctgtttgccatatttccttcatatttttaatcactatctgaaattaacattngngtttcccttcactctagaatgtaagcatcatgagaacagggctttgcaaggttncattgcctnntggtgaataatagactccttaccttt

SEQ ID NO: 28051 - DNA, 398 bp, Homo sapiens
  misc_feature (1)...(398): n = a,t,c or g
ggagtcttacaatcacatctgtgttttctaaaggcctgacactgattggtacatggagtacagcctgaagggaacaagacttgttagaaaggaagctattgnnnnnnnnnnnnnnnnnnnnnnnnnnnnnnnnnnnnnnnnnnnnnnnnnnnnnnnnnnnnnnnnnnnnnnnnnnnnnnnnnnnnnnnnnnnnnnnnnnnnnnnnnnnnnnnnnnnnnnnnnnnnnnnnnnnnnnnnnnnnnnnnnnnnnnnnnnnnnnnnnnnnnnnnnnnnnnnnnnnnnnnnnnnnnnnnnnnnnnnnnnnnnnnnnnnnnnnnnnnnnnnnnnnnnnnnnnnnnnnnnnnnnnnnnnnnnnnnnnnnnnnnnnnnnnnnnnnnnnnnnnnnnnnnnnnaaaaaa

SEQ ID NO: 28052 - DNA, 518 bp, Homo sapiens
  misc_feature (1)...(518): n = a,t,c or g
gataaaagtatggatgcatctagaaatctgtttgnaattttaaagagagttttcaagtgacttttgatagatatagnggggaacagtacttgaagatccctttgtctggtcctaagcacagagggtcatggaatcctctttcccataaggaatcctggtaacctgagaagtgtggagattactggcaagactgtccatcagtctgcacgtactgttngggctcactcttgcgtattaagaaatttctcaatagcanaaagagaanaaaaccgtgcactaaagtaactaatgtgtgttttgtgtaccacaagttacacacaaatgcctcagaaaaggcatttcaattctaaggataaaatgaaagtaaaatatttcaatatactatgattagttttttttttcctcatcactnttacaaggngatgcctaaaaggcagaaaaattgtaaaaattggggaacaatntattggnaaatnttaaggacctgcaaaattggnggcttgcctggggnaanggct

SEQ ID NO: 28053 - DNA, 504 bp, Homo sapiens
  misc_feature (1)...(504): n = a,t,c or g
gtggaaggaatagagaactgtgacctactttcaattttctctatattccaaaatgaacaggctcctatccagtcagagtagtcacagaaacgtctagaactgagccttggaggaaaagcaggctttagatagagaaaaagacaagatcatttcatgccccaaaatgatctgagcagaggtgcaaaggtgaggaagcctccagcaagttacaggaacagggagtcaaccactgtggcttgagcaatgtagccacatggagctgccttacggagagagcctgaaaagaggctggactcacagcacagaggccctcccttaaaagccaggctactgagtatatctttcagcccagaagcggtgtggagtcactaaagtttttaagcaggagagtaaaatgatgaaagctgaattttagaaacaatatgagtctctgtcacaccaggcacgtaatcaatgaggnagctgacatcccgaatttactgccngaaagacncattttngacc

SEQ ID NO: 28054 - DNA, 502 bp, Homo sapiens
  misc_feature (1)...(502): n = a,t,c or g
gggctttcaaggnggaaggnggccagtttggctctggngagtgtcaccgagggcagctgtcgcggggtgtggaggacgtgcttcanactccgcctgtggacgtttagtcgcttccgngngggctggggcgacgcccctgttcctctgcaaggagctgtttcttcttgccggtctgagattctagaggtaactccccctgctttanagaggcccagcgtgtctctnagctgggagcccctggtaccatttgagagtaagggaatcattttaanaaacagnggtggcgcttctcccatgaacgttgaatacaacactgtcatctgatgtgcacagaggccctggacgcagcacagntgtccggccacagnccctgattccagacggggganagacgtgtgtggntcctcgccgtgcanagagcaccagtntttgcactggttcccaagtgacaatnnanctnganttgaaccttcgncnggntnccttttgccttttgggtgag

SEQ ID NO: 28055 - DNA, 509 bp, Homo sapiens
  misc_feature (1)...(509): n = a,t,c or g
gatttccaccacctgagggtgggggacaaggaggagagaactaatgtttgttttagcctctttaatgagaaactattcaaattacttttcttcattttttttctcaaatggtatgctaatgatttttgctgacctcaagatttggggctctgtgaaaagtactataccagagttaaattgcctgtgttcttttctgccattaactggctttgggttgggaaattcagataattccacttttccaactttaaaatgagatctcattcaaaacaaaattgcccacaaccatttggaatatgtgtttaaattanacagtaatgctttggaaagtggaattaaacatttcagaataatagctgttaggccgggctcaatggctcacgcctgtannnnnnnnnnnnnnnnnnnnnnnnnnnnnnnnnnnnnnnnnnnnnnnnnnnnnnnnnnnnnnnnnnnnnnnnnnnnnnnnnnnnnnnnnnntnaggcatggntgcaggtncccgtttcca

SEQ ID NO: 28056 - DNA, 518 bp, Homo sapiens
  misc_feature (1)...(518): n = a,t,c or g
gttgtattaagttttgggcttctggtatgatatgatttttaaaaagcaatctgngactaaaagaaaggtctgaagctatcactatagaaaatattcttacctgaatacacataaaattaaatattattcagcctttaaaaagagggacattctggctgggagcatggnggnnnnnnnnnnnnnnnnnnnnnnnnnnnnnnnnnnnnnnnnnnnnnnnnnnnnnnnnnnnnnnnnnnnnnnnnnnnnnnnnnnnnnnnnnnnnnnnnnnnnnnnnnnnnnnnnnnnnnnnnnnnnnnnnnnnnnnnnnnnnnnnnnnnnnnnnnnnnnnnnnnnnnnnnnnnnnnnnnnnnnnnnnnnnnnnnnnnnnnnnnnnnnnnnnnnnngtcacagaaaattttttaaaaagaaaatgaggctgggaacagtggcttacatctgnaatcctancactttggnaaggccaggnnggnggatnacctgggntcaggagtcagaccggntttccacatgnggaaacc

SEQ ID NO: 28057 - DNA, 524 bp, Homo sapiens
  misc_feature (1)...(524): n = a,t,c or g
ggggatgggggaggnggcccnacccagaccatgctggaccgcctgaagcgccngagcaatacggatgggctgcccagggngcagctatcttctccaagacagctcttctcagcactggagagngantcanagcagctgngcacgtgggtnggggagctcttcttggagctgcacaatggcacatacaccacccatgcccagatnaataagggnaaccggnaatgtgagcggatcctgcacgacgnggagctgctcagtagcctggccctggcccgcantgcccagttcctatacccagnancccagctgcancacctcnggaggctccttcttctgaaccagttccatgatgnggtgactggaagctgcatccanatggnggcagaggaagccatgtgccattntgaanacatccgtccatggaataactggttaacgcttcancngaanccttgtngcttgggagccaggacctggggcctcntaatcncaaacnttgncttgaanntgaatcgnattgatgc

SEQ ID NO: 28058 - DNA, 526 bp, Homo sapiens
  misc_feature (1)...(526): n = a,t,c or g
ggagagctagcaccatgaacttctcccctggtagaaagaagatgaatgagcaaaaccaaatattccagagactgggactaagtgtaccagagaagggctnggactcaagcaagatttcagatttgtgaccattagcatttgtcaacaaagtcacccacttcccactattgcttgcacaaaccaattaaacccagtagtggtgactgngggctccattcaaagtgagctcctaagccatgggagacactgatgtatgaggaatttctgttcttccatcacctccccccccccgccaccctcccactgccaaagaacttggaaatagtgatttccacagngactccactntgagtcccagagccaatcagtagccagcatctgctccccttcactcccaccgcaggaatngggctcttggaaactggggaacatagaactnatgancngaagaagttggacctacnngnaaataaaaatgggaacanctgttggnagnggactaaaaagccttttngaaaaattttat

SEQ ID NO: 28059 - DNA, 510 bp, Homo sapiens
  misc_feature (1)...(510): n = a,t,c or g
gtagcaccatgagcttcaataccctattagattgttggcttctcaaaaacaaaagctgcgttttagatcttccaaacatagctgtttttacacggagatgcacttatgtactgaatgtataacttaaaaaagatttaaaactatcccagcatctactgcaagttatttggcagcaaagatttaagttcacagattcgtggaattaatcctacacactgaaaggaaaagttgactgctcttcagaaaaagttcttatccctcttctaaaataaaggaaaaatgaaagaaaggtaagttgagacccaggatcattcaaggatcatatctgtcccaagtctggccaattcaaactagtatttgaacttgttttaaatcttaggtgaaaatacagttaanaattccaagacccaaatccaaaaaagtctgcttttacagtgaacgatattcttaggagcttctccatcnctttaaatttcaccaaagcnngccggcaccggngnttacgccttg

SEQ ID NO: 28060 - DNA, 523 bp, Homo sapiens
  misc_feature (1)...(523): n = a,t,c or g
gaaaagaggaaaaaaccactatcttatgtgaaacaaatcgtaaggactagaatgatggtcttcaggcttcacggtaggtcacgtanaatgctgtgaatgctgggctgcatttnggttggatngnggtttttngttttttttttttgaaacagngtntcgntgnnatccaggtaagggancaggggcncaattttgantnanagnancntttgcntcccaggtnaagngattntcntgcntaancntcccnagnccntccnnaggggntggaatnnnnnnnnnnnnnnnnnnnnnnnnnnnnnnnnnnnnnnnnnnnnnnnnnnnnnnnnnnnnnnnnnnnnnnnnnnnnnnnnnnnnnnnnnnnnnnnnnnnnnnnnnnnnnnnnnnnnnnnnnnnnnnnnnnnnnnnnnnnnnnnnnnnnnctggcctggcttggaatgngtattcattaaagtaaggggatgaaaaantaagggttnaanccttttgccaaatttttggtggggnaatttaaaaatnaggg

SEQ ID NO: 28061 - DNA, 496 bp, Homo sapiens
  misc_feature (1)...(496): n = a,t,c or g
gaggagtcacgtcaaaaatgaatttgaccntgatttaaactgctacttttcttacatgacatttaatatgtgtactttggaggcccatatgtctttaataaaatagcattaagttttaaatatgatatgaatgcagccagtttctaaattcataaccttttccacaactccaaaatgctaaccaataagggagtcatacacgcaataaaacataaaccttagaaaatagctttttattaaaatggttagacagttggcagctgggttgcaatgtaataaatacttacagcattgtgggtttatcagacgttgtttaccctgcaagcaactgggaccagacaactaattatagcccctgccacaagagcagttcaagctgagtccccctgagtatatcgaagatgcaggatagtttgtgttgaaggccctggacagggagtncaaaanatttnggctctaatccttttcaacacttaaangggggnggaccttggca

SEQ ID NO: 28062 - DNA, 495 bp, Homo sapiens
  misc_feature (1)...(495): n = a,t,c or g
ggaggctaccgnnnnnnnnnnnnnnnnnnnnnnnnnnnnnnnnnnnnnnnnnnnnnnnnnnnnnnnnnnnnnnnnnnnnnnnnnnnnnnnnnnnnnnnnnnnnnnnnnnnnnnnnnnnnnnnnnnnnnnnnnnnnnnnnnnnnnnnnnnnnnnnnnnnnnnnnnnnnnnnnnnnnnnnnnnnnnnnnnnnnnnnnnnnnnnnnnnnnnnnnnnnnnnnnnnnnnnnnnnnnnnnnnnnnnnnnnnnnnnnnnnnnnnnnnnnnnnnnnnnnnnnnnnnnnnnnnnnnnnnnnnnnnntcccatgccccattgtgttgcactaacccaagcggaggtcctgattggtctttttttttttttncttttttgaaacanancttnnctttngccntgntttgcccagnntgnanngtanngnncantggncnaaaaanncnntnttggntcaaacnnggnaannaaanggnnatccctttccaaaaaaaaaaaangggg

SEQ ID NO: 28063 - DNA, 487 bp, Homo sapiens
  misc_feature (1)...(487): n = a,t,c or g
gacgacgacctcatctccaaggtaaccaancaggccacagtggggctggaacctataggggctgcctggcagctccccaccggcagccctgaccccctcctctcttcccaccctctcaccctttagtccttccagggcagtcaggggcgtgcctacctcttcaactcagtgtgagtatctggcctcccttcttgctttccctgacctctgttgtgacctgtgacccctggcatcctgctgagactcccagagttccccggtgcaggcaggaaattgtgagcatcatttcttggatgctgaggacagacacagtgcttgagggggtgggccctgtgatggcaggaccctccctgggactaccccatgtccccacagggtgaacgtnggctgcgggccanccgangancgggtgctgctgaccggncttcatgctggcggccacatncactgnganaactgncagacccttttgggcttgaaaaattaa

SEQ ID NO: 28064 - DNA, 496 bp, Homo sapiens
  misc_feature (1)...(496): n = a,t,c or g
gacaagatctctgactatatttgtacaaaggaaaactatgcagccatgcaaaggaataagctgcagccagacacaacaatatgcgtggatctcacaaacatcacgttgtgtgaaaactactgcaacaccaaagcaatgcatatggtgtaatgcaaaggataggaagttctggaacccacaaaactaagcagtgttgcatagggatacatgcatagatggtaacagtacgaatgaaagcaaagaagtgaccgagcaaaggtcaacacagggtttggaaggcacatggggcttttgtaaggctggaagtatttagtttcttgaccatgatgctggctacacaggtatttgctttataattatgttataaacagcatgcgtatgtattatgcctttttatttgggatatattcaacaaaaaaacttaatcatgtccaatctntnttaaaaccaacaacttttctntacttnaagannactttttggcccgggnattggg

SEQ ID NO: 28065 - DNA, 485 bp, Homo sapiens
  misc_feature (1)...(485): n = a,t,c or g
gcggcacgaggttacaatcaacacagttgggacaatgagaaataannnnnnnnnnnnnnnnnnnnnnnnnnnnnnnnnnnnnnnnnnnnnnnnnnnnnnnnnnnnnnnnnnnnnnnnnnnnnnnnnnnnnnnnnnnnnnnnnnnnnnnnnnnnnnnnnnnnnnnnnnnnnnnnnnnnnnnnnnnnnnnnnnnnnnnnnnnnnnnnnnnnnnnnnnnnnnnnnnnnnnnnnnnnnnnnnnnnnnnnnnnnnnnnnntgtgatgtgtagttgggcnnnnnnnnnnnnnnnnnnnnnnnnnnnnnnnnnnnnnnnnnnnnnnnnnnnnnnnnnnnnnnnnnnnnnnnnnnnnnnnnnnnnnnnnnnnnnnnnnnnnnnnnnnnnanggttatcttggattcanaaaccctatagtgcttanacctgcagnanaccnnctaaacaagtgaccggganccttttttttngngacaatttggttttnggaa

SEQ ID NO: 28066 - DNA, 488 bp, Homo sapiens
  misc_feature (1)...(488): n = a,t,c or g
gcctngaataagccgagctaaagagaaaaagaagggggatattngatacccccaacacccaagctctgaggcccctcctcacaggtccttgcagggctggccaaaataaagcagcttcactccgttgtgctgctttccagctaatgtgtctgtttggcanaagtttccctnaaaggcagatcagtgaaataagcagaagcctcgacccccctttgtcagccagagctgctgaagtgccttgccccagggtcactttgtgtgaggggattagagagcactggggctgccaagaaacactgccgtttntacagattagcaggatgctggcttgtggccttttagcgaggctcananctgcggtggccctantctgcatgggctaaagacaagcttcatctctgccttggtncctctttctgggcacaacccccctgcttcttggntctctntgntggntctgtcncaccgnangtaagcttggcaacgtg

SEQ ID NO: 28067 - DNA, 490 bp, Homo sapiens
  misc_feature (1)...(490): n = a,t,c or g
gtcnnnnnnnnnnnnnnnnnnnnnnnnnnnnnnnnnnnnnnnnnnnnnnnnnnnnnnnnnnnnnnnnnnnnnnnnnnnnnnnnnnnnnnnnnnnnnnnnnnnnnnnnnnnnnnnnnnnnnnnnnnnnnnnnnnnnnnnnnnnnnnnnnnnnnnnnnnnnnnnnnnnnnnnnnnnnnnnnnnnnnnnnnggagaacaaacctttcagagcagtaactccttcccaaatgaacactgcagctttccaacatctaataacatccacacagcacaggagggcacacctccagccccacagagcaggcatgcagagccatcaagcacatcctggcctcactggcgtctgtggcagtctcgcctgcgccactctgtgccctntgcgctgctgctatcgggaagggacagggcatgngctttaccacagnttttgcncgggtatgcactggttacaaantcctactntgggagggaaccccgnnaaaatgatccttt

SEQ ID NO: 28068 - DNA, 491 bp, Homo sapiens
  misc_feature (1)...(491): n = a,t,c or g
gctgcctagttgcttgttgtggtatacaatatcaangcaagncacttactactttagttacattattataatcctaatgggaacacacagagacttaaaagagaatcaatagccataagagtgttcttctaatgtctttgcacaaatgagctgtttctatccctgtcacttgaatctctgaatctctggcagaaaagtaataacattgctgagccattacatgttaaatctacctttgactcactcatgaatgatttgctaaagactcagtaaaggattagtgtggagagtctggaacataacacattacaaagtggggccctgagaccactggctaccttaagccatcctgcatagaagaagaattgtaggagggtgaaaatgggaatgtaaagatcccagtcatgccctgcgtacctttggtgggattccaaaactggngtcaatnaggcaccnaagaaaaaagntttccngccagaagtgccaccttg

SEQ ID NO: 28069 - DNA, 493 bp, Homo sapiens
  misc_feature (1)...(493): n = a,t,c or g
ggtggcctaatctttcagtcctccatgtttccccatatactcattacttgacactcaaatgatggagcttcttaatctcactacctgctatcagtcctttaaaataagcacaagttttaggagcttttctggcctcgctagtctgttccaaggggcccctcctgtgccgctgcatcacagcatctaccccactcaactttcatcagtcatttacttctcttcctccttgacaagacagtgaatttcttatggcagagaatatatcctttggatttttatttctagcacctatttggcactcagtaaatgttctctcagtcagtgaacatgtgaagcaatgatgggcaaggtatccaagtgtggcaagaactgaccaaagggaaaaagcaaggatccacgatgtcagggtctacaaaacngaaaagancngtggtagctggaantgaggctttgaatgaactataaaactggangggggataccatntaagaaa

SEQ ID NO: 28070 - DNA, 478 bp, Homo sapiens
  misc_feature (1)...(478): n = a,t,c or g
gattttgcccagagagatccggaaactggnagaacggagaaaacaagtcaaacagctaatgaaacagcaagacttaaatccagaccttattcttcagtatgacattcgacagaaggctttgaagctcacagcgaacagtatgtatggttgcctgggattttcctatagcagattttacgccaaaccactggctgccttggtgacatacaaaggaagggagattttgatgcatacgaaagagatggtacaaaagatgaatcttgaagttatttatggagatacagattcaattatgataaacaccaatagcaccaatctggaagaagtatttaagttgggaaacaaggtaaaaagtgaagtgaataagttgtcaaactgnttgaaatagacattgatggggntttcaagnctntgntactgntgaaaaaaaagaantccctgctntgggtggtgagcccangtnntgactggggaaaaa

SEQ ID NO: 28071 - DNA, 488 bp, Homo sapiens
  misc_feature (1)...(488): n = a,t,c or g
gatagggagctggctaccagcgttgagtcccctgtnaagccaaaccccctaaaggtctccacactgctgtttaacggcacacttgacaatggcttcagcagcacgcttgacaatgatgtgggaggaggtcacatgccctatctgcctggaccccttcgtggagcctgtgagcatcgagtgtggccacagnttctgccaggaatgcatctctcaggttgggaaaggtgggggcagcgtntgncctgtgtgccggcagcgctttntgctnaagaatctccggcccaatcgacagctagccaacatggtgaacaaccttaaagaaatcagccaggaggccananagggcacacagggggaacggtgtgcagtgcatggagagagacttnacctgttctgnganaaaaatgggaaaggcctttgctgggtatgtgcccantctnggaaacaccgngnccanccatggccctnttnaggaggntggacaagaa

SEQ ID NO: 28072 - DNA, 489 bp, Homo sapiens
  misc_feature (1)...(489): n = a,t,c or g
gnnnnnnnnnnnnnnnnnnnnnnnnnnnnnnnnnnnnnnnnnnnnnnnnnngagcctactctaattctttaatctatgtagtagttgcttatatattaaacgtgtgaaaatcgtatgaaatcattgttaattcatactgaaatattcacttacctctgatctttaagccaagctaataggtttcagcctgtttctgacctcaggagcctggacccacctatgctaagataaaagccatgatgactgtggcaacagtgttgctgacattgtactgaccacattgctgtaagtgtctccatggcacatctgcttctgtagattcagtcttactctgcttttagagactttcccatatacactaaaatgtacttgcctgttagtatgtttgatattcttcaaagggaganaattggcctggcatggnggntnanacctgnaattccagcacttttggaggnccagcaagccnntaccttngggnanaaaatt

SEQ ID NO: 28073 - DNA, 495 bp, Homo sapiens
  misc_feature (1)...(495): n = a,t,c or g
gaccttgtctgtgtataacagcggccagaggaatttctctaaaacacttatctcctcatgactctcatctgcttgaagttactctgtggctctccattgccctccaagaaaagcctaagccctgtcccaggtctcctggtgtctctcacacctcacccatccccacttctgtgcccaggcagcccttccccgaagcctcccctcctcgcccctccaggggtgctgtgggtgtcacctcctgatccctgacactcaggggagtcactggctccctgttctgtagtccattcccctctagtagaacagtcggctcctgttgggcccccagtgagttcctctctgggtccccagggctggcccagggtgggtgtcacagtgaacatggagtgagtgagtgantgantgagtgaatgactngaggatggggaaaccttgaacattcttggctngnaangctttaagccccanancgcacaantggnncaaggctaacac

SEQ ID NO: 28074 - DNA, 483 bp, Homo sapiens
  misc_feature (1)...(483): n = a,t,c or g
gcggcnnnnnnnnnnnnnnnnnnnnnnnnnnnnnnnnnnnnnnnnnnnnnnnnnnnnnnnnnnnnnnnnnnnnnnnnnnnnnnnnnnnnnnnnnnnnnnnnnnnnnnnnnnnnnnnnnnnnnnnnnnnnnnnnnnnnnnnnnnnnnnnnnnnnnnnnnnnnnnnnnnnnnnnnnnnnnnnnnnnnnnnnnnnnnnnnnnnnnnnnnnnnnnnnagtatatattcattaaattttagtagtagctgagaaggggaaaagaaatagttcttgtgtccttttactaccgttagtatagattatgattggattttcaaattgccttcattttcccagcttaacctgttgnaaaccagctttcttggactttgncttgtccangggtctggggctccttgccaaacagtctcagggnctggttgncaaataccactggnacttnataacctgnttcttgggctgnttctcttntaagnggctctggtg

SEQ ID NO: 28075 - DNA, 527 bp, Homo sapiens
  misc_feature (1)...(527): n = a,t,c or g
gcaaaaagcgcaaaacctacaaagccggcagcctcggatcttcctgttcctgctgaaggtgtacgcaacatcaagagtatgtgggagaaagggaatgtgttttcatcccccactgcagcaggcacaccaaataaggaaactgctggcttgaaggtaggggtttctagccgcatcaatgaatggctaactaaaaccccagatggaaacaagtcacctgctcccaaaccttctgacttgagaccaggagacgtatccagcaagcggaacctctgggaaaagcaatctgtggataaggtcacttcccccactaaggtttgagacagttccagaaagaacccaagctcaagacgcaggacgagctcagttgtagagggctaattcgctctgttttgnatttatgttgatttactaaattgggttcattatcttttatttttcaatatcccagtaaacccatgtatattatcctatatttaataatcncggctanagatgtcatggnaaaagtctgcntttcacangaacct

SEQ ID NO: 28076 - DNA, 517 bp, Homo sapiens
  misc_feature (1)...(517): n = a,t,c or g
ggccctttctgaacctctggccgtctggatgctccactgngcttgccaagatgaagtgcgtcttggtggccactgagggcgcanaggtcctcttctactggacagatcaggagtttgaagagagnctccggctgaagttcgggcagncagagaatgaggaagaagagctccctgccctggaggaccagctcancaccctcctagccccggtcatcatctcctccatgacgatgctggagaagctctcggacacctacacctgcttctccacggaaaatggcaacttcctgtatgtccttcacctgtttggagaatgcctgtncattgccatcaatggtgaccacnccgagagcgagggggacctgcggcggaagctgtatgtgctcaagtcctgtttgaangtgcactttgggctgntgactgtggacggcatcttatncgaaaggagctctggnccccagacctgncgcancgtgtncagctgngggagcactttcanancctgctggggcctaca

SEQ ID NO: 28077 - DNA, 515 bp, Homo sapiens
  misc_feature (1)...(515): n = a,t,c or g
gttaactagacagagacataggatgaggactctgggctccaggagactttattaaagaggaaccccgaggaggtcctctttggggcttttctatttaggtcaatagagccttcaatgacttctgtccctgaaacaggagcagtttggctcttgtactgagattgtaaaagatcttgctcctgagacattcattcatcccaccttaattcttctctttgtttctgttctgtaaggttctgcttttgtgaattagaggtaatctattctctattatctattatcattaaaccaaagaagattttttccatctgggccatgggtctttcanaatttttcagctggcctggtatcttagagtcatcttcctactctttcgttgaggggatcatttgaaaatattagttctctnnnnnnnnnnnnnnnnnnnnnnnnnnnnnnnnnnnnnnnnnnnnnnnnnnnnnnnnnnnnnnnnnnnnnnnnnnnnnnnnnnnnnnnnnnnanccacatggngaacc

SEQ ID NO: 28078 - DNA, 507 bp, Homo sapiens
  misc_feature (1)...(507): n = a,t,c or g
ggcttactgcgccttcaacttctgggctcaagngannnnnnnnnnnnnnnnnnnnnnnnnnnnnnnnnnnnnnnnnnnnnnnnncacccctggctaatttttaatttttttgtanagatggagtctcgcagtattactcaggctagatctcantgtttttaatttttatgttcagacaancggatttttacaaattgtangagatagtaactaagttttntgaaactggaggaagtttcatttgaaatgcacttgttctgagtatttaagcttaccccagaatgattagatttttaaaaannnnnnnnnnnnnnnnnnnnnnnnnnnnnnnnnnnnnnnnnnnnnnnnnnnnnnnnnnnnnnnnnnnnnnnnnnnnnnnnnnnnnnnnnnnnnnnnnncaggctcaaacagttctctcaccgtacctnctgagtagctgggacacaggtgtctgctgcctgnctgattaatntttgganatttttgtatananacanggntttgccg

SEQ ID NO: 28079 - DNA, 508 bp, Homo sapiens
  misc_feature (1)...(508): n = a,t,c or g
gaagtcaaggtaattgactaaatgcaatggtgttctggatatgctcttgcttctgtgccatttaagatctattaatctctgtatcccgtctcccttttgctgaagaagcaaactatttttggtttggctcttctggccttgaatcttacattaggtggtcctgtgctctaagaagcttcctgacatcctgagaggtaatgtcttccctcagaagcacttcttaagtcttttttctagtttcaagcattgcttgcaatgtctggcagtggctgcttgctgcttttaagccttttccagctgatttgagcccttcagcctggtcggcttaactcacatctctaaaagcttctactttaccacaggagttatctaagcatgcagattacttatcgaagttggttctcatgctaaacttttgagacttggccttncatttgagaacagtgagaacaacttggatttttctaagcctnctgggatgtggataagtaagacntgtnctgaacag

SEQ ID NO: 28080 - DNA, 506 bp, Homo sapiens
  misc_feature (1)...(506): n = a,t,c or g
ggttattactggtcttatatttgaaggtgcaaggggtctngngctgctcattactggttatcttgagcatttcataactgctgcctcctcctaaatcctgngttccaaccgctactgctggcaatgcccagcctccattgtggatgcggggaattgtgttcagcatgcttgcttctgccacggcactaaagcctaacttgcttaggatcttgctgtacttggagagagcatccattcgctgagcctagcagccaggctnttgtgactccctgggaagtgggtgaanacctggctcctggctgcagcagtgaggaggcaggccctccaggtgaagacttctcacaatggagggaaggcagttttctcaaaggaaattgagtgctattatgtactctgcttcctactttctctttcagggtgggaatctggtaagcctcctctctctcttgctctgnaaccacagaacactttnttttttttnggggcccaaatttgcccccctggaa

SEQ ID NO: 28081 - DNA, 507 bp, Homo sapiens
  misc_feature (1)...(507): n = a,t,c or g
gggaggcagtgacagtgctggaggatttggagagngaacttgatgaccctggacaaccggtttctctccgtcgacgaaaacgggaagtactagtagaagacatggtatctcaagaagaagctcagggattaccaagttctgagcttgatgctgtggagaaccagctcaagtgggcatcctgggagctccattccctaaggcactgtgatgatgatggtaggactgaaaatggagcactagctccaaagcaggagcttccttcagcattagaatcccatgaagttcctggcactctcagtatgggtgttcctcaaatttttaaatatggagaaacctgtttccccaagggcaggtttgaaagaaagagaaatccctctcgaaagaaacaacatatatgtgatgaatgtggaaaacacttcagtcagggctcagcccttattcttcatcaaagaattcacagtggggagaaaccntatggatgnggtgaatgtnggaaaancnttcacc

SEQ ID NO: 28082 - DNA, 490 bp, Homo sapiens
  misc_feature (1)...(490): n = a,t,c or g
ggtagaattatggttactggaggctgaggaggggacngggaaaggcataanaagaggagatttaagggattgattaatgaannnnnnnnnnnnnnnnnnnnnnnnnnnnnnnnnnnnnnnnnnnnnnnnnnnnnnnnnnnnnnnnnnnnnntaatttattgtatattttcaagtanctggaananaggatnnnnnnnnnnnnnnnnnnnnnnnnnnnnnnnnnnnnnnnnnnnnnnnnnnnnnnnnnnnnnnnnnnnnnnnnnnnnnnnnnnnnnnnntgtncaaaaatatcactttgccttcatnaatatgtacantnattactatcaattttangacanatgataaaacnacttgantcatagtantgaaagantactttgccanaatgaangtgtcaaaattgnntagcatataccctatgggngnntgnntgagantgggctncgaaaantttctaaggnganttaataacccgtaaaacngtttt

SEQ ID NO: 28083 - DNA, 494 bp, Homo sapiens
  misc_feature (1)...(494): n = a,t,c or g
gaacacagagtactggaagcagagctgctgtccctgngagggaagagttcccatgaactcccaatctctgcctgaatcccagctgtgctcagcagagactggggggttttgaagtggccctgggaggctgtgctctggaaacaccatatattttggagagggaagttggctcactgttgtanaggacctgaacaaggtgttcccacccgaggtcgntgtgtttgagccatcagaagcagagatctcccacacccaaaaggccacactggtgtgcctggccacaggcttcttccctgaccacgtggagctgagctggtgggtgaatgggaaggaggtgcacagtggggtcagcacggacccgcagcccctcaaggagcagcccgccctcangactccagatctgcctgacaaccgcctgagggtctcggncaccttntggcaaaaccccggaacactttcgttgcaagtcaagtntacggcttttgggaaatgaa

SEQ ID NO: 28084 - DNA, 499 bp, Homo sapiens
  misc_feature (1)...(499): n = a,t,c or g
gttttatttaacctaacatattgaaagtattatttcggntacnnnnnnnnnnnnnnnnnnnnnnnnnnnnnnnnnnnnnnnnnnnnnnnnnnnnnnnnnnnnnnnnnnnnnnnnnnnnnnnnnnnnnnnnnnnnnnnnnnnnnnnnnnnnnnnnnnnnnnnnnnnnnnnnnnnnnnnnnnnnntacgtgtgcgcacacacacacacacacagagtttcagcttgtaattaataaaaactattaatgannnnnnnnnnnnnnnnnnnnnnnnnnnnnnnnnnnnnnnnnnnnnnnnnnnnnnnnnnnnnnnnnnnnnnnnnnnnnnnnnnnnnnnnnnnnnnnnnnnnnnnnnnnnnnnnnnnnnnnnnnnnnnnnnnnnnnnnnnnnnttagcccggatatagtggcatgtgcttgntgcccactcctgagaggctcaagtggganaatcgcttcacctgggaagtggaggttcantgaacccaaaatcganccactgc

SEQ ID NO: 28085 - DNA, 496 bp, Homo sapiens
  misc_feature (1)...(496): n = a,t,c or g
gctccaaggaccatgaataagggaagagaagcaaacgttatccagaaattcaggagacccctccccacaccttacatcagaagagaaacctcaaaaggagaatagttaggcagaatagaaaacagtcatgtcaaatagcattggcctaaaatccacatagtagaacattggataaatgtataatctttcttgcccagatcttcctggaaacactatctgttgcaaaactttctcctatcaactgtttttggttaatagttcagggatttggtttagtaccttggagagctatatatccaagcattttgcttgtcaaaactatttgatagctgtatttgtaaaagcagtggctcaaatgtttttagaagagattttcnnnnnnnnnnnnnnnnnnnnnnnnnnnnnnnnnnnnnnnnnnnnnnnnnnnnnnnnnnnnnnnnnnnnnnnnnnnnnnnnnnnnnnntggccacattgnggaacctggntttctaaaaaa

SEQ ID NO: 28086 - DNA, 501 bp, Homo sapiens
  misc_feature (1)...(501): n = a,t,c or g
gatttggaaatgtgaacatttacttacaaataacccattggttataaaagaaatcacaatggaagttaaaaatactctgtactgataatgatgaaaatgctataccagaatgtattgaatgtggtggttggcaaaaagttacagatttacatacatgaagaaaggctgaacattaattactaaatctttactaagaatccaatttaagttagaaaatgaaccacagaatacactttaagaaatgagaatggtgnnnnnnnnnnnnnnnnnnnnnnnnnnnnnnnnnnnnnnnnnnnnnnnnnnnnnnnnnnnnnnnnnnnnnnnnnnnnnnnnnnnnnnnnnnnnnnnnnnnnnnnnnnnnnnnnnnnnnnnnnnnnnnnnnnnnnnnnnnnnnnacctgtactcccagctacttgggaggcccgaggtaggaggatcagttgagcctgggaaggtgaagctncantgaaccnaaatagtggcaattgacttcaancttgg

SEQ ID NO: 28087 - DNA, 504 bp, Homo sapiens
  misc_feature (1)...(504): n = a,t,c or g
gtatacatcttggggcattgaaactcttccagcttatngaacttaattaggaaatggagtgggggaagataggcagtttcctgtccgtcttcaacccccagtattctttgcttcttggcctccacagagtagcagaagccaacagttaatgttaggttccctgatgctccctggagaggagggacttcatctgtttgcttagctaacattttgaagtttggagtgtttttgatgtttctttanttcccctttgctttgttattttcagctgattaattatgaatagtgagctaaattcttagtagaaagaacaaagcttataaataaatagacctatcacgtttttctttagtcctaaaattttggacaaatgtaatatcagcatattaagtgatattgaatgcttggccaagataaatatttaatagaccaaattgacaatacaatgacattttttgagactttcangtgnaattggngctgnttttaaagggcttanccttt

SEQ ID NO: 28088 - DNA, 502 bp, Homo sapiens
  misc_feature (1)...(502): n = a,t,c or g
ggaagaaactgaaactcatttgacacggagcggggtangttgtggaaaggagaacataattgggcagaggggagtggatgacagaggtttcttatttttgaattgagccaagaaagcattccttctaagtggggccagttggcactgttactgctattttagttcaggcttctccttcctactgaccagtcaattgtattaagtgtttgatgtgagtttgaactgaggtctcaggaggggagggagcgagggagggtggtggtggaaacagctggtgccttcatcaagctatctcaattactcttcagagtgtttgggggtgggggttggtggcacaggaattagatgtgtgttagcagagtctcagcaactcttatgtagtgggtttgaattctnaggcactcttaatgctatgtgggatgttgctagttggaatgtagctaaacctttcccagtcacattctttntggctnggcttcctggaatcnttnaacantgggcc

SEQ ID NO: 28089 - DNA, 499 bp, Homo sapiens
  misc_feature (1)...(499): n = a,t,c or g
gactacatgtacttgtagggtgtcttaaagccagttactgngagttttgttttgcttgagggatgattctttgtgactcctgggttctgtaaaggagttatgtgataaatacattttaccccgttgctggaacaatctgtgggtgatggttaanaactcaggtaggactaaatttgaaaacataaaataaatgttttgatactaagaaacaagaagaaactttttttttttgnaacatggnatntgaaatcctaaaatancaaaaaagnggcncatgnnnnnnnnnnnnnnnnnnnnnnnnnnnnnnnnnnnnnnnnnnnnnnnnnnnnnnnnnnnnnnnnnnnnnnnnnnnnnnnnnnnnnnnnnnnnnnnnnnnnnnnnnnnnnnnnnnnnnnnnnnnnnnnnnnnnnnnnnnnnnnnnnnnnnnnnnnnnnnnnnnnnnnnnnnnnnnnnnnnnnnnnnnnnnnnnnnnnnnnnnnnnnnnnnnnnnnnnnnntca

SEQ ID NO: 28090 - DNA, 505 bp, Homo sapiens
  misc_feature (1)...(505): n = a,t,c or g
gagaaacaaccttgctgttggaagatcaattngggggggtcanacaagatctaggaccacaagctcctctccacagcatcatcaaatgagcccctatgaagnttcttgcatttcaccccttaggtaaggtccaaactgggcatganatggacgtcacggggtggggaccgtgtgccatcaggagactgcagcaaatcttgggccgaatcccggcaagcccctgggccaggcctccctcaggctgnaaaggccgccatttgctgactttgtcaaagccttccacgttccacgcttaacaagcacagaaactcantatttgtgcacaattaaaacaaaattcaagccgaagtttattctgtgaacgtcctttcctttagtgatgtgactgctacacccggcanacganaaccttgtggtcacaaaaatgctttgctgcaatnnngcaaacccaggacttaanaaagcccaaaagttctatactcgggnaccggtnctaccttgacat

SEQ ID NO: 28091 - DNA, 505 bp, Homo sapiens
  misc_feature (1)...(505): n = a,t,c or g
ggaaagaaaaaccactgaagcttctggaggatgtgtggggatggtgcaacaatttggaaatctcaaagtccctaagcatatggngcttttattcccatggtatattttaattgatgtacttgggggctgcatgggaagttagggagctttgaaaagtcagacagaaatctccgatagtacagaattatttcagagacaaagagctgcttgaggaagagaatctgcttcaaatacatggccagtctcttcatcaagacaccaaatttggaaatggtatagggcagaaggctgaagaacagaataaatctcccatagtttaggaagtgaaggagaaagaggcccaactaggctctatccagctcccgattctgggcatttgaaatcaaaggtagggttgagtctaattaaaaatgcaatttaggggnnnnnnnnnnnnnnnnnnnnnnnnnnnnnncacttaaggagcttaaaaccggccgattccaagnccaggaaatcgaaattt

SEQ ID NO: 28092 - DNA, 494 bp, Homo sapiens
  misc_feature (1)...(494): n = a,t,c or g
gcggcacgagctgtatgatttgaatgatttgaaaggggtggggccgagcaaggtggagaccagccatgtgcagactcacatgggcggtccaggcgggagccgttgttggccacagcagtgatacagagatcatggcccaaggggaagcgtccacaatgcaggatggctggccaggggtagctgtagcaggccatgatgggctcgcagctggcctgcatggcctcgcacaggctgtaggaggggtanatgaccctttgggggaaagggtcggnggctgcaccgccacaggctgagcacccagatcagctggaacctctccatgttcctacccctgtctcgtggcctggaactctctggttgctgggcaacgacactggtcgcctagcaacagccccgtagcctgctttccacttgcccacatctcaccctagctctgcctcttcattccggcctccacttangngcctggcagcttccagtgacctttccttcgg

SEQ ID NO: 28093 - DNA, 500 bp, Homo sapiens
gccattgtgactgcagtgtggagaatggattggagagggaaagcataaatgaaaggtaacagtgtttgtagacatgacccagtgagagctattggtggcctggcctcgaagaggagatgggatggagctagcaaagatagggattcaggaaatatttaacccatgccttctgtctcagggcaggagtgattttcaacccttgaaaatgagggcttgtcctgcctgtctgccatttggagtcttcatctatgttgtacatcatgttgaaaagatgtgtattagcttcctactaatcaaagcatgtttgtggatatggacaccattacaggtttctcatgcttcccttggctcccagacactgggctaaagtgttggattggttgtgcagtatccatacttgtcaactagctatttgcatttattttgcaccctagaggccaaaaatgttagagcagaatgattccttaagtttatccatccacacccatgttagcatgaaa

SEQ ID NO: 28094 - DNA, 511 bp, Homo sapiens
  misc_feature (1)...(511): n = a,t,c or g
gcgttgctaggcttagcgggtctggctgctgggggcccgagcagcacgctcggagccgccgcgcgccaaagcgggaatctgggaggcgagcagctctgcagttaatgcacgtattttaaactcccgggcctgcggacgctatgcacaggaagcacctccaggagattccagacctgagtagcaacgttgccaccagcttcacgtggggatgggattccagcaagacttctgaactgctgtcaggcatgggggtctccgccctggagaaagaggagcccgacagtgagaacatcccccaggaactgctctcaaacctgggccacccggagagccccccacggaaacggctgaagagcaaagggagtgacaaagactttgtgattgtccgcaggcctaagctaaatcgagagaactttccaggtggttcatgggactcctttcggatgactgctttgggancttttctggtgggcttcctgaactgnttaagggtnttggggttgaaaaaggg

SEQ ID NO: 28095 - DNA, 501 bp, Homo sapiens
  misc_feature (1)...(501): n = a,t,c or g
gaataaacaaggaaataattccagaaagngacagttatcatgaagaaaaatacattgttgtgttggaatatgtctgcgtanaaaaggtggctggggagggcctntcggaggggctgacttttgagcagtctcagatgaccaaatggagcagccttgggaggttttccaggccacatgggaccagcaagtataaaggccctggggggactgagcctgctgatttttgaaggtcaggcaccaggccactggaggcatgtgggggccatgggaggcttcttggggcggggaggtgacatggctggactcagggactcaggtttccctagggtccctctggctgccgtgaagcgagcaggggatgatgggtccaggcaggaggtgatggtggctggccccgcgtggggtcgggggcagtgggccaattgcaggtaggttttgaggcaaaacttgcccgntttgctgatgcttaagtaaaaagnccnnggaagccnagtgcnatgg

SEQ ID NO: 28096 - DNA, 517 bp, Homo sapiens
  misc_feature (1)...(517): n = a,t,c or g
ggtgggatttttggtggaaaagcagtatacattcagaatgcacctctacttatgatggggctacttcctggtaaacccattgtaatgtgcaaattacgggtttatcaggaggtgaccccatcggtaatggagaagtgctgggaggtaaatattagaaatggaagtatctaaatgagtaagaaacagcatgggagcataatttggccaaaatcaaacagaactaaagtagtcatgtcggtaagaatttgggactgcaggccagttacgatagctctcacctgtannnnnnnnnnnnnnnnnnnnnnnnnnnnnnnnnnnnnnnnnnnnnncacagctgcatcttaaccttacctttgcctctgcctctcaagctggtacctcctaatttacatcctaagagtggaaccatgtgacaaggactggagtgccattggctgtggactgtcaagcagggaagttccagaacactntttgnattnaagggccanccaangnganaattncgtcctttttaatc

SEQ ID NO: 28097 - DNA, 498 bp, Homo sapiens
  misc_feature (1)...(498): n = a,t,c or g
gcctgatcccgcaaatgctgtggaactggaaagcaagatgagtccatttaattaggtttcatattaatactaccacattgnaaataaaaatctaactgtagcaaaggcaactgctaagtaactgacagtatggactggtttgcagcggttgtcagggttcccatgatgctgctggtgaatgtacctggggagggtgcagggaagttacctcaaattctgggacaaaccacattatcataaggcatgcaaggtacatgtcgtttccttgacgctttcanagtttgtgatttttacctctgagaagatataaaactacagtttggttatacctatcaatcaccttttgtgataaggtaggtaaggaatcccaacttatattgngtttgtttctaaagaactctatctagactaatggagtttaaaactaggtccttcttaaaaatacctaaaagnctactctgtcagttatatattgggacaaaccttgaaggtaaatct

SEQ ID NO: 28098 - DNA, 502 bp, Homo sapiens
  misc_feature (1)...(502): n = a,t,c or g
gctggggatggacctttttcaacaaactcacacaggactaatttaagaatattcatgtgtatgctcagactgtttgtattctcatcagcttgggattggtggcagactagggaatcagtgaggtcttttcatggcactttgattggagactgagctttcaatactttaccatctccttttgngatcaaacaatgatctgactttgcctcacctttttaaggaaaagtcttcaggaataccttgccctctacctgatttctctttataacatcctgttagtgaagttggccgttggtggtacacaggccctttggcctgctctcctggtagcttgcacacagtgttgctgggtactgggagaagtgattaccagccatagtgtaggtatatatgaacctggcctggtttgacacagaagaagattttgcaggggactagatggnattaagctcattcaggntaacccaggagtccaggaatattggtgcaaaaaggnccttgg

SEQ ID NO: 28099 - DNA, 509 bp, Homo sapiens
  misc_feature (1)...(509): n = a,t,c or g
gctggcattctggtctgataatttttgctttgatgtagttcaaattatcaatctttttctgcatggtttctagattttgcatattttctggatgtatacatacatgacattagcaaggctttatatctcaaatgcataattaacaagtgaaataccctagtttcttttctcccctgtaacctggaatcagataatagtgttgctatactgagttcacattggcttatgctgacctagacttcagataggcaactgtctttgattaataaaacatggaagacaaaaattattatgtgtaaatgcaatttggtagggaagaatttcaaagcatggaggagggaggaagtatatattaaaaaaggaatcttggtnnnnnnnnnnnnnnnnnnnnnnnnnnnnnnnnnnnnnnnnnnnnnnnnnnnnnnnnnnnnnnnnnnnnnnnnnnnnnnnnnnnnnnnntggaacattgggaaaanccctttttnccaaaaatccacctttacccggct

SEQ ID NO: 28100 - DNA, 497 bp, Homo sapiens
  misc_feature (1)...(497): n = a,t,c or g
ggcagcagcttagccgggattctcttcngagtgggtgccaccccggcttcggacccttgggcgtanagttgcggaagaacctggccgcanaatggtggacctcggtggtggtgttcagggagcaggtattcccggnggacgccctccaccacaaaccaggccctttgctacccggggacagtgccttcaggttagtttctgcagaaactctacgcgaaatcttgcaagacaaagagctgagtaaggaacagctagtaacatttcttgagaacgtattaaaaacttctgggaaactacgggagaaccttnttcacggtgccttggaacactatgttaattgcctggatctggtaaacaagaggctaccttatggccttgctcagattgnagtgngttttcatcctgnttttgacactaagcagatacnaaatggngttaaaaggnataaaaagnggcaaataacttggccttggtttaaataggcnaaancnncattt

SEQ ID NO: 28101 - DNA, 495 bp, Homo sapiens
  misc_feature (1)...(495): n = a,t,c or g
gcggcacgagcagagctgaaaattaggggtttatcangngttttgtgaaaatgngttctttcctgtgcatgcatggggctttctcaattccccagtatacctgagtgcttttgaataccctagtttactagaggaaattttctctccaacttttttcccccaggatttagatggnnnnnnnnnnnnnnnnnnnnnnnnnnnnnnnnnnnnnnnnnnnnnnnnnnnnnnnnnnnnnnnnnnnnnnnnnnnnnnnnnnnnnnnnnnnnnnnnnnnnnnnnnnnnnnnnnnnnnnnnnnnnnnnnnnnnnnnnnnnnnnnnnnnnnnnnnnnnnnnnnnnnnnnnnnnnnnnnnnnnnnnnnnnnnnnnnnnnnnnnnnnnnnnnnnnnnnnnnnnnnnnnnnnnnnnnnnnnnnnnnnnnntcatggttttctgcctgctttatattcgctggcaactgattaaaatgngcccccngaataatgggggatctggctt

SEQ ID NO: 28102 - DNA, 506 bp, Homo sapiens
  misc_feature (1)...(506): n = a,t,c or g
gagaactgctggcacctggacgccgccatgcggccctccttcctacagctccgagagcagcttgagcacatcaaaacccacgagctgcacctgtgacggctggcctccgcctgggtcatgggcctgtggggactgaacctggaagatcatggacctggtgcccctgctcactgggcccgagcctgaactgagccccagcgggctggcgggcctttttcctgcgtcccagcctgcacccctccggccccgtctctcttggacccacctgtggggcctggggagcccactgaggggccagggaggaaggaggccacggagcgggaggcagcgccccaccacgtcgggcttccctggcctcccgcactcgccttcttagagttttattcctttccttttttgagantttttttccgnggnttattttttattatttttcaagaaaaggngaaagaaagtcccnnccaatnggcantttaccagaagtccnaacnttattttcccngccg

SEQ ID NO: 28103 - DNA, 508 bp, Homo sapiens
  misc_feature (1)...(508): n = a,t,c or g
gaactggtactgcttttcttttacctgaggaatttatccaatttcattatatttttggttctcctccctggcacacccactaggaacttctttagggtcaagtataacctaacaggtaagactggcagaagtccaaataccagacataggagatttaccccttctaatcactttgctaaaaagctaattctataatgtgtccaagccattccacaagtgattcctatgttcaacaaaataaataaatggttttacacattaaacttttttctagtatctaatttgatttacaaactgtcaaagaaattttacatctcaccaattaaacactgacattattaggacaattctggcctgttgcaccaaactaaataattagtaatagcaaatatcttcctctcagcagacagaacacctagcatagggccagcattctacttcataggctctgatggcaaaaaatnagccctggctggccgngcntacnttcnnattacnggggangggc

SEQ ID NO: 28104 - DNA, 497 bp, Homo sapiens
  misc_feature (1)...(497): n = a,t,c or g
ggatgggggtgaaggctgtgtccaagaaggccacagagcggaggtgacatttgagctctcctttctactctggggaaacccacattcctcaccagtggggacttggcagggaaggccaccactcctgccccgttgctcagcagcaccctctaggggtggggctctgaagcctgtgcgtccttcanaggcaccatggggaccagagggtgtccggcagcagggccctttccagaagccaaggaacagtaggagagaatgtgcaggcagagggagcctgtgcggaaggggtagctgtgcctgtcaaatctgttccctgctcctcccaggctctgcaggccagagagatagatgcattaggcccagtccttgtcctcagacagccaggcgtgcgggagtgtggcggacggccccttcacagcttctggcaggaaacagaacccanaanttaagggtggggaaaatttgncncgggatggnaaatgnggnaataaacccgg

SEQ ID NO: 28105 - DNA, 497 bp, Homo sapiens
  misc_feature (1)...(497): n = a,t,c or g
gaatgtaaatacatataacatttggcttatagttttatgggattcatgtacctctgaagccagtccatgaattcctggntcagaattcctccttaggaaatcatacccagacagccatcaccatcacaccttgtcatgaataattactgnctcttttagcagtctttattacgattgngtctctttcttgtcatttccttgagtttctttcatacttaggaagcaaatagctgacctgtctatgaataaagaaagcgtttttaataatgattaaggtaaaactttactggtctgtaaagataatagacaagtatgtgaattaagccagcaaccaagaaacagctacttgagggagaacctgacattcctgaatttgagttgagcaagtgagttgggagtctgcagggccatcctcagacttggtttgctagaaggactcacaggactcagaaaaactgttacnagtcatnggtataggggatttcagcaaaccctac

SEQ ID NO: 28106 - DNA, 517 bp, Homo sapiens
  misc_feature (1)...(517): n = a,t,c or g
gctggaaggtaaaataaattatgctagtaaagtangggntcttcaaaccnnaataaaagagtaaaagacacatgaggtttcttttccaggtttccctaaccagggcctagagtgctattgtgacctcctcctcaaacacaagcccaggttgaaaaccagatgccacacatatttcagcttttactatcaacactgctgaagaggccataggtatatcatggggtgggagctctttggtgtcagatacctggtttaacagcaccacttaactggagcaaatcacttagtttctcatctgtacaactggcataatggcatccacagctctgtgctgtgaggattcacacagcatacaacatggcaatcagtcaacagcagcacatcacaaacaaatcctacatagatgtgaaacatacaaaacagtatctcttacaaaatactcntancttatcanaattngggnccntttggaaancctggacntnaacttgcccagncntnatnantccgtnggttc

SEQ ID NO: 28107 - DNA, 498 bp, Homo sapiens
  misc_feature (1)...(498): n = a,t,c or g
ggtttatgagtttatcttcctnactaggctgagtnccttgagggcacaaatcatgtctaatttaactgtatattccctacatggaatatactgcctgacatatagcaggggtccagtaaagttctgttgaatttaggcaaagtcattaactcaaatttccctttttcatgtggttgctgtatatacagtatattttgattttggcaaaatatttggctgagtgatatctgaaggagattcagtgggctgctttaaatggataaatatcattgttgagtggaagaggtaggttaagtagtatgtgtggtcagaattcccttattaaacaacaaaaaaggcaactgatttttatgcataaaagagcttgtttcagccatatgagctcttaaaggatgacaaattaaaacagtagtgnttcatcgggtctatctatagaatggcancagttataaggaaggatattctaagggtanngaaaatnngggnaatggtnncctc

SEQ ID NO: 28108 - DNA, 511 bp, Homo sapiens
  misc_feature (1)...(511): n = a,t,c or g
gctggtattagaacctatgaatctggcttcattcgggtcaccacagcnggatggcggctgcctgtgctgctgcctggctctgagatgagctgctcttctgcagagttaccccactaaagggaattgagccaagcccctcacagcatgctagaagtgagcagtcatcttatcagcccagcctgcctggccccagacactggttttgtgtctctagctggggccagctaccctcgggaagggtatgccatgggcttggttgcaagcccagggtctggaaaaccccttggttgcctgaaattgcagtgacctgctttgcttacataccactgtctgcttctgagctaacatgtgtgaccatctgacactcccatgagtcctggggacacagcctccactctggagctggcgaagtacaccangggaacagacgccccactntggaattnaccaagggnccaggggaattaaagcccccttgganttgccaattgnccaaggcaataaagccccc

SEQ ID NO: 28109 - DNA, 495 bp, Homo sapiens
  misc_feature (1)...(495): n = a,t,c or g
gcttacttctagaatatattagnnctcataataangaaaaggcaaaaatactcaacttnnnnnnnnnnnnnnnnnnnnnnnnnnnnnnnnnnnnnnnnnnnnnnnnnnnnnnnnnnnnnataagcacatgaaaagattcatttttttttttttnnaancanantntnacncnntngcnnggcntgnagngcaggggcccaatntnggttnanngnaccntcnacntccnnggttaanncaattntcnngcntaaccctcnnnantacnnggantnncnggcccccgcnaccggcccnggtnaatttttngnnttttaagtaaaaanggggttnnantgggtngcccaggnnggnntaaaactccngacnngggnatttgcccgcntaacntcccaaagggnngganttataggcatgacccccgggcntggcctaaaatttgaacnttaaagtttcccnggaaattncaaccncccgtnaanaaccccttttttt

SEQ ID NO: 28110 - DNA, 153 bp, Homo sapiens
  misc_feature (1)...(153): n = a,t,c or g
gcaggctttagactttactgagtgttcaaataggcgcttaactatggcntttttacatccacatacacattttctgaaataaggattttgagttacaattatgtgtaggtgaaaaaagaactccagacccaagttaatctttttttttttttt

SEQ ID NO: 28111 - DNA, 504 bp, Homo sapiens
  misc_feature (1)...(504): n = a,t,c or g
gggccctcccaccattccctcnaccaccttcgagaacagcaaccatccccaatgcccacatctcctcttggggtctcccccaggcagcaggtgaggtccccatgacttctctgtcttcaagtcagggtccacagtcagctgtttggggatctgccccagcatgtgggccactgaccattgggtggggtcctggtcctttccagaagggcaagccatacccgtcacttgcctctcataggaaacaccatctctaatgaatgcaggcagggatcacccaccacctatgcagagcttcctgctctcattggcttttctcagcctcactgtcctcttgctgacatccggttgggaccatttgcgcaactgcagactggcagggccaggcaaacacagcatggcgcctgccaagaaggtggtgtgaaactgggattaccagtgtgagccaccgggcccagaaatttaagcttttttgaaaggaaactgctttggaangggtgnggggtt

SEQ ID NO: 28112 - DNA, 512 bp, Homo sapiens
  misc_feature (1)...(512): n = a,t,c or g
gcagaatcaatcatcttcctctcctcccagtaagcccttcagatagttcagccagtggccatgacccctgaagcttctccagggaggcctcctggtccctgcaactgttcctcatcagacatctttggaaggttcccctctgtcccagtcctggtcactttttattgcacaagttccgatttgcctacatcttttttcagagtatatgtctagaagaagaaccggaactcttagggtgacctgacaggcacagagaggaagggaccaccccatctcttcctttttccaagccccagacctcagtgacaacagctcaggatcccaagttctcaagatgctatttttagcccactcctgattcatattctgcttcctgctgggtaaaaccttaattattcttttggctgggctcggtggctacacctataatccacaatttgggaagctgggcccggtnggatacttgnggnccggaagtnnaanaccagcttgccagatngggaaacccccgt

SEQ ID NO: 28113 - DNA, 513 bp, Homo sapiens
  misc_feature (1)...(513): n = a,t,c or g
gccagcctgggcaacaagagggaaagtccgcctcagcaacaacagcagcagcagcaacaaaaaacaaagaaaaaaaaancncaaaaaaaccccacagatnttacagngagaaaaggagggtggcttataccgcaaagctgtggggatgcgtattccccacccccaatgccaggagaactanaactgtcacattgaatccattggngttcaaaaagattccagggacggtctaggggggtttgattctgaaaggganagcatgtggttttcaaacacaggaacacgcacagntgccccttcttgggcctcggtcttggatgcagccccaagctgtgcagtgtgtgcccaaggatgtttcaccgaggctgggctcattctcagctttatgtctggaagtggtgtaaggcctatggggtataaattcttggatatttacccttaccccatgttttattcaggnattttctggagttggccaaaaaagtcnagccccnaaggtttgnnggaattaaa

SEQ ID NO: 28114 - DNA, 514 bp, Homo sapiens
  misc_feature (1)...(514): n = a,t,c or g
gcacctctgtactccagcctggagtacannnnnnnnnnnnnnnnnnnnnnnnnnnnnnnnnnnnnnnnnnnnnnnnnnnnnggatcaatttctgtataagtcattgtttgcactcaccttgttggtaaactgggagcagctgcggctggaggacagttgaggcatgttatcttgggattgctgaatgctgcagttcacagtggggaggatctccacttcattccttctttaccatctcaagagctcctgagaaagctggaggnnnnnnnnnnnnnnnnnnnnnnnnnnnnnnnnnnnnnnnnnnnnnnnnnnnnnnnnnnnnnnnnnnnnnnnnnnnnnnnnnnnnnnnnnnnnnnnnnnnnnnnnnnnnnnnnnnnnnnnnnnnnnnnnnnnnnnnnnnnnnnnnnnnnnnnnnnnnnnnnnnnnnnnnnnnnnnntntgggaaggttaagcnttgaaaatntnttgancnggaggngaaggttgaatnganccaaaattggccctgcnctcc

SEQ ID NO: 28115 - DNA, 511 bp, Homo sapiens
  misc_feature (1)...(511): n = a,t,c or g
ggtgccatcaaggagaacaagtgcctcctgctcacnntcttcctgctgntgctgctggtgttcctgctggaggccaccatcgccatcctcttcttcgcctacacggacaagattgacaggtatgcccagcaagacctgaagaaaggcttgcacctgtacggcacgcagggcaacgtgggcctcaccaacgcctggagcatcatccagaccgacttccgctgctgtggcgtctccaactacactgactggttcgaggtgtacaacgccacgcgggtacctgactcctgctgcttggagttcagtgagagctgtgggctgcacgcccccggcacctggtggaaggcgccgtgctacgagacggtgaaggtgtggcttcaggagaacctgctgctgtggcatctttgggctgtcacngggcttgtgcaaaatctgggcctgactttggcatgaacattnacttgcaantggtcaaggcanacncttantgngcgtaggccgccaccgcccgttt

SEQ ID NO: 28116 - DNA, 503 bp, Homo sapiens
  misc_feature (1)...(503): n = a,t,c or g
ggagaagtgtgtgttataccagacatgaagggcgcnaaatctttctgcaaatccagagtgcttccctgagccacgtaatttcagaaattatcaaagtattttggatgtgacattttcttaaggctttcaagtggttttgatttacttggaagaaattccttcgggaatgagtttactttgcatgaggaggtgattggctatgacacccccactgagccccccagggttgagttggagagacctcttactatgaacagcacaaggagttgagtcacatctgataccagtcttctgtggggttttggttgtcgcacaactatgctgaaggctttgtcttgttgagagccatgtctgtctttattacggtgtttcttggggcccatttgctttattgcctgcaaagtgagggctgcctcctctttcttggccatagttgagttttggtccctttgatcantgangnaaatgcaccggccctgganatggaagcttgggcaangggt

SEQ ID NO: 28117 - DNA, 517 bp, Homo sapiens
  misc_feature (1)...(517): n = a,t,c or g
gaaatatcccctgagtctcagaggctacggttatattctgaaccagcagngactaccccacagcctagtgcagcctgggcatgttaacaagcccaacaaaaggggtgtgggaatgattggaaggatgtccttcccactgacaaagtattcagcacatttttgagttggcttggcaattaggttagaggattcaacatgctcaataaagatactgaagaattaactaagggcccagaagaaacattgccccaggacaaattacaggttgtagccataaaaccttatgtatgtggcgagtgacttaagggatagccaggtttaaatcttgactgtgcctaacttctatcaggagctaacttgtcaatgaaacccttgaataagatgtaactccatgtcctttggggtttccattgnctggtggcttaaagcaagtcaaggatgggcccttgaaancnttttggtngggtaatgggcaacntgggntgntttggaccctnatttgcaaagtgananagga

SEQ ID NO: 28118 - DNA, 501 bp, Homo sapiens
  misc_feature (1)...(501): n = a,t,c or g
ggggggagcaatgcgtgtttggngtacagttgtaggtgagcaatgataaggcgggaggtggagagtaaagggattaatgtgagctgtgtcaaagatggggaagaagcaggacttggtgactgattaggcttaaggagcaaggagagagagagaaggggaccgatttcctgagctttctgggttgtgtgatggaagatggtttgggacacgttgagtttaagatgcctgagaagcattcaggtggatgtctagaaggcggttgaatgtatgtgtctggagctcaaaagaagggtctgtgtacataacagatttgcaggtgggtttcttgtacaatctccccatgcctattagttttgcaagtgaaagaaattgaggccaagagaaacagactgttcgcaagtttttaaacaagaatgggtttgcctctactgatcccattccttggtggagtcaagtgggaatccagtcttcaagactttggcactgcttcggacctgccat

SEQ ID NO: 28119 - DNA, 508 bp, Homo sapiens
  misc_feature (1)...(508): n = a,t,c or g
gacttagagggtgaggggtaaacatgatcacaggattaagattctgttcatgggtggggggtttgtatttgtagttaagtggtggggtttttaaacactgaagggtgctttaatacgacttgtcaatgtcctattttttaaaaaattggaaaagggtaaaatatagtatacaattgttattttctagttgaatgtggggaattaatttaatacttttgtcagtctttttctcaatttggagacctgctcttaatttgcagtcccttttcccaaatgatttggttcttctgggttgagattataatttgacttacatagtatgggttttatatttttgtaaattatttttctagcatttagtgaaaaaatacaaagctaatagatattaaagtttgatgctgttcctaatgtangtttttcctgaataagtattganaaatgggaacccttacaagcccaattgtaggttttcctnaaaaaggattgtaaatggaacncctnacaaccc

SEQ ID NO: 28120 - DNA, 493 bp, Homo sapiens
  misc_feature (1)...(493): n = a,t,c or g
gaaaaaatatatatgtatgttaattatatggtatgcatagataatcaaatgaaaaattatgtacctgtgccataacagtgtttcttttaacatatttcttctttttccttatctgtacatcctattattctagagtcctttgtgagaagaaaaagtacaatgaaaacttaatagtttttaaagtcatgtgcatcaatgtttctgcttaatttggttcctacttcagaatcaactactgtactttcagagagaaaaaccctcttctggcttctcaggcaggaagtgactcagacctcccctgtttgaggcatgataattgctgtcctgctttagctctgcattgtttattcggcggatatttactgagcgcccactgtgtgctaggcgctattctttagtctgagaattatagccatgcataaatgctgcatagccatacaagtctgactaaaattaggnacataatagacattaaatatttctatgccaattg

SEQ ID NO: 28121 - DNA, 500 bp, Homo sapiens
  misc_feature (1)...(500): n = a,t,c or g
ggtgttttaagcacagggcaggaagcaccaacataggtgcctagtgcgtcacttcccacattttccctccacaggacatggaatactagtgactaagcctcgttttctctctctgcccaagtaactgaagctcaccacatggtggcccagcaccggccttctccccatttgtgaaaaccagtccacttgcccttcccgtaggttgatgccagaagtaacaagaggactcnagttcgaagtccttaacatttaataaacaagaagacatattggggagttacaacagctcttgatctttttatgttttattttttctccttaagctggctcggaacacattttctgagccctggaagatctttctcaagcccccacttcctaggctcagctttttgttttcctcgtacgtggggtgagctgtanacttccntgtgccctttccaatgcctccactttgggtcatangcttttaacntgggatttannccttcaaagggggg

SEQ ID NO: 28122 - DNA, 499 bp, Homo sapiens
  misc_feature (1)...(499): n = a,t,c or g
gccgnnnnnnnnnnnnnnnnnnnnnnnnnnnnnnnnnnnnnnnnnnnnnnnnnnnnnnnnnnnnnnnnnnnnnnnnnnnnnnnnnnnnnnnnnnnnnnnnnnnnnnnnnnnnnnnnnnnnnnnnnnnnnnnnnnnnnnnnnnnnnnnnngctgtgagctcttgactttttgagaggtgcaatgctctctcaattctgggccctatgagttttttccccctttgtgaanaggtaactttccccaggttctgggtgacggtggtgttgtcagagctagattttaatccgggccagtgtgagaacgtgcgtgttcactgagtagtggggctgttagaacctgactctcatcgggggcgttggctnnnnnnnnnnnnnnnnnnnnnnnnnnnnnnnnnnnnnnnnnnnnnnnnnnnnnnnnnnnnnnnnnnnnnnnnnnnnnntcccaactgctggggaagctgaagcgggaaaaacgcttgaacctgggaaggtggaggtgc

SEQ ID NO: 28123 - DNA, 500 bp, Homo sapiens
  misc_feature (1)...(500): n = a,t,c or g
gcaaatacagaagagactcctgttcttgaaaaggagggctttccatgtttgcatcttcatgactttaactgtcttttttaaannnnnnnnnnnnnnnnnnnnnnnnnnnnnnnnnnnnnnnnnnnnnnnnnnnnnnnnnnnnatgtatggnnnnnnnnnnnnnnnnnnnnnnnnnnnnnnnnnnnnnnnnnnnnnnnnnnnnnnnnnnnnnnnnnnnnnntgagagagtgtaggctgtgggagataagtccgtcaccttttcctcctgatgtaaccagagtggctgcagccaggtcctcagaaactcagagagtacccagtgggaaatccctaagaccaaagtcagcatgggcttcagccatggcctgacaccatacaaaagaatgactgtccaacaagtgtatgaaaataagctccaattcactggtagtcaanaaatgcgaattaatgtnacaacaagatattatctgnctttaaccatcatnctggcaaactgggaa

SEQ ID NO: 28124 - DNA, 500 bp, Homo sapiens
  misc_feature (1)...(500): n = a,t,c or g
ggttatttagaattgactttgaatgatagaattaagaagtaatataaaaactatagaaccagacctgtcgcnnnnnnnnnnnnnnnnnnnnnnnnnnnnnnnnnnnnnnnnnnnnnnnnnnnnnnnnnnnnnnnnnnnnnnnnnnnnnnnnnnnnnnnnnnnnnnnnnnnnnnnnnnnnnnnnnnttaattaccnnnnnnnnnnnnnnnnnnnnnnnnnnnnnnnnnnnnnnnnnnnnnnnnnnnnnnnnnnnnnnnnnnnnnnnnnnnnnnnnnnnnnnnnnnnnnnnnnnnnnnnnnnnnnnnnnnnnnnnnnnnnnnnnnnnnnnnnnnnnnnnnnnnnnnnnnnnnnnnnnnnnnnnnnnnnnnnnnnnnnnnnnnnnnnnnnnnnnnnnnnnnnnnnnnnnnnnnnnnnnnnnnnnnnnnnnnnnnnnnnnnnnnnnnnnnnnnnnnnnnnnnnnnnnnnnnnnnnnnnnnnnnnnnnnnnnnnntgggaaggtg

SEQ ID NO: 28125 - DNA, 499 bp, Homo sapiens
  misc_feature (1)...(499): n = a,t,c or g
gnnnnnnnnnnnnnnnnnnnnnnnnnnnnnnnnnnnnnnnnnnnnnnnnntaatcttgttttctttttttacttgtttacagtgtaagcaagtgccattggacaagaacgttgtctgtgtcattccttgttgtatttccaatagcaagagcacatcagatacttggcaactaggcagtcttccagcttctgccactgcgcccgacttccttgttgcatggatttatagctgattgaagcaactgtagccaaagattgagttaattacctacctgccaggagagcactagtgttatttagcccattctcatcctacatatttttcggcatagatgaaaatgaaagcttttgtttatcagatttgcagatgacacaaaactgggagaattaacaagtatgtttatttggtaaaataaagttttcatctctaacctaaaaaaaaaaaannnnnnnnnnnnannnaaaaaaanntcntttattnagngggnngcanntttttc

SEQ ID NO: 28126 - DNA, 504 bp, Homo sapiens
  misc_feature (1)...(504): n = a,t,c or g
gggtatttcaggtgaagcttgagggacttantgggctttccatgggagaatggcacatttgaacgcctgaagctgagaaatcaccatattctcatgcatagcactggagtgggccacagtgttctttttaaaatttgttgagatgccccttgaaanaatgctgtgtattcccatcacacattcttaanctgatatttaaatgtttttctcagctgggcatggtggcctatacctgtaattccagcacttcaggaggccaaggaggaaggatcacttaagcgctttgtaaagtgaggcctccatctctacaaatatattnnnnnnnnnnnnnnnnnnnnnnnnnnnnnnnnnnnnnnnnnnnnnnnnnnnnnnnnnnnnnnnnnnnnnnnnnnnnnnnnnnnnnnnnnnnnnnnnnnnnnnnnnnnnnnnnnnnnnnnnnnnnnnnnnnnnnnnnnnnnnnnnnnntccanctcaantnaaaaanaaaagggggggagaaggggg

SEQ ID NO: 28127 - DNA, 493 bp, Homo sapiens
  misc_feature (1)...(493): n = a,t,c or g
gggcgggccgccctgtctgctttccccagctttgcagtcttagcggcctgtgcatcctggtttgtcactttgtggcagtgctttatgttcctctctgccttagttctctcatctgcaaagtaaaggtggtgatagtatctacacacaggattggaatgaggaataaagaaattgcctacatgagagaagtttagcgcgattaatacagtaaatcttaaagttattatcctgtccgggaggtcagtaaggagagcagagtanacttcgacgattagttttgcttgagtcttgccccatttatgtttcttagaggaaggatagtgtggacaggtgttttacccattttttaaattgactttttaaggactattgtttctgtacatgtttggctgggttttgtttgtcattggaattaanattcttttttcattagcaaaacgtgatactgcnttgaaantttanctttttccttgnaaagtaccatttttttttt

SEQ ID NO: 28128 - DNA, 493 bp, Homo sapiens
  misc_feature (1)...(493): n = a,t,c or g
gtccttctaagctaaatatgtcatctagcacctgaaaaaatttaagtctggttctttctggataaaagaaagcgcacaggatttaagtagctgtataacatttcacaagatgaatgtaccacaaattttaatccttctattgttgatggatttggattattaccaacttttggcctttgagccagtctaggattcacgatgtaaccatggagcagatgctttgaggtgaatgacatttccagcattgaaggacagcatagacacggaaatacattttatggcgtgccagtgggtgtggtgggtctcagggatgcaaggtgggtganactccctgtctgttcctgaggagctctggtgagtgggaaggagaagggaacactcgaagagcatggcagccttaaaggaggcaatgggctgaggangccgctctgtgttcaaaaattggaacanggttgtccaaaggatgctgtttggtgttaannaaaacccaccc

SEQ ID NO: 28129 - DNA, 504 bp, Homo sapiens
  misc_feature (1)...(504): n = a,t,c or g
ggaaagttctcaaaaaccagtatagcttttcaccccatttgaagttgttaacatcctagagtctattgtgtgtccancctgaatgaaaagacatttcttgacactaaaaaattaatgaaaattgtgagcccagaagccattcctcagcactcatgttcanaagtggggatcgctgatgggagccccttctgcccacgtacttccctttttccancagggcctctaaggagttcaaatttcttgtgaatgaaaaactaatttantgagtacttactatctactgagctctgtgctagccaattaattcattgtttcattaaactcatacatctctgtgaggtatnnnnnnnnnnnnnnnnnnnnnnnnnnnnnnnnnnnnnnnnnnnnnnnnnnnnnnnnnnnnnnnnnnnnnnnnnnnnnnnnnnnnnnnnnnnnnngctggggaaggcccacggaacacnattattgtggcaaggcgaangggaagaaagnaantcttacatg

SEQ ID NO: 28130 - DNA, 493 bp, Homo sapiens
  misc_feature (1)...(493): n = a,t,c or g
nnnnnnnnnnnnnnnnnnnnnnnnnnnnnnnnnnnnnnnnnnnnnnnnnnnnnnnnnnnnnnnnnnnnnnnnnnnnnnnnnnnnnnnnnnnnnnnnnnnnnnnnnnnnnnnnnnnnnnntaaaataatgaagtaaaatatctgaaacctgctgcagcctattcattggtgttaagctaactccctctcccagaagccttggctaagcacactgtcgaggccagtgcttctcaataggtgggtgactttgtcctcctcacccccagggacacttggtaatatctagagacattttgggttactgcaattggatggtatgctactggcacctatgggcagaagccagggatgctgtttcacaccctgcagcaaacaagacagccctgtccacccaacaaagaattgtctggcacaacattactaaagctgaggctganggaanctgggctaggcnnatgttttccccttacagngnaaatgaccancaatgtccc

SEQ ID NO: 28131 - DNA, 502 bp, Homo sapiens
  misc_feature (1)...(502): n = a,t,c or g
gagtaacacctatcactcattgagcacttagtgtgttgccaaagactgatttaagtacttcacataaacttatttgtgtaaccctcgaaaccttcctatgatgtggttacggataattatcttcagtctatggacgaggaaaaaatgtgtaacatgtctaaagttaacactgctcaaagatagtggaaccaaggctccaacaccaatagcctgggtccgctgagctcaatcattgcacctcacaaccctctgggtttatgaaaataaaaagggtacggacctggccactaggggacttgaacagtttctaaacagacaattattttctgtttttatttttnnnnnnnnnnnnnnnnnnnnnnnnnnnnnnnnnnnnnnnnnnnnnnnnnnnnnnnnnnnnnnnnnnnnnnnnnnnnnnnnnnnnnnnnnnnnnnnnnnnnnaacaaaaccggggaaattttaaanggttttgggaaaaaangggncctgncaagtttcccag

SEQ ID NO: 28132 - DNA, 494 bp, Homo sapiens
  misc_feature (1)...(494): n = a,t,c or g
ggnnnnnnnnnnnnnnnnnnnnnnnnnnnnnnnnnnnnnnnnnnnnnnnnnnnnnnnnnnnnnnnnnnnnnnnnnnnnnnnnnnnnnnnnnnnnnnnnnnnnnnnnnnnnnnnnnnnnnnnnnnnnnnnnnnnnnnnnnnnnnnnnnnnnnnnnnnnnnnnnnnnnnnnnnnnnnnnnngaaaaacaaaaactaattaaataatacctcccactggagaaagcaagtctgagtaccacaaaggcaaaatactagactctataatacagtccgaacttggtttacactttacaacttttccaaaaatatccatgatctgtatatagaaggccctagaaaagtaatctagaacttaggatcagtctcctctctgtctttgacactaatgtgagtgaagatcacaacgtggtataatanaaagagcaaactttaaaattctgtcaaacacttattagctagtacttttggncatgcttggttctttttttttttttt

SEQ ID NO: 28133 - DNA, 534 bp, Homo sapiens
  misc_feature (1)...(534): n = a,t,c or g
gggagtttattaggcagagatcactctgctgggggaacatgccaaagctggggagcaagcaaaattatgganaaaccagtttgtacatagacgctcaacagacatgtattggactgacctcttcatttcaggtgaagattttagttctagtctgtttcttctccattttctaaactttatagaaatattttcatttggaaaatgcaaactccttcctgttgtttggtcttttgtcctgccttaaacagatattcctgagtcaaatgattaacggtctcttaatgacagaacatatatggatcaataaacacaaatggtttcctccaaaagtcttttcatgttcaatgcacttgagcctcattgcttggattttactgccatctagtgcctctgaaaacacgtgtgttgtatntttgagcaagacactctccagaatccgtnnatgagcaaatatatttctgctcctgggatgggagaactccgntgactttacttanacccctttatanaatgggagaaaaanncgggccaatt

SEQ ID NO: 28134 - DNA, 236 bp, Homo sapiens
  misc_feature (1)...(236): n = a,t,c or g
gnnnnnnnnnnnnnnnnnnnnnnnnnnnnnnnnnnnnnnnnnnnnnnnnnnnnnnnnnnnnnnnnnnnnnnnnnnnnnnnnnnnnnnnnnnnnnnnnnnnnnnnnnnnnnnnnnnnnnnnnnnnnnnnnnnnnnnnnnnnnnnnnnnnnnnnnnnnnnnnngatggataaattttctaattgatgatgttaattggtgatgttagtatcacttgatttttcctttttttttttttt

SEQ ID NO: 28135 - DNA, 531 bp, Homo sapiens
  misc_feature (1)...(531): n = a,t,c or g
ggaaattccaagccgggtaaattctagtcagagtggttctctgttctcaaaccctgtttcctgtgnnnnnnnnnnnnnnnnnnnnnnnnnnnnnnnnnnnnnnnnnnnnnnnnnnnnnnnnnnnnnnnnnnntttgccttgtgatcnnnnnnnnnnnnnnnnnnnnnnnnnnnnnnnnnnnnnnnnnnnnnnnnnnnnnnnnnnnnnnnnnnnnnnnnnnnnnnnnnnnnnnnnnnnnnnnnnnnnnnnnnntcacnnnnnnnnnnnnnnnnnnnnnnnnnnnnnnnnnnnnnnnnnnnnnnnnnnnnnnnnnnnnnnnnnnnnnnnnnnnnnnnnnnnnnnnnnnnnnnnnnnnnnnnnnnnnnnnnnnnnnnnnnnnnnnnnnnnnnnnnnnnnnnnnnnnnnnnnnnnattggnaaagaatgngaccctgcaacttggatgggaagtattggaagaactgggtgaantggggcactgactttgtaactcaatgaacttttttgcaaaagaanaaattctcccanccat

SEQ ID NO: 28136 - DNA, 538 bp, Homo sapiens
  misc_feature (1)...(538): n = a,t,c or g
gggaatggcttccaacctccactcccctaccccttccctctttatctccccacagtcaattaatgagctgctcattttgtccatattcccgggctgacattgaaggagtggcaaagagggacgtgatgcccgccttgggttagatcaagacttgtaggcatgaagagaggagactggaccagaccaggactaagaagcctggctgagaacgagctgtgtcacataaggggctctgggacctcaggccagccactttccttggagccccagtcctcccagttctgaaatgggggtggtgagaatgcccgctgcagtcatgaggcttaactgagatgttgtaaaggggaatttaaatcagggatggttgtgcaaatgctagccattactaaacaagggaagtgatcgttgtgtaacaatgatctagattanattttagatgtcctcagtgtangaaagtgganatggaggaggtgtaagaattcagangaggggccangaacggtggntcanncctgtaaccnancactttgggagggcg

SEQ ID NO: 28137 - DNA, 532 bp, Homo sapiens
  misc_feature (1)...(532): n = a,t,c or g
gagtctcaaaagattgtaccacaaattacttaataatcacagaagaaaaaataataacttttaggtggagaaagtgggcagacacaaccttaaccaactggttaaaattagcatcaatcacctaatgatgtgatgtactgaaaaggatacatcatcacttaggtactatatataacctaccaaaaacatacaacctgaatctactcatgaagaagcatcagctaagcccaaccctggccagtattctttttaaaaagtcaatttaaaaacaaagaccaagaaactgttccagattaaaggggactaagacacatgacagataaatgcaacgcatgatcaagggttgtattgtagacaagaaaaataaaaaattgcaataaaggacattattgggataattgtagcagaatttaatatggagtatatattacatagtagtanantaatgttagactcctgaccttaaanttatagtgcntgtaaagggaatgnccttttctcaaaatnatactgaaaggcagnacantgtcat

SEQ ID NO: 28138 - DNA, 539 bp, Homo sapiens
  misc_feature (1)...(539): n = a,t,c or g
gctctctgtctctctctctctctttctctgtgcctctctctttctcagtttgatgtttttgttaatctaatctagacttgaacactccccccacatgctttccccctaactacactccctctctctctctctcccacctgcagagaagcagccaggcaaaagacagtattcttttgttttatagcacttattacaatttgtaattatattttacttgttatcaacttaactatatctccctaactaaactgtaatacctcaagtgaagggattgagtctgtctcattcacttctgtatccctagcatcttgcagatcctaataaatgtagctatccaacacttattgaatgaatgaatgcctggcaaaccactccgggagaacgtaatgcaaattaagccatattagctagacccagaggtttactggcaaggtcaaagggagggcaaagaacttganccttcccaacatctcaagcccatgcaattcagtcaantctccangaaaggaacttgtctcaagganagggaactctttaaa

SEQ ID NO: 28139 - DNA, 536 bp, Homo sapiens
  misc_feature (1)...(536): n = a,t,c or g
gcctcggtgcagtttccactcttgacccccacctcctactgtcttgtctgtgggacagttgcctccccctcatctccagtgactcagcctacacaagggaggggaacattccatccccagtggagtctcttcctatgtggtcttctctacccctctaccccacattggccagtggactcatccattctttggaacaaatcccccccactccaaagtccatggattcaatggactcatccatttgtgaggaggacttctcgccctctggctggaagctgatacctgaagcactcccaggctcatcctgggagctttcctcagcaccttcaccttccttcccagtgtagcctcctgtcagtgggggctggacccttctaattcanaggtctcatgcctgcccttgcccaaatgcccagggtcgtgcactctctgggatacagttagtctccacatttctggtttctgtcccatagtacagttctcagtgggcatgacccaccagcccctgnanncctggggnaccattaacagaaaaa

SEQ ID NO: 28140 - DNA, 544 bp, Homo sapiens
  misc_feature (1)...(544): n = a,t,c or g
gcattttgcatccaactcaagaaaatatagtaaggtgtactgctaattaataaaacagcacatagactccattttaaatgagataagctctacaaatattagacagtctgggttcaaacaccctgtatttgcttactaactcttttatgcgtaaaactttttgtactggcatcatgcatctttctcttctgatgccatggctaatagtcagaactttggcctcttggttttttctgaaactgaaccacctcagtcttcatttgtatttatttatttgagtggtattttcatttcctttgagtaaaaggagaaaggaagaagagttgctgacgctgtcatgactgaaggggtaagattaggcattgtggcacctctcagccanggctggcttccttacaggaagtgcttcaaagctgcggagatgggagtgatttancanctggctcccccttgattgaccgcatcangctttaaaatatcaatggntcnacagcatcaacccttganaacccccngaanactancgtaatggaaaatntgagag

SEQ ID NO: 28141 - DNA, 541 bp, Homo sapiens
  misc_feature (1)...(541): n = a,t,c or g
gcgaagccaaggagagtttcgggggcatgcgcctgctgcgtcgggcagacttccacgtgggtgcccacgtgaacacgttctggaggaccccgtgccggggggccactgaagggctcagcaaaaagtcggtcgtgtgggagaataagcacatcacgtggtttgccaccctggacggcggcatcgggctgctgctgcccatgcaggagaagacctaccggcggctgctgatgctgcagaacgcgctgaccaccatgctgccacaccacgccggcctcaacccccgcgccttccggatgctgcacgtggaccgccgcaccctccagaatgccgtgcgcaacgtgctggatggggagctgctcaaccgctacctgtacctgagcaccatggagcgcaacgagctagccaagaagatcggnaccacaccagacataatcctggacgacttgctggagacggccgcgtcacgcccanttctancccgtggatgccgtcacaacancacacgggactactccaancccctttttttnaaaaanaaagg

SEQ ID NO: 28142 - DNA, 530 bp, Homo sapiens
  misc_feature (1)...(530): n = a,t,c or g
gtaatagatgatgtttaatctcaaatgtgttaaatactatgggnnnnnnnnnnnnnnnnnnnnnnnnnnnnnnnnnnnnngctggtttggtgctactgctgcgaatcttttttcttactgtagtaaatatacataacgtaaaaatttttatcttaaccannnnnnnnnnnnnnnnnnnnnnnnnnnnnnnnnnnnnnnnnnnnnnnnnnnnnnnnnnnnnnnnnnnnnnnnnnnnnnnnnnnnnnnnnnnnnnnnnnnnnnnnnnnnnnnnnnnnnnnnnnnnnnnnnnnnnnnnnnnttctagnnnnnnnnnnnnnnnnnnnnnnnnnnnnnnnnnnnnnnnnnnnnnnnttttaggtacctctcataagtggatcataacaatatttattttgtgtctaacntatctcaatcaaaataatgtctcaaggntcatcaagttgtaaaatgtatcttcccancctcttttagggggaaaaanatatttagtggtaggtgtangcacattttgttaccatcancggtggtgg

SEQ ID NO: 28143 - DNA, 511 bp, Homo sapiens
  misc_feature (1)...(511): n = a,t,c or g
gcagtttcttcagaaaactacttactttttaaacttanttttcantgngaagtccacaaactatgttaaaatagaactggttctggtcgnccagggcattnctgaaagagcttgttgagtgtaagtaaatggaagaggtatggnatggcttcatgatttcctgttcaggagactttaatcaccttccatctgcttagaaccagagctctnatgatacacattgtgggggactaanttttctgancacattantnaagccctgcanaantgacacccaaatgatcacaagnggtctccaagncccctgaggaagaaaccttaaaggatttatctgtantcttaaaaaccctcagtatcttaacccacantctctangatgctaaccgcttaatgggcaaagtatgtanngaatntttaaattnctcattggactctgctgngngtattaacatgctcganttaatntgaanntattggcntaaannnttccangggaanatgggcncccaaa

SEQ ID NO: 28144 - DNA, 506 bp, Homo sapiens
  misc_feature (1)...(506): n = a,t,c or g
ggttttactccctagtagtgactggtattaaaaagccnccacgcagnncaggatgtgggtagatcaaccctggattggttggttgggatgtgattcattagatcatctatgagattctctgttttttaggtcagagtaattgccattgatcttatgatgcagttctgcttccaggacacttaatgaacacggaaactgaaaagtaaagaacttggcctgtngggtctgtganacgggaccacccctgggagccgtgttgtgtanaggccatccagccaaggactgcaaacgtggagatctgttgtggcagtggattggattaatctctattaatcagtctattaatctgttgatctctagctgaacaatctcttttgttgaattgttgcattatgatatttatcgtgactactgaaattttggcccccccttacattggtgtcataagcaagtgccntgnnctnntccaaattcctgtgcnntggnaacntttgaaagggtngaaa

SEQ ID NO: 28145 - DNA, 497 bp, Homo sapiens
  misc_feature (1)...(497): n = a,t,c or g
gatagtcaaatgagtgaaccaaagagancaacgctttngtaacagccccacatcagcagctgaggagtaactctgggacagaggcccccatccgtgtttccgtctccgtccactctccagttgttcattcattcactcagcaagtacttactgagctcaggggatgcatcanaccgattggagctggaggcaggaaaacttcagcagaattacaaaatatgggaaactccaggtgactggaggcctggttactcaagctttttgcttctcccttctgtgctggactcgctgaagtttagtgttcagccacccgtccatcaagtggtagaggcaaaatgaaattgagttcttgtcaacagtttcagtgaaaggccggaagtcttggctaaatggaggtatctgagtatcctgtgggctgcacctntatggagcttcacagagcttcaagancncattgaatttggactggnttcttttgcnanaatncaaaaaaggcc

SEQ ID NO: 28146 - DNA, 511 bp, Homo sapiens
  misc_feature (1)...(511): n = a,t,c or g
gnnnnnnnnnnnnnnnnnnnnnnnnnnnnnnnnnnnnnnnnnnnnnnnnnnnnnnnnnnnnnnnnnnnnnnnnnnnnnnnnnnnnnnnnnnnnnnnnnnnnnnnnnnnnnnnnnnnnnnnnnnnnnnnnnnnnnnnnnnnnnnnnnnnnnnnnnnnnnnnnnnnnnnnnnnnnnnnnnnnnnnnggataactttttttagtcatagccaagagccctcaaagaggatattaggataaaagacatgtaaacaaatcctagttctgtgtctcagcgatgcagaagttttcannnnnnnnnnnnnnnnnnnnnnnnnnnnnnnnnnnnnnnnnnnnnnnnnnnnnnnnnnnnnnnnnnnnnnnnnnnnnnnnnnnnnnnnnnnnnnnnnnnnnnnnnnnnnnnnnnnnctttaaaaggtgtgccttaaacactccttgacattcatttatttcatcttgacagtagaaaatgtttgaactnttggaatgggcnnaaaaaantnttgggcccaac

SEQ ID NO: 28147 - DNA, 497 bp, Homo sapiens
  misc_feature (1)...(497): n = a,t,c or g
gggacttggtgtttttagtatcattggtatatgagggggtgtcagtgcttgaagtagaacagcccaaggcttctctattttgagaaggcctaataaaaaccctgatttttaattgacgcaccagagtcttttcctcctccgcctttccctctgctactggtataattatgtaatgcccttgctgaaatctatgtgtgtccactgaattgataagaaggacttgagtttttacagcaatcttcagatatgttgctttatgtagtgaccagcatgagaatgaccaacatgagaaggcagaataagaattgtttgtgtggcgttgtattagagcagtggttctcgaccctactctaatctttaaaaatcactgggnnnnnnnnnnnnnnnnnnnnnnnnnnnnnnnnnnnnnnnnnnnnnnnnnnnnnnnnnnnnnnnnnnnnnnnnnnnnnnnnnnnnnnnnnnnnnnnnnnnnnnnnnnnnnnnnnnnnnnnnnnnnn

SEQ ID NO: 28148 - DNA, 510 bp, Homo sapiens
  misc_feature (1)...(510): n = a,t,c or g
gagaattataggtgataacctagaaaatgggcttataaatcatttcagacatttctccaaatattttgaccaaaatatggctttggttcagagacctagtgctgggtataatcatggaggatgctggaatcaaagaccaaaagcatatntntgaccctntggccattcataatatcatctacagctagaccaatactcctcaagaacaacctancaaaaccaaggaaggggatgtnacgggtctaatgtncccngggnnttncatatttcncntnnanggggnanncnntttnaatnttttatntgtgaaannctgaaagggtggggtgaaaacattatagagcaggactgcataaacttggacttgttccttgaacctggcagcagtacatatgtatatattttgagggtgcagcatgttgtaccggatgagaacaccagggttaaatccttgncccccatttatttggctgggcttgggcatttaccctaanaatntgaatttggttt

SEQ ID NO: 28149 - DNA, 486 bp, Homo sapiens
  misc_feature (1)...(486): n = a,t,c or g
gccagttcttggccagggcaagaggacagtagctgtgtangatttgggtagcatcattaaatggttgaaaattccagtgggattcttctaactgcagaacgttgcatgctcgcatcttaagaaatagaaggtcacacgatccatttatgaattcaagatatttttattctacaaaggtaaaaataataggaaagaaagtgaaaaggaatacttcgaagatggtgaagagactgacggtgatatgaggatgtcagagaaaaaaagttgagtggggctgggcccnaggnctcacccctgtaatcccaaagtgccgccgggattacaggcgntagccacncaggcncngcctgnctcancntttnttcctgacatcctcgtntcaccgncnggcnctncacttcnncgnggtgncctnttcactncctccnanatcnnnccnntgnggntnnnnnnntcgnnnatcntnnnngntcngngcccccattt

SEQ ID NO: 28150 - DNA, 508 bp, Homo sapiens
  misc_feature (1)...(508): n = a,t,c or g
gaaccctgaccctggggaaagacgccttcatctgggacaaaactggagatgcatcgggaaagaagaaactccgaagaaaagaattttagtgttaatgactctttctgaaggaagagaagacatttgccttttgttaaaagatggtaaaccagatctgtctccaagaccttggcctctccttggaggacctttaggtcaaactccctagtctccacctgagaccctgggagagaagtttgaagcacaactcccttaaggtctccaaaccagacggtgacgcctgcgggaccatctggggcacctgcttccacccgtctctctgcccactcgggtctgcagacctggttcccactgaggccctttgcaggatggaactacggggcttacaggagcttttgtgtgcctggtagaaactatttctgttccagtcacattgccatcactcttgnactgcctgccaccgcggaagaagctggtgacaggccaaaggcnatggaaanaacacctt

SEQ ID NO: 28151 - DNA, 505 bp, Homo sapiens
  misc_feature (1)...(505): n = a,t,c or g
gcacagcactgtgaggtagatgttattgttaaccannnnnnnnnnnnnnnnnnnnnnnnnnnnnnnnnnnnnnnnnnnnnnnnnngcactgctctgctccagcagaatttctggaagtcagctggccagctagactctttcagattacttttcctcacccaagcccacttctgaattttctctccctattgattcaacccctgtggtgacaggtttatcttcaaatgaggtttcctaggatagccctgctatggagtcaacctgaccaagggccagctgcaccactcacctgggagcagttgcctgtagaaccagagaacagaaataacaaacttcactagggttggccgcaaaccacaagatcctctagaaggaccccaaaatgtccgtgaagaccaatagtcagattactgaccatgccgccagagaagaaaagggcagcctaccaactatccatcctatttgagccacgtgacttgccacgtgggtgtttcttgaggaaaac

SEQ ID NO: 28152 - DNA, 507 bp, Homo sapiens
  misc_feature (1)...(507): n = a,t,c or g
gataccttctaagaatggaatggaatatgcaagttaaatgaaccatacaaccagtgctatttttctatccattcatctacgcccctctcctaaaataattgaaatacatttttaattatagccaggatgggaagagagaactcacacagatggaagaatcttctacataaatcacagtatgtgcagtgcgatttttcattatgttattttttgtaataaattttatgtgtgagaaagtacatcttttttctttttcttcccttcagatataaaaagaacacaatgggaagatcctcggttggagaatgtagcaataactggaccagtaagtctctctgccagtgtgctctgatgggactgtccgctcacctgtctcttcaagagcagatagtcacgggcataaccctacaggcattgagaggaaagcacattgccgtctctcctctccccatttccatactccaatctcagttatttgaaaagatcttttaccgncattatccttac

SEQ ID NO: 28153 - DNA, 626 bp, Homo sapiens
  misc_feature (1)...(626): n = a,t,c or g
gtcttcattcacctaatcagcancngcttaatgaatacntaccagttgccacaggcacacatacatgagtaagtccttccaaaaggaacacacagtgcagtagaagagatagacgtgcacacagctaattagagtacaagaagacacaggtcataatcaagatataaaataaatactatttatgggaacacaaaggagggagcaataatttagcttgggtggttagagaagttttattgagatggtaaatctaaatataagcttgatatagttagatgaaggttatacttaaatgtcaataggaagaatgatagaaaagaaaataattctaagtcaaagtaataacataaataangacattaaactntaaaaattcatangggnttaagggacaagacaatttaatggggggaanantggnntttnncccaannggggnttaaaaacctnggaattcncatgacaaacttgatttggaccctaacttaccccacacacaaattacctcaaagggatcatancctaataaaaatctaaactntaaaactttagaagaaattcaggagtaaatccttgngaccttgggttaccaatgtttttatttgacccaaagtcagctccagaga

SEQ ID NO: 28154 - DNA, 633 bp, Homo sapiens
  misc_feature (1)...(633): n = a,t,c or g
gaactggaagaggtggaggggaccctcctgcagcctgnngctgtggacaacnggagccagatccagagcttcgaggccaaaccagatgatctcctcatctgcacctaccctaaagcagggacaacgtggattcaggaaattgtggatatgattgaacagaatggggacgtggagaagtgccagcgagccatcatccaacaccgccatcctttcattgagtgggctcggccaccccaaccttctgctgctgccaccgtctttctgggaaaacaactgcaagttcctttatgtagctcgaaatgccaaagactgtatggtttcctactaccatttccaaaggatgaaccacatgcttcctgacctggtacctgggaaanagtttttgnaaccttcttaaanggaaaagnggtttgggggtcctggtttnacncttnaagggntgnnggaaatgaaagacagccccagattctntcctttctatgaggacataaagaggacccaaagcatgaaattcggaaggngatgcantcatgggaaaaaagtggatgaacagtgctagataaattgncaggaacgnatttgagaaatgaagaaaatcctgcaatcgtctacagttccaaatcttcttggcca

SEQ ID NO: 28155 - DNA, 609 bp, Homo sapiens
  misc_feature (1)...(609): n = a,t,c or g
gaggttattggccttaaagtcaatggatgttacagtatttaagtggagagggccaggtgccaaattgtctgatggatctggcactgtgggtagcagggacaggatggggaaatgctcctgctctaccgtggaggtggcattgctgccctgcccgggcctggcatcctccttacctggggctcaagagcatgagcagcctccacttgggaggacttagcggagagtgtggtcaaagaaagacagggaaagaacacgctctctggcaaggtgaatgttggggattttgttggccagaaggtctgagattccaggatgctgcggaagcactgcatagaggagagaccatgtggccacanagaaaacatggcananaaggatgggaagccaaattttgcaactagggaatgacntcttgaatcgggnacntacattccaaacanttgnggtttgggatgttgttaaaggctnattcctggccactaaggtgcggcccgnggtncagataanctgnttaagccattgatanagcctggaccagcataccttatctcctaggtgagttgttntaagccaatttttaaannacttttncagctgnantaattgtgt

SEQ ID NO: 28156 - DNA, 511 bp, Homo sapiens
  misc_feature (1)...(511): n = a,t,c or g
gttgatgatgacgatgatgatgaaccttttgggctggttgctgtatggaagtagaatgaatgctaactattctccttggtcagcctggtttttcatgaagacagtccagctctgggaggctagagagctttccccagctctgcccagtccagagctggaggagtggcaggactgatttctgtaccgttcanactcccttccccatccctcacaccatcctccaggtcctcccctgggaggggtgtgggtacatgaggaagtggacaccagcaatgactcacctcgctaggtgtccacccaggtctgctgcccatccccactccctgcctcgtcctcaccttctctcctgccaccccctccaggatccctctgaccacgcgatcctttcaaaattcagaagttctataatctagatgcccttaaggcctcctggatttccagttttantggaacctggcctgacctccaagccaggattggaaaggtttgaagcctntgccaatgttacccc

SEQ ID NO: 28157 - DNA, 503 bp, Homo sapiens
  misc_feature (1)...(503): n = a,t,c or g
gggcaaaacatttttattctnnggcctcagagtanggtttgagtatcacagggcttgaaatctgactgtcaagttacttactactgtatggctgatggctagaaatgctgtaagctggctcacttgagacagccaaggttctcctttgtgagtgccattaacctggaccctcatgccatagcatagacagtggcaaatctttcatattgcattgccaagtttgtgtgaatggcaagaaaaaagttgatatttgatgtaactgagggtactggttaaatggcctgatcnnnnnnnnnnnnnnnnnnnnnnnnnnnnnnnnnnnnnnnnnnnnnnnnnnnnnnnnnnnnnnnnnnnnnnnnnnnnnnnnnnnnnnnnnnnnnnnnnnnnnnnnnnnnnnnnnnnnnnnnnnnnnnnnnnnnnnnnnnncgggtgtngnggctnatgcctgtgannctggctattcggaagctnaaccgggaaaaattcttttnacccagnnaccg

SEQ ID NO: 28158 - DNA, 507 bp, Homo sapiens
  misc_feature (1)...(507): n = a,t,c or g
gtggaagaaatgtacattttcaggcttcacttcagncctccgggatcagaaactntgagtgtggggccagaaatctgtggtttaagtancattanttaaagcagtgaagacagattttattcagtaactactgacagaagaggaaagagttgagcttcattctgatttgcacagaggtgactgggcattttagagggaaaatgagggagtagggaaggaaagcaagcagggactcagtagagtcatggaagtgaaaaattacagagggtttctcagtataaatgtgattaggccagctgtgtctgctacctggcaattactgaagttagatttttatcctcccagagactgggagacagaggccctaccctacatttcaaaggactggcttccaggcccttgagaaacaaacactctgtagnntgtaggaaatacataaacatnttaaaggncncaggnanggnttcccaacttaacnccttttcnctaaaggcctttaaaaagggg

SEQ ID NO: 28159 - DNA, 511 bp, Homo sapiens
  misc_feature (1)...(511): n = a,t,c or g
ggagagagctgacaacatataaaaatatattctttanaacnggctttgagccccaccacattctcctaatggctcatcttcatgcagctgggattcagagatgatgccctagtcccactgngtggcctcaacagtttcctagtatcatatctagcatgcacccgcatcctagacatttntnaaaagagaaggcccagggannnnnnnnnnnnnnnnnnnnnnnnnnnnnnnnnnnnnnnnnnnnnnnnnnnnnnnnnnnnnnnnnnnnnnntnnnnnnnnnnnnnnnnnnnnnnnnnnnnnnnnnnnnnnnnnnnnnnnnnnnnnnnnnnnnnnnnnnnnnnnnnnnnnnnnnnnnnnnnnnnnnnnnnnnnnnnnnnnnnnnnnnnnnnnnnnnnnnnnnnnnnnnnnnnnnnnngcantgagcccaganccagcctgggcaacatancnaganttttttttcaaaaaaaaaaannnnnnnnaaaaaaaaagggttttttttangggccc

SEQ ID NO: 28160 - DNA, 516 bp, Homo sapiens
  misc_feature (1)...(516): n = a,t,c or g
gcggcacgaggcaactttgagtaaagtcttagggtcncatgaagagcctccaaagtgtcccatgctaggggaacttcacgtggggccagggagtgttgctgatcctgtgccttttcagtgtctttacaggcagacgtttcaggcattctctgagatgctccanagtttggnggnaaaagacccacatttggaaaatcttgacaccattattaaggtaaacaagatatcaaggganagtgggaaatgattcctattaactggtgaaagtgggagatgaaaatgtggaaggattcagtggtaanaggcaacgtattaaagagtatcagctatcaactttgagtcanagacttgggttcaaatgctgactctgcattcattggttacacngtcctcccgctagaaattctgcaaggaatttgctctctcagtgnatgcatttcttccatttacatngnganaataaatcctgngaaatttgaaaaaagggcctttaaanaaatnattggttnttaattt

SEQ ID NO: 28161 - DNA, 517 bp, Homo sapiens
  misc_feature (1)...(517): n = a,t,c or g
gggtccagggatgaatctggctgaagattttgtcangtctaaattaggtttccaaatttatcattaggaatctgtcctttatttattatctctgcattcctttgttttggctttgttttccagnggctgctgcctaaattgtgtcttttgggagtaaagggagagcttccttctcccaatagatgcagagaatgtcctggggctgatgttcattggcttccttgaactgtcttgccttatgtgcttaccccagactaatcaccattgtcagagggaagcaattgagtcattgcctgggccgcagttacatggncatatattgagccagggagtgagaaaagttgctctctcactcccccagcatatgcactgagattggaggagtggtagttgcccaaaggaaaaacagggcttttgtgccagcacaatgggaaatggattccagacaggaaaaacccagacgttcncttgggggttnaaaacctttttcttgatnggngaataaaaactttgggga

SEQ ID NO: 28162 - DNA, 539 bp, Homo sapiens
  misc_feature (1)...(539): n = a,t,c or g
gcggcacgagcccacaccttgatctcaagactttgtttgactaatccttggcctgactccaagagctttgcccctgtggctctgtcatgaccccccacccccagcccacaccattcctctctcagattccgctgttctcagcagcatctcaagagcccgaaatcaagataagtcttttcctctcctacttcccaaagaacttagtcactgccctccctgcagagtgcttgctacccaaaacagaagggagaggccccacccaacccctgctttcccactgaggaggttctagaaggccacatcaaatgtcctctccactcaggtgcaaactggctcagtctaatggctggggggtgatggtgagccaccgtctggggagactgaggacacattcattgctgaccttgtggtggggctctgcacaggacaagtacttgaacttctctctactgagtgctaccaagtttcttggggnccttggcctctgcctttaggtaatgctccttggggcaagnccaaccctcntttaggcttactaa

SEQ ID NO: 28163 - DNA, 615 bp, Homo sapiens
  misc_feature (1)...(615): n = a,t,c or g
attganacngtttgacnnnnnnnnnnnnnnnnnnnnnnnnnnnnnnnnnnnnnnnnnnnnnnnnnnnnnnttttgctatatccttcttaggtcaacagggaaaacttggttngntccgggngactgggggcaagtctanatgatcaacttcagggtagaaatctttggtactacctatatttgaatcaatgaggtggagggaggatgaagcataaacttaactgccttatattggccacttgcctttttgnggctccactctacctgtttggatcaaatctgtcataaccaagttaaagtactgnctttttaaagaataagacacaatctaaagactacatctggatcacaagttaacatattggaatggtaccacctattttatcatacactgcaaattttcttacttcctcttcctataacaatataatcatagctgngttttaaagtccaagctggtannnnnnnnnnnnnnnnnnnnnnnnnnnnnggtccaaggcangaggnatcacttgagcccaggngttcaagactannctaggcnttcagggngaccctcnttntaaaattaaattggaaacnggtcacctggaaaaaaattngggatatagtcaa

SEQ ID NO: 28164 - DNA, 535 bp, Homo sapiens
  misc_feature (1)...(535): n = a,t,c or g
nnnnnnnnnnnnnnnnnnnnnnnnnnnnnnnnnnnnnnnnnnnnnnnnnnnnnnnnnnnnnnnnnnnnnnnnnnnnnnncagccctnnnnnnnnnnnnnnnnnnnnnnnnnnnnnnnnnnnnnnnnnnnnnnnnnnnnnnnnnnnnnnnnnnnnnnnnnnnnnnnnnnnnnnnnnnnnnnnnnnnnnnnnnnnnnnnnnnnnnnnnnnnnnnnnnnnnnnnnnnnnnnnnnnnnnnnnnnnnnnnnntatctgactttgcagtttaaaaaggacannnnnnnnnnnnnnnnnnnnnnnnnnnnnnnnnnnnnnnnnnnnnnnnnnnnnnnnnnnnnnnnnnnnnnnnnnnnnnnnnnnnnnnnnnnnnnnnnnnnnnnnnnnnnnnnnnnnnnnnnnnnnnnnnnnnnnnnnnnnnntgtggtggacccacctgnatctcactgctcggaagnttaagcaggagaattgttgaaccagggangcaaaattgcatgagccaaggtgcgccatggactttaacttggcanaaaaaaa

SEQ ID NO: 28165 - DNA, 546 bp, Homo sapiens
  misc_feature (1)...(546): n = a,t,c or g
gagcagcctggcacagatgtgcagnttccttttnagcggngganggggctgacatttgtatgatactagtgngtatccccctgtcattttgacaaaggcagtcaaatatggcttttttatcaccatggaaaccagtttcgtaggacatggtccctaactttgttttggaaaaagttttnaaagcctaccctcctgggtaacacggaagtggttgatgacncgaccagccttccagccccctttggnatttggctgtgttaccacttnatgtctaccctccaggagagtttataagggttggctgggacagccgagctccgattggcctacttggcctctanagaaaaaaatctcgagggagaagtagntgtgcttaatttctggcttacctaccttggggacatcatatttgngattcatgtncttacacatgaaagctttgggttacttggttntcctggcaagttgnatcaccatttgggggcgactttcaaatggccnttgacanttgtgggggccggaagnttaaggnagtttaaaaatggg

SEQ ID NO: 28166 - DNA, 535 bp, Homo sapiens
  misc_feature (1)...(535): n = a,t,c or g
gcggcacgagctacagtgcaaaattttaatatttgtatagactttaccgaaaactagagcagttgtcctggaccccacacttttctatgagaacaatatggctagagaatggaaagtaggcaccaatatggagagggagaagctgctaaaaaaaagagtgagaactattaaataaataaacatttgctgagcatggtggctcattcctgtaatctcaacatttttggnnnnnnnnnnnnnnnnnnnnnnnnnnnnnnnnnnnnnnnnnnnnnnnnnnnnnnnnnnnnnnnnnnnnnnnnnnnnnnnnnnnnnnnnnnnnnnnnnnnnnnnnnnnnnnnnnnnnnnnnnnnnnnnnnnnnnnnnnnnnnnnnnnnnnnnnnnnnnnnnnnnnnnnnnnnnnnnnnnnnnnnnnnnnnnnnnnnnnnnnnnnnnnnnnnnnnnnnnnnnnnnnnnnnnnnnnnnnnnnnnnntgtntcaaaaaaaacattaggaatcataatatataggctggtactgngntnatgcctgnatccac

SEQ ID NO: 28167 - DNA, 87 bp, Homo sapiens
gcggcacgagatttttccatctgcccctgatgagtctgcagccttcactcagggtcccttcagccacaaggacaaaaaaaaaaaaaa

SEQ ID NO: 28168 - DNA, 544 bp, Homo sapiens
  misc_feature (1)...(544): n = a,t,c or g
gtccttctcagcttcactgtttcttgtttttanaaaggacttttgcattattaaatgagatgatttatttaaaggtaaccgtcactcaaaaggcaacatttgttattagaaattngggtttagaattgcccataagagattttggattaatcttaaatatttgtttccttgcttgatttcctcctctgctgttgcttttgcctttctgttttgcttgctttttatctcaattcctttccctctcgtttatcttttatcttgngagaaaagcaattgttcactgatttgcaagatcctgtccaggacctgactatcagctgctttcagagtctaaagatgagacaaaaatgaaaacagactggctgcaatgtctgatataattccttttcgatgtcatcatctcagccctgcctgaaaaaaaaatccaagaagatatgaaagcccaaggagtaaagcattaaccatgcaaaaatcccnccccggagagaaacaagggatctatgactctgtgggaanggtgtaatgcaggngttgcngctatttt

SEQ ID NO: 28169 - DNA, 639 bp, Homo sapiens
  misc_feature (1)...(639): n = a,t,c or g
gtgtagttataagggaggcattgtgtagttctagtattaggtcccagttttttggtgaacctgtgctcctggactgtgaacataaccattgtttctcagtcccccacccttatccctgtcacctttaggtgggacagaatggttagaaaggactggaatttggtatttcccttccctcttgtgaaaggctgaagtgaactggagttgtttacagtacttctttacccacaggtaggttaggctctggtaaattagtttctgttcaaggcaggccttgttaagaactgattgctctggcgtatttcaaaattgttcttttttccttccccctaccaaaagcacaaagggatttttcnccggataattactgtaagggcanaataaanctccctggnggnaaaatcnaaaanggtcaagggcncaaatancngggncccccnggggntttaaattgcnattnntggnaactgattccccacaanttggcatnaaattgnngggtttctaacccnggnactgggtcccaaggaatttcgcttgtggttccgccngatgacntganattttcccaacngccaactgtccccaatttgggaacctggttgcccgtgacccacttctngaaggactaactaagct

SEQ ID NO: 28170 - DNA, 641 bp, Homo sapiens
  misc_feature (1)...(641): n = a,t,c or g
gtnnnnnnnnnnnnnnnnnnnnnnnnnnnnnnnnnnnnnnnnnnnnnnnnnnnnnnnnnnnnnnnnnnnnnnnnnnnnnnnnnnnnnnnnnnnnnnnnnnnnnnnnnnnnnnnnnnnnnnnnnnnnnnnnnnnnnnnnnnnnnnnnnnnnnnnnnnnnnnnnnnnnnnnnnnnnnnnnnnnnnnnnnnnnnnnnnnnnnnnnnnnngggaagcccaactccttaaggggcaggggaggcagtggtcttaaagcccagagagggtctctatgtgcaaagagagggtctctatatgcacacaaatagcagttactatcaacctgtggcttggcaagaaaggagctnggaaaatgggaactccaacctnaatctcctcccaaccttcanctctggnngngncnccttaccaatnnaancccnnngngaancnnagggnaacccncccnaggttttacggaaantcatcttcccngggtntggaccaaggaagggaggananagaatgtccncanaatgttaanancaancnaggntttggntttgaggtgacagcnaannacaaaaacctnacaggaaccatatttaanttcccttacggtttaaaagtatgcangatncnncnaanaaaatnananggnaaag

SEQ ID NO: 28171 - DNA, 575 bp, Homo sapiens
  misc_feature (1)...(575): n = a,t,c or g
accttggccatctatgacctggctacgcagactcttaggcatcagtgtcagcaccagtcgggcatcgtgcagctgctgtgggaggcaggcactgccgtggtatatacctgcagcctggatggnatcgtgcgcctctgggacgcccggaccggccgcctgcttactgactaccggggccacacggctgagatcctggactttgccctcagcaaagatgcctccctggtggtgaccacgtcaggagaccacaaagcgaaagtattttgtgtccaaaggcctgaccgttaatggctgcagcccctgcctgtgtgtcnggtgttnaagggacaaaggaccctgccctgttgccaacaaaggnattggnanaaaggaaaaagangttgggncctggnnaattncaaacccntaaaaggattgccccncccttttctccctttanaaccaaccagggccctccaccttgccaaactggtgggccttcaaaggaaggggggacctttccttcacttcattctgtgtancatggggtgttattgnngtgggataagtgttgggtccntcttccttccaatccg

SEQ ID NO: 28172 - DNA, 614 bp, Homo sapiens
  misc_feature (1)...(614): n = a,t,c or g
ggagagcnnnnnnnnnnnnnnnnnnnnnnnnnnnnnnnnnnnnnnnnnnnnnnnnnnnnnnnnnnnnnnnnnnnnnnnnnnnnnnnnnnnnnnnnnnnnnnnnnnnnnnnnnnnnnnnnnnnnnnnnnnnnnnnnnnnnnnnnnnnnnnnnnnnnnnnnnnnnnnnnnnnnnnnnnnnnnnncctccttccccccgcccccccaaaaannnnnnnnnnnnnnnnnnnnnnnnnnnnnnnnnnnnnnnnnnnnnnnnnnnnnnnnnnnnnnnnnnnnnnnnnnnnnnnnnnnnnnnnnnnnnnnnnnnnnnnnnnnnnnnnnnnnnnnnnnnnnnnanagcaagnccttnnnnnnnnnnnnnnnnnnnnnnnnnnnnnnnnnnnnnnnnnnnnnnnnnnnaggcttgcngcttnnncaatnttggncnttnannccntgtnccaacccangntaaaangggcaanataaacttngncaaggcttcaaggggacaanccananccttggggggttcatgtgtgttggccttgggtgnaaaaatcanaattgaggttgggaacttncccanattcaaaggtgttggaancctgntntcagcaaaatcaatgcagggg

SEQ ID NO: 28173 - DNA, 623 bp, Homo sapiens
  misc_feature (1)...(623): n = a,t,c or g
gggcaagtccaaccgtatgactgtgtccctttagcctgacgcccttccccagctccctatataatgcagagaaagttccagctccttagccgcgtagtcaaggttcctggagtcctggcccctaaggcattggtgctctctggttccctctccctgtgcacctcacctgccttccaggtgaggtgattcctggaaagtcttggccgtttggcagtgcccctgcagcccaggcctgaatagccttctctcaagatttggccaaaacatccccatctccatgaagtgtccacactgcctccccactttctcccancctgggggagttgaccaacccctcgaggntgcccacttaagctgctgtgcacaatgtgaactggggtgacattgactgttaactggggggaccgattggaataaagtnttaancaaccntgcagggccanaattggtttaattcccacttgtnanaagtaggcaggggnggnaaaaccccactttcaaanggaggcnaaaactggaagggtggggtggattccgggaaaatgcctgaggcatcantncgaatgacagccaaggattcgggcaagttgcggncccnggtccttttnacctctgcgcttgga

SEQ ID NO: 28174 - DNA, 615 bp, Homo sapiens
  misc_feature (1)...(615): n = a,t,c or g
gctgcagtgccactctcgaggtggacggcgagttcttgcacaggaacagtagcgtccagctgcgagtcctgtatggtcccaaaattgaccgagccacatgcccccagcacttgaaatggaaagataaaacgagacacgtcctgcagtgccaagccaggggcaacccgtaccccgagctgcggtgtttgaaggaaggctccagccgggaggtgccggtggggatcccgttcttcgtcaacgtaacacataatggtacttatcagtgccaagcgtccagctcacgaggcaaatacaccctggtcgtggtgatggacattgaggctgggagctcccactttgtccccgtcttcgtggcggtgttactgancctgggcgttggtgacnatcgtactgggccttaatgtacgtcttaagggaacaccaacggggcggnaatttccaanttngggagganagcncctatctgccctcnagtctatcanccgacanaagcatgggggaanaccgtcaaaactgattacctggatccgggatcaaattggcgggggcttggctgtgcctcaaattcccacaataagcctcaaactccctaaaaaaaanannnagnaaaaaaaa

SEQ ID NO: 28175 - DNA, 632 bp, Homo sapiens
  misc_feature (1)...(632): n = a,t,c or g
gnnnnnnnnnnnnnnnnnnnnnnnnnnnnnnnnnnnnnnnnnnnnnnnnnnnnnnnnnnnnnnnnnnnnnnnnnnnnnnnnnnnnnnnnnnnnnnnnnnnnnnnnnnnnnnnnnnnnnnnnnnnnnnnnnnnnnnnnnnnnnnnnnnnnnnnnnnnnnntgctgatcaagtcaaacaagtttcttgttanagtggaaattgcattctggagcgaggaggcttttgctaaacaaatgaacaaagcatgaatagaagagcaggttgaaataagtgctatgatgaagctaaagccgggttatttgttggtggggtggcggctgccttanattgggtggtcagggaangctctctgangaggtgaaanttagaacccaataanatngacaganccaggtaaccaatngctgtagganannnnncnaaaaagaacggnggntnaaaanccnaggggaccaanaaanctggatntttcangaaanaaggganccattaatgttctaaaatctcaaacaatacatttgaacngnattttttttaaaaagcaccttacanttgggctcagtctcaccacaaagaaaggaagntaaaatcagacaaggataaaatcctaataacatcanatncaagtatgt

SEQ ID NO: 28176 - DNA, 637 bp, Homo sapiens
  misc_feature (1)...(637): n = a,t,c or g
gcgagacttgaagccagcttattctggacccacgcaggcgactgaagacgatgggacccactgccctgcattcgtgacgggctgagcgacagtgaggagcaggctgctgactcccttgccacaccgtgaaggagtcccaaaggtgggacactgagtgagacaagccagaggaaagaccactcatgttgcagttccctttccatggaatgtccagaaaaggcacatttacagagagaagcagatgagtggttgctgggcagaaatgggagccggccacagctgagcacaagaggactttggagggtgatggaaatggttttcgacctgaatctgaacatgggaagcactgcagtttaanagncctgggnccctaaacccttcaacccaangggncaaancttntgngcaaaanagcctttaggnatccaaggnccgggggggacccttganncttcnagcttgggggaatgcacctcaagggggaccagcatcattgtcaaccccaagagctccctgtacgtcnaagtgngtctcanatnctcaactgcctgganaacanacgtganacttctgccaaangtgtctgaaccataaatcagngaaagaaacttttaactgctganggttgggtaattac

SEQ ID NO: 28177 - DNA, 629 bp, Homo sapiens
  misc_feature (1)...(629): n = a,t,c or g
ggagctccaacgtgaatactgcaagtatcaggcaactcactacctgactttccagttctaaaccattctaattgctgtacagagaactaacctttgttgagactgttgagtgatggatgttttacacacttgctttcccagaattcccacctctggagatcgtaggtgtgggagctcagagggtggggagtggactgtccccatcacacagcaagggaggggctaaaggaagagcagggcctggcatgcagccccagatagcccacttgggtgtgtctctgagggaggctgcagggctggctctagagtttcctttttcagtcttaacctgggtgaccaacttccacangaaattggcacngtgactcatgcctgtaaccgcaacacanttgggaaggccaggnggaaggtcacctggnggcnnggntttcngaannaacctgggcnaatgnggggaaaaccctgtcctactaaaatacannanttacatttcattacaggggtggtggngcacactggtatcccactactcaggaggctgangcagganatcacttgaacccgggaaggtacagttcantganctgagatcgttcactgnacncanctgggnacanancanacncgtc

SEQ ID NO: 28178 - DNA, 516 bp, Homo sapiens
  misc_feature (1)...(516): n = a,t,c or g
gaaaatttcatctatttaggtanaatanatgaaggggttttacaagttttaaaaccacataggctgggttcatatcccagctctgcatattanttgtgtgatttgggactaatcatgtatcttatctgagccttttctcatctgtaaaataaagattatcaattgccccttcatctcagagcagttagttctctgctaactctaggcaggaaacaggccggacagtggttacnaacttccaagattacagactgcctccatgactaagagactgctcagccttttgttcttgttaaacttttttctcagcaagggattataaacctcagagtttcctctcaccctcctggaatatgctgcactctttctctaagagaantgaccctgaccatacagcaaaggacataaanacagggnccaacttgggaactaanggtccattgggtccanccaagantggcntcccanttttntcacaangggaggggnngnaancggnaagggaaattnncccaa

SEQ ID NO: 28179 - DNA, 507 bp, Homo sapiens
  misc_feature (1)...(507): n = a,t,c or g
gaaatgacaaaggatgctcttttctccagctttactgttgaatggcatgattttaggtaattaattcatctgtgtcccaaggaaagtgcacccactcctgagctggtcagttgtatttgacttgccactgggtgattgggatcctgatgagatggcctggccagacttcanccaggagaaaatgttggtangatggaaagaacgtgcatggggcaagtgcccaaaggcctgcactgagggcgaancctgtctaactgctgtgtggccttggccanaactgcttaacctccatgggccttgnttctctcanctgtagaagggganacttggtctcatgtgtganttttagtttaanagtttgccctgccaccttcctgncatggntgtttccaaacagctgagtgatncaangtcacaanggcntgggctgacgttgatttgtttgtntggtttaagncacaggnttttaaagttcnannggaanaaaanggttnncccaaccngttt

SEQ ID NO: 28180 - DNA, 497 bp, Homo sapiens
  misc_feature (1)...(497): n = a,t,c or g
gctacgcaaagctaggccaggcatggtttccacattcgagcaatatcaattcctatatgacgtcattgccagcacctaccctgctcagaatggacaagtaaagaaaaacaaccatcaanaagataaaattgaatttgataatgaagtggacaaagtaaagcaggatgctaattgtgttaatccacttggtgccccagaaaagctccctgaagcaaaggaacaggctgaaggttctgaacccacgagtggcactgaggggccagaacattctgtcaatggtcctgcaagtccagctttaaatcaaggttcataggaaaagacataaatgaggaaactccaaacctcctgttagctgttatttctatttttgtanaagtacgaagtgaaaatangtatacagtggannnnnnnnnnnnnnnnnnnnnnnnnnnnnnnnnnnnnnnnnnnnnnnnnnnnnnaaannggctccttttaaaancnccggacnggaaaaaaaa

SEQ ID NO: 28181 - DNA, 480 bp, Homo sapiens
  misc_feature (1)...(480): n = a,t,c or g
aaagctaaagtgatcctaaatatgacagtgggcagcacctttctagcgtgagctgtanagtaacgagaagtgctttatactgaacgtggttgatgggaggagagacgaggcattcgggccggtggggcgtaagggttatcgttaagcacaagacacagaatagtttacacactgtgtgggggacggcttctcacgctttgtttactctcttcatccgttgtgactctaggcttcaggttgcattggggttcctctgtacagcaagatgtttcttgccttttgttaatgcattgttgtaaagtatttgatgtacattacagattaaagaagaaaagcgcgttgtgtatattacaccaatgccgccgtgtttcctcatctatggttcnaaatattgcttcaatttcaaacttttgaaagatgtatgggttccagtttttccttanattctcccantatgtntttananaaaaaaaaaaaaaa

SEQ ID NO: 28182 - DNA, 515 bp, Homo sapiens
  misc_feature (1)...(515): n = a,t,c or g
gaactggaagtatggtatgcaagacatactagtggagttaatttacaagaacatccaaagaccatttgaggaaagaggctcaaatttcagccttgggaataaaacatacagatgggtattggttagaaaaacacataacaagttaatgacaatctactggatgtggagacagaagtagcaaaatactgcagtaaagaacaaaagatcatggttgtctttcatgatggaatgcctaggaagtctttgtgattttacaggacccancagtgaataaagctgctctcttcctggcaacatcttaaaagaaaccagcagccgttgaccgcaggaatcctcaaatgttatacttgaagtagtgcttcaggcaagtgaactgaggtacancaggataaatgatgtcccaaggtcctgaaacaagctcatagcaaaaccngggctatggncccgtntctcaatcccgggganttccctangaaaagggttnccganananccttnnntttagnncctncaat

SEQ ID NO: 28183 - DNA, 507 bp, Homo sapiens
  misc_feature (1)...(507): n = a,t,c or g
gggctcggcgtnnnnnnnnnnnnnnnnnnnnnnnnnnnnnnnnnnnnnnnnnnnnnnnnnnnnnnnnnnnnnnnnnnnnnnnnnnnnnnnnnnnnnnnnnnnnnnnnnnnnnnnnnnnnnnnnnnnnnnnnnnnnnnnnnnnnnnnnnnnnnnnnnnnnnnnnnnnnnnnnnnnnnnnnnnnnnnnnnnnnnnnnnnnnnnnnnnnnnnnnnnnnnnnnnnnnnnnnnnnnnnnnnnnnnnnnnnnnnnnnnnnnnnnnnnnttgcncnactanacncancctggaaaanagacccagacncnanctgaaaaaaaaaaccaaaccaccaaaatttacccnattgtggngganaatncttgtannnaaagctacccggnatgctaaattaggaggatggttgancccctgggaggnaaaggttnnattngccaatttgcacnangnttnccaaacccggggaaaaaanccaaacctnncccaaaaaattttacaatnccttatttagc

SEQ ID NO: 28184 - DNA, 682 bp, Homo sapiens
  misc_feature (1)...(682): n = a,t,c or g
nnnnnnnnnnnnnnnnnnnnnnnnnnnnnnnnnnnnnnnnnnnnnnnnnnnnnnnnnnnnnnnnnnnnnnnnnnnnnnnnnnnnnnnnnnnggatttgatattttgaaaataccctgcaaaagtaaaacnnnnnnnnnnnnnnnnnnnnnnnnnnnnnnnnnnnnnnnnnnnnnnnnnnnnnnnnnnnnnnnnnnnnnnnnnnnnnnnnnnnnnnnnnnnnnnnnnnnnnnnnnnnnnnnnnnnnnnnnnnnnnnnnnnnnnnnnnnnnnnnnnnnnnnnnnnnnnnnnnnnnnnnnnnnnnnnnnnnnnnnnnnnnnnnnnnnnnnnnnnnnnnnnnnnnnnnnnnnnnnnnnnnnnnnnnnnnnnnnnnnnnnnnnnnnnnnnnnnnnnnnnnnnnnnnnnnnnnnnnnnnnnnnnnnnnnnnccccagcaaaattatttttttttcaaagtaaggtggaaanaatatgggatgnntaaaatgntntnannccttanttnaaanccctaagggcnaanctttaanatcgtnanggtngcntattttaaggnaaacttntcagggngtanggtggnctactttatacatcctntttaatttgnggcctttataccagngggaaatgngcttntngttactntgccaaacttgaggcaaattgaanttggtgctcaactttt

SEQ ID NO: 28185 - DNA, 650 bp, Homo sapiens
  misc_feature (1)...(650): n = a,t,c or g
gagactttagaggtatccactccccctttcccagttttctcctgattcttccttctagtccttgtgcatattagtgggattcttaaaaagccactgacaatctgatggtctaaagctccacctgcagttagaaagaagctggtcagccttctggaatgttctttctccactggaggctagtgagcacctccagactaaaggaggttttggttgcgcttttagctttgaggaggtcactgaacttcaagagcccttctggtttcccattttgtgtgataggattaaaaacctctgttttgttgggttacctccgtctctgtgacttggggtgacaacctcggaccagtggagaaggtgtgtgggcagcaggaagagctgtttgatctctccttgcaaaatgtttctggctcaggttcaagagtggagaaaccctcttgaacatggaacagttggctcttgggncagtagcaagacnggaatgagcttgaaacttntcctgcctaaagggggtccntaccgggtttgganttggggtcctttttcaagcatgtccagntgacttcanatggaaatcttctaccagttntataaaatgaaccgtatcacagcctgatggaacantgtgttcactgntagtgtcagtaacttta

SEQ ID NO: 28186 - DNA, 674 bp, Homo sapiens
  misc_feature (1)...(674): n = a,t,c or g
gaagttgagtctccttgtaggctctatgatggccttcctaaaatgccgactgcatcacattagtcctgccccagacacttcagtgaccctttattgcttcggggataaaatgtaggttgctaggcatcacacaccaggccccgtgctctgacccctctctgcctcactgccccctctacctcaccaccacgtttcttcctgctccctacctaccctgctcccagtaacattggcagtgccactttctttcatatctcctttccctcacacatgctgtcttcttagcccagagtgccctttgacagccatttttctttgagtaaattctgccagttcttcaaaacttcagttcatatgccgtcttccagggaatcctcctttcactccctgccccagtctgaggaagcgacttatctgtgggtccccggagtctttgtgaaaatcatctttggagccctcattcttactggcatggancttncaaagggnactttngttcccaagttctngttaattgacngcacacannngggacnctaacanttttgtggatgaaaaantatggttgcntcanntacntgcttttctgaaatgaaaatacttgagcaggcccggngctacgctnnaatccaacatttggaggctagcagcggtactgagtnngantcnaacac

SEQ ID NO: 28187 - DNA, 675 bp, Homo sapiens
  misc_feature (1)...(675): n = a,t,c or g
ggtgaaaatgagatccaccaacatcttttattaagttcagttattagtctgtgaagtgctttactttttgcacaattttaatagcttgctattcagtaatacattatagtgaattcatgatcaaggtttccttaaatttagcattgcatttcagtactgactgtgtaagctaaattgctgatccaaaataaaaacccagactagaatagggttcttaaaatcaagtatcaatacaaantagaacacaattaaaatcttaannnnnnnnnnnnnnnnnnnnnnnnnnnnnnnnnnnnnnnnnnnnnnnnnnnnnnnnnnnnnnnnnnnnnnnnnnnnnnnnnnnnnnnnnnnnnnnnnnnnnnnnnnnnnnnnnnnnnnnnnnnnnnnnnnnnnnnnnnnnnnnnnnnnnnnnnnnnnnnnnnnnnnnnnnnnnnnnnnnnnnnnnnnnnnnnnnnnnnnnnnnnnnnnnnnnnnnnnnnnnnnnnnnnnntntnccnagattngccacttgattcnacntngnnacnnattngattttgtttanaattattgctnntaaaaaaaaattgttnggacatttcctgatttanngattggacngggnnttttanttccgcttacaacacntnaanggttaagaaaatnncatagtntggcntttttgttntgttcccg

SEQ ID NO: 28188 - DNA, 658 bp, Homo sapiens
  misc_feature (1)...(658): n = a,t,c or g
ggggagnggccangatgctgancctgctgctgctggcgctgccngncctggcgagcccggcctacgcggcccctgccccagtccaggccctgcagcaagcgggtatcgtcgggggtcaggaggcccccaggagcaagtggccctggcaggngagcctgagagtccgcgaccgatactggatgcacttctgcgggggctccctcatccacccccagtgggtgctgaccgcggcgcactgcctgggaccggacgtcaaggatctggccaccctcagggtgcaactgngggagcagcacctctactaccaggaccagctgctgccggtcagcaggatcatcgtgcacccacagttctacatcatccagactgnagcggatatcgccctgctggagctgnaggacccgtgaacatcttcagccgtgtacacacngcatgctgcccctgctngaaccttccccggggatgcnatcttggtaattgcttggccaantngnnannatnacccttcnacngnnttccctnaacaggnaaagncccntantggaaaccccttttgnacnaaanaccacttgccntaccggaacnantccgatntcngngaatctnnnccggaaancnaaagatctnaggcaatttgaggcctgtngnagnatgcact

SEQ ID NO: 28189 - DNA, 647 bp, Homo sapiens
  misc_feature (1)...(647): n = a,t,c or g
gcacataaatattagatgtctttctagttgtgtacaaggagaaaggaatatgtgtgtgagtatgcagtgttaccttgaggaggtgacagtgatgctgagaggtaaaagctgaatgggaactaagttagcaaaaggaggaaaggaaagattattattcagagtaaatggtttgtttcaaggccctatggtagaaaggagcctgctgccttaagaactgccatggtggttanaatgaatgatgaggagtaggagcgatggaaaagagcccagggatatagttagggatgtgattaagttcaccatattaaagatatccatctcaaatggcttaaatctaaaggattttatttatttatttgagatggagtcttnnnnnnnnnnnnnnnnnnnnnnnnnnnnnnnnnnnnnnnnnnnnnnnnnnnnnnnnccaggtctagcaattctcgncctcaacctttccanacctgggattcagangaccccccccaagntncttttngnttttngtaancgganttcanttgtngnnaggntgcctaantcnnntnaggattccccctagctccaanggntaaatacaggntgaccatncctnctaatataagnnttaatgcnatgagtggntgagcaatnattgtccntactat

SEQ ID NO: 28190 - DNA, 679 bp, Homo sapiens
  misc_feature (1)...(679): n = a,t,c or g
gggcanaagccgcagcctttgngaggaagcataaagcagggtgggccagtctggtactggaggagttcagagaaagaaggaatctntggacatctgcggtgcttcactgaggagacaagcctcgtatagganagttggtgagtttggggcangtgcaggggagtggtagtctaagctgaggaggcctacaaagactagctagcaaagggcatggggcatgtttaaggcgcggtgacctaaacccactcttctgtattctctcccaggagaaggaggtacaagaagggtgagtgggttgactcagaaatagaacttcagaatttaaaaccttaagctggattcagaaggttggccttggggccataaagcagcagagcatggatgctaaggctgngggttctggagttcagacanttctgggttcaaatcccaactttgntcataagtcatgtgactcanaaagatactaatcttntttaagcctttgtnggccctcattaacgggtaaattggttcatgatanacnttanccgagcanataattnaaccctgctttggggaatgaaatagagtacattctntgacactttctctgngtanactggctagcanaatcntntcccagtatntgctatactcatccttcaaagcctgganttggactttcnaaatctagggt

SEQ ID NO: 28191 - DNA, 550 bp, Homo sapiens
  misc_feature (1)...(550): n = a,t,c or g
gcggcacgagaactggattctgtgtacctagtacacaggcatgactgggatcccgtgtaccgagtacacgacccaggtatgtaccaagtaggcacccttgggcgcacccactggggccaggggtcgggggagtgttgggagcctcctccccaccccacctccctcacttcactgcattccagattggacatgttccatagccttgctggggaagggcccactgccaactccctctgccccagccccacccttggccatctccctttgggaactagggggctgctggtgggaaatgggagccagggcagatgtatgcattcctttatgtccctgtaaatgtgggactacaagaagaggagctgcctgagtggtactttctcttcctggtaatcctctggcccagccttatggcagaatagaggtatttttaggctatttttgtaatatggcttctggtcaaaatccctgtgaacttaattccaaccctnattgtacagccccnaattccttaacccttataaggaatagttancctcaaaaaaaaaaaaaa
